United States Patent Application Publication US 2015/0376612 A1 - sequence listing, part 47

SEQ ID NO: 111574 - DNA, 1084 bp, Homo sapiens
tacaaaaattatctgggcttggtggcgggcacctgtaatcccagccacttgggaggctgaggcaggagaattgcttgaacccgggaggtggaggctgcggtgagccaagatcatgccattgcactccagcctgggtgacagagtaacactctgtctcagaaaaaaaaaaaaagaaaaatatatggggtaaatacagtaaaacgttttgttaaattccaatatacattcagtgataccactctttttcttctaagcctgtgtgttataatttaccagttccccaaaatgccatttttaacgccgaactgtgtaatatacatggaaaacagctttttacaattaattttcaaagttgtaattttaaagaatttgggtgtatacctatgttaatgaaacaacagaagtacaaaaaagaatatcagatacaaaaatcaatcgtgaagaaaatctgttcttaatatatttcattatgattgaaaaacataaaaactaacataggaaagtgaatgatcagttacttatgatatattttgtttcctcttgtggtttaataaagtgaagtgtgtgtgtgtgtgtgtgtgtgtatacctgggggtgggcagtgctctttttctaaaactaatatggcttatatatctgaattatgccctttttagtgtgtattaggatgtgggctggtttgcttttctaccacctttgtaattttatgtatcccatctcctttgtgtgaattcatatattatagcaaaatacaagagacatgggactgtttgcaataccatatggaaatcttttaataaatatatgtaaataaaataaaaaatatttgtctccaccttttccccaaaagcaacagcaagacatattttgttagatattttatttttaatgttttctataatttaaaaatgtatagcctgccaaatgttgttttcataaccatgatattgttttgaaaaaattttatcttaaaatactgaatgttctgaccttttatagatgtttttgattttgttttaaataattttaaattatggagcttgacctagatttgccaataaactttctagcctatttattttct

SEQ ID NO: 111575 - DNA, 1084 bp, Homo sapiens
tccttggcaggtgatttaatctaagcctcagtttcctcatctgtaaaatgggggaagtaatcctatttagaacatttttgtgaggatcaaataaaataatgtgggcatagcacaatgtttagtacaaactaagcactcagtgtcagctaatttttattttcattattttaatgtaaagcaatggcttttaaactttttaattttttattttatttttatttttttaaagaggtgaggtctcactgtgttgcccaggctggtctcaagcaatcctcctgccttggcctcccaaaatactaggattacaggcatgaaccactgcgcccagcctaaacttttatttttgcacagtaagagatgcattttactttgccacccagtatacagatacattgtaaatatctgtaattaaaaaattcatgaagtaatgcttagactttgaatgtgcaatgcattcttatattttttattctattttatttaaaaaatgttggttgagatcgctaaatgatttcacatcccattaatgggtcaggaactacgctttgaaaagcactaatgctaaggataatcaggttaagtgcatttaagaaagctgttgttgaatctttatttcttttcttcaaatggtttacaacatcaattggagtttgaatactaaattacatttaaaaataagttcttaaacatttcttgggaattaccatcatttattgaatatttctcatggtcacgttactgtgtgctaagtagtctatttatatatgttatctaatttagttctcacaacagccctgtaagtaggccttgtgtttacatttgataattgaaattaagactcagagagctttttattaacttgcccaaggtcctaaatttagagagggatgaagcaaagattcaaactgagttctctctgatcccaaagcctgtctgccctcttaacccccatggttttctgatgttccctcatagtgatttctgaagatgtttcatttcttccttaacataaatttgaatgtcgatattgagaatttacccattgtggtacatcttttgtagtttcctttgaaatgactcattt

SEQ ID NO: 111576 - DNA, 1049 bp, Homo sapiens
attctgaggcttgtggaaggaggaagatgctgacgtttaagcaaccagatttaaggcagttgttcaatgtatcaaatagctcttctaagttattttaatataaattaaaactaaatgggagctctgggacagccctgttttaattacaattggaatgcatcttaggagaccattctacctcttataatcataacagtgtcattatgatttttttaagaagaatcactaattagccaggtctatcctgaggtcttagagtttggtttatagatgattcttgttgaattaagtggaaggctgaggcatgtgaacattcatcttggccctaaacctttttccctggtgatacgaaatggttcagcagtaatcagcagcagaaaggtatgcttaaaaccggcttgttctttatgtgagataccaggttgagcaaactggatttacctttcattgaggattattcacatggaattttaaactgatttcctgcaaattctgtccacagtgttgggaagctagagtggtagactgtagtttctgagctaacataagatctgatctctgaccttctgctgacgtggaatccaggttatgttgccttgtttccttggatgggagttcacagccagtgaaactagccctgactgaattatttaattcatcttctccttgaagacggttgcaaggagtttttatagaaccgaatgccttacaaatttggggcttgcaaatgtatttctgttctttcttcattttcccttttgctgaagatagaaacacctcctgggtctttggttcagcctgctgttgtttacagtccctgctgtagattacctcactctgccagtccctgtcgtaatgtgatttatctttttaaaattaaattctcatcataattccctcaggcatctgtcttcctcagaatgtttagttatttcatatagaacttaagcaaggaaggaagaaaggaaaggaaggaagagaagaaggaaagaagaaaagaagttctgtttggatactgtgctaacaggtcatattgggcttgcttatta

SEQ ID NO: 111577 - DNA, 1403 bp, Homo sapiens
accatttggtcccttttttcctttctttttgagacagagtctcactctgtcacccaggctagagtgcagtggtgtgatcatagctcactgcagcctcaatctcttaggctcaagcaatcctcctgcctcagcctcctgaatagatggcactacaggcatgcgccaccatgcctgactgatttttttaaattctttatttttagtagagatggggtctcactctgttgcccaggctggtcttgaactcctgagcccaagcagtccttccgccttggtctcccaaagtgctagaagtacaggtgtaagccactgcaccgggcacctttattcataaacagactccaagtttcacttttcccttgagtctccattgaccagttctcatctgggagatcaggatatgcctggtgggggttacccttggctgaaatatatggataaagggtgtctcttagcctggttgagcagagagagttcaccctggaggcaagtagtggagtgtgttcaaccaagaaggctacacaaaagggtggctgggagggatctgggagagactggattatttatcagaccaaagttataatggagtaattcacatatggagctctcagagggcactgcaggtccagagaacggagcaagaagtgctgagcaagggatgttcaggaaacgaagtctgcagacacttggctggtggtggaaggtgccttttatgtggagtccagcgtgtcctgccagggaagaggaggccatttaaaggcaccatgctgtcccagacaccaggcttggacgttttcccaaaacaactttagaatgaggtcaaataggcttttcatttcactgtgtataccaaaggttatgactgactctgaagatatatatgtaaagatgtctcctttctgattttatttctggaaggaagatttcaaaaaaattttaattgcttcatgtttgaatcatcattctgtatttttttccctccaggggatgtttattttatcagagtcaaaaccaaacttatttctaacatcgtcctagtaattttttcttcttttctttttttttttttgagatggggttttgttctgtcatgcaggctgaagtgcagtggcatgatcttggctcactgtaagctctgcctcctgcgttcaaatcgttctcgtgtctcagcttcccgagtagctgggactacaggtatgtgccatcatgcccgtctaatttttgtattttagtagagatggggtttcaccatgttgaccaagctggtcttgaacttctgacttcaagtgatccacccacccaatctcagcctcccaaagtgccaaagtgcaggcatgagccactgtgcctggcgtagtcattttttcttttaatcttcttttttgtttttaaaattgtaaaaa

SEQ ID NO: 111578 - DNA, 1063 bp, Homo sapiens
tttaggatattaatgatgttgttaataatattgttacagttggggtcagtgccagccagcaccaagacagaacaaggccgtgggcactgagctatgtctgatgagatgatggggaatgtgttatgatttataaagacagataaattatcactgccctttcctagtaattgatattcaatatctgccacaagaggagttttttgtttgtttgttttaatgaatgatcattcaaagtagagagctaacatggagaatagtctggttagtgtgggaagttctgtactggggttattaccatttggattttccttggaagtttctaggtgagttttgattaggacatataacttcatcaaaggttaggtgatcggattgcatataaagctgctttaagtattaaaatagaggcattttgacttggattaccagtgaaaccattttgggcatagtcttaactgtatgtggtgtgattgagatgtctgtgggttgccatgtaactccacagtttgcttttatgtgtgtgattgtgagtgggaagggtggagtatgggcgtttggcatgaacagatcatacttcctgacatctcttctccacaagcattcttttccaggtgacagagactagaacacatttcaggagacactttaagagtgaaaggtgagaggaggaacggacagtggagaggtgtgtgctgcgcatgactaaatatttccttcccgtttgacattactctcccgggagtccttaaaacaatattagtagaatctttattttaaagtttatttatgtgggtcttaaggaagacctaaagtctccctttattttttttttaccttcaagtggaaattatttcacatctatgtttgatgtggtggtgggtaaagcaccctggacttagagccaagagaaacggattcttgtctgagctctgctgctgaatagctctgtaggctcaaaaacatctctgccttactgggcagcagagtcttcatctgtcttagaggttggcaaagttttcctgtaatgggccagatagcaaattaatttaggtttcccaggtta

SEQ ID NO: 111579 - DNA, 1032 bp, Homo sapiens
caacttctggaatggaagaccctctggaaacacagagctgtgtggttgcaggaaatgggctctttgcatgataactaactcatcttcctctctcccccaaccagatttcctgctgaggtaagtaatgtggagtgggttttttgttctttttcttcagccttctgttccttttgtgtatgtctggccttgtaaatatggtgaataaatgctataattataaccctttttgacagctctgtaatttaattgtaattcattctgagcatctatttaagacaatgatgtgtattgaagatacagctgttccaatctcatctgctaaactgacaggcatcggttggaatcatagtcccagtaactgtaggaacttccgatctattcaagaccaaatagagggatacactctctgtggggtgtgtgtgtgtgtgactgtgttccatatcctggtttggcaaaagtggtaatgtagtatttggagagaagcggcatttaaaatcggcctttgcaaaaatatgaaaattattctgaagtagaaaatgtcaggccgggcgcggtggctcacgcctgtaatcccagcactttgggaggccgaggcgggtggatcatgaggtcaggagatcgagaccatcctggctaacaaggtgaaaccccgtctctactaaaaatacaaaaaattagccgggcgcggtggcgggcacctgtagtcccagctactcgggaggctgaggcaggagaatggcgtgaacccgggaagcggagcttgcagtgagccgagattgcgccactgcagtccgcagtccggcctgggcgacagagcgagactccgtctcaaaaaaaaaaaaaaaagaaaaaaaaaaaaaagaaaatgtctcaggtttactttttgcagaaagctaagctgaatatttttgattaacattcagaggggtccctctgtaaacctggaattgattcctggtagcactggctgggggtcattgctcatcagatgtccgagtttcctagggatgccctaacaaagtaccaaaaact

SEQ ID NO: 111580 - DNA, 1050 bp, Homo sapiens
ccaccatgcccagcctagaaattttcttcctatgactgcaaataatttcagtcccaaaggcttttagatgattgcaggaagaatctcacaagaattatttatttcataatgatattgttcttctcatttattttgggctataacatagagcaatacatttaccatctttcttgctatttggccaggtagttgcagagtagcctgttgtgccttttgaccttcaatgccctgaatatagcttacagaatgtgagatgttatgaaagaatctataatgggggacctcagaactttctaactggtagatgaattgaagatggactcatctaattgaagatgaataacttgcctcttccccaacccccagttctcttcttaccttacttttactccctgttgcaagagggagtttgaatataattcaagaagatgctcctagtaacaggaaattccttcatttgaggattctggtgggctagaccacagtaggttatgaagcaaatttgagaacagtaagattaaggaaatggaatggagataactcaatgtgatagaaataacagtgaaatgaatattaggttttgttcgtttgtttgtttgtttgtttttgagacagagtcttgctctttcgcccaggctggagtgcagtggtgtgatctcagctcactgcaacctctgcctcctggattgaagcgattcttgtgcctcagcctcccgagtagctggagattacaggtgcatgccaccacacccaactaacttttgtacttttagtagagatggggttttgctacgttggccaggctggtcttgaactcctggcctggagagaacagtcaaattgttatttcagcctcccaaagtgctgtgattacaggggtgaggtaccatgccctgctgaaatcaatattaggaaaacatcctggtcaaggttatgcaactcatgtgatcttggagaagtatattcaccttttgtttagtaagtgttcattgtgagcattgggtcactaggtgatttctcagataccttctagcttaaagtcccatgatt

SEQ ID NO: 111581 - DNA, 1017 bp, Homo sapiens
accaaaaaaaaaaaaaaaaaaaagaattccaggtgagggtgttactgttgttatgagggaagcagctagtgtgggttgcggagaaatcggagagaaggtcagacagatgaaggcaccagattgaggaggacctgaaaagccacactgaggttgtggagttttatcaagaggacagcagagaacatctgatgatactttatgtaggttagtgaaaagtatattgtgatagaagaatgatgggctaaaacccagaagttaaaggttcctgtttcaatcctgccatttattaactaggagaccttggagtcatcatataaaatccttgagcctatgtatttgacaaacgacaagtacatatcacagagatgtcatgaggataaagtgagaaaatagttgtgaaaaatgttttgaaagtcatacataaggttctccacaaatgtaagaaattgcaatgatattataacagtggtgatgcaggaagattatgcttgcaggcataaacaaaatgaattgtaatgggggaagttaaacagcagagacagctcgtttcagtagcacagtggggtggtttgaatgtatgtgtttctccaaaattcattatgttggaacctaatccccaaggtgatgatattagaaggtggggcctttcggaggtggctctgcccttatgaatgggattcatgccctttttgcctggagccccttttgcccttccatctcttccgctcttcgaggacaccatgtttgtcccttctttgcccttctgccatatgagaaggcagcaagaatgggtcatttgtgaggaacagggctttcgccagacactgaatattctggcaccttgatcttggacttcccagcctctaggaccataagaaataaatgtttattgtttataaattacaaaatctaaggtattttgttttagcagcctgaatggactaagatacgtgtgaatgaacggaaaagggcctctaccatgctatgtatggattaccaactgaggaataactcaag

SEQ ID NO: 111582 - DNA, 1006 bp, Homo sapiens
aaattgatagtaacatttcttccctcctgtccccttcttcccactgcccaaccacccagcaaaagtaaattttgtgttgtaaaagtctaaaatgccatcttaaatagtacagtgttggagaacactttgctaaattatacttctatatggcagttgttccggaatatttcccattagcattgcagacgtgctctgtttcactacattgttaaaattgcttctatcttttaggccccatctgtgtaccacaaaaacattcacatcagcagttgttatttatcaagaaaatagctgctactgatgaccatgtacttaatccagttgattctgtggagataaactgctaatactgccccagcatcataaactgaccataaaatagtttatctagtggttgctaatagacatatgctcaggttttcataatggtcatgcaacataggattgtaaagctttgagaacttgcttttttgacatgagagatcttatatttgagattatcaattggggaatcaaataagagtataactccttacctagtttataaaattttatttcctactaatgtcacttaagtttgccttcctgaatgtaggatgggctaaaatgtaatttctgagtcttttcaggaagtcaatgctagaaaattgatcaagtaccacagtcaataataaaataaccattaaatacacttttaaatttatttaagttttttttttttttgagacggagtctcgcactgtcgctcgggctggattgcagtggtgcgatctcggctcactacaacctctgcctcccgggttcaagcaattctcctgcctcagcctcccaagtagctggaattataggcaccagccaccacgcccagctaattttttttgtatttttagtagagacggtgtttcacgatgttggccaggctggtctcaaactcctgacctcgtgatccgcctgcctcagccccgcaaagtgccgggattacaggcgtgagccaccacgcctggcc

SEQ ID NO: 111583 - DNA, 1045 bp, Homo sapiens
cattttaccactgggacagaggtctagtatgatagtgctacttttcagaaaaagccattttgtctgtgtatagttaccattcaaatagcctatatctcttagatttgcattaagaacctcatagagctttaagggagaattggagcaattagatgaatgaattatatttatttttattacttgttataggtttggcagttctctaccagtggaccaatcttttcatccccgtgtacctcaccatcagagcaaaaaatattttttggttcccatgattgctttatctactgttgtaacatgaaaggtcacctgcagtggaaatttgaaactacttcaagggtctatgcaacaccgtttgctttccataactacaatggcagcaatgaaatgttgctggcagcagcatctactgatgggaaagtgtggatcttggaatctcagagtggacaattgcaaagtgtttatgaacttcctggagaagtcttctcttctcctgtggtcctggaatcaatgctcattattgggtgtagagataattatgtttattgtctggatttattgggtggcaatcaaaaataatcaaatacagtccttatttgtataacaaatgtgagatatttgaaaatattttaccattatacatcatgtggacttattttatattaaagaagattatattttggctaagaaacggaaacttgtctacacttgattagagaacaactatattttacttcccataggaacgacagaagcttttacaaggagttagagaacaaaacacatcaatataattagtagcacttttgtttaattaggtgtgatggttaactttatttatatgtcagcttgactggctaagggatgctcagatgattgatagctggtaaaacattatttctgggtttgtctgtgaggctgtttctggaaaagatgattagcatttgaatttgaatcagtagactgagtaaagaaggtcctccctcaccagtgtgccaatgtgggtggcatcgttcaatctgatgagggcctgaatagaatgaaa

SEQ ID NO: 111584 - DNA, 1034 bp, Homo sapiens
gagactctatctcaaaaaaaaaaaaaaaaaaagaaagaaaattcacctcattagtctaataccataagcatagaagcattaaatttcaatacttagaagaagagtgagtaactgtcaggtgtagttgagccttggaacaggtattaactatttcccaagcttgtgtggtctgggaagaataaagcattaattaagtcttaatatcttaagacctttttaacttcattaccaaatttaccacaaataagtgtgctactcagagttttggaattaaagaatttaggattatcatcttgacagtagaaaaaaatgacgaagatatcaataagatgttttaagacctgattacataaaaattaaaatgttatgtaagaattatgaaattaagctgggaaaatttttgaaataaatgtaaaaaaagtggaaattcatttatatttataagtattaatgaaaataaagatcaaatacaaattaataagacaaatgtagagcagatagaaaaataaacaagggacataaatacacaggaccccaaagaagagacggctagtaaatgtatataaatagttcatgaatttaataatcaaaggaatgaaaattaaaaactcttgagataaacaaatggtgttagattagaagacatattcatcataacattaaatgctgatgagagtggtaagaggttgtaactagtgaggcctctaatgaaaacgatttgaccataggtaacaatatcatatccttgatccaataaaattcgttttttagaaatcctggcaaaaataatcagaaacatagtcaaatatatgcattaagatgcctatttctaagttgtttataatacctagaaattccaaaaaacgttcaatgataaggtagagagagaaattatttatgttcatatgggatattatggattaaaattatatttaaatcattttacaaaatcagtgagcaaaatatgataccaagttatatattcagaatgatctcagctatattagatcgtgtgtgtgtatatacacatattc

SEQ ID NO: 111585 - DNA, 1693 bp, Homo sapiens
ttaatcaagaggaagccagtggaacatctttacatcagaaagccatcatgactttcacttgccacaatgagattaatgcttttgttgtactgagcagagggagtcaaattttgtctctgaattccactaggtttttaacaaagttaggacattgctcttcagcctgtccttctgactcagtttcacagaccaacattcaaaatttgaaaggcttaaattctccagttcttattgggaagtcaaaagatccatcctgtgttgcaaaagtttctgaagaggggaaacctgcgatagggactcagaaaatggagttacatgtgaggtggaggtcagacacaggcaaatgtgtagatgcttcaccgctggttgtaatacccacttttgataagtcatctacaactgtgtacattggttcccattctcatagaatgaaggcagttgacttttactctgggaaggtaaaatgggaacagattttgggagatcgaattgaatcctcagcatgtgtatctaagtgtggaaactttattgtggtgggtaagtttttgaatttgaggtttgtggagttaaattgaattaccatacaataatcttcataggcccaagttaaattttttaaaaatctaaatatgatgggtttggttgctgtccaaaaattatagttaaccctgtgctgattaatattgtgggccttggggtcaagagtccctggatttgaacctacctgtatagctattatgaactctgtgacctttggcaagttactgaacctcttagaatttcactttccttgtgggtaaaatgggaataataataaaatgtgttgctgtatcacaaataccccaaaactcaacaacctagaacaacacaaatttattgtctcatagtttctatgggtcagcaattcaggagcagcttagctggcagttctggctcagggctttcacgtggctatagccatctgaaagcttgacttgggttggaaaatctgccaaggtagctcatttacatcactattagcagaaagcctcagttctttgctgattctggcaggaagcttcaattcttgccacatacgcctctctctaggctgcttgactgcccttacaacatggcagctaacattcctcagagtgatccaggagacagcaagtaaagaggaacagagtaccttttatgacctagcgttccaagttccataccatcattttttgttttcttctgttaattagaagggcataactcagccaggcgcggtggctcacagctgtaatatcagcactttgagaggccaaggtggacagatcgcttgtgcccaggagttcgagaccagcctgggtaacatgcagaaactctgtcactacaaaaaatacaaacattagctaggcatggtagtacatgcctgtagtcccagctacttggatggctgagatgggaggatcactagagcccagtaggttgaggctgctgtgagtggtgattgtgccactgtactctggtctgagcaagcagagcaggactctgtctcaaaaaaaaaaaaagtgcataactcagttcaggccacattcaaggggaagagaattaggctccacctcttgaaaggaagtacatcaaagaattcatgtactttttttttttttcttttttttgagatggagtctggctctgtttcccaggctggagtgcagtggcg

SEQ ID NO: 111586 - DNA, 1020 bp, Homo sapiens
ttgaagaaggcgtgtgtgctgctaagcagcagcctcccttctgttcttcagctctcaagagaatatcccttgtctccttccctaacaggaaacatactagagaggaaattccggggacagtagttcaatcaaaccaagttgacacatcaaaagtcatcacagatgataaaatatgtctggtaaaacgtggatattgctttaaatagctgttaattcttttataaagaagatttcctgaattttgatagcaccattttggctaatttaagagagaagaataaaatctggccaacattcagaaacttgatcatcataaacacatgaacactcttttaggatatgtgcttactgaatgtttgacgtttctcataactgcattctgttttgccttagggtactttttgacatcacacaagaagatgttttgtttctggcttcacctctgaccttcgatccttctgttgtggaaatatttcttgctctatcaagtggtgcctctctgcttattgtaccaacttccgtcaagttgctcccatcaaaattagccagcgttctcttttcccatcatagagtgactgttttgcaggtacattttagtagcaatgaacgttttgtttatcatttttcaatattttaagtgttttagagaatattttgtattcctgtagttctttacaatggattaatataatctggttagattatcaagggccgtctcctcaggatgtgactttttttgttgtttatttgaaaatgaaaaaagataaatgaattctgcctagaaaattcttttattatgtattttgtgcatactataataattagaggaccttgactttgactcagatttgttggatttgagaaggataggctgcctcttctgtcttaaaatctatgtatgttgtgtttctcatgaaaaactagtataagtcaattaaattataatcgagttaggaatatagattttcttatttttacatcagtgtactttacattaacctacagaaacaagtatttttg

SEQ ID NO: 111587 - DNA, 1029 bp, Homo sapiens
attcagtttagcatctcttcatccaaactcacttctggattaattcttctccatccaccaaatcacctgggccagaaacccaacaattttcttagactcactctatatccagaaagtcaccatgtcttatttattctttgctcatagaccctttctaaccactcctcttgtaacagaatagtagttcaggaccatatagtatatccgaattactgcaaaagactcattaaatggttctcacttagcagaatctcatttattattctgtccttgatagagtctaatctatgctattgccaccttcaattggatcctgtcacttacaggttaagatctaaactccttagtgctgagtgtacacggttattaaggatttgcatctcatctcctatcaacaacgcacctcaccttttccctctcccccaccccgttctttaccttaattggaaggcttaatgttcacataccagctttcccaggtcagatcctcaatgttggctgtttgcctgaagtgcccatttttattatttggagaatagctacttataacaaatattacccatgaagcaatctctgaccttctaggcagagttcggcattctctgttcccattaacatttcaagcctgctttattatcatacgcattgcattataattgcttgtatatgtctggtgtttttgaaaataagttagtaaggacagcactttgctcttggagatttatttatctttttacccccgggtatacagcaagtacttccccccactccccaaaaacgtcatgttgaatgagtaaatgaatacagttggccctctgtatccagaggtttcctatccgaggattcatccaactgcagactgaaaatatttggggcccacgcctataatcccagcactttaggagactgaggcaggagatcatttgaggccaggagtttgagaccagattgggtaacatagtgagacatcgtctctgctaaaaataaaaagctagctgggtgttttggtgcacacctgtagttccagct

SEQ ID NO: 111588 - DNA, 1027 bp, Homo sapiens
atctgagattagaagtttaagatgacttgaccccaaacctttgtttatgtaagaatttttaaacataaaagtgtttgtttctgttatgttaccataatttgatgtatatagtgtccagatccatttagaaatttaatatttattaataactgaaactgtttgtcttcctttggtatatagtctcgcatattatattatagcaggccaagataaaattttgacagctctttaagcccacatgcagcagtgggtcagataaccctgtggcagtgacacgggcaaattggcatttgaataaagccctgggaccacctcaacatgcgtagcctcttgtcttaaatgtactccccatggcagcatggaggaggcaagacctgtgggtcaattttgaactggccttactttgatttttaaaacaagagactcagggaaagtactaaaccaaaatctctgattttactttgcgttttctgtagtttttgttttactgagatgcttttgtaaaggaaaataatactgtgacagtttagtaattctacagattcttaatatttctccatcatggccttttacttcacaattttctgaagtctgaattcaattacaatttttttttaccaatttaatctcaaatgttgtttaactgctttaaattcatatacgtagagtattataaactgcagagatgaaaaatgtgttttcacgggatttatattgtgaactaaactaagcctactttttgtgacttatttgtgatgccttgttgataaatatgtgtaataagtatgtttaaatatgtgtgtccttttttttttttttttaaatagtgactttagttagtgctttatggtaaacagcatggagacaacttccaggctccattcttggcaccagctagtcatatcttatttctctgatccaggcatttcaataaataggccatctcttatgaaccaggcaaaactgctggttgactatgagggacaaattaagtaattagaaaagcagtactaagtaagcactacat

SEQ ID NO: 111589 - DNA, 1710 bp, Homo sapiens
ctatattatcataaaaactctacatttaggcaatgtttccaccatcttatatagatgaaaaaatagacttaggaaaactgagtgaacttgagcttaactttgagcctagatcttcctgactttaaattccattttttcaattaagaaaattactcccaaagccctctaattccattctagacttgaagcctcctctgctgttttaaattatgttatcccctagattccaattaaaatttttaaaaataaaggaactgagttttattgattttttttccttttttttttttttaaagaaaggctaaaggagaaatttatcctagcttaaattattctgtttgtaactattctctgttgacgcgtttcttcctttctaaaggaattcttattacatttttatttttccctctttctttaggagcaaacagtgttgtgtatctgtcagtagaaggactggtttcatctgtacaagaagggataaagtttaaaaaacagaaagagaaaaagcacgatattatgatccaagaaaatggaaatggtctggaatgttttgaaaagagtggtcattgtacagcttgtctcactggaaaatatcctgtagaattagaatggtagctggtagggttggatgtgtgtagtttcaagatagaaagttggtcaagaagttatagtggtcacacctcatctatttactgttactcagttggtacaatgtaaaatgccatgcttatgtttataagttttgagattttttttttttctgaaaaggataccaaagtgcgataactgaacatttccaattgcatataatacaacaatatgtggtgttcttttttttacacaagcattggctagcctttttaacctggtcagagaaggcaggtggtcactgacatttcccaagtccatgctttaaagggtttgcaagaagttagggttaaggagaggtgatgccaacaagacaggtgagttaaatataccatttcacacaaagtttgaatagaatacattatacctcataggtgtctagcctctacagttctggctgtagttatgaccttggcttccctgtctaactgtagacaaatctttaaaaaaaaataataataatctggtgcctcagtttccccacatgtgcaatgggatacttattaaataattaataagaatgtgaataagtgtcatacttttgtgatttgagccatcatttcacttctgattttaagacaactcatgattgttagctttcagaaagctaatgattgttaactttttgaaattagtttacaattaattaagatttcattatgatggaaggagacataattggcagatctttgccatctctctttgagatgtcctaaaaagggttgtaaaaatctgtgaaaaagtttttcctacatttgactagaaaatgtgatccatagtatttagtgccctgatactataagctcagcaagtaacctggtacatttgaaataaaaaccaaatttttagattcaaacaatccctttatccttaatttaattaattatcatatgctttttttaatgaagtgcttgatcacttgcaaacatatatacatgtagatgtacatatacatgtacacatacacataaatattattgcaattaagtgatcaagtacagacacaataggggccagttttgtttaaggatcaaagagacaaccactttggggaattagtat

SEQ ID NO: 111590 - DNA, 1151 bp, Homo sapiens
atattcactaccttggatactttattaacttctaaaagaattaatatgcatacattttagaaaagattaccttgataaatgggttaattacttcctatccctaaaaagtatctcattggtctactggtttttatttatttattttaattcatttctttaaaaattatcattttgataatgaatttttctgacagtgatttaatctttgtcatgtcttcatatgcttactgttatctttcaaaacagaggaataatgtttaagacaaaaacattatgagtcctcacaaaatgaattggtttttccaccaagtatattttgtttagtggtttttctttttgccttttttccaaataataaaggaaaattattttgaaattttacttgaatattgtggcggcaacacaacctagagaaaatatttgcctattctgtatattactcctcattatcctttcatttcttctctatcagtgtggacttccatatgtggaggtgctgtgtaaaaaccggtatgtagggagaaccttcattcagccaaacatgaggttaagacaacttggtgttgcaaaaaaatttggagtattgtcagacaactttaaaggcaaaagaattgttcttgtagatgattcaattgtcagaggcaataccatctcacctataataaaactgctcaaagaatctggtgcaaaagaggtaagtaatattaaaacatatcctaaagcataagttaacaataagatactggcataaaattgcaattcagggtagtgaatcaaaatggatgttcaatataataaattaactttttttatcagtttggtttaggaataactgtgtagcaacttgaagaacatgtcacagccacacttacattaaatgtaatccttaatagattaaaaaagctcaatataaaagcttaaggctgggcgaggtagctcatgcctgtaatcccagtactttgggagcctgaggtaggaggttgcttgagcccaggagttcgagaacagcctgggcaatatagtgagaccctgtctctacaaaaataaaagataataataaaattaaattttaaaaaacctaaaatttttacaaaatttattcaaagactaactacacaaaataggctgggcacagtgactcatgcctataa

SEQ ID NO: 111591 - DNA, 1030 bp, Homo sapiens
atgaaaatagagacttattttagaaaggaagaacttcctcaatgagagatagttatgacagaaaaatgtaagccaggagaaaatgttttctttatactttattcttttaaaattcaatacaacttagggcccttaattttttaattctatactagaacttagtgtttacagagagattataaagaaatcattgcaggagacataccactttaaaaagtcacttctagattttatattgaatgaatcaattgtttctctaagggaaggtactctgtgtgctttataattaatattttcatcagccttaaggactagtttattaaaagtcttctttctttaacattgtttcccaagatattaccgtgaagtcttgcctggagaaattgtggaaatatccagacacaatgtccaaactcttgatattatatcaaggtctgaaggaaacccagtggctttttgtatctttgaatatgtttattttgcaagaccagacagtatgttcgaaggtaagtagatttcttttctttgaacattcatataaatgttttagctatctccttgaaacatggcaattcttgcctcaaaggcttacctggctctttgaaggcatatagttatatgttgtggatataggactgagcccacaagtcataagatcactatttttcacttccttttgactcttggattttgttttttgttaggagtaaggattatgattttctagatctatatgaaggtcgattttttttttaaaaccacacagttgagttccccagtttgtgtattttcacattcatatttttgtatatattgcatttctttttatactcaatctgtagaattctagcactagttttttagaataacactgttatatcatgctaagtaaaaatactctctctccttttccaaacacaccagaccaaatggtttatacagtaagataccgttgtggccagcagctagcgattgaagcacctgtggatgcagatttggttagcactgttccagaatctgctacgcctgc

SEQ ID NO: 111592 - DNA, 1168 bp, Homo sapiens
gcaggaggtgagtggtaagtgaaacttcatctgtatttataggtgctccccatcgctcactattaccacctgagctctgtctcctgtccagatcagcagcagcattagattctcctaggagcatgaaccctgttgtgagctgtgcatgcaagggatccaggttgtgctctccttatgagaagctaatgtataatgcctgatgatctgttactgtctcccatcacccccagatgggactgtctagttgcaggaaaacaagctcagggctcccactgattctagattatggtgagttgtataattatttcattatatattacagtatagtaataatagaaataaagtgcacaataaatgtaattcgcttgaatcatccccaaatcatcccctgtccctggtccatggaaaaattgtcttccaccaaactggtccctggtgccaaaaaggttggggactgctgcattagtgggatgcaggatttttgtaactggacatccacagaatgccttattttcattatggttggctactgggtttggggtggggtggagcttcccctctgatgattaaacttctctttttttctatatagcttctgcgtcatggtattggtctgtctacaagttctgatagtgaaatgattacccagttactggcgtatacccctcctcaggaacaagatgacaccccagactgggtagccaggtaagcagagaactggactaaacttagagctctagtaaggagagttttgccttgcatatgtttataactgaagttattcattcaattatttaattaattccaggattaaaaacttgatgaaggaagcacccacagcatactccctgcttataatgcacagagatgttatttatgcagtacgagatccttatggaaatcgtcccttatgcattggtcgtcttattccagtgtctgatataaatgacaaaggtaataaactttagaaggaatatcatttcatagtgtttttccattattgtcctactgctatcaagccctgaaatctttaggtatagaaagttgatgggtgggagggagctaggtaagaaaaataaaaataaatgtattcttcctttttaaagtacgtttctttgagtactcctgaggatgagtccccccccttttttttttttttttttttttt

SEQ ID NO: 111593 - DNA, 1043 bp, Homo sapiens
tcaattgtattctgatagtacctggaggtaaagtcaggttccagaagttaagggctcagtcccagaagttaagggctcagtcccacaagattgtcccgcacttcagatgccagttgcaagtccaggcctttggtacatctgacaaccagttataaattgggagttcctgcaacagccctagcactacctttggtttcaaacatcacaaaactcaagaaagtgctttgtatacatttaccagtttattataaaggatattacaaaggctacagaagaacagtctggtgaaaagatggaaaaggcagggtatgtgggaacgagtgtggagcttccatgccctttccaggggcaccaccctccaggcatctccaagtgttcagctatccagaagctctctgaacctagtcattgtggatttttatggaggcttcatgaagtaggcacgaatgattaaatcatcagccactggtgatcagctcaacctttagcctttgtccccttccctgggggtccagggatgaagctggaagctccaaccctctggttgattcccctggcaactagccctcatactgatgctgtgcaggagcccctagctaccagtcatctcaacagcatacaaaaggacacctatcattttggcaattctaagggttttaggagctgtgtaccaggaaagaccaggataaaaataacatatataaatcttcttacatatcacaaaagcataaaaataaaatggagtataaacttgaagatgacatgaaaaaatgaattggaaacaatgacaggaaactagaatatgggaaaagggacggagactgtttacttaaactcttggttcacagcatgttgtttggagctttctgtgctaatgatgtcaaatttgtgcctatgctttcattcatcatttcatctttctttttttttttttttaactgcctgtctttatattcattcctagtagcttccttttatccattcaggcattcattaattaatgttgagtttcttcagtttattagctcccaataaccttgact

SEQ ID NO: 111594 - DNA, 1023 bp, Homo sapiens
accaactcaaatagggggtcatttatttaaatgctttaagatgctttgatttttttaatgcaaattttagtttttatacttgacaaattttattgcttactacatctgttcttaaatgttttagtgaatagtatcttatgaaacacaagtgcttcaacattgtgaaggtattaaatgccactaaattgttctttttagaatggttaattttatggtatgtgacttttgcctcagtaaatttttttaagtaagtgcttcacagttcttacaattaggttatttgtttttgacttttttttagattagaattctgaaacacagagatattaaatgtacttctttgtcttatttggattggctgggcagagaagagaggcgtttattactagcagtactagtctgtttttttctaagttgcactttttgatttctcaagggaatgggtcttgtaaatcacgtctttactgaagacaatttgaaaaaattatatgtttcaaatcttggaattggacacaccaggtatgccaccacaggaaaatgtgaactagaaaattgtcagcccttcgttgttgaaacacttcatgggaagatagctgtggcacataatggcgaattggtaaatgctgctcgattaaggaaaaaggtacgtttgtttgtttgttttccctaggcctttttaaatgattaggatgggttaatgaataaaagttaaggatctttgtaaagggcattttctaattgttgctacctgttacctaactgcaacaaacaattgcatcagaatgatctggagtacttgttacaattccagattgtaagctatcccctagagttcgagacaagggtgagaatatgcattttagactcactttttgaatgcactgctttagagatttgggagagttgatttatggatggaagcatagagaaattagagtttatggacttgctatctctttaactctgttgctatgttcaaagcttgtatgagataagaaaaatcaagccatttttcctattctc

SEQ ID NO: 111595 - DNA, 1055 bp, Homo sapiens
ctttatttctgttattattacgttgtaatatataatgaaataattaaacaactcaccataatctagaatcagtgggagcccggagcttgttttcctgcaactacatggtcccatctgggagtgatgggagacaatgacagatcatcaggcattagattctcataaggagcacacaacctagatcccttgcctgcacagttcacaacagtcttcgtgctccagtgttctaatctaatgtgagaatctaatgttgccgttgatctgacaggagtcgcggagctcaggtcataatgtgcatgatggggagtgtctgtaaatacagatgaagcttggctcgcccaccactcacctcctgctgtgcaacccagttcgtaacaggccacggaccagtaagggtccaggtgttggggacccctggtctagagaagacacttggttacttcaagcttccacagagccttacaactttgatttcctgaatcctggtctagaactcattcagtttatttcatgctatcatgtcttagtgtgtatgtactgtatctcaatcctttggtttaaatatactttaaagacatttatgatgggtctcagagaaatgtactacttctaagaaagtctcatgtattttatatttttctaagttcttcaatgccctttttctattttactcaattttaccacaattagtatgaaaatttactttaacttctgccatctggggttgcatatttgctttattaaaattgatctattttaaactttattctgggaatccagttttatttcctcctttttgtataactgtactgtttctattctggggaagatcaaatgtatactaaatctgtttcataataaattcagctagcttgtcaaatagcatgtaatgaaacctatttaacttacatatataatattcctcttatggtactgaacattctcaatacaggttgagcatccctaatatgaaatctgaaatgctacaaaatttgaaactttttgagcaccaacatgatgctacatgtggaaaattatacacttgacctcatgtg

SEQ ID NO: 111596 - DNA, 1394 bp, Homo sapiens
tacaaggtttagaaaaaagttgaaactcttggcttaaattaggtacctatttttaatgatttttaagggtcatttgagcatacaatagtgtaaggatttcatttttaaagagtttttctcttgctaaatgaaaatgcaaagaggaatgtctagaattttttttgttaatgtcaattccaaagttaccatgtctccatttggcagttctgagagttggttttcttaggatgcagtcaacttcttcataaaatctcatttttcttggagggttgccattttttctttgtaaaatgctatattcatattttacatttttatatttcgtatgacattgtttccggtctctgtctatcccaaactgcattaattaatcttctggcaatttcctcaaatattttcttgtttcttgtggccccttcaagcattcgcttaattttttcatcagaccatatcaatgctctgacctcactgtcacaccagtattttccggcctctgtgttactcactgttataatctgtaaatgacttttagcatcttctaaaggattacctacaaatcaacatgatttataattattcaaacatagataaatcttgtatttgattatcattcacttaaagcaactgtgatggcataaagtaccaagaatacaataataacttcaatatgagtcaaaagaaattttgtgtccatattcaaacagtatattctaaaaattataagacagactgttctcattattagtgagaaaatttagctgcttttcatcataggtgatcttcactggatatttgtgaatatggaaagtcccagtgtttactaaatttcttttagtgagaagtgggcatagacattttccttctttctctactgtattctctaccaactcaggtataaggaagcattttaggtaatacacaatagagatcttctctgttagacttcatatatcaaaatgacatttaaaatttaccaatttagaccctgcagtggacccagtattattttggggtgatgatgtgcagcagggggtgacagggggaaggcatactccacaatgctttctaacagtgagttcctctcatcttaaattctcctaggttttaattctgaataatttttcagccttatgaattttttttttttttttttaagagacagggtctcactatgttgccgaggctggcgtggacctcctgagctcaagcgatcctcctgcctcagcctcccaagtagctggcactacaggtgcctaccaccatgcctagtgcctcatggaaatttgaaaatgtgtttaaatcactcttgttggatataatttttaaaagatggtgatagaaatgtaaaatggtgaagtcatggtggaaaacaggtagttcctcagaaactttca

SEQ ID NO: 111597 - DNA, 1037 bp, Homo sapiens
aaagtgctgagattacaggcgtgagccaccatgcctggccaaccttatctttaagaagatggaatctagaaggtgagatttctatcacttttgttttgtatttggtccagttttttgtcttgggtataatctaatctgaaacatttagtcctggggttaacagaatacctggaaggtatattagccatttcatataaaaataaatagagtatcaattagttaagccagtcatgcactggatatttaacccagatgggttcatccagatgtactccccgtttttagtagttctggctgtcttcagatttattccgtagctctgctttctgtaggggaattttcacatgtcctcttagctgtaaactgtgcatgcatgtgtgtgggtatgttcatgcctgatttatataatcaccaaatgctgttttggtcctgaaaacatcatttcagtagtttgcggagttctgaacaaaccagacaccccttcttagaataaacattttcatctttaaaacacagtcacattttatggagactagaatggcctggacatatttgaagattccataaaaggaattagtaaatgtctgtagatttatgccatgaatcagctaattagcctttccttgattaggagataaccatgcccttccattcaatgaattatcacttctcctggttaggaattgaaccttacaatgacaaacattttcatacttctaaaaatttataagatttacctgatgaagttgggttttctgtctgcagaaacattctgtagaatcttttggttctgttattacgctttgaggaaactgatttgtaatgatctcaggagcacttttcttaagagatttagacactggttctgcaaacagagtacagaacattaccactggaaaggcacttgtgagaatgagagatgcactcagtcagacttatatggatctagttcccagttaatcttcatttagttttgtggagaacacaggatttgattgtcagagaacttactttgggctgccaaattaaggcaggga

SEQ ID NO: 111598 - DNA, 1235 bp, Homo sapiens
agcagggctgagctggccacgccacctagggacagcgcgcgccgccgcagtagctggggccaccctcgggaaggaagagcctgtcgcgagcgcgagcttctgagctcgacgggccgagctggcagctggttggtgcttacaccttggccgcagcggcaggtccttccacgtgctttcggcggcgacatggagctggaggagttggggatccgagaggaatgtggcgtgttcgggtgcatcgcctcaggagagtggcccacgcagctggatgtaccgcatgtgatcactctgggactcgtggggctgcagcaccggtgagcaacagggtgggggtggcgggggcgtgcgtctccatctctcggagccgcttcccgcagtcggcgttctcatgagcgcccgagggcccgggaggaccgacctctccgacctaagccagtacctgcctgtggcgtcgaccgggttgcctaggcgtgcacgaggggcacctcgcttccatgaactttagcctgtcctgcccaccctcccagccacttatgccttttaggggctctctccctccccgccccccggtgtgtgcacccatccagaggctggccagcttgtaaaccgccggtttgcttggtctagctgggtcagggctcctccccgactgcaggcgggttctagtctcccggagcctgtggctgctcctgtaataggctagtgtggcgtggcggccagtccaggtccttcaacacctaaaggttttcgcgcggggcctccaaccaccacaagcttttgtttgcaagggcagagctattgagcagattatgggtttgaaagtagttatcgctatgggaacttgaggatgctagacttcagacccagggaaagatgactagttgatgttgagaatgactactggtagtagatctcacataaattaaatggaaataagccaaccatagggaacagtgcatctggaaaagattcattggtagacgtcttgcctaatgaatgaaaacgttggtaataacatgacaaaaattaactcccttcttcaaaagggggacaggggagtagtgtctctatgccaagatccatacacttgattttgaaaaattgggagatcctttcgagttaaaaaaaattactttgcttcggtgatctttccttttcttactacctgacttaactggaagttgatataaattattacactaggataagaaaaacaaacctgggtttgatattct

SEQ ID NO: 111599 - DNA, 1046 bp, Homo sapiens
tatttgctgcacgtggaaatctccgttattttccagcacccaacagtagcgtaatgggagtaacggacttaacctcatttctctttcagagcatttagccttcatatgcccttccctgcatgcttcccccaggccgtcaagacttggtacgctccaacttctgagtcgctcccgcagccgagaaggggccggggtatgcgagcttccgcagagtggggaggggccgccagtgcgcgccacttttcgcctgtccgggcactgcgccagcgcggggcggcccggaggcggggtcgcgtctctgcgcctgcgcggcgggaagccagtggggcgttgtttcgtccgatatccgcgtttcagtctccgcccatacccctccgggttaggcggctgtagcggagctcgaaaagagtggcgcagggtcgcgcggccccgcctccttccccgcccagcgaagctctctgaccacccctcttttctagagttctgcctcgcttcccggcgcggtcgcagccctcagcccacttaggataatggcgacagctgagggtgagtaacagggatccgggcccttcacggtctccctgacccccaggccgtgagctcgcggccacgtgcgagccgcgaaactctgtcccgcctccctgcagcagcgcctctaggcagccgcgcgggcgcacacgtggcccaggcgctcccgggcctccccgaactttactgcctcggggatggggagaaggagcaaagtagaggagaacgagaaatggccaaggggtggaaaggtgcctggaagtattatttataatcaatagctattgcaaaatacaagcaaatcagtcttgattcgtcaaaacctgagtcttgctttgcccgttaggttaatgacctttctaagaaggttaataattgaaacttttgaaagacctgtctagaggccgggcctggtggctcacgcctgtaatcccagcactttgggaggccaaggcgggcggatcacctgaggtcagtagtacgagaccagcctggccaacatggcgaaaccccgtctc

SEQ ID NO: 111600 - DNA, 1086 bp, Homo sapiens
actatcttaaatatcttgcatctttgcccactactctttccttagaccaagacatttctttttcttttcctttttttttattgagacagggtctcactctatcacccaggcttgagtgaaatagtgcaaatcttggcccactgcggcctcgacctccccaagtagctgagactacaggcatgcaccaccatgctgggctaatttttgtttttttggtagagatgggattttgccctgttgcccaggctggtcttgaactcctgagctaaagcaatctgccctccttgtcttcctaaagtgctgagattacagatgtgagccactgcacctggccagacgtttcttgttcaagttactgcaacagcatcctaactggtcttccaagctctagtttttgttcactcaccccttcctcccttcattgtccatacagaagccgtaatgatctttccaaatagcgttttgctttagcacttaaaagccttatagctcttcttgggttaaagtctaaactcaatcagcatggcttgtgaaacaagaaggatgtgtagcaaaatggaagggaagttttccaggcctaggaaagaagagattgtcagaagctaggggaagattgtataagaattaaagatgttggagttctagataggaaatagacaaataagagtttggagcagtaagccagggctgtatcttaaagggacttttaaaccatgttaatgagtctagacattacattagggagggtagagattcatcctctaaattaggtgccctacagtggcaactgttaactaaattacaactactttgtttaatggttacctccactagctggtgatgtggcccctgtccaactcttaagtcttgtctcctgccattctttagctgcagcccccaccccttcccctgcccaacagcaatgtacatatacccagagctccagctccaaccagactgaagttctgcaatccactttgaccaccttgtatttattcatcaacactacctacccctttctctcctttggctaaatttcgatgattcttcagatttcaacctgtcactttcttgtagacttctttt

SEQ ID NO: 111601 - DNA, 1067 bp, Homo sapiens
ttgcctacaaaaaagcaaatatcagcaaaaatcgcatattttttcctgcaagatagtttagatactatactgtgagtgtgtctgtgaaaatactagtatagttacattactttaagtgggtcttaattaattttaattctagttcagttctgctatgagaggcaggttaatagtggaaagagcacaggatttgatgtcagaggagttaggattttatctacctcttatatttcctaactgcatgaccctcaacccttttgatttctgctttactaatttctacaattatttatgtaattaaaattcttcacaagatcatgtgaatcaaatgtgatggtatgagaaatacattgtagagtatatggttttatacagatgatttaatttttattaatattacttaatcactgtatatttacagattaattgttctaggtgatttagtcttcagcattcaggaagtttctgaattttggtctatttccattttatttccacagtactgaacattggtaaaaaattatatgagggtaaaacaaaagaagtctacgaattgttagacagtccaggaaaagtcctcctgcagtccaaggaccagattacagcaggaaatgcagctagaaaaaaccacctggaaggaaaagctgcaatctcaaataaaatcaccagttgtatttttcagttattacaggaagcaggtaagcagctccctcaaagtctcttctctcaccttctctggtaagcatgtcgatgtctttcatgtgaagttggcattaatatgaacaacttgtttgcagatgtctcaaaagctaagtgaatttaaatcaaaccaagaacccttaaacttcactataacaccttatttggtttgggattattagtatcattgaattaaaaggaatcttaacaagtttgctgtaatctttatctggcacatgcactctctgtgcagcttacctctccaaggccatcttcactttaaggaatttaactatgaaggaaacccattttaatgttaagcagttctaacatgaagaactgaaatttactccctgtaattctataca

SEQ ID NO: 111602 - DNA, 1302 bp, Homo sapiens
ctcttgaactcctaggctcaagcgatcctcctgcttcagcctcctaaattactgggactacagtgtgagccactgcacctggatcaaaatttcttttcttttttttttttttttttgagatggagtctccctctgttgcttaggctagagtgcagtggcgctctctcagctcactgcaacctccacctcccgggtttaaatgattctcctgcctcagcctcccaagtagctgggattacaggtgcacaccaccacacccagctaattttttgtaattttagtagacagggtttcactgtgttggccaggctggtctcgaactcctgatcttgtgatccgcccacctcagccccctaaagtgctgggattacaggcatgagccaccatgcccggctgtggctaaaaatttctaaggagttcatgctcaaggtgaaaaggatgttggtttttctgaaaagtttaaaaattttagattgaagttaattgtactactatactttattcacaggatgatgccaataatgacccacagtggtctgaggaacagctgattgctgcaaaattttgctttgctggacttcttataggccagactgaagtggatatcatgagtcatgctacacaggctatatttgaaatactggagaaatcctggttgccccagaattgtacactggttgatatgaaggtacagataaaacaagtacagataaaacaacaggatttgaaagtaaaggttatagttgagagatgctttcataaaatagtttttgaaaactttgttgacatgctgtttccagattgaatttggtgttgatgtaaccaccaaagaaattgttcttgctgatgttattgacaatgattcctggagactctggccatcaggagatcgaagccaacagaaagacaaacaggtagataatgcttcaggtttttttatcctttttgagatcaagctgagatagaggagaaaggagagatgaggggaaaaagcaaattattgttcctaatgatatgaacctgttttgtggattgctgtttatttttaaagataaatgtctctggtatcctaatagaagaataataggaataatactttacatttataaagcaaatttctcatctgttatcttaataacattgtcacaacagtaacagcaagtattatctttgtttggctaaatgaaaactaagggtcttaagaggatgggtatcttcacaattactagagtcagggacagatctgggactctattccaagtctcctgcatgttaccaggccacatttctgctcctatataa

SEQ ID NO: 111603 - DNA, 1050 bp, Homo sapiens
ctgttgcagggtggggagcaaggggagggagagcattaggagaaatacctaatgcatatggggcttaaaacctagatgacaggttgatgggtgcagcaaactaccatggcacatgtatacctatgtaacaaacctgcacattctgcacatgtatttaaaataaaaaataacagaaaacaaaattagagcaagaccctttctatacttaatatataaaaattctcaaggcagttaattgtagttgctagtacagaaaacacttaaccttaagtgaaaataaaagtatactttactatggaactttgttagtttaattcaggaagtgaaaagatgcattttcagaagtatcccttgctatacaaactcttcataatccctccccaaaactcagaaaccaaatagtttcaggtagcaagagatacttgttttctaaactttctatcttattttctagtcttatcgggacctcaaagaagtaactcctgaagggctccaaatggtaaagaaaaactttgagtgggttgcagagagagtagaggtaaaccttctatagtaaaactgtatgtattatgtgtttttcttctaagaaaatcttgtttcaaaagaaaaaaaaatgggagagtatagtgcttttcttttcagtgactttgttttttgttgttgttttttttgagacggagtcttgctctgtcgcccaggctggagtgcagtggcgccatctcagctcactgcaagctccgcctcccgggttcacgccattctcctagctcagcctcccgagtagctgggactacaggcgctggccaccacgcccagctaattttttgtatttttagtagagacggggtttcaccgtgttagccaggatggtcttgatctcctgacctcgtgatccccctgcctcggcctcccaaagtgccgggattacaggcgtgagccaccacgcccagctcttcagtgactttgaaagtgaggaacacttttaggaaatgtatcagctgggctatccttactaggatactggaactccgtgctgttaagctggccaat

SEQ ID NO: 111604 - DNA, 1040 bp, Homo sapiens
gactttaaatattcctttaagttttatggtattactataattctgggagttgaatggggtttgtgattatgcaagggtcataatcacatttgagaacattattcttataggaatatatattttgagttacaagcaattaacttacaaagacttagaacatgacttctgatttggctaatcataccttaaagcttccattaaacaaagtgcactaaaggtcttaggatgaaatattttgtattataatttcctgaaaattaaaagattttgagtatctttactgtttattttaaataatttgtctgataaaaattgaattctttaggtcttgatgaagaccactttcctttatatattgagatttttaaaaataaatcctgtctttttgttgtttgtctctgtcttaaatttgatctgttaagaaagaaaatattgggcccagatataattttactacaaactctagctcatttattcatttttgtttttatgttcttttcatatccacgtattttttcttcagttgcttttgaaatcagaaagtcagtgcagggttgtagtgttgatgggctctacttctgatcttggtcactgtgaaaaaatcaagaaggcctgtggaaattttggcattccatgtgaacttcgagtaacatctgcgcataaaggaccagatgaaactctgaggattaaagctgagtatgaaggtaaaccacaagtaatatggacatttcaggtatttctgattttgctaaaagtaattacacactttagactaataatgctgaaaaaagagctttgtcagttttctaagggaaaaacacatgatatactaggctttctttttttttgagatggagtctcactctgtcgcccaggctggagtacagtggcgccatctcagctcactgcaagctccacctcccgggttcacaccattctcctgcctcagcctcccaagtagctgggactacaggcgcccaccaccatgcccggctaattttttgtatttttaatagagacggggtttcactgtgttagcc

SEQ ID NO: 111605 - DNA, 1017 bp, Homo sapiens
gccctgggtttacaaccaaatgtttctcaactggaaaaaaatgttgattatttcgtgtacaggttgttgctatggaagtgtagttactaattttgggggagtgggaggttgggggaactcagactcctttgatagctaatgaattctagaactcttttcagaaaattgcaaatacatacaattttggattctaggttaacaaatctctgctttaggaaacaggaggataatttataaatttatcaaagaatgaattgcttaagagattatgttaaaaaatgtatcaaagggccttaaaatttgggggacactatattaattaaactttccttcaactcttgtttgaagacgtgtccctaaacccctagtttatattaactggttctccctgcaccagttgagggaccacccagtcaagaaagacacctgttcagatggtgtcattcttcactttggccagcctatacagcaatagaagaggcctatgagctattccctcactgacaccctgctatcccctttataatgtagatctcaaaaacaaccaaaccgattccagctactttattacttgacttatagtaagtggcagagtaaccttatgttttgaatatatgtgtaataatagtatcttttatgttttttcagagaagactattcaaggacctcaagtaattaaaacatataggccttaaaccaaaaaaaaaaaaaaaccctgtctttaaatctgttttgaatgtttagcataattatactcttgtcatttccctaggggatggcattcctactgtatttgtggcagtggcaggcagaagtaatggtttgggaccagtgatgtctgggaacactgcatatccagttatcagctgtcctcccctcacaccagactggggagttcaggatgtgtggtcttctcttcgactacccagtggtaagatacattgaatttttaaaaactgttcattacaagcatttaacagatgcacaacagtagacagaatagcataataaaatctc

SEQ ID NO: 111606 - DNA, 1052 bp, Homo sapiens
catagctcaagtttgtctaagaacaggtacttttgtactcttaccttgacccttattttgcttcagttgttcttcgccagggattgaaagggatagtgtatgtgaacagaagtttcaaaaagataagtttctttgtaagtgagttctataagaagggtgatagatgatatatataaaatatctcttcatggcaggtaatactgactgcttttcctcttgtaatcactttaccactccggtattaaagacagttgtacagattctactttagattagaataatgcagtagctttttattttctgtggcaggactgctctgagtataaaattttttgtaaggttgtattttcattactaattgagctcaattttctgtcttttccttgctgaaccaataggtcttggctgttcaaccgtactttctccagaaggatcagctcaatttgctgctcagatatttgggttaagcaaccatttggtatggagcaaactgcgagcaagcattttgaacacatggatttccttgaagcaggctgacaagaaaatcagagaatgtaatttataagaaagaatgccattgaattttttaggggaaaaactacaaatttctaatttagctgaaggaaaatcaagcaagatgaaaaggtaattttaaattagagaacacaaataaaatgtattagtgaataaatgcttctctagatccatattaataaacatgagcatctaacccctcctttcttaggctagacaccaagatatttcagccagcctttatcattcctcttactttatcctttttccttaagtattggtggtcactactattgagtttcttccttaacactgattaaatgatcttaactccctcagctaaaactggcattactgactcccagctatatttctccagacttgcatttttttttttttttttgagacagggtctcactgtcgcccaggctggagtgcagtggcgtgatctcagttcactgctgctttccctcctgggctcaagcagttctcccacctcagcctctcgactaacaggg

SEQ ID NO: 111607 - DNA, 1048 bp, Homo sapiens
agccgtgcctatttctccttcaaatgactccctatggcttctagttggtagtcttttatttaccacctcatagtccttttatttatatcccataaatgatcgtccggccccgcaccgtgggaccaggacgctgcctcgaccatggcggtctcctggaaacaggctgctttgagccgaaactggtgaccgtttcccaaccccgtccaggagtccgacgcctcttttctccaggccaacttcaagtgaggtgtatcaactctatccgcacaaatttcttgccacgagagcagaagattatgatctctgatgctgccttagggctgaagacactcccaactcggcgacgcttagcaatcatcgacttcctcctcctcttggctgcctcggagatcctgttccggggcagaggtctccccgccccgcccctcgtctcctccaagatggcgagcggcggcagcgggggggtgtcagtacctgcgctgtggagtgaagtgaaccggtatggccagaacggcgacttcacgcgcgctctcaagaccgtcaataagagtaagtgtcggggtgggcactggggcgggcccaggccggctggaggatgcggcctgtttccggcgcgcgagaccacctcgcgcgggaggcacgggaaggggagacccccgaaacccccccgtctattgtccgcccggctcgggccctagcgcccggaagacgcaggtctcactcctcggcttcaccaggccagcctggggtccctggttgcttacagccacgtgtacttctctttttaccctccgcgggaagcgagggaaggttttaaagagaccgcagctcccggagtccatttcaaactgttttcttatttgactcctttgctgctttatttcacaaatattccaaagtgcctccttttcttcttcgtcttgagcgcagtgatcaggactctattgctgagggagcttgttctctttggccgctaaagggggaggaacctgcttgggacacgtagtttagaggctggtgctaaccaggtggaagctgtacgggttct

SEQ ID NO: 111608 - DNA, 1228 bp, Homo sapiens
aagttaggaaatatgtgtgtggaagcaccaacacttgaaataatgtcggaagaaaagtttggcctgtttttttgccctgtaagggatgatttcggtttttaccgcctttggtgtgaggtttaattcatcatattcttttgttccttactacatacctggaatatggccatgctgcttaatgttctcggtggtgcgcagttcttctctactgaagatacagcctgtgcatgttagatttggaaatgtaattaccaaggcagggcttagctgttcagagtagcagtaacctaaaaggtgtgtcagtaacatgcaaagctatctaagtaattttcaacactctagtactgggttaacgtgaaaagtagtgattgtgcccacagtgcacttttggtgatttcagacattgaggaaaatagctacgaattagaattatttgatccctaaatttgtttgaattaactctagccttccaaccagtactgtatacttagtatagtattttgcaggaattctttaatcagcaaagattgtcaacttgtttaccagtatgttttcttaattggtagaaattcttgtgattctttgagaattggacttctgtagttgcacaggagcaagagtaactatgatcctggtcattttaacaccgaacagttgttagcgttgaaacttgccacctgagttcttccttatactttggtcatcttagttgaaaaggggaaattttaatgatttttggaaacgttgccagcaagataaattgcctttgtattatactttataagatttttccaaaatattcatttcatattgtcagtaaccttattaaataggtaatgcttttctaatcattttgtagctaagaaaactgagatttggctgttaagtgatatgcccaatacctcaaagcatttagtggcaagcttgcaccaaacctaggtcatttgcttccaaattctacctgaactttttccctgtgaagtaatgaactatgtagaatgtagcatgcatttcaagatgaaatatctggagaaattgcttctttcttctttatttcactgcacttttttggtacatgtatattgggaatctttatctcattgaaaatttaatctataactctccttattgtcacttcttaagttaaaagcaaagattagttgttttctgggtttgttttgttttgttgctgtttcttccagttgttctgaccaattatttctgttgc

SEQ ID NO: 111609 - DNA, 1053 bp, Homo sapiens
taatcatttgtttcttaaacaagtttaaagaaatatggcttattgttttgttaatgaatttaagaaacttctaaaacaacccatttaacatccttcagattatctttgtatctaagacaattacttatttagcagatgaatgatttccttcttaaatgtttatttcaaaaggccaataattttaataacaatatccatgaaagagaggctagggaagttgatatatgcttaattatatgtttgattgatatacatttacaagctatctgatatttagacaagtctctaacctttgtcagttttctcatctgttatcaggactaaatccagtgtttagagtggtgttgtatataatgggtgcattgcattgttagataataatcagatactgtttttttttccttcttcagtaactctctctcctttgaaaaggcatattgcgagtacaggctgaacagaattgagaatgccttgaagacaatagaaagtgccaaccagcagacagacaaactgaaggagctttatggacaagtggtaattactgcttttaaatacatgttgacagtgatactgagtgagcatgactacctctagcaaggagcagggttgaggaaacccagcccatcctgatgctccacaaaactgaccaccaaaccagtccttaaggtttgaacataattcctcttcttgatcttcatacaaacagttgcatatataatgtgctatgaacaaatgacttcctcaggtaatcagaaaatcaaagaaaatgaactaatctgtttaattttgacttttgagttagaaagatgaagcacattgagcttgtatattaaacagatttgaaatactatttcactaatattttactctaaggatgtcatgatagataagaatttagatgattctagcccatgaaattgtgaaaatattttaaagtattttgagacataaaattaaccctaatgtaaaatagggctgttaatgacaagaggacagaaatgtgtatcttacagctagcaaaaccctcttaaagtttttctttttttttttttt

SEQ ID NO: 111610 - DNA, 1079 bp, Homo sapiens
tgacagagcgagactccatctcaaaaaaaaaaaaggtatgtacttgttttcagacataatgctgttgcacacttaatagacaacaatatagtgtaaacatagcttttatatgcactgggaaaccaaaaaatctgtgactccttctattgtaatatttgctttattgcggtagtctggaaccaaacacgaaatatctccaagatatttctgtattttgaagaggagtgagttactttttatttatcatctaaattctagagggcatagcttgtagaaattgccaagttaggtatttttgtagtcctaatacacttcaatttgtgctgtccctttttttccttcaaaaagctcaaaacaagcaattaatagtggaaaaataaaacaaatcttgttctccatttctttaaagcagttcacttgttaagcctttttatacctaggaagcctcctttgagaaggctttaaaaggagtgggggtagattctgggataactatatgtacatgagtagatttgaattgcagagattcaaaaagagtagatttgaattacttctgtgaatcaggataaatttatatgcatcttattagcttaggcaccccaatcaggtagatagattcaagctctcctgctgtatctatataaagttaatagaaaaaggaataagttgaaatctgagattctgttaatgatagataaacttttctttgttaggaccaaaatgtctttgactccaagaagaaagtgaaattaaccaatgcggaaggagtagagtttaagctttccaagaaacaactacaagctatagaatttaacaaagctttacttgctatgtacacaaaccaggtgggtaattacctttggtgtcatggctaaaccttttgtaatatggtatatgaggagtaatagggatattagtctaatctttttatagtttttgtttgtattttgtcttcaactcataaatatatttttttgccttcctcaaaatattatatatattattggctgggcacaatggctcatgcctgtaatcctagcactttgggaggttgaagtgggcggaatgcctgagttcaa

SEQ ID NO: 111611 - DNA, 1007 bp, Homo sapiens
aagtcctgggattacaggcatgagccaccacgcccggccgagagacagtaatgtttttattatttagaactgagtcaagttattcttaataatgtagcaaaaaatacatatatgcattttgttgtttttgaagcaaatgcttatatttgatgtgtttgatttttttaaacagttctagaatttaggcatccaagtgaatgtttagaatttctcctttactaaagactcttagagctcatagattaaattcaataaatggaaaccattttcttacaagaaaaaattgagaatagatactgtaaactgattctcttaccctaggcagttctttggttaatatttgtttcaactgattttcccatgtttcttttctttctggtcatttagtgtttaatttcattaaccagtttatttttcttgtgggggttggatatcttctaggctgaacaatgccgcaaaatatctgccagtttacagtcccaaagtcccgagcatctcttacctgtgttaatccaagctgcccagctctgccgtgaaaagcagcacacaaaagcaatagagctgcttcaggtaaaataattacttgaatgaggtgtcagacatttgcagctttgtttcattttcattgtgttgtaataacctactagcatgtaaatttaatgggaaaactaatcagaaatgtaccactacacaaatttcattgtcattttagttaactcttgggttacagagctttatataaatttctttgtgttatataaatttctataatgtaaatatttgttataaatgctgaagaatgctgttttgtttggagatctgtttaacctgagttaggggatcatttaggcatgtataattccagaacatacttaacctcttttgcaataatctgatctccagtgagttctactccagaacctcaattatggagatactgactttgtttttatcaacccaaaccagctattatattgcatatttaaatttcttgaatataaactaca

SEQ ID NO: 111612 - DNA, 1133 bp, Homo sapiens
actttaaggtaggagtagtaattataatagtaatagttgtctggtataaatttaatttcattctctgctctggtattggtttcttattcagtcaaatgtgccaggcactatttaggccttatagtatcactgaaaaccaacctcaaataatctcagatctgtataggaatttcttagcctatatcattttcgtcagtgtgatttctttaaattagaacaatttcataattgtggccaacaaatttagtttttagttttctgattattcaaatattgcaggtttcaatcattaatacagctgtgaaagcatcttttccatagtagaaactaattctgtagtggtagtatgtgcatcttttggacaggggctgttttattcatgtttgcattctcatggcctctgtgcagttggcactcagtaaatgtaatatggtagtgctttcccttaaagattcatattttaaggatcgtgctataattactttaccttagagtcaaatacagtatatgactgaaaataaaatgtttctaatatttaatatatgaccaccttttacctttcaaggaatgtatccatttcatttaggttgctgactttattggcataaaagttcttcattttatttctttattgtccttttaatatctatagaacctctctcattcctgatattggttattcatgtatttttttctttttccctctgattagcctgtccagaggtttatcagttttactgattgttcttaaagatccagctttttgtttgtttcctttctatcctcatctcctactgctcagcatccccctccccctccactccagctatgtaggcctccttcctgtccctcagccacaccaggcaccctttttactggcttcaaacagctcatgccacatgggattcatcatgagagttcagccgctctatgtatgcctcactgatcatacacttaaatgtccagcagtgtcttattgtagaaacatttctaagggcttattctcaacttctgtacttaccaaaccatttgtgaactggcactgctttaaaggaaagttttattttacagatatctaccttcatatttggaaaacacggttgttcatggtatttctagaagtaaagttaact

SEQ ID NO: 111613 - DNA, 1081 bp, Homo sapiens
ctttcagaatgctttttttttttttttgagacggagtcttgctccatcgctcaggctggagtgcagtggcgcaatctcgctcactgcagcctctgcctccctggttcaagtgattctcctgcctcagcctcccaagtagctgagattacaggcacgcactgccacacccaactaatttttgtatttttagtagagacggggttttactatgttgtccaggctggtctggaactcctgacctcaggtgatccacctgccttggcctcccatcgtgctgggattacagacgtgagccactgttcccagccactttcagaatgcttgacaattattttgaagtgttaatttttatgccctttttagtgccttttttggtcaatgtacttaatatagattttacttacataaaaaaattaataaactcacaggtttaaaatacaaaagataaaaaagtgtaagagtaagtaaaaagtcttccatccgtgtctacccacctccctcccagggccataaccaacgtaacttgttttgaatctccttccagagatattctttgcatgtatcttacctacacatgttcttctggcaaaaaatttattctctaaagtcttgccaaacatagagtaacttaccaagggattctaggtagtcatgcttgtgcaaattactttttacatagacttaatgtgtgccactgaaaaacttttttcagtgtaaacagaatctgttttcgaattgtcacctctgttttctaaactactttccaaaaattatagtatctgaagcttaattgactttaacctgaatcaaatcttaactaatttgttagctttggtaagctgataccaagtcttaaaccatgtttatgataagtgcccaactaactcttatagagcacttacttaatgctctataaatattttatcacaaagatggtaatgatttttttttctctttgtagacagggagatttgaaaaagaagaaaaagaaaaagaagggtaaggcattaaaaaagtctttataaattttctccaaaataaatgtttgattttagccctatatagaaatatttggacataa

SEQ ID NO: 111614 - DNA, 1532 bp, Homo sapiens
tcttcaataaaaacagtgaaaatgttattcaaaagaaaagtcgatagggagttggggagcttaccttaaaagaagtagaaaatgtgtgggagattgttaagtgtgataagtaaaacccatgtacatacatttttatactcttccttcgttgaatatatgagtgaccaaaaatgatctgatgatttcagggatgccagtaaaactgtgagcagcccacccacctccccaagacctggcagtgctgcaacagtatctgcctctacaagtaacatcatacccccaagacaccagaaacctgcaggggctccagcaacaaaaaagaaacagcaacagaaaaagaagaaaggtggaaaaggtggctggtgatgagaatattcttgttgcaggctgtttttaaactagtgtcagtgacactaggaatataataaaggtaacacagcaagaagcacagaactactccctcttcatctccatattttcataatttcttgtgtttcaaatagggaaacatcttcctcaaagtctgcctagtgagatatggcctactggttgcctcatagctttgtacagattatgaggactgaaaataattgggcatttacccatcttggtatctgttgtatcctttatctgtgtgtgctgatttgatcttttttcagtttcacataccttatctaaggtttcccaggatttaaacagaaactacttctatgatttcagctggagtctgaagatacttgtttctgttcaagtcccactttaaattatgtcttaggagactgaaagtggaatcttctgagcattcctaaatatctgcttagaaatatcatgtgataaagagggaccttcttaatacactgatgttcttcactaaatggatggccacaagaaaaataaagtaaatgtcttaaataatttaaccataaattttctgtcatgtgatactggaatatgggatacttttcatgtttatatatatatatatatgtatatatatatacatatatatatatatataaacatgaaatatatatatatggctcctttgtgccccatgtcattttcagattatggtagcatgctgatacagcaccatgaaagaactcaaggaaaatatatcaatgtaagaagttcactcttagacccagtgttctgaggtcacatgggtttggactgtctcaatcagaaagattaatgactgttatcaagaacatgaacattggcttcctccatagagaagaaatcagtatctgagttgcataccaggcagtattaaaatctaacaggtctgtttggcccattgatagatactcaaatggtgtctccttctggttatggattttgaccattgattacctttctcaatgtaatgaagtattttacagtcaatttgtggtgtaaatgttgctcttgtctttccttgcttacaaactactttcacattgaacagctgtgagacagacatattgagatgcctgcccttgttagtattcattttatgctgcccaagatatcatttaatttagacttaa

SEQ ID NO: 111615 - DNA, 1036 bp, Homo sapiens
ataagttttaattgtcaaatgaagtataaacacatgaactttctagaaatatttcctcttttggataggtctttaaccagttcatatatatactttgtcaaatatatggatgtgtatgtgtacatttataagaaccagtatggatacatccattcactgtggtacattttaaaataaaatattttagcagtgaatatggattaaggtgttttgggtgttggcattttatggaggacttcctggttagtataaccaagaattttcttttaagctgagtatcaaaattgtgtgtactgtccctcttagcaaacccataaaactaatctaatgggattgagagaaccccgtgtaaacttactgaaaattcatcttggtgtgtgtataaacagaagtaaacctttgaaaaagtcattaagcatagcaattccaatgctattgggaacagccaaccttaaatatcattgcatcactcaagccttctggaacctgctattcattgttccttacaagtctatttgaaacagatacaatgaaggaaaataagtttattacattgaaaaataattgtggccgggcacggtggctcgcacctgtaatcccagcactttgggaggccgaggcgggcagatcacctcaggtcagaagttcgagaccagcctgaccaacgtggagaaaccccatctctactaaaaatacaaaattagccaggcatggtggctcatgcctgtaatcccagctacgtgcgaggctgaggcaagagaatcgcttgaacctgggaggtagaggttgcagtgagctgagatcggaccactgcactccagcctgggcaacaagagtgaaactccgtctcaaaaaataattgtgctggacgggtgcggtggctcatgcctgtaatcccagcactttgggaggcccaatcaggcggattacctgaagtcaggagttcgagaccagcctggccaacatggtgaaactccgtctctactaaaaatacaaaaattagctgggcatggtggcacatgcctgtaatcccagc

SEQ ID NO: 111616 - DNA, 1029 bp, Homo sapiens
cccaaagcgccaacccactgcggagacagaaggccgcctaccggggaggccggaggccggctagtcgcggactcgggcgaacccaccctcgcgatctgtcaagtctgtccccaggggaggtccccctttcgggaggaagtttttaaggggatttctcaaaatcacccccgcgcttccttcactccttccttagagccggaggtcggtgagggcccgcggaatcatctatctcgcccccgtcgcaggcagggatacagttcctgcaaggggtcccggggggcgcgggaggcgcaggacgctaggctctgccgtcagcccgcaacagcgctcagtccagggagggaggcccgggtggggggcagccgtaagcccccgctcagcgtgcagccaccggggacttgcgcggccgtggcaccgctggagggggcggcctggggctggggctgcccggcggcgccgcgaccgccttccttcgctgcgtcccgcccgctccacgcctcgctcaccgccgccgcttctccctgccccgcagcgcgcagggaccatgtcggcggagaccgcgagcggccccacagaggaccaggtggaaatcctggagtacaacttcaacaaggtcgacaagcacccggattccaccacgctgtgcctcatcgcggccgaggcaggcctttccgaggaggagacccaggtgcgtccccacacgcgcccagcgcgccccgacccctgcctgggctgagccttctcgcggctgggcggtcctgttcgtccgcgcctcccgccgggctgccctccccatgatctcccatcgcttctgcccgcatcccaggggcccagaccctgcatggctcccgccgccgcctccccgcttccccgctcccatgggcgcccggtctccccgccacccccatccagccgtggttccccgggagctgcgcagaaacccctcggtcaccagtcctttcttttccactctccccggcagcccgggatacacgctttctccctctgcgagttgggagcagcgtctct

SEQ ID NO: 111617 - DNA, 1057 bp, Homo sapiens
ctctggttgcttgatgagcaaagcgtgtgggggaggagcaaatggcttcgaccaagcagcagatgagcaaggcagtctaagaggagaaaagggaatcacataatttgtatttgtactttctttaaaaaaaaaaaagaccaaaaaccaaagaaacaaagctcagattctacttagcgatctcaagacttgcccacagatactcaactaagtgtttaacaatgtctacaccctgtccaggccagcctgtgtctcttctccagcccgtagctgtcaggttgttttatacgctggtgccacctgtggggcgtggtacaggggggcctgctggattacatcttagtgtgtatttactacacatgctgcctgaactgcctgcattctggctgtggcctggtgtatatcccaggccttgggtcatttccatcctacgtctcccagagcccatagatacccggggtggcctttaaaactggtgtcaggctgggcctggaaagtaccacccagatccagaaccagcctgcagaatccagctgcctggggtttgggagggaaggccttgacaggcactaagctggctgttccctgtgagtcagagcacactgcactgggagttacatcccttgggatgggttgaacagtcacaaccagaggatacagagagtctcttccttacctccttcaagccaaccacgggctttgtgtattagttttttcatgtacaaagctgtcaaatagtaaggtcgaagggtattccttgtcccctcttgctaataatgcaggattctagccctctctgcttctcatcttagatatttctgaatgctcacaggagtttatcttgcatccttatgattaagtcagttcaatttcaatgttatgtcctggactctgctgccagtgtctggcactgctaccctgtgctgctaaagtgcagggcaaagtagggagacagcatcatggccccctttttataggtttcactctgttgttaggatataggagtggtacagtaggccaaaaagtgaccccccaaaagatatccacatcaaacccctaa

SEQ ID NO: 111618 - DNA, 1154 bp, Homo sapiens
gcccgacgcctcgcgagggcgcccgcggagcctccccggccctgggcgttgggcgagccccggggcggtcggaggggcccgggggcggtcggagaagcccggacgccggctgcgcggtaactttccgtcctctcccgggacgggggccctagggctggggagggggctgcctggactcggggaggactggttccggccaaacagcgcctcgagcttgatcccctcccccgttttagtgttggagagcgcaggaaaaggctcaggacgagtgtcggggcgactcccgcgagttggtgtgtaaatgtgtgcagtgagcgggccgaggcgagaggaagcgagagcgcccgagtttgcaaagagctgctttgtgtttggtattttgagaaaatggccgaatgcctatttcagttaggaatgccgccgccgaggcaggcgctggtggcagcagcacggaggaattcgtgcagcacgttgggctttcgggctgtgcctggacggtcttcctaacaatcgttaaaattccatttggggtggcagttaggggttagggagcaattagaaaagtcgatgttgggccaaattacccaatagcttgggctgttcagccccgggacagccttcgccctctgttttctgtgatggcatttgcttccaacttttgttggtacgtagaactaaaccggtttgtgtttatacacttgggtgaagcgggttactttttgtattttcggtttaactttattttcttagaacttcttactttttttaatttgcgagtgaacacttcgtttgagaatggcaccttttagattgagaagtaacgtagcatctagaaagcccaacttgttttgaagaaggtgatcttgtaatggcttccactaggcaagtaggccaagtcaagcacaatgcaagaaagttgctgattgtcgagttgagttgcacgatgattttattcgtattgaaaagcttggaattcagtgttgtggaacttcagcctgcagaaaaataagcttattaatttttatttgtgaagttttgaataaatcaaacttcctttttcacaagaaaaggggtccataaatgttttttcttttaagcctgtggagttgtcgaaaaattaaggggctgactgctactttttcacagtagtttat

SEQ ID NO: 111619 - DNA, 1429 bp, Homo sapiens
tgaaggggggaaaagttgggaggacaataatttactactcatgttttgaatttttaaaataattttaacagtaaaaatgaaggttactttttatccccaccagaacaattaaaagtgcttgaggaggcaccacatgccagtggctgaatgatgaatgagttgtgcaaacaattggtagaattgttttatagggatagtagaaatttttttttggtgattgcagtagactattgggaattaacaactattttaaagatttgtttttaataggcgatgaagtttactgagttataaagatcatactggaaaatttttaagttatgaagaattacagcgatgtggttttaagccagtaacagtagtgtttaaactggtgctcttgttttgttttgtttttaattcagaatacagttatggccacccaggtaatggggcagtcttctggaggaggagggctgtttaccagcagtggcaacattggaatggccctgcctaacgacatgtatgacttgcatgacctttccaaagctgaactggccgcacctcagcttattatgctggcaaatgtggccttaactggggaagtaaatggcagctgctgtgattacctggtcggtgaagaaagacagatggcagaactgatgccggttggggataacaacttttcagatagtgaagaaggagaaggacttgaagagtctgctgatataaaaggtgaacctcatggactggaaaacatggaactgagaagtttggaactcagcgtcgtagaacctcagcctgtatttgaggcatcaggtgctccagatatttacagttcaaataaagatcttccccctgaaacacctggagcggaggacaaaggcaagagctcgaagaccaaaccctttcgctgtaagccatgccaatatgaagcagaatctgaagaacagtttgtgcatcacatcagagttcacagtgctaagaaattttttgtggaagagagtgcagagaagcaggcaaaagccagggaatctggctcttccactgcagaagagggagatttctccaagggccccattcgctgtgaccgctgcggctacaatactaatcgatatgatcactatacagcacacctgaaacaccacaccagagctggggataatgagcgagtctacaagtgtatcatttgcacatacacaacagtgagcgagtatcactggaggaaacatttaagaaaccattttccaaggaaagtatacacatgtggaaaatgcaactatttttcagacagaaaaaacaattatgttcagcatgttagaactcatacaggtaagagaagctttctagtccataagttcagttctcttttctgattgttacttgagtggttagttaagtagtgcttgagaaaaaggactctggttcaaatccaggttccattttgcta

SEQ ID NO: 111620 - DNA, 1050 bp, Homo sapiens
ctcactcagaagtattgttttaagctaacactttcaaatggtagtagattcatcatttacaagttaaaaaaaaaacctaaaaaccggtgttaatagcatcagacagttcaggtagattttttaaaaggtgattcttaatataacaaaaatgctttgtaccttatcaagatagttttttacttatcactacttaatgtattaacatgcagtatcactgtgaaaattaaaagggctgtgagaattcggaaagtcaatgttgttttcttgtcagcaaagccaaaataatgtagtcatagtttctgaaataaataacttacattttaagtacatgataaattgatctttttgccagaaataggaaaaaaaaattcttgttaaaatgtgctgagcgctgaacattgttgcattgttagtgagaattgtatttggctatttcgtgacatttaaacactcttatattattgaaattttgcaggagaacgcccatataaatgtgaactttgtccttactcaagttctcagaagactcatctaactagacatatgcgtactcattcaggttggtaagaaattggaacttttctatcattttcagtaaatgaccattttaaggaaattcttttagacttgtaaccgagtcatttacttattatttatttttaatataatttagaagtcagaatttaaaaatcagtattccgtcaatctggggattcctaacatggaatccaaaggtggacctcctgaaaatggaatttttgtgtacactttttctgggaggaggggccttaattctcatcaaatctttgaagcgttccgtgactccaacaaaagttaaactaatgtagaccaagactgattgatcttttaacccctacttctcatatttctcctaacagtataaagctgagagtcacaacgtgtggttgacaagtgtcagggattccttcttagcttctcaggtcctgaaatgaaggtttgttctgtttcaaggtttggtcgagcttttgaggactgactgcaaaagtttagcttgaaaaagaaaatgat

SEQ ID NO: 111621 - DNA, 1089 bp, Homo sapiens
tctagctctatctagaagttcttaggccttatgctacctatctttctacattctatgtccacgtatgttaaaatgtttgtctccatttaaatcattcactggagagaaccaggtatagagtaatgtagcatgttgtagaaacttgcatatttgtaaatctgttagtagaccaacatggagaagaattgtccagtcagctgaatatctaatttgactacctggataaggtgattattttatcaccaggcattttctaatcatgtaaaacttaacatctacatggttttacctaatgtctgagttttgctttatgaaaatttttagtacaatttgatatgaatttgagaatgtttgagatgaattttcataaatgtcaatttccgtttttctactatgcattccattggaccagtggggtatggataccatttggtaatatttactagagtgtgatctagatgggtatgtattcaggtagaatgtattactcttatgcctttaatttgggggtgggggttctggttttttatgtatcagtgattgtgactttgcttattttacataccatatctatttgtgtgccacttctcattacctagttcctttatgtattttatagaaaggtggggggaaaatcaagaaagttttctgaataattaccttggcctatatttttgctttaaaatagcaatgctagcgcaggaagtttgctaagtgaaaatttactcagctcttgccatgacggacagaaggattaaatttcaagaaaaagcctttgctcagactaaagcagaatttcaaaacttttgcacctaggatctgggagtatcgcccagagtgaaagatatttttctcaagatttaccataagaaatttagggtggagggagtatgggaattttattttatttttatttatttttgagacgaagtttcgctcttgtcgcccaggctgtagtgcagtggtgcgatcttggctcactgtaatcttgccttctgggtccaagcaattctccttcttcagcctcctgagtagctgggattacaggcatctgccactacacccggctaattttttgtatttttagta

SEQ ID NO: 111622 - DNA, 1252 bp, Homo sapiens
atgatacagcattttaaatagtctttgttgttactttacatatacagttctttatattttaatcttgaatttgtcttaatctatgtcttctctcatacttttgatttgccttcaggtgagaagccatttaaatgtgatcagtgcagttatgtggcctctaatcaacatgaagtaacccgccatgcaagacaggttcacaatgggcctaaacctcttaattgcccacactgtgattacaaaacagcagatagaagcaacttcaaaaaacatgtagagctacatgtgaacccacggcagttcaattgccctgtatgtgactatgcagcttccaagaagtgtaatctacagtatcacttcaaatctaagcatcctacttgtcctaataaaacaatggatgtctcaaaagtgaaactaaagaaaaccaaaaaacgagaggctgacttgcctgataatattaccaatgaaaaaacagaaatagaacaaacaaaaataaaaggggatgtggctggaaagaaaaatgaaaagtccgtcaaagcagagaaaagagatgtctcaaaagagaaaaagccttctaataatgtgtcagtgatccaggtgactaccagaactcgaaaatcagtaacagaggtgaaagagatggatgtgcatacaggaagcaattcagaaaaattcagtaaaactaagaaaagcaaaaggaagctggaagttgacagccattctttacatggtcctgtgaatgatgaggaatcttcaacaaaaaagaaaaagaaggtagaaagcaaatccaaaaataatagtcaggaagtgccaaagggtgacagcaaagtggaggagaataaaaagcaaaatacttgcatgaaaaaaagtacaaagaagaaaactctgaaaaataaatcaagtaagaaaagcagtaagcctcctcagaaggaacctgttgagaagggatctgctcagatggaccctcctcagatggggcctgctcccacagaggcggttcagaaggggcccgttcaggtggagccgccacctcccatggagcatgctcagatggagggtgcccagatacggcctgctcctgacgagcctgttcagatggaggtggttcaggaggggcctgctcagaaggagctgctgcctcccgtggagcctgctcagatggtgggtgcccaaattgtacttgctcacatggagctgcctcctcccatggagactgctcagacggaggttgcccaaatggggcctgctcccatgg

SEQ ID NO: 111623 - DNA, 5039 bp, Homo sapiens
agagggagccacctcctcccagagagcctccccttcacatggagccaatttccaaaaagcctcctctccgaaaagataaaaaggaaaagtctaacatgcagagtgaaagggcacggaaggagcaagtccttattgaagttggcttagtgcctgttaaagatagctggcttctaaaggaaagtgtaagcacagaggatctctcaccaccatcaccaccactgccaaaggaaaatttaagagaagaggcatcaggagaccaaaaattactcaacacaggtgaaggaaataaagaagcccctcttcagaaagtaggagcagaagaggcagatgagagcctacctggtcttgctgctaatatcaacgaatctacccatatttcatcctctggacaaaacttgaatacgccagagggtgaaactttaaatggtaaacatcagactgacagtatagtttgtgaaatgaaaatggacactgatcagaacacaagagagaatctcactggtataaattcaacagttgaagaaccagtttcaccaatgcttcccccttcagcagtagaagaacgtgaagcagtgtccaaaactgcactggcatcacctcctgctacaatggcagcaaatgagtctcaggaaattgatgaagatgaaggcatccacagccatgaaggaagtgacctaagtgacaacatgtcagagggtagtgatgattctggattgcatggggctcggccagttccacaagaatctagcagaaaaaatgcaaaggaagccttggcagtcaaagcggctaagggagattttgtttgtatcttctgtgatcgttctttcagaaagggaaaagattacagcaaacacctcaatcgccatttggttaatgtgtactatcttgaagaagcagctcaagggcaggagtaatgaaactttgaacaaggtttcagttcttagtttgtaaggtatattacattttatattcatttatgatagcagacaaccttttaagattgctttaattagtatctgatgttgatttttaagtggcattcttttccttaggactttttatgtatacctgttgattgttgtgtaaattttagtaaatctaagagagtgtactaaaccagcaggtatctgttagcttatgtgtttaattgaaattagaaggctaagatggtataacagcattttattgctttgtccagctacaacttgtcatttttttctccatgtcttatcttcctgtttcactttagtttattcttcgttttttattgagatctataaaaaattggcttacttaatagcaaattacttgaagaatttgcctgctttatataaagttagcactttaagatttttttttttagagatgagaagacatttaaattgaagaaaaattcccccagcaatagacagtctatcagtccaagtatttacttcctgagttttgatcaatattttttatttgtgtatgttaatcgtcataaaaacagtgattttggtgtgttttttattttggtgctttaatggcttaagatgttgcacattttttttttcttttggtttctgtttatgtttttttgcctatgcagttaaatttttcctagaaatagcatttgtgttgaacagtaacactttatacatatatatatgcatgtttattttgtttggcgtctttggagggatgcttttagacttgtttgcaaaagggcagttttctttttctttgctgcagttgtctattttgcagaataatagtgtgtgcaagtttgtgagcaaatgaaatatgcaggttcaatctattgattttgatttttacatcttatatctatgccagaatctgtatttcatataacttatttatttcgaatggatgtagtaaattcacagctatcagttttgattttgcaataaataaaccactaggttgcatgtcgaacaaatttttatctcaaataccaaccatcagttttttttttcatgtgttttggtacagctaattcctaattgtagagtgttaaatgtttgaggagaaccttttctcatagatggttggtgttcatatggctactttacaataaagagaactgtaagtgatatttggaaactacaaacctggaattaggagatataattattccttcaagttttatagaatatcacttgggagattccaaagccatagctattacgcggcaaacctaggataagaaaggtagtatgagtgctggtagaccagctgcaactttcctatacagtgaaaaaggctggtgaaacaagtacagtccagattttttaaaatcatactttctcagggatctccacaaactggtgggtgtcctggctgtctgtgtgatagcctctttctataggtgaggcctcaaatgaattgcagctatcctggtgttcctatgagggcactttgtatgaaaaagggcatgtactccaaaacatttttgtaggttctttggccagttgccaaagagtgtgaaagaatccaatagaggatttttcttactgatagcagtcattcattgcagtaaaataaaatatgatcccattagggaatcttgaattctgacctcccatactccgttttgaaataaccactttatatttcattttttaaaaatctgatgatctctttgaggcaggtttcagatttggcagtacaacatgaaagattaggaaaagcattaataacgtgtgggtggaaagcttgttaaaaatctgagagtgaagtttgagttaaaagttgtttgaacatggcattgactgggaggccaaagatttaaagaagcggaagattcttctcttaagacatgaggagtaagttgtgtgataatggtatgtgttttgtgtgcatgaatggacattgtaaatgttgaattctaggctccgacaatcattgtcaacagaagatcaagctgcaaatatttatgttttaaaacttaaattataaagctagttaagtctttctaatgactagttttaatgttcatgggtacattttacctaagttaccgtttacattgtatagaaaaagatacatcttaagcacagattggttattaggaattagtttggggaagaggtttttttgtggattctttcatactgcaaagaaaaaccatttgccttttggggaattgagctaacttctaatctagtcttaagactagaatgctaaaaacaaaaacatgaaggaaattaaaaccccttattattaaattgatttgtaaaaacattgttactggaaatttattggacttgaggccttcctccagaaaataaggacttgattgtcaggcctatattaggttctgaaccttaatgccatgtatttgtacttactaaaaattgtttcaatgaaaagtacattagcagtatgaacttctggtccagttggaagtttttccatttgaaaaatgtgatgtttgcatggaactgtttgaaacttttttattttctagtccccctcccccacactggatagaatttagcctagaattttccctttggataaaagaacaaaaattgaacatgttatttgtaaattgatgtttagtaattagtgataaacttgaaatactagcatatattataagccttaatcttaggtagtcttatgaaaatgaatctcttaactatcttttgaacctgtattcacattggttttcaagatattttaagttatattttttcctcttttcagagctgcttcttattctggggctacttttttttttagttgtgtaattcacaaagggctgcatttttttttttttttaataaggcttataactatggctggatcttttgctctagtcttctaagaagggccattttattttttagagtcacttctaaagtcatgtggtaattaactttggagactgttttgcgtatgagtgctgatacaaattaaaacccaagtagacctcattgcatgtcaccctatgaatgttgacaatggaaggaataccttgcctgtagtatactgtcacttctggattgataagctgaggaagaaagttaagtttcttttttacataagtcagaaaaacttacagctggtgttcctagtttcctggttgacctcagcagatgaagtgaacagatagtgttaattcagattgaagaaattatctgaatcttggtttgtgtagatttacaatctacatgcaatattaactaaatcagatagcttttacagtttcacatgtgtacataggttccctcccggtcccttccatatccattagttattgaactttctaaactggcattgaaacattacaacaatgttttgttgcaccaattttataaacttaagcagtgcaatacgtgttacttttctgaggcaaaccaaaggtaaatttctcaaggttcttgctgccttctttagcagcatttgatggaagatcttttatacatttgtaatagataaaaataaaccagattgcaaatccttttttaaaatcctaaaccatgtaccaagtttttggtccaaattatgtaggataagttaaacttaaattgcattctattaaccaatatgagtgtatttctgtaagcatagttatgttgaaataaagttttaaaaaccatgatgcctttgtttattattggtatatccagaatgtaggaaagccaaatttatgttgctggaactgcaagtgtattaataggcttttgaagattatttctcaggctgggcgcagtggctcacgcctgtaatcccagcactttgggaggctgaggcaggtggatcatgaggtcaggatttcaaggccagcctggccgacatagtgaaaccacgtctctactaaaaatacaaaaattagctgcgtgtggtggcaggcgcctgtaatcccagctactcgggaggctgaggcaagagaatcgcttgaacacaggaggtggaggttgcagtgagccgagatcgtgccattgcacttcagcccaggcgagagtgtgagactctgtctttaaaaaaaaaaaaaaaaaaagtatcacaggtagaaaagtcacagcatgttg

SEQ ID NO: 111624 - DNA, 1645 bp, Homo sapiens
agtcatgcagcattgcttcagctgcattctcttaagttacaggagagtcaaaatctacccgattcaaggagagggtgcatagaccactatatgtgatgataggagtgtcaagatcacattatagaagaccatgtcggatgggagataggcttgtggccatctttggaaaatgcaaactttcatacctgtacatgtatgaaatgttgctataatagattgccccaccttagggtattgcccagttgttggaatccttccatggctctgcccccttaccctgttctctgactctagtgtctgaaaatcttgctgatcaataaaatggaaaacttaacattcatacaacttacattgaacctttctaataaacctctttttatattggaagaatacctgtgtgacatagacataaattattttattaatgtaattgaaattttagaaaagtggggtgaaagcattacttattcagcagaaagtaaatatgtttctgctacttaaagtcataggagcaagatgttaactaagtggcatctcattgcaaatgagtacaatatttttgtttttacagatatgcaatatgatgaggatgatgatgaaatcaccccggatttgtggcaagaagcatgctggattgtaatcaggtaactttggaccaaactgaattagcctgaaaaggcactttagatttcctgcttattcttcttgataaatagctcttctatataaatatgctacatgagagtagttattttatttatatatttaacattttaagtatttcagatctaaaagttacacaaagaattcatttaatcattttaaccagattccgaaaatgttaccctgtactacatttctttgtctttttctctttttgtatatatatatttttttctgaaacatgtgagagtaacttgcagatcatttgaccctgggaggttgaggttacagtgagcgaaggtcgcaccgctgcactccagtcttggtgatagagtgagaccctgtttccaaaaaaaaaaaagaataactgcagacataagaacattcttttacataatcacaattatggtgatcttatttaatctatagaccttacccacattttgccagttgtcccactggtgtttatagcaaaatacaaatttttctgatcctggatccaacctaggatcacatattgcatttacttgtcatggcatgttcttttgtttcctttaatctggaacagttcctcagtgtgtctgttcttttttttaccttgacatttttgaagaatacgggccagttactttttaggatgcctttccgtttaggtttgtctgatatttctcataattagattcagatgattacttttggcagaagtgacatagtctcagtgcatcatatcaggaggcatgtttgtttcattactagtaatgttaatttgattgcttggttttctcattattttaaatggacaaagttaaaattggttgtatttcattccaaattcccatccaattctaagtgtaactaaatgtaataaaattacgagaagccttgtataggtaagaaaagtaacttataagtgataaagtaacatcctgtaaggttaggatgttaaaggcttataactcttctctctcttctctcatcccct

SEQ ID NO: 111625 - DNA, 1050 bp, Homo sapiens
cggttctcctatctcagcctcccaagtagctgggactacaggcgtgtgccatcacacccagctaatttttctgtttttagtagagacggtgtttctccatattggccaggctggtctcaaactcctgacctcaggtgatctgcccacatcagcttcccaaagtgctgggattacagatgtgagccaccatgccccacctctttgacatttttgtgtagttgctcccctgccatgtatgttcacgtactatacatatatctgtgctttagacataaaagagcaacaactttcactctgcccaaacaatttttgctcaccttccccacgcttttttttgcaatattcctcctgttgagaatatatgttgtagacctctacatgtttaaaataataccattttattcggcagtatgtttaagaatttgcttaaagaagtgcggatctatgcacagaaatttattgatcgaggaaaggattttaacttggagttggcaattaaaacacggatcatatctgatggcctaaaatactctttagctactggaaactggggtgatcaaaagaaagctcatcaagccagagctggagtatctcaggtaagtgtgccaactatgactacaggctcaataggaaacatgtttataggactagtagattcttttgtttgttgaatataaattattttgcttttctttcttggtcaaaggtaaaactactgggtgccgggtgtggtggctcacacctgtaatcccagcactttgggaggccgaggtgggctggatcacctgaggtcaggagtttgagaccaacctggccaacatggcgaaaccccatctctattaaagatacaaaaattagctgggcatggtggtgggtgtctgtaatcccagctactctacttgggaggctgaggcaggagaatcgcttgtacctgggaggtggaggttgcagtgagctgagatcatgccactgcactccagcctgggcaaaaagagtgagactccgtctcaaaaaacaaaaaaaaaaacttactggggacttttgaattat

SEQ ID NO: 111626 - DNA, 1047 bp, Homo sapiens
aaaaagtcagtgggtaattatgtagggcataattacttttagaaatagatgtttgaaaaattatgcagagtggtttagaaataagttttttttataattgtattcttagaaagtaagaataaatcttgaaatcacattgaaggaaaaatgtttatggaaaagaagtttgataggcatgtaaaatcagaatgactaatacttggtttattttttagggccatgctgtaggacttgtgaagaatttagccttgatggcgtatatttcagttggatctcaaccatctccaattctggaatttttagaagaatggagtatggaaaatttagaagaaatttctcctgcagctattgctgagtgtgtatagatggaattagttttttaaactatagttaatctttagttgttgcttagtatagaattgttaagtgtaaaatgcttttgctttttcattgtagtgcaaccaagatttttgttaatggctgctgggttggaatacataaagatcccgaacaacttatgaacaccctaaggaaattgagacgtcagatggacatcattgtgtctgaagtaagaatctttagttaagagggtgtggactgtgagatttttaaacaaggcataggactagtgaaagttatctttgcattggcatcttttctttgaactttattcccttgaactgtaaagtgtaaatttaattataagttattgctaggccgggtgcagtggctcatgcctgtaatcccagcactttgggaggccgaggcgcagatcacctgaggtcaggagttcaagcgcagcctggccaatatggcgaaaccccatctctactaaaaatacaacaattagccaggcacggtggcatgggcctgtaatcgcagctactcgggaggctgagacaggagaatcacttgaacccgggaggcgggggttatggtgaggtgagattgcacctctgcactccagcctgggtgacagagtgggtctctgtctcaaaaaataaaaaaaagcctgggcatggtggctcacgcctgtaatcccagcac

SEQ ID NO: 111627 - DNA, 1083 bp, Homo sapiens
ttgttttctgtgtgggctgtagtattagagttcagaatagtttgtaatatttggaataagggtgtgattcatggtatagagactcctgtggccttctctctgacttggaactgattcatgtatgtggtttttaatctttgttggggattatgtgacattccgtgtctatttcctcacaggcatgaggcatgccatttacgacaagctggatgatgatggtttgatagctccaggggttcgtgtatcaggagatgatgttattataggcaaaacagtcaccttgcctgaaaatgaagatgaattggagagcaccaatagacgctataccaagagagactgtagcacttttctcagaactagcgagacgggcattgtggatcaggttatggtaactctcaatcaggaaggatataaattttgtaaaataagggtgagtacaactttgttcatgtagctagttttagaaagtaaaccaaatccacttaactaacttatttttatatgaatttaggtacgctctgttaggattccacagattggagacaaatttgctagtcgacatggtcaaaagggtacttgtggtattcagtatagacaagaggtaggtatctttgatctccctcatgcccaaaccagttttgttaaatattttttttttaatcaaaatttgctttaacttaagagctcaaagatgatacaggttgaactttttgattttattgttgaataagtatatgaacataccatgtttaaacagaatttgggacatacagtaattcagttgggagaactgaaatgtcagttctagtttagtatatgtatctttgagtcccttttaaaatttttctttgtaggatatgcctttcacctgtgaaggtatcacccctgatatcatcatcaatccccatgccatcccctctcgtatgactattggtcacttaattgaatgccttcaagggaaggtaagagatgttcttcaaaaatatagattctaagctgatgcttcttctaaaactctgataggtgattgctctcacatttgagccagggtactttgtaaaaagctagtgtgagacttacttt

SEQ ID NO: 111628 - DNA, 1433 bp, Homo sapiens
atttttaagtattcttttaaggtaaagtggtaatagtctaacatatggatggcttggttttagggcattaaaatgtcattttcctttgagccatctgaagtacttaggagtctcactctttttgtacctgatcccatggatcgacttctatttgaatacttataattgagtttttcttttttaagcaagtttatttgttctaaatgttttgtgtaaggttataaaatgaaccttatatatcacagctttccataacatagattttgagttcaaaatctttgaattttaaaatacttaaaataatactttcaaattttaaaagtatttaaaaattttttgaatgcatttttattgatatgacttttagggggagacagactgaagcaacattttaaagagtacttttttttttaaaaggtatcggctaacaagggtgaaattggtgatgccactccatttaatgatgctgttaacgtgcagaagatttctaatcttttatctgattatggctatcatctcagaggaaatgaggtatatttgctcttatagtagtaatttgccacttgtttttttttgtatgtgtgtagttttattctgaaacaatgtaaccttttattgaagtatcatatgtgcacatatagaaatgtacagcttgatgaattttcacaaagtaaacacagctgcatgactaacaccaagatctaaaaatgtgaaggtagcgactgaaccttttttagtcgctacctttccactcccaccccaagctaattactctcttaattgctaacattatagattagttctgtgctttaatttttatataaatggagtaacacaatatatacacatatcttctttgacgttgtttaatttttaggtctacacttcaaaatctgtgtttgttgcaggtcctgtacaatgggttcactggtcgaaaaatcacatcacaaatatttattggccccacttattaccagcgtttgaagcatatggtggatgataagattcactctcgtgctaggggacctattcagatcctcaatagacagcccatggagggtagatctcggtaagaactgtatcatcatcattattattaattaaccttatattatgaaaaatgtcaacacaccaaaatggagatagtggtatagtgaatgcctgtgtgcctgttacccccatttcaacaattatcgactgatggccagtcttgttgcattcatctctgtccttctaacctttgatattatcatcatgttttaaaggcagagtctcactctgtcacccaggctggagtgcagtggcatgcccacagctccctgcagccttgaactgggcacaagcaatcctaccttagcctcccaagtagctaaattaatattgtctcttaagtccttttttgaatttattggttgtcctccaacctttttttt

SEQ ID NO: 111629 - DNA, 1010 bp, Homo sapiens
aaaccagtttaggttttagtgtggtaatttctctaagctattcatcttttggaaataataagactttgtacaagggattttaaacaatgagtttttgaaaaccttttagttgaggtgggtgaatataaattatgtctggcagaatgggtaaaataccaaagcctactaggagaaagaaccaccataagctgaggtagcagaatgtgtgttctcagctccactcatttattcattatctacagtaccagatctttgtctttttctggggtagagaagtggggtcacttcaatacaattctgctaattaccatttgttttttcttttcagatttctttggtgcgaatgccttacgcatgcaaactattgtttcaggaacttatgtctatgagtattgcaccgcgaatgatgagtgtttagctattttacaggagtcaacaagataattaaatatcttggtgtcttgtttctattgtgtggctttttaaaaatgacaaatatgtactgtgttgtgataaaaagtattttatttgtttaatgatatgcatgcttttcttctgtaaatatataataaatttttgtagatagtcttgatgtgtgatctttattttgtatttctctgtgtaaaaccagtgaatataactaaagtgttagtggattggattaaaagaaacttattaggcaagaacaggtaatgtagttatccatgactacttttaaccatgcagactaataatattctggaggtttatagctcggcaccttcacctgtttaaaaaaaaaaaaagataaaaattagttacatatggggatgtggttgacttttgaattggcaggtagttgagtgtttccaaataaatgaagatgttaaaatatggggataaaggatatatgagtaattgtataaatgatatgctggagtgctctgtggaactcaagttacatgattttagctatgaaaggcaattttgctgtattggttgatgcatcaaaggtacatcttattatagaa

SEQ ID NO: 111630 - DNA, 1043 bp, Homo sapiens
caagtttgattttgactcttacatgttagataaggtaaaagcatctaagtcataataacgatgttcagtcacccatccagataatcttttggagtctcatgctgtacattttaatggcatacttaatgcccttatgggttgctaactacagaatttcatcaatagctacgtctgatactttcatacttagttctgttctttttaaagcaaatgtactagtcatttttaaatggctgtgagatttattgtgtaccttttttcactggtatttcatgtaaggcatcaaccactgtaatttttgctgatgctgaagcctgtccttgggaattggatgcatggcactcatattctccagcatcttccttacttagaggagatacctgtgaaagaaaaaagatctagtattcctctgtggtggtcttctcttttgtcagtggttccagtgaggtcattatttcataaatttcctaagatgaccaggggattcatagcaaaggtactgctagaagcagtgcaagtcctgtgataggagacttcgataactaccatatttggtttgctgaggattcatatgaggaaatgtcatggacaacttttgatcatactgcataggttaaaaactggataggtacacattatcggtttaagggcaaccttgataagggtatatgatcaaagtattctccatgaatatccagggtcaagtaaaataaggtatttattaatcgataatcagttaaaacaatgcttgggccacgcagctccgtgtgaggattttgctttgaactcttaggaaaatactagttcttgttaattcattggttgttttcaaaacatgcaataaagcacttttcctttagtttctctgaaagaggagcagcgactccatggtaaggctattccaaacagatgtggaagagcaagcacctttaggctggcggtacatcaggcacctttgccaggtctgcttatgtctaatgctaagaatgaaactcttgccagctcttggtactggtactcaccagcacccagccagttacttc

SEQ ID NO: 111631 - DNA, 1046 bp, Homo sapiens
cctcagaataaagtaatggtattggctttggtctcagcctattttccattgatgaagctgttgcaggaagagccccaaggtcccaagcatcaaacctagtgctgggtgacagttcatcagttgaacatggcatgacaggcaaaaggcctggaactgagaagcagaatttccaagagcatgagtgaatgaatgatggtgaccagtggcaggaaattatgaccatgtatattccccaggcatgcagaaaaatacattagtttaaaacatgtacgcttagcaggaaactggcaggaagaaataaaagaggatctatattttaaaagtatttaggaaagggaaatagttcagtgaaatgctgggtttactctgttagaaagtctgacatacactatgtgcaattgtagggatgtggccacttccaagtagatgatctggtgtacaaaactcagtattactctccttttgtttttgcaggtaaaaaggggtcactatggagttcaaaggacagaactcctgcctggtgaccgggacaacctggccattcagacccggggtggcccagaaaagcatgaagtaactggctgggtgctggtgagtaccagtaccaagagctggcaagagtttcattcttagcattagacataagcagacctggcaaaggtgcctgatgtaccgccagcctaaaggtgcttgctcttccacatctgtttggaatagccttaccatggagtcgctgctcctctttcagagaaactaaaggaaaagtgctttattgcatgttttgaaaacaaccaatgaattaacaagaactagtattttcctaagagttcaaagcaaaatcctcacacggagctgcgtggcccaagcattgttttaactgattatcgattaataaataccttattttacttgaccctggatattcatggagaatactttgatcatatacccttatcaaggttgcccttaaaccgataatgtgtacctatccagtttttaacctatgcagtatgatcaaaagttgtccatgacatttcctcatatga

SEQ ID NO: 111632 - DNA, 1246 bp, Homo sapiens
cacgccactgcactccagcctgggttacagagggagaccctgtctcaaaaaaattaaatagtcagttgcagttgtgttctttaagttcctatctttctgtcagtgccacctagatggcctgtcaaaaccttgacccagccaccaccagcgttgctgctgcctagccaccaccagcaggggtgctgcccggtaccttgtgggcaaaaggctacagcaggagttggtgaccttcacaatgcctagtgacacagggatttctgccttgcctgaatcaggcaaccttttcaaatgggtggggaccatccattgagcagctggcacagcatatgaagacctgaggtataagctctccctagagctccccaggggctacccttacaatgtacccatggtgaagttcctcacgccctgctaccaccccaacatggacacccagggtaatatctgcctggacatcctgaaggacaagtggtctgccctgtatgatgtcaggaccatcctgctctccatccacagccttcgaggcaaacccaacattgatagctcgttgaacaggcatgctgccaagctctggaaaccccccacagcttttaagaagcacctgcaagaaacctacttaaagcaggtcaccagccaggagccctgacccaggctgcccagcctgtccttgtgtcgtctttttaagttttccttagatggtctgtcctttctgtgatttttgtatagcactctgtatcttgagctgtggtattattattattattattattagtcttttaagcctccagttgagtgcttgtgatgtatattaaataaatgcattttgggttgggcatggtggtgcagttctgtgatcccagcactttgggaggctgagaggggaggattgcttgagttcaggagttcaagaccagcccggacaacatagcaaaaccctgtctccataaaaaatgtaaaaattagctgggcatggtggtgtgtgcctgtagttccagctactcaggggactgaggtgggaggattgctcaagccagagaagttgaggttgaaataagctgagattcctgccagtgcactccagcatgggtgacagagtgaccctgactcaaaaaaaaaaaaattaaataaataaataaataacaacaaaatgccccagaactgcccaagattactagtgtctctggctcatgaggtcagactaggaggggcctcttcaaacagccccctaagcttccacaactacagt

SEQ ID NO: 111633 - DNA, 1050 bp, Homo sapiens
tatgagagatattgctaatggccatcaccctaatagaaaacttagaaaattttgatttaattcatgagaatctagcttcacgtatttgtttcatttctagatgatacgtattaaagtctttatacttgcaaatatttctgaggattaaagaatacttgtcctcccattttccaagatctaatcacaatgattcccagtccttacattataagatttgatcagatctgttctttgtttcctagcagcatgtgttccctagcagtcatacattccacaggtcctgatgtcattagaactgtgtgtgtcagtgtattgtgctgtctttagctgaaggtgaatgtgtcagagtatttgaatgccattccatagctcttccttatcactaagtattcagtaacctgatctatttgtgtatatggttgactagactatttctacaaaatcagggtaggaggaatgattaactcaaagttttatatgaactattaatttttttttttagatagagatgttaggctgcatcaggcatccccggcctgaagagtgataagccagtatgtgatttgcctgatgggtaaatgcttttgatgtctcatttttggttgcttggtgtgattatccttcagactgagagtgctcctcaaaaatatgaatggaaagtctttcagaaatgattttcttaatcatgatcttcttaacattttgcagatttaaatactcttttccacagggaataatagcaagtatggcacttactggctgcagctactgtggctggcattgtttctactaattaggaaaggcagattttttttatggatttgatttaccattgattcctttgtgagctatagccaaggaaatcataaatagtagattaaaaagactataaagtcatgaggattgaagttagtcaaataatatgatgcaaaactgaattgtttttcagattggatttggaccactttaagtgttggttgaaactctctttgaaaaggactgccaagtagaagtgacagttactgttagaagtggggagttttggcccag

SEQ ID NO: 111634 - DNA, 1057 bp, Homo sapiens
tagggacaggcatggtggctcacgcctgtaatcccagcattttgggaggccaaggtagatggatcacttgaggtcaggagttcaaaaccagactggccaacatggtgaaaccccatctctattaaaaacacaagaaattagctgggcgtggtggcacatgtctgtagtcccagctgcttgggagcctgaggtgggagaatcacttgaacctggggggcgtaggttgcagtgagccaaaggttgcagtgagccaagattgcaccactgcactctagcctgggtgatagagtgagaacctgtctcaaaaaaaaaaaaaaaaaaaaacacaaaacacacacacacacacacacaaaagaaaatatataggataatattataaatgaatgattctggaaatagtctgcttcaacaactttggaggaagactcataaacagcactggacaagaagactcaagatatgaattttagctctggatttgctgatgggccaacattttaccttctcagagcttcagtaccctcatcacaaaagggctataatatctgccttgcctttatctcaagattgttttaaggatcaagtgaggtaatgcttagaaaagtttgtgaaccatgaagtagtgtaatatcattataatttccctgatttgagtcatcacccctttttagaagaattaactgaacacgctgtctgctgaagtcttatcactctgtgctagagccttaacccaggctaggctacaacatgacaaaagcattatgaatttaatctttggtaaatgccattagagaccttcatcagggtaatggctctgcaccaccctagtacactacaactctgattatagtgcacaccacacttttgcccagttataaactatatgattgcaaaaatgaaaacttcagttcaattttctatgatttttccttagcaaatttaatattccagagaatttaaaatattttacataatgtaattttttatattgacagtcaatactcattacctctcacatttatttagcaattatgagttgtcagatatttggcaagtt

SEQ ID NO: 111635 - DNA, 5472 bp, Homo sapiens
tagataatctggactttatgctacatcaacatgatgtcatctgagccttgatgaaggtatagggagaatccatgaacatagtttgatctggcagagagcagtatggaagataagtagtggaaagggactaggtggaggccaacggattagggccagtaatgccattttaatagactgaaatcacagggagtgtaagagctgggattagtaggagagggtcatgattgtgagaggtttcagacttttaaagcctgctgaaagtcctggttgtgttgttctttatttagttggaaatgcattgttttggaatttagaaccagggccatggttaacctgagataagaagaaatgggtttaatgtgtgtatatggtagccataagccatggaaggagcacagagtaaaaacatttaaaggtgagtttttgatgaacacctccacttaaagaagtagaaaatgaagagtgagtgaaggaggccaataagggtgaatgttaatgagaaatttagaaggaaacctacaaaaataggacaatgtgactgtcaggttttaacctgagctggggtccaaagggagttgatggacaggtggtgggtaattgaaagaacactcagggggtgaaggggcataggcaggtgggacatggctttattatacgctgtccctcacagtgtcagtgatacatttatgcacttcacagacaacagtggctcagagtcaggtgatgagccgactcataacatggtagcataactgtgattatataatgcatgggattgtgcacctgcgctctaatcctgctgcatcatgctgtaacagatgtttaccttggcctactcttgactgccgcacagccattttccttacactccaccccctaggctgagggggtcctcttagtggggaaacttgcccacacggtggcaccctggacccataggccacagcagtaatacaagaagcaacaacctactactaatatccctgttacgctccccatgattatcagggcccaacgtaggccagagctcagggatgcccaccatctctgtggggggtcattagtaaggctctcaactgcttcaacctcctgtgccatctcttgcaaggctgctattatgttttgttgattttctggaataaatgtacaacattgtgtccctataagggcacagatgccaccttgggcagcttactatatctaaggccatccagttttgcagcaccatctttcatctttctggtttgatcaacctcattggttaacaggaggagggtgacttgggtgtaattcaggggccaagctgtgtgctctgcaagggctgtaacctgtgtttctacagtaatgacacctgctccagggatggtcaaagctaaggggtagagccaccaaggggcttgcagcacttgcaaaaagtgggaacgtagcacctcccagttgtgtgggcatctaggcaatgtgggaagcacagtggcaggcacaaaggccatccccaggtacaagggccagtccagttcactggtgcatatggccattccatgtctccacagacccataaactcccagggggcacaaagtccattggagcttgacgttgatgaggccacctattccactacacccttggtgtggtgatatatgttatatttgtgcaggctatggtgggcaaataccccatgttgacaccatcccattgttgctgtatacatcgtggtacctgtggggtgggggcactatgtgttcccctgctaaccagccccattcatcatagacattacaggtcagccaggggttgagcatgtcataggttttgccatgccccctatccaaagtttaccatttcacattccaggcatcgcccatgggaccccaagtctctagccatgtccagttctccatagaagctaagtgtatgtggcagggcaagccgtccatagctgctgctggaagggtggtgcagatcctacagttggaaagattagtcacctcagcataggtgtgggcccatttcacaatgcttttgcagcatgtcaatctatggtcgaaacgacaaagcaggcacaggtactaacaaggatgaatcatgcccttcaggcaaaatacaggctaaccattcatttctggtagctgccagtggcttctgcccagggtggtgctccccatggttcctttgggtcctctatctgtgctaaagttactggggagctcatattaggccacacagatggtacagatgtcccacagaggagggttccttccctggccattcccctatgaacagtcattcacggaggccatatattaaatacccaaggagtgacatgtaaatcacacagtaggccctcccccctggggctatggtagccaaccatctgcaatgggccttcgagagtccatggccaaagccaggttttttgttatcctgcctttaggtgcattgaggcaggcaacagcagattaccattcgtccccatatctagtgagaggaggtcatccttggtgtctgtatctgtaactgaatggaggcagtggcccagtgtagaagtgccccactggggctgggccacctttctgtggctgttcattcaaggtttggagcatcaggtccaaccttgaactacagccccacaaaggcaggagaataacatgcaaatgtaattcattttccataagtcttgccacatggcgtggctccaaatgagttggtgaccaactagccaattcggtaatttccaggtagttaaccacaagattgggccctggtaaactgcccatctattggtgcagattgccataggtgtctccttcttggtgatcaccatccacactgctctgagttcagcccactgactactttgtccacacctgataacaaatcatatggtgtcagtactaggctggaccgcaacagcagtccaggaagcagtcgcaccctggctggacccatccatatgccatgccccatcgggaatgggggggtgcccctctcctacagagtcagcagtacagttatgtttttcactttcactgactggcctccatagccgtctatgtatgcagccttgcctggaaacttatctaggttcccatagacgaggctacactctgcaccagcatttaccaatgccaacactggggagagtggattgccagttccacatatggcctctggtcatctggtttccccccaagccaggcaccttggccagttccctaatcaaacacaaaaggctctttacctccacccaccttcaagtagtctttgagctggagcatcctggtggaactgggtcgagcaacatcatcctgccccgtcttgggcattttctggaattgctgctctggggacaattgcctccacaaagttaacagcacttcactgggttgcctatcagttttatctcggtcaaccccagcccaaatcaagtcaattcccatctgtgtgcaggtcacccactggggcggttttttgtcccacgaggtggcccctgtggaaggggtaccttccccttttttatggcacaaagtccctggtcctgccaatggccctctgcttctctgagggccaccatggcagtagtcatctcatgtatgcagtgccccatgtacagagtaaggacagtggccagagagccgaaagcactcaggggtgcagagctcaacacaagttccctcatgtgggagggaaagcattcaacatatggccctcaggtatttaaatcaaacaaaacttgccacatacccatttcctgaattacctgcaccagctctgcatatgaatgccatttactcacagtttttggtatttctctggcattgttccataccattctatgacagccatcagccattcagtcagggtgtggtcgcctcgcccctgtgttaaccgcctgctcacctgcaatcgctgttggagggatgggtcataatggaggccaacttttccatttcagaggcagagcagacaataccatcagctccctcatccaaaaggcaaagcatccaggtagataggggttcccccatgcactgctgacactgtttacctaatttatgcaagtcagttggggtataggcactgtatgacatgtgctccaccacagtaggaggtccctgaacccccacgccctggggccccagtggctgttcctgctctattttctgacggaccactgggtgagcctgcagtggaggttcttcctccttggtatcagacctggcgggggtctctgactgggatggctggcccaggcccacactagtggcaggccctaattctcgtttcaagctgtatgtccggatctccaggcgctctgcttgaccctggaggtcccttacctgagctgtatccctcagggactgagtgtgcacttcctgtagcacagtcaaaaacgcccatccaactctgccggcaaaggctcgctccttttcagtgctctgtgcttcaaagtgcttcagcgccttctccatggtcatgggagacccgtccaccatcacccgtgttttcaccggggcccatctgagcaggaaggctgccacaaggtaacacaacccatgctgagaccacatagctgacccaggaccatcaggggctgaggactcactcacctcggaatcctgttgactacgccaattatcaggttccaacctgagctggggtccaaggggagtgggtgaatggatggcaggtagttgaaacaacactcggggggccgtaggcaggtgggacatggctttattatgcaccacccctcacagtgtcagtgatacatttatgcacttcatagacaatagtggctcagagccaggtggtgagcccactcataacatggttacataactgtggttatataatgcaagggattgtgcacctgtgctccaaccctgctgtgtcatgctatgccagatgtttaccttggcctactcttgactgctgcacagccattttccttacagcgacagaagataacattaaagggaatgttaaggaaagaccatcaatagtttcaaaggctaccaaaattagatctgaaaaaattctagtgccagaaaattagtttatattcaaatattgagagacagtgtatataacttactaggtaagagtagattcaggagtgtgttgtctgtttctgccacttaccggctatgtgatttggtagttatgtcatgcctagcctcagttttctcatctgtaaaattggagtgataatagtggccacttcatgaatacatcatgagtattaaatgaattaatatttgtgaaatgcttagccggtatctgtaacatagacctatctaactgtatctctgtaactatcatatatctcacatgttctggatatctagctatcatttatctatctatctatctatctatctatctatctatctatctatatcatctatctatctatatcatctatctatctatctatctatctatctatctatctatctatctatctgtca

SEQ ID NO: 111636 - DNA, 1068 bp, Homo sapiens
atcaatgaaactagttcacgtgtttaaaactctttaacaacaaaaataactatgatctacctggttctctcaagggcaatataaccttacccactacgactatgtctgtgcaaagttaattacgacatcatgcaaatagcacctagcaccttttttatctaatagatttccaatgattcaatgtactggtcattatgtattagagatttattctattttttccaggtttctaatgtactttaaatctatattttactttaagttactatttttcttttttgaaattaaatatgtgaatacattctcattcatagtatagatttaggtaaattatgactacacatttgtttttggcatgaccatatgttgaggtcatatttctcaaggtaagtttcatcaagtttataaaaaaagcaatagggatttaaaaaataaactatactttataacttatcgttttgagttttggaagtatccggtagctgtctggagggtaggctgagagtgggaataaggatggggaggagtatgttgagaatggaggctgggggtaaaattagttgttgcaaaagacaagtaatgttgggagcctgacatggtttggctgtgtccccacccaaatctcatcttgaattgtaattctcacaattcccacatgctgtgggagggacccagtgggaggtaactgaatcatagtgtgggtctttctcgtgctgttctcgtgatagtgaataagcctcatgagatctgatttttgtttgtttgtttgtttttgatggagtctcgctctgtcgcccaggctggagtgcagtgggcgatgttggctcactgcaagctctgcctcctgggttcacaccattctcctgcctcagcctcctgaatagctgggactacaggcgcccgccgccacaactggctaattttttgtatttttagtagagacggggtttcaccatgttagccaggatggtcttgacctcctgacctcatgatccacctgcctcggcctcccaaattgctgggattacaggcatgagccaccacacccggctgagatctgatggtttt

SEQ ID NO: 111637 - DNA, 1045 bp, Homo sapiens
gtaagagctcagtgtatttctggtgaaaacacacatcaatgacataaaagaaagtaaggcaaatgttaaaattgctacattacaaatcataaaaaagagaaacattgaaattctggggaaatttcaaaagttaaatttatatgcaactaattctgtttaattgagaagtgttgcaaatttgataacgatgttaactctctgtctacccattttctagcagaaaacattcatggagttcttaaaaaggtctctaacaaatgaaggatataacaattcaccaagcagtgattttaacccaatatccctatgtaaagtagctatttaaaaatactctcctaatgtacttttctcagtttatttttccaaaataatacaattattaggtagggggcaattgtatcattatagtaaactataatatgaaaaacttggattaattggcaccatatttctattatccatctatttaacagaactgaaaatgttgctggtataaagaaaatattgaaattatgtgtttaggataaagggttatggtgctggaaaaataatattagaattatttcaaaggagaactagcaggagaaaatttgcctctagaaccacagaagctaacaacaagagtaaaactataaaccagggaagtcacaacaaagaggtttgttccctagaggacagagccaaggaagttggcctgctgtgcttatgtttttaaagttctgctttaaatcctatcttggcaggctaagaaaaacataatgtggtaaattttcttttcctgctgatagatcagaaaacattcagtagcactaattcaaaaagcagaataagaaagcatgttgaaggcacaggaaacaggccaggcgcggtggctcatgcctgtaatcccagcactttgggagaccgaggcgggcggatcacgaggtcaggagatcgaaacacagtgaaacctcgtctctcctaaaaatacaaaaaattagctgggcatggtggcatgcacctgtagtcccagctactggggaggctgaggcaggagaatcgcttg

SEQ ID NO: 111638 - DNA, 1081 bp, Homo sapiens
ggatgaagtggctgaggcaaccatttcttttcttgcacctggctggagaaatgaaattctgtagaaccaatttaccctgcggatgtatcctagccatgtaataaaaggggaaagctgcagtttagttttactaggcatagatttgttattttgatctcagtatatcttactcctgtgcttattcatcatttgattctgaatttggtagggaagaaaagagtgtaatttatcagttgtactgataaattagctactgccaggttaagaagctacattaaagaatgaatagattttgcagttacaaaatctattcattctttaatgtagcttcttaacctggtagtagcttttttgctgtgcttaaatttacatacctactttactgatttagctacttcattttgcccaaaaccatggacatctttcagccctcaccttactcgattgcttgatggttcttgatggagttagatgttcactttttatttaactgctaatttttctaatttgttttcattatttcatactttcctgatacaactactatttcaatggctgaccctttctttttctttgtttactttttgtttattcagactctaattattgtacttcctgagggcttggctctgagatttgttcctacatactctctgtggtaagttgtattattgtacaccaatatttattttccctttcttttttttttactctcagccttctaacgaaatataatttttttatcccattggcgaagtgacactttttctagcttaatgtgagcaggtttgccacatgctatgtctgagcaagagctacaaatacaatagcataatttggcttagcttctcttgtttttccccgcttctgtgaggaaagtcacatcctacattgaaggtatccatattccccagtctagaattaaaaggacaattgtagaagacacaaatatgccccacagactagagcagaggcacaaccatcccacagaatccacaaaaacggaatgagaaataaacctgtgctgctgtcagccactgagcttttgggcttgttagttacacaacataaactctcaaga

SEQ ID NO: 111639 - DNA, 1116 bp, Homo sapiens
cttcaaattgttgggaacaaagaaaacattatctgacctgtttatcattcaagtgtcagacaattcatgaaaaaaaatgtattgttacaaaaggagatacaacactgttaaacaataaaacattattttcttgtattattgttttaaattaaaaaatgtattttttaactctacaaagagcatcataataaattgtcgatttgttcaataatagttaacagttagttaggtccttagcattaagaacctaactagtaaagctcaaaacagctgtaacgtgtcttgatgaatggtataaattttaaatgttcttgttaatttgaatttctcattttactaaataatgcaagaaaaaaatgagccattgtaactaggacaatatttggattacattagtcactgattcaatatattgccacagtaggcattcaaaaatgatttgaatcaattttaaattcatacatatatgttggataatattatgagcgaagaattgtactagatagtatagggtacataaagaagatgatacattacatgttatcaaggagcacatccaagcaggtcatacacattatataagcactatgtgttctttttcaacctttcagtgaatatatagacattcttagagaacaaatataaaataaattccaaataattgaagatgcactgagggagccctgatcctctatagacaattagaaaacaatttgcttttgaacataggtggaaatgaagagggaaatcagactgaataaaatatgcttaaaacctaaatttaaaatccatagcttagagaacaatagacttgataattgttgaaactttccatttaagttatgcattttgttctcttttaagcaggcacctgattatttttttctacatgaaatatagttaataatagtttgtaacatatggatagataattctaccaaatgatgatgacaatagtaagattaacagaatattgcatgattattaaacagttctaaatgcaaatttgttttctagcttgctactatggcaaaatgtcatatttaacatttttaaatggtggaatactttacattttatatttaacataaattttatatttaaatataatatttt

SEQ ID NO: 111640 - DNA, 1038 bp, Homo sapiens
ctttatcctagaaaaggtacctgttcccctgaaaattaatatgattagcctgaagacatagtgaaaaatgacaaccactttattaggttactaagatcatcttttcctgtctattcagaaaaacaaaggtttcaataattcagaattataatccactagtgataaaaacaaattaatcactattatcattaaatatacaatattagggcccactgagagccatcccagtaacccgaccaccgctggtcttcactggacaccatgaaccacactgtccaaccttctctcctatcaacagcggccagccccccaactatgagatgctcaaggaggagcatgaggtggctgtgctgggggtggcctacaaccctgctcccccgacgtccaccgtgatccacatccgcaacgagacctccgtgcccgaccatgttgtctggtccctgttcaacactctcttcatgaacccctgctgcctgggcttcatagcattcgcttactccgtgaagtctaggcacaggaagatggttggcgacctgactggcgcccaggcctatgcctccaccgccaagtgcctgaacatctgggccctgattttgggcatcttcatgaccattctgctcatcatcatcccagtgttgatcttccaagcctatcaatagatcaggaggcatcattgaggccaggagctctgcccatgacctgtatcccatgtactccaccttccattcctcaccctgcccccggagccgagtcctgtgtcagccctttatcctcacacacttttctacaacggcattcaataaagtgcacgtgtttctggtaaaaaataaataaataaataaataaataaataaataaaaatatacagtattacacacttacccttatatgatatccacatttccaaaaatattcagttgcatcctcctctttgctcactcatgtttaagtttttcctatagcaaattaaaagggaaagatacaggaaaagagagaaagagggagtgcgagcaagtgagcaaatcaaatgaaaaactg

SEQ ID NO: 111641 - DNA, 1061 bp, Homo sapiens
ttattccctttaagctacctttatcttcatattctctccagtctcttccctgctgaaacatggtttcaacaacaaacctgacctctttctctgtaatgtattcctcttttctccactttctaaaaactatctcagggcagtctcaacgacaaatatggctttgacagccactataagctaataaccccccaaatttacacatttctctcctgagcaacagaatggtaatgataacttctcatttgtcatctccacttgggtgtctgacagacaccttcagtacaaaacacacaatagtaacttcttaacttcccctcaaaatttgttctttctcctacttccccttctccttttttaaatcccatactttatttcaaaacctctttttgtttaatgctatcactagttacccagtttccagaaccatggatctggagttcatcctagacaatttcctgtctttagatgcctgaaagagtgtttcctatgggattccaacagcagtgatcagggcaaaaatgaatggctagagaggaagacataaagactgtttttgaagacacatgagttacttccaggaatccccataagtaactgagggggttattaaagaaggcaggatatgtgatatcaagaacaactacaaaccagaggaatttaagttactcaattttacccaaaaactaataaaacctagacatttccaaattacatagtttggatgtctgtttcttccactatattgtaaatctctggagatcgtgagctatatttcattaatctttgatttctcagtgcctatcatggtacccaacatactgtagatacttaatactatttaatatttaaatgaataaattcatataaaagataacttttccggagccatttactttttttatgattgaggaaattcagtggcagagtgagccttcctctgagtccctgatcagcgaaggagtcattgctccattatctttctcatcaggccattcccattgagagatgcgcttcaggccagggcttctggattgcttgtcagcaagtcatcttactctgca

SEQ ID NO: 111642 - DNA, 1439 bp, Homo sapiens
aaatttaatggcttaatactcttgggctgggcgcggtggctcacacctgtaatcccagcactttgggaggccgaggcgggcagatcaccaggtcaggagatcgagaccatggtgaaaccccgtctctactaaaaatacaaaaaaaaattagccaggcgcgatggcgggcgcctgtagtcccagctactcaggaggctgaggctggagaatggcatgaaccctggaggcggagcttgcagtgagccgagatcgcctcactgtactccagcctggatgacagagtgagactccatctcaaaaaacaagaaacaatactcttgtattatctatctcacagttatgtagagagaaccatgagcttgaccaggtattctctttagagtattacaagactggaatcaagatgttgacaggtttgtatttctttctggaggctgtaaggacgaatctgcttccagtctgcttccagtctcgttcagactgttggcagaactcagttttaagtggttgtgggactgaggttcccatttcctcactggctgttggccagggtgtcattcttagattttagaaataactcatgtttcttggcatatggccccacatctttagtgccagcaacggtgcaagtccctttcatgcttcaaatttctgtgactgttccttctctttcgtttcttctctgcttccagcaggagaaagtactctatttttaagggcttaatgtgattagattgggcctacctacattatcaaagataatctccccatctcaaggtcccttttgccatgaaatttaatgtatttacaagttctggagattaaagccagcacatttgtggggagtcgttattcttcccactacattttaaggttcctttgaagtattatcatggttcagttttgaatgagatttttatttttatttttacaggttttttatgttaactttggtgaccttttgtgtactttacatgaaacaccttatatattaagtactggggattcgttctatgttccttcaggtaagacaatttatttcacttagacaacatgtatatagttgtttttgggcactatggaaatggaagccacagtggtcaaaatgaagtgtgatatgactgatggatgtcagaacagtttggtacatattttcctttcatttgatcattaggtaagtgtattagcattttgtggtggtttttttttgtttttgagacagagtcttgctctgtcacccaggctggagtgcagtggcacgatctcagctcactgtagcctccacctcctgggttcaagcgattcttgtgcctcagactctcgagtagctgggactacaggcacgaaccaccacatccggctactttttgtatttttagtagaggcgggattttgctatgttagccgtaacagatcacctgacctcaagtgatctgccc

SEQ ID NO: 111643 - DNA, 1057 bp, Homo sapiens
acttcagaaataataccataggtaaaattcattttttaatgtctactttcttccaaatggaaagtaagctaattttattcttaaaaaattattaatagcatattataaatttcttcatgagtaaatttcccagtcaaatgaaacccaccattcctatgcccaagctatggttaacatagacatttctaaagtgttttatatacctctatctcacttagagattatgcaaaacatcacttaataccttgataatgcaagagtttacatgttaaggcttacagaaaataggaagtttagggtgtttgcttttatattaaatcattatgggtttttaagtttgaatttttgtttatcagagtgatttataaataggaagagacttctttgcgtttgacagttttataacttctctatagctatattttgtactgaactttttgggattgagaataattttaagtaagtagtttgtatttcaatggtatttcttttgcagagactaacttaatggtaaatctaggtatacctcttggagatcctttgcagccaacgagggtaaaggacccagaaacaagagagattattctcatgggtaagatcaggcatgatactgaaaatacttaattaaacaatttgtaagaaaatattgcttgcttgatgattggcctgtctactttccctttctctccccaattctatcagtgctaaagtccagaagagtctaattccaacgagcaacctatgtgaagacaactgtgggggaatattgatatcagacagctccaggggacacttaacaccccggacttgtcctctggggcacaagtagtgctacaatcaggaatgtcgtctcccccaacagggtctaggccttctttgaccaggaggacacatgggaacagaggctgtttatggggaattgtagatagatagttggcagactcaaggatacgcttatcatgaagccaggcagggattgtgggtagggcacagacaaacttctgggcctacagatggcagtaatgttacctgggatatgaatcctttgtgaggatga

SEQ ID NO: 111644 - DNA, 1063 bp, Homo sapiens
tggggtgaaatgatgaatcaggagtagggaaagggaaataaaaatgttcctgagcagggcttcagtatttacagaggggaacattgagcattatgcctaagagcagtaggcaacttctcgttagcttcagcatagctttagcaaacaaaaaataggtaagaacatgggaatttgaagataagccaacaaactcaatttagtatacagaactttgcattgttcagataagatgagtgtacatttaacattgtcaacgctgagtattattaggtttttaaatatttgccaatttggtagcctgtttttccattggcttttctttaattgttagcataaatatttgttttttctagtcttttgtctagaaaaatattcatgttctaaaaaataaagctttcatgttctaaaagacagtctttccactgctaagtaccatcaactaaaaactatgtatacacttttgtctgacatctttttatagtattgccctccaacacaccaaatgttcgcaggaccaagagaacacgtttgaaacctttggagtactggcgaggagagcgaatagattatcaaggaaggccatcaggtaaaacttatttatgttataatatctgtcaataaaaaatttgtttactatgtgccagacactgcactacatgtttatatacattaccttacttaatcatcacccccccaaattttgataataggatttaaattcatttttgtctgattaatgtagagatgctgatattttctctttggtagctgaatgttgttattcctgtatcatctgacaagatttccaattgcataatataaagcgttagattagaacgtgagaaaattgtaactggtaaaggtaaagtagttttcattatttttcctattaaccattttccattttctcatagttttctacaaagtagtgtagggtgggcaagaaagtgtagtgttaatcgtagagttattttctttcttatttttgtagagatgaggccttgctatgttgtccaggctggtctcatcttatgggctcaagcagtcctcccgctttggcatc

SEQ ID NO: 111645 - DNA, 1036 bp, Homo sapiens
tgagactgtttcctcttgaatcaattttgataatttgtgtctttctaggagtttgtccatttcatctaggttatttaatttgttggcatacagttgttcctagtattctcttgtaatcacttttatttcttttgactttaatggtaggacccaggaggatactagaacctgaagaattatacagtcactaggaagagtgtatcttgtttgcatatatttggagtaaactaactaccaaagagatgagctcagtccctctgaggaccctattgcccctcagtaggctgactagggatatcaaagaagccaattttagttgtttatggattctccagtaaaccatgatagattaactgtaatatatatcaagctgcttatagataaggtctccttatgtccctttcaccaccttccttggcaggtgtcttctccatttctctcatcagaatttttcaaattgggactcttggtaggtcctagaaaccagtttccttccttagctagttgcaagtctcagaacctgaacagggtgatctgatattcgttatagccaatattacattgtctttgtacccacctgtgtatcgtttctggaagaaaattttattttgaagaagtataaacactcatacatttatcatttttatagatctacaagaagctcaaagaatgaagataacattatgactgcacagaatgttcccctaaagcctcagaccagtggatatacatgtaatataccaacagagtcaaacttggattctggagagcataagacttcagttttagaggaaaggtatgcgtgtattgtaaggataatagttgtatatattagttacccattgctgtataacagattacccaagaactttattttaattttgttaaaagcttaaaaacacttattgtttcatagtttctatggctcagcaatctgggaggcttagctagctagttttggctcggatattctcaggaggtagcagtcatctttctggttttaaccctttaaagtcttgtctggaactggagaatc

SEQ ID NO: 111646 - DNA, 3001 bp, Homo sapiens
gttgatgtctagatttctagctctaaatttttgtgatgtcattactattataaataagggtgaacagacatagaaatgtgaaaggagggaaagatttgtaagattaagggaaaattgaggagatatataaacagtttaaaagaaatttagattttatttcctagattattttctttactaaacaaatataaaagctttatttttttgaactgttaaaagtatcaccctgtttcagtcccattgttaggcatgcggcaactgctccacctcattcgtgtcctcccgatgatacgaagttgatagaggatgaatttataattgatgagtcggatcaaagttttgccagtagatcttggattacaataccaagaaaggcagggtctctgaaacaacgcacaatatccccggctgagagcactgcactccttcaaggtagaaagtcaagagaaaagcatcataatatattacctaagactttggcaaatgacaaacattcccataaacctcacccagtagagacatctcagccctctgataaaacagtactggatacaagttatgctttgataggtgaaacagtaaataattatagatctacaaaatatgaaatgtattccaagaatgcagaaaaaccatctagaagcaaaaggactataaaacaaaaacagagaagaaaattcatggctaaaccagctgaagaacagcttgatgtgggacagtctaaagatgaaaacatacatacatcacatattacccaagacgaatttcaaagaaattcagacagaaatatggaagagcatgaagagatgggaaatgattgtgtttccaaaaaacagatgccacctgtgggtaagtgtttatattaaatataaccatgagcattattctacccattttatgttttttaatatcctaacttagctttggcaagtaggcaaagtaaacctaaatgaacaaagagcctgaaaagcctataggttcttttctagaacctttttattttatatataatttaattctaactcatatagtttttgtttatcttgtgagatggcagtatatatagagggcaaagtgaaaagaaaaggctagtaaacaagttagtatcggaagatgaataagacagaatgataaattatttagaaaataaaaatgttaaaaaaaatcccagggtaccgtgggactattttttatagagataaaagtccattctcttccatcattcactcatgtgtctaacagttgttgaatgccatacactgcattaggcactgtaatcacaaaaattactaacccattatttctactgttaacaagatcattctggtgggttctgtagaataatagataatatacatacatgcataggattaaaaggaaggatacaaaattttgatttatccataatttcttaggaaaagacatatgaaggaagtatacttgaaagatgcgctctataattgtaaatattaaacattttctgagtacctgctatattctacacactaatttttacatatattctgtatctagattggttagtgaatataatgctcattaattaccatatcagttgtattaattttctattgctgtcatatgacaagttactacacacttattggcttaaaacaacaaacattgattatcttacagttctgtgggtcagatgtctcactgggataaaatcaaggtattggtggggttttctttctttctggtagctctgggaggaagtctgtttctttgccttttccaccctcttgaaactacctatattccttgactcatggtcctcctccaccatctgcaaaactagcaataccagccttctcatgttgtgaatttatcttgcctcttcttccatcatctcatctctctgaccacagcttttaaaagaaacataattagattgggtcaacctggatgatccaagataatgcctctatttcagagtttataatttaatcacactttaaatctcctcttcttaagttgaaaaaaatcattatttcaaaacaggaaagcagtaattgcctacttttacttaggacgttataggaaggaactgtatttttttttcagtttcagaagatacttatttttttggctgaggagtatataagagttatcaagcagtgtgaaaatttgcatttaataggaagttagtgcttacttcagcagcacatataattgacagaaagagaacatgtgacttttaaaaatggagatgaaaaggccacaggataaatttaagaagttcctgtaattgacggtttttttataatcttgtggttttctgaaaactcttttagtagattgtgaattggttttatggttttctttattttaggaagcaagaaaagtagcactagaaaagataaggaagaatctaaaaagaagcgcttttccagtgagtccaagaacaaacttgtacctgaagaagtgacttcaactgtcacgaaaagtcgaagaatttccaggcgtccatctgattggtgggtggtaaaatcagaggagagtaagtatttttatttaaattgtgtttgttcatagacaaaatcattctgtaaggggcattatgtttgattttatatttctatatagagaatatcatgaggaccaagttaaattgggtcatcaaaaggaatattaaatcaatggtaaagatattccttgaagcgttaatatatacagtattttaggaatagggataatagctgtgggaaaacaaaaccccaaaccagaaatccctgctttcatggagcttgcattctagttgggaaaggcaatataaataatccagctattttaatgtcctggctgtgagggatacaaagattgataatatgaggttctgccaccaaggagtttataatctaaaagattatagtttattacacataaaaaagtaaattacttgtgttggaggttcccaagactaccctcagatttggtaatttgctaggaggactgggcatatagttgtactcatggctgt

SEQ ID NO: 111647 - DNA, 1985 bp, Homo sapiens
aactagtttacagtcccaccaacagtgtaaaagtgttcctatttctccacatcctctccagcacctgttgtttcctgactttttaatgattgccattctaactattgtgaaatagtgtctcattatggttttgatttgcatttctctgatggccagtgctgatgagcattttttcatgtgtccgttggctgcatagatgtcttcttttgagaagtgtctgttcatatcctttgcccactttttgatggggctgtttgatttttttcttgtaaatttatttaagttctttgtagattctggatattagccctttgtcagatgggtagattgtaaaaattttcttccattctgtaggttgcctgttcactctgatggtagtttattttgctgtgcaaaagctctttagtttaattagatcccatttgtcaattttcacttttgttgccattgcttttggtgtttttcatgactgatacttattatagtcattcagccaggatacacagctgggtcagtaagggaaaaatgcgcattagcagagtctggaggaatccatatataggcttcctgtgttcctcaaggggccatatagaatgtactcattcccttcagcagtgaaatgcagtaacgtgtgtacattttttctcctcagagaagccttttgaaactcagcctgttttcactgggggttggtcccataggcatcccctgcctaccaaaattttacgcactcccagaaggaaagaaagcagatgttcaccacagatcacagtgtttatttatacaaacagtctaggcaggctggcgcagcaggtgcaaccttctctgttggtaatggagggaacattctaaaagttaagtctccagatgccaaccaaggggtagccctgtaagctggtcctttaaatatatcaggcctcctatgttaactctttcctgcagagtgaatctcaatactacagtgttttacgtgtctattttgaactttacatagataagattgttatgtacttctgcaggttgcttttttttctggttaaaataataatttatattattgtagtttatttgttccattgttacgtatgtaatatggtatatctatactataatttatttatttaataagtttattcagtcttctgtccacatagttgctgtttagagtaatattgtttctgtgataggttgtatgaaatttcagctttactgaataatgccagattgttttccaaagtagctattactttagaaataaaataaaaagtagtataaaactcttaacagctggtttgttgttttagaatacttgtttttccccccatttaaaaaacaaatatatttcattgaattggtaagttaataaaatagttctaatgttgtatttcttctgtgctcagtgccagaaatcacatccaaagtcagttccagtttcttcaaagaagaaagaagcctctctacagtttgttgtagaaccaagtgaagccacaaacagatcaggttggtgccatctccatgggcattatttgcttggatatatttaaaaaatgagaaacgctaatggtgcatgtgttgctttgagtatgaaggtcagggtcagcctagacagaattgtgaattgtgaaatggatgaatttgtttttgatttccttacaactccatggtcagtgctctttttctctcttcttctccatttcctttagtcagtgatacatgctactactttttaaagttttctttctttttatttttcagattaaaagagtgttactccattgagttaataaaggtttaaaataagaatttagtcattactcctatcattctgctgaggtagcctttaaatagttctgtaccttaattggtgcccataaatgaaaaaaaaaaaagcatgtgtgtttgtatgtgtctgtgcctgtacctgctttcagaaaaggctattataatttccttttacaccaatagtgtaagagtaccttttacct

SEQ ID NO: 111648 - DNA, 1649 bp, Homo sapiens
tgctatctcaactcactgcaacctttgcctcccaggttcaagtgattcttgtgcctcagccttccaagtagctgggattacaggtgtgtgccaccacgcctggctaatttttgtattttttagtagagaccaggtttcaccatgttggctagtctggtctcgaactcctgccctccagtgatctgccctcttcagcctcccaaagtgttgggattacaggcataagccactgcatctagccagaaaaaatatataatgaaaatagatgtgtagaattcttggaatcgctggagaatttgagataatctttggtgatttacatatctgtttaaggaagtcataaattacagcaaaaacttttccaagtgctgattagcatcagcaggtattggaataagagaataagccagccaaagaaataggggcagatgatagaaaagaatgttttctatacaagctctgaaagaagagctggcatatattgatacttcaggtgttttgtttgcttttctcatttcctgatgcttctcaggaacatttgaatattaaattgaggtctctacttgatttaagctaattgtggtcagtgagtcaacagatggttcttcacatgtcatatacagctacttttaattgtgactaatagatattacactatatcttgtttttgaaaatttcatacttttgttttaggtcttgccaatgattttagtacaaattctacaaaatcagtgcctaattcaacacgcaaaataaaagacacttgtattcagtcaccaagcaaagaggtaagtgataaagaagagctggtataggtttaatattttaatgaatgaaggtatacacaatatactcatgtatattttagttgtttgtaagtcttattcttgaaagggaattctatattcccattgactttctataaaatttggaggtattttgtgaaaagttttatttgatattttctgttggaattgggattatgggaattagaattatcaaattataataaacatttttcacttctcctaaaataatactcaaattaggtttttaggaaaatgggcagtgatcaaagttgctaatcaggttggcagggttggttatattctaataaatgaaggcacttcattgttatacggggaaatcaatcttctgttgattatatattttaattgctgttagtttgatcagaaataaagtattggttgacttaactatactaagtagcagactttcaaataaagtatttgaagctaatctaaggcaaattattcaaaagcacaatactaattagaaaaatcatatagtgctagaagtaacacttactagaaaactgtaaaaggcaatcaacatattaaacatatgtagccttttggttccaagcaatgcagacaaaaccatttctttcagaattgagaggccttctgaaacttgataaattacaatggtttttgaaagttaaagcaactttaggttttctgggataaacttgacttggtcataaagtattaactttttttgattaggtttgcctaatattgaagatgtttgcatctatgtttatgaataatattgtctttttttgaaaaatgttcttacagggctttggtatcaaggttatgctagaggttcctcttctaggtaga

SEQ ID NO: 111649 - DNA, 1060 bp, Homo sapiens
ttcacttttctcaaaacctgtttactaattccttgttaaattctttcttaaaataaatgatgtttgttttccttgagcaatacacattttttctctttactagtttgtcttttagtaattatattccatcatacatattcagattatataagactaaagttaatcattacctttaccttttggcagattttatttttcaaaaatggctacagcaatattttcaatcccacatactcttctagaagcttactacactgtagtccccattaagacccctgaggtcaggtcataaaaggatatatagctggcttccttttggctctctctcactcttttacttgctctcttggaaagctcacctttggaacctagacgccatgttgtgaggaagctcaaactagcacacatggagaaaatctcatgctaccagcctgcaggcagcatcaggtggtcagacatgtgagtaggcagactttcaaatgattccaggccctagatttcacagagcagaaacaagccattggtactgttctgtggtgtgccatgccaaacccctaacctaccgactccatgaacatggattgtttatgcaactaagttttagagttatttattgtgcagatataataactagaacaactcttcaatttccaagttatgtactattgtcatatattttatctgtattgtgtgttttaattctgttgtcatgtactttaatgttctttaattctaagactttatatagtcagtgtttgtgtttatacatacacatatatataaaactttctttgcttttcattattttttgtatctaagacttactcctatgggctgaacgtttatgtcttcccaaaatttatgtgttgaaattctgatcttcaaggtgatgtaatttggagatggggcctttgaggggtgattaggtcatgggggcagagcccttataaaagaggctggagatctctcacccctaccatattaggacacagcaagaaggtgccatccttgagccggcatgtggaccctcacgagacactgcatgtaccagtgccttaat

SEQ ID NO: 111650 - DNA, 1006 bp, Homo sapiens
aaaaaaaatcagagttgagctcttgaggatcagagttaagtatccattgataatatgtgttcattttgctctatgtcataactttgtttttttattgagaaatatatatttttcaaaaacacatatatattcaaaaatacataaaatataaatatgcagttcaaggaataattttaaagcaactatataactagcactcagcttagtagaatatattgacagcagttcagaaattacacatgtagttccttcccagtcacaaccagctccctgccacgtaccctttggtaattaccactatcctaccttgtatgataattgtctctttgtttttatagtgttaccacctatgtgtgtaaacttaaacaatacagtttgcttgtttttgagttttatttaaaatcatacattcttttgtagctgcatttgttcaagatgggattgattcatgttggttgtagctgtactttattcttcattatgtctgtgtaatttacttttctgttaatatgccacaatttatttactgtagacaattgggatgtttttagtttcaggcaattacagtttcacaatgaacatcattttatgtaactcctagtacaaagagtatatatttaggagtagaattttttggtcatagggtattcatatcttaaattttattagatgattacaaatttttttctaagcattagtatgttggttggttttgtgttgctataaaggaatatccaagactcggtaattcataaagaaaaaaggtttatttggctcatggttcagcaggttgtacaaacattgcaccagcatccctgcaatcatggcagaaggcaaaggaggaactggcgtatcacatggctagaggagcaagagagaaatagaggaagtcccagatcatttttaagaatcagatctcacattaactcatggagcaagaactcgtcatctcaacgagggcaccaagccatttatgagggatccagatatccatccccataacccg

SEQ ID NO: 111651 - DNA, 2756 bp, Homo sapiens
aatatgtggatcttactgtgtcatttgctccagacattgatggagatgaagatttgccgggacctccagtaagatactacttcagtcatgacactgattaatacaagttgtcttaacgttactccaggaccacttgattttggaaagagtgcacttaattcagaagctaaagaaaatcagttcataatactatggatttctctttcattaagccttaattttaagggaaacatcagtaagaaactgcactgaagaattataaaacattttggggcatagcatacacttgtctaacggttcacacgtggctatgatcacaagcaactttgaactggaatgctatttacaaaagttttgtgtattaatctgtgtattaatctctctggataaaaagaaggaaaaaatatgtatgaccagaacagatatggatgaagaaattgaaagcaacgaatgcaactattcaaaaagtttaattttatgaatttcttttttgtttagtcttgaagactgattttctatgcaaatagtgtttggcatcctgcacctctgatatgatttggctttgagaatttaataccactgggaagaagtatggtagtggtggatgaagggtggatattttaaattgtgcagttacagtttactgtcctattacctctgctcgtttaaccagtttgttatatcactgtgtccccaaaatcaggatttttgttgatagcatcagtgttgtaggagcaataggtcagatgagacatattaacttagactaaacgtgaacagtattatatggactctcacaacgctcttagagaatccgtgaatgtgaacagacaaatgtggctaaccatttgattcttcagtatgccttctaatgtggctattttatttatgtgagactctaaacctgattgtcctaatatataaaactaaaagattttgtaaagggagtgtctttagaaatagatgaaatgtagaatgttaaaaattattgctagggtagtcttttttttttccagaaacctaattagggtattaaattttgtgttttttttgttttttttttttaaacagaagcatgttatttcattcccattcccagaaagggagttaatgaagataaaaatttattttttaaggtctttattgagagaaactttgttttctgatatgaactattgcagatgtttttataaatactttcattaaaatgatgtaaacagtagtacccaacactgtaaactcagtgaaaatagtaaatgattcttttattactaagactgtcatgcattctgaagcagttggcttttttttaaccataggaagtaatttccctctagctcctttccttctactctcctgctcagaccattagtaggtactttgttaaataaaaaactagattaacatcaatattactccaatttggtatcttttacactatgtattatacctactttctttttatttcatttacaaatagtttaaattactttatcaaccagctgtattgtttccctcttgtaaaagtaccatcaagtggggaaaatgtatgtggaagtggagagtgaatttgtatgactaaaggataatctgtacatggggaagtgggcaaaagtggataggatgaatttaaagaaaatgactacctttggaaaaaagaaattaaattttgttcacatatcctaccctttcccattgtgcatatcccaagtgtcatatttaaaactaaggttacttaaaacagaatccaggaatatcaaggctctgtggcttggaattttagaggataggactaataaaaggacttttgcaaagaaggcttttttccacgttcactttgttttgtgttctttgaaagtaactgatacttttcgggtagttaattcagcagtccataaatatgatccagtaacttgcttatattttattgaagtctcgacagctcttcagaagtaaatttagaacgatgctgtcagttcatatttatagatattagtgttttagcagataaaacaaaatcaacaaaaattaagttcattttgtgattaaacctgcaaccatttttccattactttttttctatagttaatggttattgccatgatttcttctgtttggttctactaagctagaaagccagggtgaagttaatgataattcccattattttatttctgtaccatgagattgctgttgatgactgaaataccaggtgcaaaaattaatgatttgatttttgtacagtttcaatgagtattttttacttattaaaaataaattaagaaatgtaagaatatctttgtaaatcatgtttcataagttgactccagagattctgattttgctgtttattttgtgagtaatgttgctttggtgtttcctgattttcaagtttgcaatcatggagatacagcagttattaggtgtggaaggacattacctcaaatgtcctcagatggctccaggaaattcttttaaaacagttggagagaaatagtcgtgaccatgtaaaacctagaggatctggtaaatcccatactactggttagggatttgtaaagtccatttctttttagagttcaaagcagttctgttacttgtccataagttcctcataaattgtcccaaaggtaggacatggaaataaatgtatatctttattttttaatctactatgtcacactctggtgatattcatggaacattaaaaaagcaactatgtttattttataattagtaaaatgaagatagaaaat

SEQ ID NO: 111652 - DNA, 1011 bp, Homo sapiens
atgagagtacaaaatactataatccacagtaagggatatatagcactatatttcagatacatttgcacaagtctcaaactatatatttgcaagataattattctggcattatttatcgtggccaatgattagaataaccgaagtgtccagtaatggggtactggaacatccacacagtgaaacccattttaaaaagagagagacaacactgtcttgctaaaacatactgatttataatacactggaaggatcagcaaggtactgattaaaagtggttatctatatgatgtgatgaagaaataagattatggaatattttagaagatatattatcctttatttccccacattaatttctagcctgatcacaaataatggacttctgaaagtgggttttttttgtgtgtgtgtcatcactaaaaggaagaaaatttcaatgtttctgttctgaatatttttctgtaacagaaatggaatatcatttacaatttgggatcgatggaccgtacatggaaaagaagatttcaccctcttggatttcataaatgcagtcaaagtgagatacttttgttcatttagttcattagtagctttatgtctggtttctgttttgtttttatttataattttattggaagttataattatttaccatgaatttgctttttttactggtcataaaacattgtttacgaacaatgttaaataagcattttatgtttgagcgaggctttcattgtttcttttttggatattcacttttaggagaagtatggaattgagccaacaatggtggtacagggagtcaaaatgctttatgttcctgtaatgcctggtcatgcaaaaagattgaagttaacgtaagtattcaacattatatgcagcgattaacaagaatttaaatgtaagttgatgcacactaaaaaattaaatatagaggttactataattcagataaaagcattagtcttgtctaatgacattaataaagacagtgaatctgccaggtga

SEQ ID NO: 111653 - DNA, 1059 bp, Homo sapiens
ttctgaccaagaaagccagccacaacccttcccacacaaatgtgaatccattcatttacatggtaaataacctcattatttataataaatatctaaggtgaaaccaaaatcaccttttttactttatccataaattagtaaaatgacaatgtgtttttacatttaatgaaatcaaatataagaatcttcagttatatggaggaacaaataattactactgaataactccctaaatctcaaattattttcagaggagttggtctttgtgtgaatacctggaaacactatattagatacacattagattcacacttgtgtgtatatgtatattttttctatttttttaatttagtttttattctttgaaagagacaaggtctcacatatgtggcccagcctggtcttgaactcctaggctcaagcaatcctcgcacctcagcttcccaagtagctgggattacaggtgcataccaccacacccaaccttatgtatatatatttttaaacacttagcttgcattcactaaccttcctttcagcagataactctatgcttaattttctcatctggtggtggttttaggcttccagtcaccttatgctggactgcttcttctataagactttctttttttgtttttaaataaacacatttacttagtttgaacttgatatatactcattaagaccaaatgtataatatttcttatgacttaaaatgaattattgttcactggtctgagttttctggttctgtccactcactcctcttcccaaggtagtcatgatcactacctgaatgttaagtgtttttgagaataactgtttgatgttttgtcttttataacttctgtagtgttttggtgtagaccagaatatttttgtctaacttaaaaaaaaaaacttgaaataataattctgtggttatatttcttcaaactacatttaaaggctatagttcataatgagttaaatatcgtctttaaaactgtacattcaaattttgctttattttttaatttcaaaaggcacctcagtttccttcagaatgctgcaaaa

SEQ ID NO: 111654 - DNA, 1008 bp, Homo sapiens
ttttattaagccctttggaaagaaaaaattgaggtaagttctagttaaaatttcatgagggaacaataatctccaagacttattactcttatagtgaaggcaactttaaagatgttttctcactttcttttaatcttttgctaacaaggcccactttttagtatcaaatattcatagcacttatagtgagtacatatattatagtactaataacttacagctaggaaaatatgaggataacttgtaagataagaaatcagagttaaaattttgtatgctatctcttaccattccccttctcaaacagaaaagaaaagaaaggttaaagaagaaggaagggaaaaggagcttgaggtgaaaaaagaaaagcataaaacacatgagttgacacttcaaacttaggctaacttttggtgagggatgtgtatatgtttgtaattggaagtatgttgattttttttttctctcccattctagaagatacagagtggacacagtttagaaggctgttttcaagttataaagttacttagcagaagacctagaaattggtcccagtgtgtagaattagcaagattaaagtttgaaaaatattttaaccataaggtaagtatgcattgtgagacattaagaaaaggtctgatcttggcttatttagttattaacaaattaatttcattgacctgaaatgtgtattctttcttttggcaagcttttcagaaattagtagtaagttaaatgagaacacatgctaatctaaaagaagtttgttcagaatagaagaagcaagaaactgagaaaatagggacatttagtcagaaattttgctgagattttgccatttccacccatatctgataatcacattttatgtctgtttccccatctgtaaaatagaaataataaatttgtacctaatacataaggtagtggtaaagataaaaggaggtaacacaaagcatttagaacagagcctggcacataaaaaattactaaatattagctgtt

SEQ ID NO: 111655 - DNA, 1451 bp, Homo sapiens
ttgagaagagatagtgtggtagaacttgtagttagaaaataaccaaagaagaaatataaagcaagggaaaaggagtaatattgttaggaattaacctagagataaaggttaagaaagccccagatttagggtactactagatgtatatgtatattgcagaataggggaacaggaatgatccactgtttgatagtagtatatctgttttcctaaaatactgcattcaagaagtgatcagtatgtgaaatggtcaatagaaagttgtaggttgtcctttggttacattgttattgctcacttttttgttttttacttgctgtcttttcaaatagtcgttgcttagcaaatctaaggcctcttttagattctggaacaatgggcactaagggacacactgaagttattgtaccgcatttgactgagtcttacaatagtcatgtaagtgaatcaatattttgaaatagatgtcttttttatatcttgtaatttttgtcttaatcaacaatttgatttagctttcctaatccttctgattttgctctgccaatgatgttcatacatatgtgcatgtacattttttaaaatataattgaacttttttttaattatcagaattttgtgtctggtgtttctggagcattattcttctgtttactatttatttctcagagctgcttagttttctaataccctttgagtttaagattgtttgataagaacaaactattagattgagactagaactgtcaacaaagacataaaattttattcacttgctgagacaaagtgagtcattttagattaggtaaaccaataaacctaggcaaaatgtactctataatagaatgtggatttcttcaatggtactttatccacaaaaaacgacttaggtatttaccatttatttaatacatgctttctgcaagaaacctcaagcattgaggacatatttctgctcccagatgtttttctccatggaaaaactcatgcttttctgagcactatactgggtattcctgaattacttttcaaagcggggcagtgttataaaactttaaatgtcaccttgattcatgaggaaaaaaatgatttatagatgatggtgtgtcatgagtactacatggtgctttaaatgagtacacaaataataaataagattcatgtttggcattacatagctattaacaaataggttaaatgtcaaaagaattaacttctcttattgcctaagagagagaagatataaaaatgtctggttggattttatttatttttggatttttaataggcttaaagctcaaaactagattaaatcaataaaaattggtcattgcttccccttaagtacctgttgtcatattttataaattagcgggatcccccagaagaggaaataccattttgtactctaaaatcctttccagctgctattgaacataccatacagtggg

SEQ ID NO: 111656 - DNA, 1313 bp, Homo sapiens
aaataatttctgaaaatatttccatccagaaataataattttaaaatatgttagtaccaaagtattcaactcgcatacctctaagaacttatcttctgcagagttgatttccaatgttttactgaatgtgttctcatttttttctaggcacttaccaagtcaaacatcattactagggaaaaattgtaattggatttttaactttttttaagaactgtaaagtacttaactataagatagaaggtgtttagatttttattaataatttgtaaattatttggactaatgtgcattattaatgtagtgtgattacagtgaatgtaatttctacaagccaaaaatgaaaactggtctcattactctcattatatatgtatggactatgactgaacttacacattcttatcactctggaatatatagaaaaatcatagtcctttttttgttgtttaacatattccttctgcttatattatttgtttagaaacctaaaagctacactgctgctgatgctactctgaaaataaattctcaaataaagatagatgcacacctgaacaaagtatgtccaaccactgagaccatttacaatgatgagttctatactaaacaagatgtaattattacagcattagataatgtggaagccaggagatacgtagacaggtatgttcttgaaattcatgttcctacagaattgtctttagttttcacttctgtttcccacattacttattgaaaagttacggaattatctgattattccttatgttcctattgtagtactcctcaaacacaaaccctttgatgatttctcattatacttagaatgaaattcaaaatctgtaacataacctaaatgtttttcatggagtacttttcacctgttcaccatgccagagtaacatttaccagtcttccttggctccccttattctagctgtatgtgcctttcagttttttggctgtcttttgttttttctgaattgtaaagctatttttaatactttggggtgagtcccactgcaatagaaaacatagaaggagtaactccttcacccccagaaatgccccaggagagaaaggctacctgagaaggaagcacaaaaaggacccactgcaaactcagggcaaagggaatgccatcagtcctgggtcctgtgagtactagaggaggaaacgtgagcatggtgggactggcttcaggcacagaggcgaagggcacgggggtggacaccaaaccacaaagctacttaggttcttccttctcgttttcccttttctgcttcagctgcatggtcttcaggtccctc

SEQ ID NO: 111657 - DNA, 1981 bp, Homo sapiens
aaaaaaatgataaagtaataggaaaaagtttcacttttataatgatttgccaactttgataattataagacgatttcaataacttgtacaaagatgatcttattaaaagattttctgaatcgtaccattttatacaatacatatttcttaccaaaaaagccttgagtatgtattctatttttttttaaaatggatgtaattttgtagcagtaaatgtgataaggaaggaactaacagtttccaaatttgtaaattttaataaggaaaggggattagatcatttaccttcatggccttgaggttaagtcatttaacttctaaccttcaggtttcttatttgttaaatagagttaataacagtattaagctaatgtgtttattatgatggttaaataatgttttaaaagtatttagcccagtgcctgggacatacaaccactcagtaaatgttggccgatttttaatgttctcaataggcacctttagagattcacacagctatgcttgccttggaccagtttcaggagaaatacagtcgcaagccaaatgttgggtaatgttttaagtttaaaaataagtattttcctttttataaaagtagtagttcagaaattataatttaaaaagtaactatgccctttgtaattacaataccaatagatataccaagctgtgcaaacatttattatgactttctggtccttttcctggtgggagtggagaaatttggtttataaaagtggaatcatactaaatgtgaatttttccactttgaagcctttaaaaattaaagcttcttaaaacaaaaaaaattctgagaattactgaattattaacacatagtaattttttttttaactttatatcctgttaagtcagagtactgttggagaaggtttttgctttttatatttgggattaaatcttgggattgggtgttgtggctcacgcctatgatcccaggactttgggaggctgaagcaggtggatcacttgaggccaggagttcaagaccagcctggccaacatggcgaaaccctgtctctgctaaaaatacagaaattaccaggcgtggtggtgcatgccggtaatcccagctccttgggaggctgaggcacaagaatcgcttgaaccaggaggcagagggtgcagtgagccaagattgcatcactgcactccagcctgggtgacagtgagactgtctcaaaaaaaaaaaaacaaaaaaaactaaacttatttatatactgatataagtgtgattttgaagtaatgtatttataagccaatcatctttaaatcagtacaacattttgtgctacctgttggcaaaaatcccacattcttttatatatttcctaaattttaattttgagtatgtcctactgtttatggcagttgagaaaattaaagttagggtgttctgttttgagttgtagatgccaacaagattcagaagaactgttgaaactagcaacatctataagtgaaaccttggaagagaaggtgactattgaaatttatggctgtccgaatatttgtttgttaatacataagtgttctgtatattagtattctcttatccttcacatccagctttgctactctgtggcattagacaacttttttcagtttgttctgttttaatttataaatctataaaatagagttaacctaccttcatagggttattgtgaacattaaataatttaattttgtaaagtacttagaaatgccatgtgacatatagtaattaatatttgctgctatttttttaactgttactattattctttattattctgttatgatttacttgatttgttaacttaaacttatatatgttagctttcttatataagtcacctgttttatatattatacattcatatctctttatcacatttcgtacatcagatttagatttaaacatttcacctagaaaatggtttttttgtgtgtgttatgatgccagtgcctgctt

SEQ ID NO: 111658 - DNA, 1050 bp, Homo sapiens
tttcattactgattgaggtgccaccttgattttgtcctttgtgtacttgagactgtttctgaattctctaatcttttccagttgtctgtttattaaccagtaccatattatattattatgataggtagttattattatattattgaggctttatgatatattttaatatctaataatgagtagccctcattactctttttctgtaagtttccttggttatttttaagtcctggagtttcacattggaaaaaatactctgcctagttccccacactcctcccagctcttcattaaaaaaaaaaaaaaacaaacaaacaaaaaaaaacactatgctggaattctttaattttgtaaattagggataattaacctcttatgacaataagagttgaaatttaaatatctatatccctgtgtaatgattttttaaattttttgtcttctagtgatatcgccattttcttttagtattggtgacaccacagaactggaaccatatttacatggaggcatagctgtccaagttaagactcctaaaacagttttttttgtaagtatttttttttcggcttaaaaaacatttttttacagaaaaagaaaggcagaagagacaaataactactcagttaaccaaacagattaaatgtggaacagaatttgtttttatttttatttttttgtttgtacccactttgagggaaatggaattaatctaatgaaataaatgaataaaatggatattaacaaaaaacttacacatcttttatagccagaataccatatacatatagttgagctaaatgggtatacccgaaaggaactgtatctttgtgaattatcaaagagtttatcatacttattacaatttactttctaagacaagaaataaaactaatgtattttcaagatttagcaagagttgttttgctttattattatttaattttctaaaatgaagatattcaaattatacttgttaatcctggtttttaaattttaatttaattttataaatttcaaaaaacagtatatatgttggaaatgtaaaat

SEQ ID NO: 111659 - DNA, 1036 bp, Homo sapiens
ccattttggaaaacagtttggcactgtctaatgaagttgaagtatacatattcttaaatcctgcatttcctctctggggatatacattagagcaggggtgtccaatctttttgcttccctgggccacattggaagaagaataattgtcttggaccacacatagaatccactaacagtaatgatagctgatgaactaaaaaaaaaaaaaaattgcaaaaaaatctcataatgttttaagaaagtttacgaatttgtattgggccgcattcaaagctgtcctgggccgcatgcagcctgtggaccgtgggttggacaagcttgtatcagagaaacaactcttaagtgtgtaccaggagatgtttataagaatggtcagaatacaatataaatgaatattaatgaccagttgcagacatcagtataagtccatctcataaataatttcattcaaaagaaacaagataaaagacactcaaagtgattccatctatacaaagtctaaaatcaggtaaaacctaagtatattatttctgggtacgcataagggtggtaagactatataagaactttcgtacatactatagtagattttcaataaatatttgatgtgtaaatggatagtttttactttctaaaacaaaagtcttgagtaccaatttaaaaagaaaagtttaggttttattatattttgtatgaaacagggaaggaaataaagatagcttgtgtttataaagttttgtctctctagataagaaatcccttttcaggcttttatgttgaatatgaaaagctgaaataatggaaattaaatatttatttttaaaacaaatgtgcattaaacatgtatgtgttaattctgaaagtaaatacttataacccaaggggttctgaaattatttatttatatcgaactaatctttaaaatgtttctcataagaattcattggaatttatattatctccaaagatagcatcaagtttctcattgttctttcagataaacacttacaattgactttattactatatcagactt

SEQ ID NO: 111660 - DNA, 1575 bp, Homo sapiens
tggaacataatactcagtttgtaaaattgaagttggtagaattggaggaaaaatgtagagctagcctgtgccagaaaaacattgatgacatttagcataattggcagtatatatggataatagttgaaggtcatcactagttaatatctttggcctaaatcttactgaagggatcagatggaaaagtcattaaagttaagtggaaaactgcataaagagatttgaataatctgttgtagatgtctaatgaggcatcatcctttttctaaaccatgtcagcatattaccttctgtgaattaatttattattgcatttctttggattgttctctccgccgattataatacagagacttttctttttttatattttaaaattgtttatataaatttttttttcaaatcagggatccacttaacactatttgcctttttgacatacctaacacatttctttccttttctagcatgattatgatatgagggtggatgatttccttcgtcgcacacaagctgttgtcagtggccggagaagtagaccccgtgaaagagaccgggaacgagagcgagaccgccctagagataacagacgagacagagagcgagatagaggacgtgatagagaaagagaaagagagcgattatgtgatcgagacagagaccgaggggagagaggtcgatatagaagataatgggcttttggaagcactgattgtttaaagatacaaaaaatcttgtattttttttttgtgtgtgtttacaagtagtaaatttattttcagctgtctgcctatgaagttcattgtgtagaaggatttattatgaccccctttgttccaagcatgcagtatcataagaactggaaaaactcaaatccgccaaaaatccacagctgacagttgaattgacacttttattggggcagaatggaacagtccaagaatgtagatactgattctttctccataaatgttcttatagtgtgttcatcctagagttatttttttgtttgtttttttcctttttggatcttgattgataactgccatgatattttgctttgatgtgtttctacatgtagttgcacacggttcagtaaaaataatgctgctatcgagtatgcaaatattgaagtatgatggtttgactgtatggcagtgttgtagcagcctcttgtttttttccccattgcctctttttttaaaaaacttataaagtcactttttatttttcctcagtcttcaatgacgagagcaatattaagaagacattgctatctaatttttaatctttttaaatgaaaaattcctatgttcagtagcgtggttgatgctattgtttagccttcccctccaaattgtatacattggcttggaatgttcacaacttgcgtgcgtggcagcggaagacgattcccatattctacattgctactgttttgtataaaataaattggtaaagattgacggttatcttttgtatctttttcttatccaattgcaggtttgttttattatgcaataatggacataaaagcatgctttttgttcaggaattttaggaaccccatttgct

SEQ ID NO: 111661 - DNA, 1144 bp, Homo sapiens
aagtgcttagaacaatgcctggctcacagtaagcaccatgtaagtgtttgctatttccattgttatttatatgataggagtagaaaagcataaacatgttaaatcttagaagatgtgtaattttcgacaaaaagcatattttgaaacaccttaatgccatcaaagtaaatgtctagtacagattcacttgtttgggattggtgttttggatgaagggttctaagaatcgcttgtttacaagggtgttggtagattcttaatgtaaatggttttccttttttagcccccttacccaggaatggaacaacctccacaccatccttactatcagcaccatgctccacctcctcaagctcatcccccttactcaggacatcatccagtaccacatgaagcaagatacagagataaacgagtagtaagtgcacaaggaggcaaaggtgtgagggaactacttagaattctgtaggtaacttaaatatggggagaccagagtatgatgattgacggaccattgcatattcttactgcagactgttttggaataattgtttgtttttattaaaaatgcctgattatgcccctttggattatatagatagaatatatttcttttactgatcaaatcacaaactgcttaaggcaaacgcctacaaatagaactccttttaggtagtacctaggctatgttctttccatattgagatcttaattatgctatgtaattaatattgttaatagatatttctgaactttttgtgtattcttactcaatttttctaggatagatcgtgtatattaagttagctgataagctgtaatctcatttagtcatttgtttttatttctaccaaatgttaaagctagtaactgataaattgttttacctctggttattgtgatgttagcaaagaataaccagatgttatgatatgtagcagacatgtcctttattcattgattctgttaattatttgataagattgatgtgaaagctttttttgatggcttcaaaacaggaccagtgaaaaaaagactctagttttagtttgagttttctgggtttttaactagtggggctgagtttattaaatgcttccccaccccccccaatagtacttttatttataaagcagaattgtct

SEQ ID NO: 111662 - DNA, 1045 bp, Homo sapiens
taagagagcaaactatattcaagaagggatatcatgtatttgaagagagtcagtgatacacttgtgaaacttaggcagttaggagattgatgttagtgatcattatagcactattatgtaacaagtggcttgattagcctcattcttccaaaataggttgtcctgttgtagaaagtgaaaatagtttttccccagtaacatgactactcaaatgtttttacattttaatttgttgggttcttattaaaagaagcaggggaaagaatatttttctaaccaccatcgatttttcattttcagtgtatacatcttcatttttgcaacttttgcaattttttccccctcccccttaagtttacattttaaaaagcttatctgtggttttcttggtaagacctacatatacccaaggtggaaagtaaacatttgttttaaggaagtcctgtcatagtgtgctcaagatagttcctctgcccttaccttccctgtgaagcagaaggaagaaattttctgattagcaagatttggagtgtgaacatagaagatacctatctgaaagcttctctagcagtttacaattctatgatatcattagttatttcctagattatcatgtaatctgagaagaaaatttgaaaatgggataatacagtagtagcatcacttaaagtacatatttcatggaaagaattgaaacgagtggtaaggaaggtttaattataatgccataaaagaaaaatataaatttgatttactaaaatgcttgatgtttgaacagggtatttaaaggatccacgataccaggaagtggacaggtaagtcgggttcactcttgcctagttttgaattacattcttggaactagtttatgaattacctgaatttagtttcacaaatcttattcccaacagacgattttcaggagttcgccgagatgtgtttttaaatggggtaagcatttcattttatctatttaatgtggataaaatcaggctctgatttattttgcagttctgtgataatttttaattatattgacattatc

SEQ ID NO: 111663 - DNA, 4823 bp, Homo sapiens
ctccaaatgagaataagggacacttctattttcatttggttttaacagctgggttaaggtccagcttctttttggtcagtttttaagttttttgagttcatagaagaaagggatatactaaatattttctgtgtcatttcatttgcaaactgcgtaaaacaactataaagtagatggtgatattcttgtttatcaaagaaatagattcaggctcagagaagagagcaggctggggtttaagccccaagttatcttggttctcaagcccttgctcttaagctcttttttagaaaactggagaatatggaaaaagtctctgaagaggctttctatagggaattaaccactgtaagtggtttttaaaatttagtcacatttaagtcacagttaatacaggaattcactactaaaagtagtataaggtccttaaaggattctgcagaagaatgtaattgatattactttgtatttaggcgtgaattacccttcactaagtcggctcatctcaccaatccttggaatgaacataaaccagtaaagatcggacgtgatggacaggtttgtggccttaattgattctttaaaaaaacacatttaatcaacccttttagagatctttattgatgtattcgttttaaccgtttctgatgaaagagaccacgtgagaatttgaaaaaataatcttatctgaagtttataataactgtgattgagactaataagacatccattaatgttgaaatataggcagctttatatggtactttcatttgatacaattgaaggaaatatttctaaagagaatttgccagatttaaatttgttttgactatattatcactgtttaacagattcttcagtttctgtaatacattttagaattgccgtttagtatatgtgctagttttctgagtagaaagcagctttctgaaaagattaaatatatgtactcaggttttcaagtctacaaatggaactgaaaatgtggagtaattgaaaattaaccaaaacctttctttgacccttgtaattctcacatgtaattctgaaccagaagttttgttttattttattttttaattttaatttttttggaaaccaggttacgagagtggctaatttttgtattttcggtcgagacagggtttcaccattttgcgaggctggtctcaaactcctggcctcaagcgatccgcctgcctggggctcccaaagtgctggaattacaggcatgagccactatgcctggccatgcaaaagtaatatgacattttattgctcatgagtaaaaatgttttcactttttcaattacaaatagctgaaaatgatttaattttaaagagcccatagattggtctgcctttgtggtaaatctaatgtatttcaatacacttagtagatcataattatcaaagttgttggtacacacactaacatgaattttttttttccattgtattaaatgaccttgtcctgatatttttctattttgcacaaagaaatagtcccttttcagagggtggttgtcacagaattttaagcaactgcatttgtgtatttaacttcagagattctacacttttagtttttaccctttatataaatacacaaaacactttttaaatgttttataaatctggaagtcttattggaatcccatatgatcatcagccttgggaagaaagcttccaagtcagtttttgttctggtacatcaggaaaatgcaagtctgttgaaagggtctgtttttgttttataaattgctactttcctattctaggaaattgaacttgaatgtggaacccagctttgtcttctgtttccccccgatgaaagtattgacttgtatcaggtcattcataaaatgcgtcacaagagaagaatgcattctcagccccgatcacgaggacgtccatcccgtcgagaaccagtccgggatgtgggaaggttagaaacgttctttggactgataataggcacatgtatcagaataacatgatggaggaatatgattcgtcaaaagtttgtcctgcggtaaagaagaaagagaaaatcctcaaatcaagctgcatggactagtttgtggcttcattgaggatttcacatggtcaccttggtctcagtcatttttcaagaggaaaatggggatctttccttatgcagaaaaaagtataaccagtgataaccagtttagattagataatactctgataatacaatgtatacaattgaaatgaggtaggcatttgttgctaagaacaggctagaaaggaggaagaggaggaagtctttatttgcaaaaattgttaatactttttaaaaagccttttctttcaggtatgtctctggataagccttatcagatatgggacttttataaaggatcactaatattttttcagaagatgacgcctcatttagaggataaaatattttaagttattttgatattcaagaggagcattattgggactgtttcagattttatcaccgtgatgtgttaaccctattgccaaatattctctaacatgtacccagtgaattcacacatcttgctgagcttctgaaaacaataggttctttccaaaggggatcaagtggccctgggagacccggcaacaaaccaaaaagaagggctgttgctgtgtctgtttacaacttttccagatgctggcagtacctgtggacttaaaagtgttttttagaggatcgccatggttattgatcactactttatgaactaaacagcattttccagaaaaagggggtttaacttgttacagaattggagaagtctttgcaaaggactgatttaagcccttctacccaacaccttcccctgtgtagatttgcatacagctaaatctaaaatattctgctaaagactattggatgtatggttgatgggatgaaacctttgattaaatttccttttggtggagacatcctgtggtaggtacagataatccaacaagagtccccatttctttgagcttaaaaaggacactgtcgagtaggtaggaggaaacctggcagagccccttatttttggcctaaaaggactgagcaccaagatgtcttttgaagttttaagctaagaggtttccagtgcaatacaatatatacaagtgaagtttttacctcagttttgcaatggactgcaaactatacttattacaccactacaccttctctcaagcctgccagggcctccatttatgtatgtggcttacagcttaaagtcagtagttggactactatatgaactgttactatcatgttttataccggtcgtaaatgcactccccaaactacaggaaagcggtatgtttattttttaaaccagcttttaattttcttagtattatttattgtagatgcaactgtttttattctgttggggggcttgggattattgcacttaactttgcagtttgagtgaactgtgttgaaaaagttaatgaaagcagttggtactcagacaaatagctgaaaactagtgaatgctaggttgttatcaagtttttatttgacattaaggttaaaaagatatatttattttctaaatattttggactttttttttgtttaactctttattagctgctaagtaaattgaagtgtatttaatgatgtgttaagttaacccgatttatggaagacagtaaagaacagccctctgtagtcagtaaagtttcaccttctaaagaatatattttgaattagttttatgaactctgttaaaattctgacccattacttgccaatttataaaagcctattttattacaaggcattgtctctggaaaaaaaaaattcccttaattcttaaatgtcattagatgtagaaagaaaaactaaatgttactaaggattattaagaaatagttttttaactattaagattttaaaaactttcctgtaaagttgcttttaataagtatcaaattttctgtatgatcatgtaaaattcataatttgtgcaaagcagaggaaaaataaattcttaattttgtttagacttaacctaaaatgacatttataagttttaaatatgcagattttagagttacatattgtacaatgatgataggtttttctagtttttatttttcatctgaatggagactttatttgggaaagtgttttaattgttaaaactgatatttagtttgagaatgactttgtttacttttgtttagactactaaaatgtgacttacatgttttgattggactagtctgcaattttctcatcatagcatgagttggcagagaatatctacttccagcagtacatttaaagtttggtttataggaattaatttgagaatcaaaatgtaggaattttaaaataatttgctcactaaaaaaattaagatgttaaataatgggttattctttgtacttatctctgtcagaaactcttgctttactctttgttctcccagcagtttttggtttaatttctaatgtgtctaatttgtgtaggcgtcgaccagaagattatgatattcataacagcagaaagaaaccaaggattgactatccccctgagtttcaccagagaccaggttaatattttataatcctgcagatatttgatttcaaattattggaaaaaaattaaaaaattaaaaacaaccctcacaatcctgcagttttaaaagtgaaaaaaattcaggacctgactacttaaatcttgagaaattttagtagttctcattagtgtaattcttcccttaacttcgttaaggttgtctagtctattccagtgtaactcatcataccctatgaattacctgaaattgctaattttgcaa

SEQ ID NO: 111664 - DNA, 1060 bp, Homo sapiens
taattgtctccattttttcccttaggtttttataaattattactacgttattctgacagctgataaataaaacctttcttcattatagcttacttaaattgaaagcacaccaaaatatgtagttttttttcaaacataactggaaacacaaaagagttgtagttaatttcactttgtggtctttatgttatttatgtagggtgtatggtccacgctccctgtaaatgagaagaaattaaatcttgcatttagatctgcaaggagtgttatcttaatattttctgtcagagagagtggaaaatttcaaggtaagaataaaaataatttggacatataaaaacattaattatattagcatctacatattatattatgatatgattctcttagggtttgcaagactttcttcagaatcacatcacggaggatctcctatacactgggtgcttccagcaggaatgagtgctaaaatgctgggaggtgtctttaaaattgactggatttgcaggtaaattatacacttcagtatagataactgaaattttgaatacactaccagtttagaataatgtgttaaagtgaaaaagtcactgtatacttatcttaccttgttcagtaactacctttatctaatgtgggacacaacaaaggcgtatttagtctaaagttacatgtatttgatttgttttgtatattagtaataaagcagtaaatgaattggacagttgcttgaaatgttgtctggcgtatctgtataattttagtgatttaacatgtcacttaagttattgaggaatgggaaataagtactatgacttggctaacaatttcggaggtaactagtttagtcgtggacagtattttttaaggaggttagcaaatgatgtttagttgccattgtgatcttctgaaactgagttaagatttaactgtatttattagaaaaataatcaggcttattttgaacactgagttgtcactatttttaggtccttactgcacactgaagtattgtacacaagaagctcattatttaagtgatctttacgtggcatacaca

SEQ ID NO: 111665 - DNA, 1509 bp, Homo sapiens
atcactaattatggtatatatatttttccagttgtaaagctttgggttcaggggttcatcagatctcttaagatagaatcagaattgtaattgtgctgaagaatggtagtggagtttaaaaaaataaggacttaagacagtgttacctggtgtgtagaaaggacacagttttgaaagaaattgtttttgctttgcaaatttccccccccgcttggaaaactgtattcaaggccacctatatatggcaattaaggccctgactttgtagttatttcgtgtgtttttatttgattgaaactgatgaaagaaacaagatgcccgtactttttaaacagtatttttaaaataaaacattctgaggaaattgagggatcaggagagaggagcacagactaatagaagggctatgcaaaaactagacatgtaatgatacattcttgtttgattacttctcttcgtttctgtattgtgatttaaaaaaaaaactcttgttctttttagatgagaaaaagaaggaaaggaagagagctagaggcatatctccaattgtttttgatagaagtggaagctctgcatcagagtcatatgcaggtattctcattttgtgatcatatctgacttgattctaatgtaatctgctttagaaagcgtgtggaggctgtagtttagtgtgaacttgttgatgtccattagcactgatttttggcatgttcagtgtaataattctagagaaaactaagctttttcttattattttaatcctgttctgttactgcttaagtggaattttcactttttttttcttggaagatgatgattcagtgactagttttctgagtgggaaactgttcaaatatacatacttttaaaaaaatccaaacaacccaaaaagcaaaacactcgtacacattgagaagttttttttgtgtgtgtgggtgcgccaggaagaataatttgtcttgaatgagaattttatgtgacaagactgtagaaattttgtcttatctctattaaagctcaatctgaacaaatgtactttggctaaatacaggttcagaaaagaagcatgagaaattatcatcttccgttcgtgctgtccgaaaaggtatcatttaaatttgaaattgttttcattgcatgctgcatagtcattatttttccttattggttctccattaatagctgcttttaatgtagtaatgttccgatatattacatgaagcaaaaaataatatcttaacatagaaagctctgtgtctgcttcttactgcatattttttagaataataccaaacatttcaggatattttagtttttggacaaaatgggatgggtgtgtgtgtgtatgtgtgtatgtgttatatatagatgtgtgtgtatatatatgtatgtatataatggtctgttattcttgaatctgagtaagaaaatctataaaacttggtaaccattttcatacttaaatatggatttgatatatcggaacatcactaggttaggtttactttc

SEQ ID NO: 111666 - DNA, 1028 bp, Homo sapiens
tttacaaactgataggatatattttttataatttaagataataaatatttcattagcagtatgtgttgaatgttcatttattgtggagaatgtatgaaaccactcccttgggtagggaacgttttgttgtaggaatcttctttttggtatctctgttatttcttagactttaatgtttgtattgtttacattaaacaaagggaacttacttaaatgggtaggaccagaaattgcatttgtaacaggctcctagatgataccatagtaaggtaacttgattgacacactttgtttttgtggagaagacatttcaaattaaatggtaactgtagttttataataaatcttgatatcaaaactctgttactagactaggtttattctaaaagagatacctgaaagttttattttccttataaaggaaaatcccttatgtggaacatgctttaggtactatattaatatgcaggaaatttttttttatacaatagtttatgaaagagtaatggggtgattttggaacttcttgattaagagacgtcagtttttaaataaaagtgatcacagttgagtttctctgtcatgaattttctagattccagttcattttaccttattctcagaatttttggtaactttataaaagcaacagactgattgataacagtttatttattagatgattttcattgttcttttgacctgagagtaatagttgggggagagggccataaacttaagagcattgggagttattcatacaaaaatgatgaaaattccttggagatttctcatgctaatgctaggtttagcattatataaaaacaattgagtaggatcttctgcttctgttattttccctgcattatctcagatctttttagtaactttttaattattgtttttgtctttatataaagagggtcttgctatgttgcccaggctggtctcgaactcctgaggtcaagtgatccgcctgcctcgacctcccaaagtgctgggattacaggcacgagcaactgcaccag

SEQ ID NO: 111667 - DNA, 2678 bp, Homo sapiens
gatagcccagacttctgtttgtgtgtgtgtgtgtattttgagaaactcactcttatcgcccaggctggaatgcagtggcacaatcttggcttactgcaacctctgcttcccaggttcaagtgattcttgtccctgagccttctgagtagctggggttaaaggcatgtgccaccatgccctgctaatttttgtatttttagcagagcagggttttgccatgttggccaggctggtctcaaactcctggcgtcacgtgattggcctgcctcagcctcccaaagtgctgggattgcaggcatgagccaccacgactggccaattctttaccctgtattagttttatagaaattaatcttgtgtcttgattctgaaataaaagtaaagctttttatataaaagtaaaagctcctaggcgcttgtggcctcacacttagtaagtactcaaaaatacatgttcaatgatagtgatttttccctattaatttttaattttatttgcagatggagaacttaatgttctggatgatattttaactgaagtaccagaacaagatgatgaactgtataatccagagagtgaacaagataaaaatgagaaaaagggtatgtaagagttctattatttttgttgaaataacagtataaatagaggagattcaatttcttaaaaaaaatgactgtgcttttttgtgcttgttccttgaggcagttaacactaaatgtacataataaactggtatccatatgaatagggataatctgtttttttctaatatatgaaacttctcaaatatatggttttattcccatagttgaaagctatgttttcttttagattaactctggagaagaaatctctcagaagacttttaaagaaatgaggcctatccccccttcctgatgtatatattattgtcagtctttggtgaaataaatggaatactacaaatacttcttttttttttttttacattgtattttaaaggatcaaaaagaaaaagtgatcgaatggaatctactgataccaaacgacaaaagccttctgtccattctagacaactggtttctaagccactgagctcatctgttagcaataacaaaagaatagttagtacaaaaggaaagtcagccacagagtataaaaatgaggaatatcaaagatctgaaagaaacaagcgtctagatgctgatcggaaaattcgtctatcaagtagtgcctccagagaaccttataagaatcaacctgaaaaaacctgtgtccggaaaagggatcctgaaaggagggccaaatctcctacgccagatggttctgaggtagtaaatattattgcagatataaaacagaaagccattctttttgaggctttagaactgtttattcaccctgaccttgtcttttatatgactgctgattccctttttctttaaacatcagagaattgggcttgaagtggatagacgtgcaagcagatccagccagtcttctaaggaagaagtgaactctgaagaatatggctctgaccatgagactggcagcagtggttcttctgatgagcaagggaacaacactgagaatgaggaggaaggagtggaagaagatgtggaggaagatgaagaagtagaagaagatgcagaagaagatgaagaggtggatgaagatggagaggaggaggaggaagaggaggaggaggaagaggaggaggaggaggaggaagaagaagaatatgaacaggatgagagagaccagaaagaggagggaaatgattatgacactcgaagtgaggccagtgactctggttctgaatctgtttccttcacagatgggtctgtcagatctggttcaggcacagatggatcaggtactactttttatatgtaaaagtttgtcttaaaaaaagcttgataggtttcagtcttgaaaatgtttaaattataaaattgttgaggagatgggggatattaataggattgtcttgtgatcctttatatgcttttgaatgttataaatacatttgaataatcttggataagatttacatattttaggaaaggcatttcctagctacagaatggttgtgttgtaaatgaacacaagtccatttgattctgtataaggaaatgtatttcagatttctgtaaattcttagattttcataccagtcagcagtttatttaaacactgatgtacttgaagtatattcataggaaacctgtccactgggtattacagtatttccttggtaaaatacccctagatttccatcatatggcttcagaatcaaaacagattatttcttttttatctctgggagcacagacttttcttctaattttgtgtctgtcagttgactggctgagacagggtcgacaagagggctggggtgtaaggtataagatggagatgaagactataaataaaattcttgtggaaaaatcaggtaagaaccatcttcagtcatttcttcaatgctatatatatcctgcctctctatacctatgagacaaaaatgtatgactgttacgtagttggaggcactaggcttaggggaacttttcttgggggagggtacagcaaggagaggtcagggtacttacagagcactatatgatgattataatctcatgactgtcttatgtaaagatgctaccagattgctacataagcaaaatgtactaaa

SEQ ID NO: 111668 - DNA, 3240 bp, Homo sapiens
gtggttgccatagtaatgagtaatcacacacacagaaatgttggagaagctccagctttgaatcttcccagcctagacatcaacgagacttgtcaatgaacaagccttcagatgatttcagccccagccccagccccatttgactgcagccacatgggagaccccggttgagccctggaaccatgagccataatgaaaggtgttaccattttaagtcaagttttagggtgatcatcttatacagcagtagataatcagaacatgtatgcatataccatacctgttttgttgaagaaggaattttgttttgtgttctggaccagattttatatatatcacatagcccagtcattagcaagagggttggggcaggcaggttttattaaagtccaatagttataaggaaggagagtcttcttacaggttgaaaaactcatagaagattcaaatgtcctgcttttcctttccccaaaactgaccttttttaagtgcctcttatcagaggtgaagaatcttgaactcagaaagactgggaatttcctgatacctaaatgcaagctataacctgcatttccttaacctccaagacttttccccttgtatattatattccagtgtatatataaggagtttcagtgatggagaaaagtacttaaaatttggtcatttgtattatatcaggggttggcaaaactctttgtaaagggccaaatagactttgtgggctgtaagtgttctctgacatattctttgcttttttttttttcttgttaataagcgccttaaaaacgtaaaaaccattcttgcaggccattctaaataggcaatgggccatgtttatcctgtaggttttagtttgccagtttgtggtaaaaccacacagtttattgatgttatggactataatacggataaaagtgtgtacatcatttaagtgagggtgttatagttgattttgaatatttcagtagattttaaatgttgtaatgttaaagatatagagctttctggtgcactaatttgaaatttatgttctagtatatatgcccttttaatattttgcatttgtgttctttatactttggttaaagttgcttttattgttccccatctgatttaactgtcaatttctaaagccggaacttcatactaatatccatttgttactagacaagtgtatttggtcaactggaacatttgagcttctctttctttatctgcaaagtaatgaatgattaaacatgctctattttatatgatttgtatatatgatatattttaaaagtgataaaattttaaaagtgacaaagtatttttaaaaagtagtaagcattggttaatatttgttgtcttgaaaaaggttgtaggtgctttctaaaactacaaccagtatctgaatttgaattcgttaaaactttaaaacagtaatacccctttttataggaaaaccaggctttaagtgtgtttgaaacttaaatttatttaaattaacattctgcaaaattatttcattctgtattaaatttagcatgtctaaagtatataatataaatgttcagggttcggggatgatatttctgaataagatctagtgattttatgaaaagatttgtatagcattatttgcctgtttcattgtgatagtcttgaaattttttctttttgtcttctacaaatgtatttgattctgtgaagacctgttggatctacttttttactgattagtgagctttgacccagtacttattaaacatctgtaaaacattgatttacttctatcagactattttttttataatttagagtccgaaaatggtgtttgccaccattcagatcttgaagaaatttttcttagcaaaaacatgaatctagatgatgagagaagcttttttgtttgacatatcttgattttaaataagattttttaaaagtaaacaaaaataaaaacccatatagcctgttttcattttagaaaaatgatagaaagtacatatcagcattggtaccacccaaaatgatcaattttgctattccagacatagtaattttcagatatctttagattgtgtctgtttccaaatgtaaaggaaaatgatatcttttccatttcctatgtaaccttatcgtttgtattaactattctcttcagtcacagatttctttcccactttggggaaaatttgaatcccatttaacctgtttatagcccccaggttaattaatagacctttctgtaattcatgtgggctttgtttttttcctgaagccacaaatgtaattgttctgtctcatcagttttcatggctttatacttcctctttggcacaccttaaatttggaaagatgtttttgatattggaatagttaatgtttaaacatttactattagcattagtacattttaaaatttaaaatggtatttgtgtgtatttctaaggtttatcttgttggacaaggtagaagtggggacaaaactgagttttatgctttcatgatcattgaataaagtcatagttcccttctctgaacaagttttgtgcttttacagtccacaccagcaggctctaaatgttttttttattatatagcacattgataattttttcatttaacttgcagtttgacataatttcagataagcataatagctacaagtgcagtgtgaagaattttcttttactctccaaacacattctgcagatgttagcattttgtcacatttgtctcattctgtgtgtctgtgtgtgtacgtgcatgtgtgcacacttttttcctgaaccatttgtaagttgtagacataatatatctttgtccctaaatacttaaatatgtgttataaggactttgacttaaccatagtacagtcaaaattagaaaaataacattgctacttactctgatttacaaactttattcagatttcaccagtttttccaattatgtccaatattgtgggctgtgttcagttatcatgcctctctaggtctgctttgatatgaaatagttcttactctttgtttcatgacagtgacatatttggatgccctttaatttgggtttgtctgatttttttcctcatgtaggttcagcttttccattttgcatagaacattacaaaagcattgttctattctcagagcattgttacaggaggtccatgatgttgatttgtctcattactggtgatgttaactttgattatctggttaatttggcctgtgaaacatttctccactgtaa

SEQ ID NO: 111669 - DNA, 1096 bp, Homo sapiens
gattccataaatggtttaagatcttgatagcaaatgagtctataagttgcagaaattggcaattatattaatcacagaacagtaaagacccttgttcatagagttcttgatggggttttgcacttatctgggtaataaagacatgaatttctataatctataacaatgcttcaataatactcatacctagaagctgcagcccatataagtggacagattgctagctccctgtgattcctgtggtgataatttgcccaagaaactggatttgaaaggtgttgcaatgttggtgttaactaatattaaatgccatttttctatataaggaggaaatatgcatcttttctattattgcaaacaccttgtataaattgtattaatcttttacaaagttctctacaaagaacagttacaaaagtttaatctatccaaaatgtgtatgagtaatgtgtaatgagttactgtgttaaaaataacgtgttttctagattaccagactagaagctccctgagtgcccggagtacatctgtcttgttcactgggttctttgtatacagtaattgtgtttcagtaccttgagtatttaccaggttggacttcattgactgactggttaaatgacatgtgcagtatgataacgaaagctaagagtttctcagtttaagttatacaacagttctcccctgacccccaacctctaccagccttattttcctggtaaatacgttctaagatccacagtggatacctgaaacaatggatattactatatcctatctatactatgtttttttctatatgtatatacctatgatgaagtttaatttataagtcagggactgtaagagatcaaccacaacaataataaagtagaacagtcattacagtatgccatcatcactactcttgtgctttggggctattattaagtaaaataagagttactttgaacactgacactgccatatgtggacagttgatctactacccgagacagttactaaatgactaatggcaggtaacatatgcaatgcaaatatttgttgaccaaagggatgattcattttccaggcaggacagagtgggacagtgcgt

SEQ ID NO: 111670 - DNA, 1244 bp, Homo sapiens
acttcatctcagtagggtttttctttgatgcggatttcacgcttgactttccgtttagctgtcttgggctgagaggggccctttctgagttgcaagctcctaggtttatttcctggtaggatcatgcggatgtaacgcgtattttcaggacaaccatttctgttaggctaaaatttgaaaacccctaatgccgcgatcaacactggtggtgtggtaagtgagcaagtttaggaagtggcactggcaggttattaatcttgagaaatatctgcaaataacttctggctgttcctgttaaataggcaaagtgaattacccgttttgttcctcgaatacttattttggaaaaacatagtacttggaaaaaggaatacttagtttggaaagatgactgtgtgacttaggctggcaaagaaatcctgggtgctattatgttagaaaaaccgtgtgtagctcccagagggtacagtcagaaacaaatgaatgcaagttacagagagttggagggataaatttcagtgaaatgtagagagaactgacgttgctgtaatggaaagatagtaatactaagttcccaagccctagagatattaatgtaggtcctagatcagtgtctctctggagagtggtctagattaaatgctgctttaagatctttttcaaccctaagattaacataatagtcttggaaagattatagttaaaaatatgacacggtcgctgctctgtgtctcacacatctcttctgtgtgcctaattgatttggggtttttttgtcgggggttgttaagtgggctctagagtcaagttacattaggcgtgtaatccttttttcttaatttttctggtttctgcatcaggagagtcttcatgcttcaatgaactgccctaggttagggacaagctgggaaagtggaatgggtgggaatacttttaagatactgcccttatcctaaagtagttctttgattaggttatagcagtttaatgttccatccttaaactaaatgctaaaaaatctccctgggccttttttttttttttttttgagaaatccagaagtaatgggaacataggattgtatggtgttagtgagtaaaggaaaatgcttttaattagttaactcagttattaaaatacatgatcttaattagtaagtattcagcaaacatctgattgtctttctaatttatgaactgtggatatgggagtctgtagtggttgtggtgggcgaaatgaaccaa

SEQ ID NO: 111671 - DNA, 1193 bp, Homo sapiens
gtaaaaacaatttaaagagagaaagagaaagatagagagagagagaattcttgtttcaatgacctagaggaaaaaagatgttataagttcgcttttgaaactggaacattaatttttcaccatattaagacaagaccctgtatatacacgttaaacttaaacagctatcttttaggctgttgaatgcaagaaggtaagtttaagtaccatctagtggtaggcatcaccctccacctagtggcatccctctccatctagtggcaagataggcgaattgaaagcaagtgccaaagaagaaatagtctgatactgaaatgttgaacaaaagtttaaaaagacaacagtattgaccacgcctcctccaagtcccagcgagcccgtgtacaacctgtcccgactccagccgcctcttcagctcgccatggatcccaactgctcctgtgccgccagtgactcctgcacctgcgccggctcctgcaagtgcaaagagtgcaaatgcacctcctgcaagaaaagctgctgctcctgctgtcctgtgggctgtgccaagtgtgcccagggctgcatctgcaaaggggcgtcggacaagtgcagctgctgtgcctgatgctgggacagccctgcccccagatgtaaataacgcgacctctacaaacctggattttttatgtacaaccctgaccctgacgtttgctacattcctttttctatgaaataatgtgaatgataataaaacagctttgacttgaaaaaaaaaaaaaaaagagaatagtattaaagtaccagataaactttaccactgttttattaaattttaatataaataaactatgtaaaataattcatgattgtagcaggttatctaatttggaaataaaaagaatactcttgctggatggtaaacagactattcctagcatgaggtcttttcttggaattattttatcttagtccttacctagaaggacttaggaagtgacaaacagtgctaaaaacctgagagaaaagttaagacatagtgacagaattttgcaggacaaaagagtgatattagtacagtctttcttatgttaaaccttttatgatcttgaaaatcttatctttaaatcttaagaagctgttggattatactttaatcattgcagggaaaagatttagaaattatgttgtcaaccagtttagatcaaattgac

SEQ ID NO: 111672 - DNA, 1038 bp, Homo sapiens
atctataatgtatctactatttttaaaatatcaaaatgttcaaatgaaaataagtatacattttaaagtagttacttctaagggaaaaaccttagtcataaaagcttctattgctcagagcaatgtatgaacaactctttggcattatccccaggatcagtttacaagtcaaaaataaaaactacttccactattttgaagtcaaattttataagcctactaatattgccccacagtaatactgaattcaaaataacattaggcaaattccctaaaaatgctatagtaggatatttgtattacattatatccaagtgttgagacattttaaatagtactttttaataaaaaacaatcatactgatcacctattgtgcttactttcagaggcaactgaaaggatgaaatcactgacttggatcttgggcctttgggctcttgcagcgtgtttcacagtaagtatcattaatcacgatcacacttctttatagtttctcattaaccattacttcagatttctttttacattaatgatgttaccttttcttatatattagtaactattaatcatcaatgaaacactgtttagggcttaaatttaaatttaaaatctaatttaaataaccacacatgtctgatggctgccatactggacagctcaagtctgtggtatcagactgcattaaacagatacgtataaatgttaagttcccatactctagtcagttacacagtaggtaaaactctataaaaatagataatcaaaataaaaccgttttcccagcatgtagtttatggatcatttacaccagagtcacctaactcacttattaaaaatatagtaaagacctcatccaagcttcaataagagtatcagataatgggacctggaaagatgcattttactaaggatctacaagtatctttgcatgctaaattttgggagaatgctaagcatttatatataaacagctactttgtatacaaaaccaggttaaagacaaatgagatactaaatatcatacaaaattacaaaaa

SEQ ID NO: 111673 - DNA, 2266 bp, Homo sapiens
taaagcgcagcgccctctattggccatcgggacctcgcctggaggtgccgtcaggattccgtcccccagccactcccaggcactcgagagtaagcgcattagcccgagaaagcgttctgtggaacggaacttccttatcctatcgtttccacacggaaagattttaattcaccggaatcgactggcgttaaagggcacagtgaaaaggaagttggtatcaacgtgatctcgactaagggaccgagcggaagtcctcaatcgtacgccacgcggagagcatgctgggggccggaaggaagaggaaattccagtagccgatcaggagtctgcaaactccggtggtaggggagcgcgctgctgtttagagccacgagttaccggagcgcctgattcctgcgccgaagtcagtggtggccgaaagtccggagtcgctgtaaaacctgagattgtgagccatggtggggagatcccggcggcgcggagcagctaagtgggcagctgtgcgagccaaggcaggtcccacgctcaccgacgaaaatggagatgatttaggattgccaccctcaccaggggacaccagctactaccaagatcaggtagatgactttcatgaggcacgatcccgggccgccttagctaagggctggaatgaagtacagagtggagacgaggaggatggcgaggaggaggaggaggaggtgctagccctagatatggacgatgaggacgacgaagatggagggaatgcgggggaggaggaggaggaggagaatgccgatgatgatggtgggagctccgtgcaaagtgaagctgaggcctctgtggatcccagtttgtcgtggggtcagaggaaaaaactttactatgacacggactatggttccaagtcccgaggccggcagagtcaacaggaggcagaggaggaggaaagagaggaggaggaggaggcacagatcattcagcggcgcctagcccaagcgctgcaagaggatgattttggtgtcgcctgggttgaggcctttgcaaaaccagtgcctcaggtagatgaggctgagacacgggtcgtgaaggatttggctaaagtttcagtgaaagagaagctgaaaatgttgcgaaaggaatcaccagaactcttggagctgatagaagacctgaaagtcaagttgacagaggttaaggatgagctggagccattgttagagttggtggaacaagggatcattccacccggaaaaggaagccaatacttgaggaccaagtacaacctctacttgaattattgctcgaacatcagtttttatttgatcctgaaagctaggagagtcccagcacatggacatcctgtcatagaaaggcttgttacctaccgaaatttgatcaacaagctgtccgttgtggatcagaagctgtcctcagaaattcgtcatctgttgacacttaaggatgatgctgtaaagaaagaactgattccaaaagcaaaatccaccaagcccaaaccaaagtctgtttcaaagacttctgctgctgcctgtgctgttacagatctttctgatgattctgattttgatgaaaaagcaaaactgaagtactataaagaaatagaagacaggcaaaagctaaagagaaagaaagaagaaaatagcactgaagaacaggctcttgaagatcaaaatgcaaagagagctattacctatcaaattgctaaaaataggggacttactcctaggagaaagaagattgatcgcaatcccagagtgaaacacagagagaagttcagaagagccaaaattagaagaagaggccaggttcgtgaagttcgtaaagaagagcaacgttatagtggtgaattatctggcattcgtgcaggagttaaaaagagcattaagcttaaatgaagtttttgcttagcataaggtttttggcagttttggatcaataaatttttacttttaactaaagtcattgtattaatatataatactttaaattttaaaaattcttgtccacaaggaaatttgtctgggttattggacaatttataagaactatgggagcaatatgaaggtgcttgagaaaagagatgatgttgaagttttccaatattctgttgaagttttccaatattaagtattagcttagggaaatttcacagttcattgtggagtgttaaacttagaacatgtgtaacttttcacataaagagaatgcatctttgacagttatcttatttgtaaggcagcctataaaatagttctgaagtatttta

SEQ ID NO: 111674 - DNA, 1077 bp, Homo sapiens
gcagcagcagaagtctttgaaacagactttggtttgggcttggtggattttgcttttggaatcagttctttctttacagcatcatccttaagtgtcaacagatgacgaatttctgaggacagcttctgatccacaacggacagcttgttgatcaaatttcggtaggtaacaagcctttctatgacaggatgtccatgtgctgggactctcctagctttcaggatcaaataaaaactgatgttcgagcaataattcaagtagaggttgtacttggtcctcaagtattggcttccttttccgggtggaatgatcccttgttccaccaactctaacaatggctccagctcatccttaacctctgtcaacttgactttcaggtcttctatcagctccaagagttctggtgattcctttcgcaacattttcagcttctctttcactgaaactttagccaaatccttcacgacccgtgtctcagcctcatctacctgaggcactggttttgcaaaggcctcaacccaggcgacaccaaaatcatcctcttgcagcgcttgggctaggcgccgctgaatgatctgtgcctcctcctcctcctctctttcctcctcctctgcctcctgttgactctgccggcctcgggacttggaaccatagtccgtgtcatagtaaagttttttcctctgaccccacgacaaactgggatccacagaggcctcagcttcactttgcacggagctcccaccatcatcatcggcattctcctcctcctcctcctcccccgcattccctccatcttcgtcgtcctcatcgtccatatctagggctagcacctcctcctcctcctcctcgccatcctcctcgtctccactctgtacttcattccagcccttagctaaggcggcccgggatcgtgcctcatgaaagtcatctacctgatcttggtagtagctggtgtcccctggtgagggtggcaatcctaaatcatctccattttcgtcggtgagcgtgggacctgccttggctcgcacagctgcccacttagctgctccgcgccgccgggatctccccaccatggct

SEQ ID NO: 111675 - DNA, 1029 bp, Homo sapiens
cacgtgcttgggcgggggcgagaagcggcctgcctgcccccctccacccggggcgccctggccctgtcccgggtcccgggctgggaaccttccccgaaggagtctaagagggggcggcgcccggagaccccgtggcccctctgacccgcctttttcgggctcccggcgccgcggcagctgagtaggtgtggctgctgcgccgccgccgccgccagtgcggccttagtaatactagtaactaattttttacgagcgttccttccatgccggtaaatatgacagatccgtcccccggattggaaagagaaatcggagcggtgcatgagaagacaagaagggaatgtgtggctttggaaggctacctcccagggttatatcggttgtcgggaagaggcctccacttttaaagccactggcacacgcgagcgctctgaatgcagctgacccacactccgtgctgtattttttattagtgaactgtttactgtgctggcaaacgagtagggccctagagtcgtcaatgaatataaggactcttagaggaatgttaaatctgattttcaaatacaagctcttacagtatgaaaatgtggctgacgatacaaggcatgctgtaagcgccaaatactttgctgtatgagttctggaaagggagacagaaacttgcctgaagcgatgagggaaggacctttcccaccatacaccctatatttttaaagcacaagtacaaatcttttagctgctctgccctgccaagaaaccctgactcaccttttctgccccgatccatctcctaggaaaagataatatttattgattatttcctatgtgcatgtgttgtgataatcatggttaataagtttgtgtgcgccaaactgaatgccactttttcagatgcggaagctcgatttatcccaagtaacagcttaagagaaggaatgcagttgacccagattgcttttctgctaaacccatgctctttaaatctaacaagagatccaaaactgtgatggtgggtgacaggttaac

SEQ ID NO: 111676 - DNA, 2040 bp, Homo sapiens
tactcaatccttactaattttgaaacacactccctactttgtgaagtggctcaggttatgagctgtagaatttgttgtgggaagtcagtagcacaccgtaagcattaaaaaattggtttgaaattgtgtgaaaggaaatttttttttgttttgtttgcttttttgagatggagtttcacttttgttgcccagtttggagtgcgatggggcaatcttgcctcacagcaacctctgcttcccgggtttagctgattctcctgcctcagtctcctgagtagcagggactatgggcatgcaccaccacacccacctaatttttgtattttagtagagacggggttttgccatgttggccaggctggtcttgaattcctgacctcaagggatccgcccgccccaacctcccaaagtgttgggattacaggcgtgagccaccatgcctggccaggaaatgtttttagagttacaaagcaaagcagtggtacttgagaaggtaagtagcaatatggccatgccccctactgtatttgaataattgtgaaaaggttcatagtctccctaaaacttctcaaggctgctggccaaggtggcattccctctctttgcaaagccttttttatctgacatgctccctaccgaccggacaagatactcagctttgtcagagggagtggtggggcgggggtgggaaagtttggaagaaaggtgtgggaaccttatgatgtgtaggaaaggagagcctggcaggccaagacagcaaaaagcaggtggaaagctgaagtcgttgtagcatgtcgccttttagagtgtgattcttctaacttcagagtctgtttagggactctccacagacatttatctacttctgctgtcttttttatgaacttaggaaatctgatcacttgaggtgagaatgcttggtaaaattctgacccatctctcttccttcctcaaaatctgagagataccactgtaaccctctgctcacatctcctttttactttcctttgcctctgtcccataaacgtttatccttactgactttcattttatgtgttgatagggtttttccagaactctcaaaggagaagcacttatcatagtgcagttatggtgacatttacttactgcttactttgtgccaagtgccatgctaagcatttaactccgaaatggttaatattattatccccattttgttaatgtagaaatgggcacagagaagtaacttgccaaggttactcagcagctaggtggtggacctaggattcactgtgagcatgctgactccagagtccacatgctatgtcacactctttcatcacctcccgtaactggaatcaggtcctagattagaggcacgtcttcaggcaaccagccctctggttccatattctactcactaatgccctatttactaaaaatgagtaaattaatgaaactcaagagtcaccaatctgatagaaaaaatggttgtatatgtaaaaaacgctgaataggtccatttataacagacattaagactttcctaaacacctaaaattgtctgtttcttgtctattgccttgttctttcttctgcatccctagcatatgggaggtaccctgtacatgttgagtgaatgaatctgttatgtacatgtaatgaagccagtgttagactgacctgtttgttggggcataaatatggtttgattttatagaatttgggggttttcacaattgaagtgaaacatgagggtggaaaaatgccattgcaaggctatatacatatctataccagcaagtatctattgagagtctggtatttggtaggtactattttgagtagatacgtaagaggtatgcaaaatgcatatttctttggtggagcttctggtctttgtggagctagttatttagtttcattttacaactgagtaaattgaggcaagaggaggataaatttcccaaggtcacctactaagtttttgatagctttacgtctgtgtaaattattgcctacagccactgagccatgaaatcagttttacttttcagg

SEQ ID NO: 111677 - DNA, 1043 bp, Homo sapiens
tgtctttaagcctctaaataaaacatttgaggtcacttatcacatctgattctattcaataatgagaaagctattaattttgttcatatatgaaaatgttatagaaattgtagtgatttataacactaagttaagacaacatgactataattataggattgtacatgatgaatacagtagaaacaccagggtatttggtaatggtatcctcaccattatatgaggatacaattttaagcaagttatgacatctaggaaatgtttgataaaacatttttttaacaatatggattattaggttagatgagaaaataacttttcagcatttatttattgaatatggactcctaagaaagcataatgcctggaaaggttaaatatgattaatatggcatccctatagattacaatagaatggtaatattggaatctattggccattgctttttataaattatttgtggtaactattatgatccatttgagatttccactgtcagtacctctgagatctttgtggtctcttgacttgcgacttttttccaggactcttgctaatttatgagaggttttctgcttctaccctttaattctcttaataccacagaaagagagctgatttgaatcatagctacaaatcgttttgtttttaatacagttgcttcttagctaaggtttattctctgtccttatactgatgaaaaaaaacaaaaaacgcttgcatatgaggagaaattctttataaacatctgcctgatagttaggcacatcgacaggacaaagaagaccataggtgaattgtacctagcagatggggttaggaaaggtgattctctgcctttgaccttgagttgaaatcttatcatgactcagaattttcccattgtgtttgataagcattttatcttcccagtcagccttagccttgagaaagttttagggatggttaataacacagaacacaaagcagtcattttgggtgtgtctttaagaacaatgtttaagtggtttttaagaccctttgcatcttttaacaattggtt

SEQ ID NO: 111678 - DNA, 1054 bp, Homo sapiens
caatagactaattatgtagctctgaaaagatttaagctggtggcactgtaaacatctacccttaaggtacatagtgactcaaaggaccttgaggtataaaagaatggcatgttacctattgtagtaaagtcctgagcatgccaaggtaaagtggagaacagctttacatggaaaagacagaccttttagtttctgggggagaaaagttctcttaaattaattgcatcactctgatacttaaaactttaatctctgttttaagaagaaaacagaaaatatgtctgtttgtaacagaaaaatgttctagatgggatatgcccaaggaaaagtccgagatccctggtatccaccacgcattcctacctagaaattcactttccagagcctttttctatacaaatcttggaggctcttcatattttgctttactaaggtaggcttttatcttcataggtgacaaatagagtttctaattaaatacaatacaataaagaacaaaatgggaatattccctctattgacttttgcaaggtcacagcaagtctgtaaagtaataatgtggatggtaagagtccattctcatgaatctgtaatcctacataatatagatttgtggcacattatattgtcaaaggattgaacctgaaaatgacttctgcaaatatgtctatatataatgtatttcagcactaatttactataaaataatagtagccaactcacagtatttttttttctgtatgagacactttccatttgctttacatatatagacacataattccaaaattaaaaaaacctctggaaatgaaaagcatttttcacaaatttgcctgaacttatttggtgttacaacatgatgtgaatttacttgaggctatttatagtctttattctacttaatctgaatattcatttcctgcagaaatattaatgtgcttgattgtaggttactgcctcagatcctgctagttctgtatggtgaataaacatctggctttattgaattatatgtgatttattttgtgtatcttcaaagtagcctcctttattt

SEQ ID NO: 111679 - DNA, 1354 bp, Homo sapiens
tcttcttgccttctcaatattcttttcttgttgttttttgtttgattgttttttttaaatctgtatgcctatgcttaccaacttcccaatattccatagcctatttctggattacatattcttttctattgagctgttttcttcattaataccacacaattttaggcactaaattgttaaaatgttttattatattatagggctaggccacaaactgtttgtgaaagaagaagggctgagtcttgggaagtagagaatttttttattttcacaaaatattatctattctaaaagcatgaatgaatccaaaaccatcttataacctaggattggtttcctgaaaagttgtgtgtgtatgtgtgtgtgtattgagagtgcgcttatgttgtaaagaatattaaaatactgctttatttttgttgccttagctaaaaaaacttttctcggacaaaataaatccttctgggggcctctagaactggtagaaaagcttgttccagaagccgcagagataacagcaagtgttaaagatcttccaggacttaagtaagtctaaggttgaattccatttctcaggaacagcattcttattaactatcccttgaagagcaagactaaagacaattatgtacgaataatttattttataacaatccaaaatgcatgatgtcatgaataggtgctgacaggagagaattggtatacagaatattgagaaaaatgtgctcttgagggataattattcatctaagagagattgtctttttgttgaaatgccaaacatttgcttattttttaaagcacttgggagaatcatatctaagggggtggcatgctgtacttgacttagggaaaaaaggtattcagtgggtttgagagtcaagattaaaacagctgtcaaattaacctgaagagctagtgactgtagcctgccttagaactataaagtagtgaccaccttcccaaatgagactggtttaattttaatcagacagaggcctagattgcctgtgtccacattcatgctttggacatttatataatccacactgaatttataaggatttgctattattgatctgatggaacatttttagttgggtctcccagaggctgtgtcttcaaattgtagttacattcagtaattctttttgaaagcatttgttccgggtcacattagcccacacacaaaaattccttgcatgggaatgtactgggagaggtcctgaggagcacctcagtgtgcttgttacactggaataccattagcaagaataagtgaactgattctactgtagcctttgcttctggtgcttatgttttcagttgtttgatttctgtgtttttgtaggac

SEQ ID NO: 111680 - DNA, 1094 bp, Homo sapiens
gtaattgcgatgttaccccagggacccagatggtcctctgggttccctgggctcttgaatatatcaacaacattcacatttaggaggactgcaactgcttcattttgtgctgactgctgtaaccctgtaggtatatttctataataagatatgaccatcagttgtcgtaatatctactgaagtgtctcaaatatgtatatattttagatgtattaaataacactatctttggcttagcaggtttttcagatttgtacattattgggcaaatgttattgtatatcctaattattattgttaattattaattaattattgttaatgtctctgaaaatgaatggtagcttaagctattttgccagaatattcagacctgagagttttggtgtactttttcctgtgaaatattatggtttgtacttagttgaaggaacagagtgtaagcaatttacttacctttgggggcaggatgttgagaaagaactggagatgcagatcagcatgaggcaggagatggaattggctatgaagatgctggagaaggatgtctgtgagaagcaggatgccctggtatctcttcggcagcagctggatgacctcagagctctcaagcatgaacttgcctttaagctgcaggtaggggaaatatgaggaatagactcactggctctctaaaatcctggggcttccctcctcccatctgatcctccagaatcacactttaattacaagaggaaagaatcacatctcattttgatgctagctgccagtaaactactttcagaatcagacaaccatgggatcctgtattgctgttctagaaaaccatggccacttttcacattatagtagaggatgagggtcttttttatcctatagggtaatttctactctgcagtctaccgtgccagctaagttatatattctattagcttttacactggaatgtgatacattgatgaactattactgtgatcacactgcatataacaatactaactttagataaattgcttttttttccatttcaggattaactgatattgaaatatatgaacatttctgttttcccacttaccattagattcaaaagg

SEQ ID NO: 111681 - DNA, 2230 bp, Homo sapiens
tatcgttattttccataacagagttcagacttaggagtaaaacagaaaagtgaactaaacagtcgcttggaagagaagactaatcagatggctgctaccattaaacaacttgaacaaaggtaaaagtcctgtttctttaatgaaacactttggattgtcagtgctgaagtgaaaagaatgtgctgtacattcggcaaatagaaaatacatgaaattcttccaaattagcatcagacattctggtagaaaaaagccagttgaatgttatgtgtgttttctaaggtatgactgaaatgtttttaggaaatgtcaatcacttgactagcctttaaaaaaaaaaaagaaaggtcagccttttatgactgttttgaacatcagaactcttaatccatgtcagagtcatgtgttagaggaaggatacttaaaagcatggaaggactcttaaatgtatgtatgtaattctgtgattttattgttcatcactgaagtctttgaatacttggatgctaggggatatagaggcactgagagataggtgtcctccaaggatctattctggatctttctctcccttctttaacccttttctcttatctcccttttctttctcctgggtagttctgtagcttccactgtcacctccagtgtgttttcccagctcttaccttcatctggagaccagtcttgagttttcatcctttgggcagctatcttccaccagtatctacaattcagtctgcccaaagcacatcttcttcctatgctactctctttctgtgcttatgtgaaaccaccattttctctctggcaacttagcagccaagagaaatggctgagtcttcaaggatgaatgtgacgtggtacccaaggtcatttgatgtttctacccttaacacctgtttgtcacccttcttgcacttgagcaaaactaaactgctggtccctgtacttcccatttttcccatttatttctttcccaatagttccaccaattagaaatgtcctaattcttcccactcccttattcgtcagatacatttttaagtttaggctcaaatgccacctccccagagtttcctctgatacctctttgcagctagaaatgatctgtctttctgggaactcccatagcttcatactcatatctatctatactgcttatggcacttctcactgtctactgtaccttttaactctttatatatgtctcctccgatgcgagtgtaagctccctgagattagttaacgaatcttttaagttcccgtattagatctgtcgcagtgccttgaatatacaagcattcattcagtagatatatgaatgaatggattaatgggtgatttcttatattcagatgattcttaaccagtaagggtcctgaacagcagtgcatattaatgttaactcaaaacttaatggcaaatttataaataaacctgaaacctcttacatagccaaatacaaatgtatcagtctacctaggaaagatggttaggtacttgctcataaacagttatatgtttatgatttaacaaaatgattttactgttcataaattgtgcttttgaaatgaaatgtatcaaatttcttttcaatgatgttttgacttggaatttaaagcaaacagaaagagaataatgacttatctctttgagtattaagctgacttattctcttgctatttttgtgtttcctgtttatccattttctcattctcctttcacttcattgtcatttttattttatttagtgaaaaggatttggtgaaacaggcaaagaccttaaatagtgcagcaaataaactgatcccaaaacatcattaggcatttttaagttggtcacgtcgcaagtccgatatcacaacttaattgtaaaaggaagaaatctgaaagttactacatttaagctctgattctatataaaatgtcaccaaaaagttgactttgaatttgttggacttttaaaaaaccagttggaaatataggttgggtttttttcttattgttttctccccagggttagaaaaattggtataagttcctaattaaaagctgaataaactttgagaaattatttctgagttgaccaataaataaaaataccactttctttaaaaaagcctagggaattgaagctctgtacatatactaatgatgcctttacaacccagtccttgataataccagattctcggtgcattgttcatgtctgtatctgcaagcctgttct

SEQ ID NO: 111682 - DNA, 1050 bp, Homo sapiens
atttcaacctgaatgggttttctggtgacagtctcattcatttccccttcttgggttaatttgctaaagctcacatcttaagaatatttgggactgatacacaacatgtgataatggataatggatagatttccataatatcaaatagaaaaaaagctactaaaatatatggccagtgaaccattggagttttacacattgggaaacataaatgctaactattttgatagcaaaaaggaatgtaaaatataacttcaaatctatttttaaatgggaacccttatataataagtcaagggtcagattctagtgattcattttaagaagcaaagtttcctctccttggaggtcaaaattaataattatgttgttctaagtaatataaaagacctacagtatttcttgtttgaaaaaaatgtttgtattctgagctttttattgaaatgatataaatgaaaatacatgaagttcctatttgtcacaattttttacttctccattgtaggctgcaaccccaccctatggatgaacaggtaacagagcctcctgtttcaaaacatcttgtatgaattatgaagttggttgtaccgtgcctagccagcaaataaggtagcatgggcggaagatgagtgaatacagtgtgccatccttctaacaataccctgaacaaatatgtattgcctgaagctcacacaggaagtagcacagctttgagcagtttactaagtaaacatcagttctcacctattttaaattatccctgacataagatctaggagagctcactttatgtccctttcctctagtttttccttacataaaatggagagaaaaaagatgttttgatcacttagaaataagctaacataaatgattgtaaaacactttgttaatctaatagtatatgataagcccatgagaaagacagtgaatgctactgtgtctgagtcaccctgtcatttacctcttaggttataaaataaaataagtcctactgctttcctttttttttttttaaatggagataaggtcttactcacattgcccaag

SEQ ID NO: 111683 - DNA, 1005 bp, Homo sapiens
aaagtaaataactgcccttttcagaatctccttccacaaaacaagccaactcttccccattccctccatcttcctttccaagtcataatggaaattgtaaggagttttaaaaatagggtttggcttttgcaaatagaagatattgattaaagcaaagtcaaatatagagtaaaataagtttaatttgttttcttaagacagggtcttgctctgttgcacaagctggagggcagtagtgcaatcacagctcactgaatccctgttctcccgggcctcaagcaatcttcccaccttagcctcccaagtagctgggactggctttttttttttttttttggccggggagggggtctcattggttgctcagcctggtctcaaactcctgggcttaagcagtcctcccaccttgacttccacagtgccgagattacaggcatgagccaccacacctggccaagtttaatttgttcatggctgagaacagttagctcggaatacttacattgttttttgaataaggaattccttattctgagtgagtcacgaatgagagctgatagatgctttcttgaaaagggcaatacagtcatcccttggtatccatgggggattggttccaggaacccaacttgatatcagaatccatgggtgctcaagtcccattatagagaatgggttatatggtatttgcatataacctacatacatcctcctgtgtactttaaatcatctgaagatgattacttatacctaataaaatacctacacatcacttcatttgcatggattcaacatagtgcttggtgttcagtaaattcaagttttgcttttttggaactttgtggaatttttctttttctgaatatttttgattggcagttggttgaagccatggatgcagaacccatggatatggagggctgactgtacttacttacatatctatctatctttgagtaacaaactctttgggggaaaagagggaagtgtattgagcaagagaag

SEQ ID NO: 111684 - DNA, 1734 bp, Homo sapiens
gcaaagaacggtttcagacctttgaactggtatggtttggcagaatagttttaaattttgctgtatttgattacttagagataggaatttttaaaaatcaaaacaaaaaataccacagcttagtgtaaatgacaatttggcggttttatgtctttagaaatgttttgcctttctaagccttgtgctaaaggcgtataacggtggtgcctatctacttaagggggcattctagtcttaacttaaaagttgtctaaactgtccctccctggctttttttggtttggggtagacctaagggtgtttgttagtctcaaaactgtgaagtgacatgtcagaacagtccagactggtaagaaaattaatggcttcacttgaatttaaaccagctctagataggaaaaaaatcagtctcctcatttgctttttaaatggagtagtacatcccatattttagaacaagtaggggtgccttgcttaaataaaaatagcatttaatgtataattgtgtgaagggtttatggataaagctgtacttctgtcacaatgtggcagtactttctgctttaatattaaacagcttgttatttaaatattggacaaaatggctggcttcaaaatatagtcattaataaactaactttatgtgcacctgtgtaggagaatcaaaatcctgtatgctttctttgccttgttcctgttctcagggtgacgactgccaccaggagatgcagttctagttcttaaaattaaatttgcccaggtttctgacaggtgatacctggaagagagactatgtcttctcttacttaatacataaccatctttgattaccagctaagatgcgaaatcactgtactgtagtcaataaatgaagacttgtttcaggctgaagattacctaagagtatttattattggagtctgtgagtcaactgaatatattattacctcaagtcctgctatattaatataagtagtaagggttaattttcgtgtgtgtgttctctaaaatcctgtgaacatgacttaaccagcttaacatcatcagtagtactgcctagatggaaatgcgttttcatatatggttgaatatgccaagctatgagaactggtatctgtagttgtacgaactattagaatgtgatctttgttgctctttcacatttggtatctgatttgctgtggaaaagatctgtggggcctactgtgaggaattcatctgcaattgatttaagctaatgagttttatttgcacatctctggaaaaagaatgcaagcaaagcattaaaatgctatatgatggatgggtaaggttgaaaggatatatcttcttggcacgctacaggctgagttttctgtacaaaatgtggccattattgggaaatcattttatgtatttgaatgctcccttttgtttttgttcatgatctaggctagtacgtaagtgattgctaaggtggatgtagttatgggaaaggaagagaagcacataatacagtaaaagtaatcttatttccatgcaagtggaagacggtaccgtctccccacatttgagaagactgttttgcatcactctttgctattgaaggaagcagtgatggtgaatttccttctgtttgggttccttgtgtctataacttcctttgtggtaaagccatcaggaagaatagtgggagtggggcatatggtcagggtgctcatatcctgctttagcctagctgctgcttacggagtg

SEQ ID NO: 111685 - DNA, 1504 bp, Homo sapiens
gtgcctggcaccgtgcctgactaatttttctatttttagtagacacaggtttcgccatgttggccaggctggtctcgaactcctgggttcaaatggtccacctgcctcgacctcccaaagtgccgggattacaggcatgagccaccgcatccagcctgtttgtccattttacattttgtttgtttgtggttgtttgagacggagtcttgtctgtcgcccagtctgtagtgcagtggtatgatctcagctcactgcaacctccgcctcctgggttcaagtgattgtcctgccacagcctcccgagtagctgggactataggcacccaccaccacactggctaatttttgtatttttagtagagatggggtttcgctacattggccaggctggcttgaactccttacctcaggtgatcctcccacttcggcttcccaaagtactgggattacaataggcgtgagccaccgtgtctggcctaaattttgtttttaattagggaaaggaaagggcaaagggtttgagttgctgtctgaactgtgagaaaaatggctgtaatatttttctaccttttcaactttttaaaactaatctttctcattatcctcagatcataggtatattgaactgttcctgaattcatgtccaaaaggaaaataagactctaggggctccagataataaggtaaatttaagaggtaatactgtgggctgggtgcagtggctcacacctgtaatcccagtactttgggaggccaaggtgggcggaccacctgaggtcaggagttcaagccagcctggccaacatggtgaaaccctgtctctactaaaaatacaaaaattaaccgagcatgatggtgggtgcctgtaattccagctactcaggaggctgaagcgggagaatcacttgaacccgggaggcagcggttgcagtgagctgagattgtgccactgcactccagcctgggcaacagagcgagactcaaaaaaaaaaaaaaaaaagagagagatacaactgtggaaattatttgctattgataaactaataatcattcactcactaatttgtaatatggtagaaaccattctctttttatttttcaaatttttttagggactaggtcttgctctgttgcccaggctagcagtggtgcgatcatagctcactgcagcttcaaccttctgggctcaggtgattctctcacttcagcctcccaagtagctgggactacaggtgtgtactaccatgcctacctaattttttaattttttgtagagatggggtctcactatgttgcccaggctggccttgaacttctggccttaagtgatcctgctgcctttgcctcccaaagtgttggaattacaagagtgagccaccccgcctggcaccattcctttttaataaagatcaaactaatgataattgaagtgtcaatataaggaatgaaaattctcgctctggcttctcagatgtggggggcaaaaaaaaaaaaagaaaattct

SEQ ID NO: 111686 - DNA, 1050 bp, Homo sapiens
catgcccagctaacttatttttatttttattttttgtagagacagtgtctggctgtgttgcccaggctggtctcgaactcctgggctcaagtgattctcctgcttcagccttccaaagtgttgggattacaagtgtgagctaccacgcccagcctttgttcttttttttttttttcagtgcctataatctagaaagtctcttttagggtttaattcataatcattttacctgctctctgatgttacaaaaagggctaagttcttaaactggtaatggtctgaggcattcagtgcttatgggtgttcaggtgatatttgttgagtggcagaaatttcagatcattttggcttttaatgctcttaagaggaattgaggatttggacataaaagtcatacctaattagaatctgttaataacccttgaagctgttatgttttaacagtgctttctgttccacctctcagaattgcctaaggaggtgccagaaaagcttccagaggctgctgattttggaactacgtcttctctgcattttgtccacatgagaggattacctttccaagccaatgcccaagacattataaacgtgtgtggcagtaagatatccaatctcaatagatttgaacaaaagttctaaaattgaacttgtattaatttggggaaggtagagaagaaaatatagtgtttctgcgttggatagtaagatggcatcttcctggttgcaaagcttgcttctttttctgtagctgaaaagtgtggcttggtattacttttttttgtgacagagtctcgctctgtcgcccaggctggagtgcagtggagtgaacttggctcactgcaacctctgcctcccgggttcaagcatttcttccgccttggtctaccgagtagctgggattacaggcaggcgccaccatgcccggctaattttagtattttcagtagagatggggtttcaccatgttggccaggctggttttgatctcctgacctcaagcgatccactgtcctcggcctcccaaagtgttgagattacaggtgtgagcca

SEQ ID NO: 111687 - DNA, 1851 bp, Homo sapiens
taaactatggtaataaaattactcatacaggaaatattttagagacctatggagatgattttaaaggaagacacttatgtataaatttaactatattgtatttccttaagtgattgtagaaacattgcaatagaaataatgaattttgtgttgggcctatcctgatttgctatttaatgatcaggaaggagatcataagcttctgtgctaaggtttgcttatcttttctacttggaaggttttagagactaaatccttattggtgtttggatgacttcagtgatggggatttgtgtaaggaatatgacacttgtttcctgctttgttgttggaaaactgcattcttgtgacttacataattgagctaaaagtttgatttctgttttcaattgattttgctcatacacttttagactgcagaatccgcaacggtgagaatggaatacattttctcctaaacagagatgggaaacgaaggggtgatgccttaattgaaatggagtcagagcaggatgtgcagaaagccttagagaagcaccgcatgtacatgggccagcggtatgtggaaggtatgtgaagtcagattatggctttttgggatcattgcattaggttttatacttttcaaggtagtttttatttgatccttaataatgaagtatttagattgtatgaatgcattcttttataggatgtgaaaataaaacataaagagataaagtttcttttttttgtgggggggatggaatctcactctgtcacccaggctggagtgcagtggtgcgatttcagctcactgcaacctctgcctcctgggttcaagcaattctcctgtctcagcctcccaagtagctgggactacaggcacatgccatgatacccagctaatttttgtatttttattagagatggggttttaccatattggtcaggctggtctcaaactcctgacctcaggtaatccacccgccttggcctcccaaagttctgggattataggcgtgagccagtgtgcctggccaatgaagtatcttacaagctgtgagaaataaagaagttatgcccgcatggtaaatatgcaataaatgtcatttgttattttctctagagaagcgcataaagattaaaatagttattgaattctcagataacccagcaagttgtaatgattttttttaatgggtttgttcctttgttatgtaaatttttcatccctgttgggttttttcttcgtagtatatgagataaacaatgaagatgtggatgccttaatgaagagcttgcaggtcaaatcttcgcctgtggtaaatgatggtgtggttcgtttgagaggacttccttatagttgcaatgagaaagacattgtagacttctttgcaggtactttgcagttgtattatgcttgggagctcatatcttttttcccttggtatctccttctatatcttagatgagcctgtttctgggcaaaggcatgcagttatattaggttctttaggggagagctcttcacttaaatttctaatatttatagattttatatgtgtttttgttctatcaggcagattttaggagggaagtcagatttcagaataatttcatgagggttttactattgaaggaaataacttctcataatagttgctgtatttgtgtaagacaataacaatttatataatttaaaagtattttctaattcctagaaccattagcagtgaagtctgtgatttctattgtttcctagtatataattaacagcaaaaaaaaaaaaaaaaactggtggggagaattgtatgttttgggtgggcttcttggaccttacctattctggaaatacaagtatgtaggtgt

SEQ ID NO: 111688 - DNA, 1048 bp, Homo sapiens
gcagtgtaagtgtggctggggtgaatgttgaggccttgttccccgcctggcccatggtaggtttcgtgaggctgctgacgcccccacctcgcatcttcttgctttccgccggctggttgtgaagttgcgaggcccgagcccgccggagggttgggagtttccgtgcagcccgagcgctaggcctgggcggccctcggcgcctctcggtcggccgctgctgggaaggtgcgcgcacacagttgcgtgggctggcttgtagggaaggagcctgtccccatcgcgccgttccctctcctgtccccagggaaagacgagctgtcccggtttactgaaggtcacctctgcaactccactcatacagaaggtctttaaggactgtgtgtcgcctcgtctgggaaagcagtttggagatttagctgttggggggagggggtgaatgggagggagcgttgagggttgaggacacaacttggggtcccaggaatgaatttgcaatgttttcctttccattttttctttatttttttagaaaagtcggtgtgtagttagattgcaaatattttgtgctttgtagatgaacctttctcttcttggtacgtggcatctgggaagtgtctgcacactttttaactacccagcccctgattccttaggtcatatttatcttaattcaatttgtgcttctcctttaacttagggagactgggaggctaatcagcatggctgctgtctgccagtggctgagctaattgatttgaatcctggcccaatactttacgctgcctttttctgtaaaagcttgtgatgcttatggaattatggaaaaatggggaaagttgtctacaaaaaccacaacaaaaccatctccagtaaacctttgtgagctagcttctctctttttttttctatgaaattgactgcggtgatatctgtagagcatctactatgtgttagacactgcttacatttattccttaaaactaaacattaagcctttttttttttttttttttggagaccgagtctcgctctgtcgcccaggctggag

SEQ ID NO: 111689 - DNA, 1070 bp, Homo sapiens
acaggcctgtgccaccacacctggctaatttttgaatttttagtagagacggggttttactatgttggccaggctggtctcaaactcctgacctcgtgatctgcctgccttggcctcccaatatgctggaattacaggcgtgagccaccacgcccagccctgtatgattcttgtaagggtcttctgaaagtaagacttgcattaccagattactgattatctttggaaagagtgagttgacctgtcatagcctcagttttagcccatttaaaatgggagccttctatcattacatgatctctaaaatatcttccagttctaaagttctctcctgccaggggcatccttcaaatgactggcacacatttccaaactgctccctgatttggcttaggtagccttagttttggtctgacataatttagatgtatcctgtgacactgaataagggaaaactggcagaggaaagaatctgcaaaaataccttctgagtatttctttatcataccactaggagagttgcctggaattaacatccaataaaacgtaaatatactggtcctaaatgtgagggaggtgtcaggttaataatatacaatatgattccaggttagactttaaatcaaatgatgtctgtcatataaaattattcagcatatcaaaaacattgggaatttcagaatcaaagagagtttatattcaaatagatatttataattatcatctcttctgaccaaaatctaataaccttttgtttatgaagcaagattattaaaatttttgttctatccaacttttcaaagaattgaaattatactgtaacatgtacagaatagaacagaacatgagtgggcatatgctctttaaatattcatttgaataaagacacatgcacatgtttgtttattgcagcactatttaccgtagcgaagacttggaaccaacccaaatgcccatcaacgagagactggataaagaaaatgtggcacatatacaccatggaatactatgcaaccataaaaaagaattagttcatgtcctttgcagggacatggatgaagctggaaacc

SEQ ID NO: 111690 - DNA, 1031 bp, Homo sapiens
tatttaacctgttggatttgttcttttaattcccttttggtgcaaggacagagcttgccaccttgttttaacacccaaaaaatgtgggttgaatcagtacattttggaaactggcttttattattacttctactaataatagcaatgacagttaccatttatttagtggtacctaaatgtaaggcctttcatacatgttttttacatcatatgtcaacattcattataagaatattgctctatgcattgccgtagactcaaagaatttagtcaaatgatcaaagagcccgtaacagaagtataatattgtagctcaggaaaaatatggagataccatatgaagaggtaaaagaagttggcagttctcagtaaagagaaaggaagactgcactaggaaagacacaaagctgtgtttgaaccttcacttctttctagcccatggagatgagtatagctgcagagctattcaaaatctagcgtctgtcaattcccttcctccatttacacctcttcctgcagaagtatgtttgtggtttttacccgtcacgggactgtttactttggagaaacgtcttctgtggactttgtatggggtttgtagttgcaggtgcatcttttgttctctcctcaccctgtttgaacttatatgaactgtcacactccccacctcgcctttttgaaaagtctagtcaagatagtccctttaaaaaataatgtggtttaggctgggcatggtggctcacgcctataatcccagcactttgggaggctgagactggcagatcatcacctgagatcgggaggttgagagcagcctgggcaacatagtgaatctcgtctctattaataatagaaaaattagctgggcgtggtggtgtgcatctgtaatcccagccactcaggcaggagaatcacttaaacctgggaggtgggggtgaggttgcagtgagctgagatcgtgccagtgtgtgtactccagcctgaatgatagagtgagactctgtctcaaaaaaaaaaaaaaaaaagtaatt

SEQ ID NO: 111691 - DNA, 1062 bp, Homo sapiens
atataaatgctatttatggtggctatgtaaaaaaatggacatgtgaggagagcatagaaacaaaacatgagtttgttgggatctacttagtttggattgtgataaacgcaaagtagtccactgggtatttaaaaatgtatctttatttggaggagcagagtgttgaaaacatgtctgtgtgtacattagtaatatagatacataaaatatatacactgtgtataggtatatactaatcttctgtgtgctttttatctctccaatgcagatatgagtatcattgggcagatggaacgaacataaagaaacctattaagtgctctgcaccaaagtatattgattacttgatgacttgggttcaggaccagttggatgatgagacgttatttccatcaaaaattggtataattaatttttgtaagggggatccatcatgatttatcttttatatgtttatagaattttcctccctctttccactatatctagttggagagttctttatggctgtgttgatatatgtatatgttacgcagttcccaagaagaggcacaaaagtttgttaacccagtggtaaaataagcaagtgatcctgtgtgaattgagcttttcccctttaacttagtgcttttaaatgcttaattagctgaaagtataggtttattagaaaataaatgatctccctctcttaaggtaattatttttgatgatattctagattaaagtatcactgagtttattttcagacaatgatagcattttttaacactttaaaaaaattatgatcatcattgagaataaacttacttccctgaagtaagggaaaggcttaagaagccctttcagtagaaagttctagatggagggttattcctattctaggaaccatggtaaattaccatacataacatatatttttaatcttatgcacttacaggtgttctatgtttttcataccaaatttatcatgaacattaaggtaaaccctctattttattttatttattttaatctaaatttttcattttttgggagacaagagtatctctgtattgcccaggc

SEQ ID NO: 111692 - DNA, 1071 bp, Homo sapiens
aaagaatttcatgtctgtggcaaaaactatactcaaacgcctctttagggtttatgctcacatttatcatcagcattttgaccctgtgatccagcttcaggaggaagcacatctaaatacatctttcaagcactttattttttttgtccaggtaagttggattaggaggcctttggtgctcagggtaagcatttatcttcatagttctaaggtaaatactgtattcacactgtcaggatggaatttgccatatctctgtagtctgcatcctcttctacagttttccatgatgataaggactgactttttgtttctaaattttattagtttccaagttgatggtatgcaagtctaaaatggatttgaaaagttgtgccttggatttgcttcagttaacaggccatatggagggactggataatgaatctgactagtttggcagatctgtggatgaactggttctcctgggcattttagtacttctcctactgcagtctgccctggatctttattagcggactctggtgcaggaatgggttttgaatatcacatctgttttttgtccttttgttttttttaaaaccacattctaaataagttttaagttaaggactatccatcatgtctgagggaaaaatatgtcacaaagaatgtttctgtgccagagggccattagtctttggtctgacttcctagttaacttcctctttttttagtcttcaaataactggccttagaaatgcagactaagagcagtgacagtattctcaccatgctctaataataagagaaataacaggcaaaaatgaaaaagaggtggaaataaaagagctgaccagttttttattgttgctattattgttgttggaggttgagaaggggagatggtcatcaggagaataaacaattaaacatcttgaattcgtgttgtttttgtatatctacaggcatatatttataaatgcctttgccacttcccctgttctcttaagaaatttgtatccatcttccccctgtacacactcctcacactgaaggcacacattttacctatataaacatactttagga

SEQ ID NO: 111693 - DNA, 5961 bp, Homo sapiens
attcagccatattcgtgttattttcctaccatatcttttgatagcttgcagatacgttagtttgtaaccaggttttggcttttcatataatgctgaatttgcctgagatgctagtgttttgtgtgtgtgtctatgtctacttggttaactgtatttaaatggtgtccagatcattcctttcaacaggaagcagcaacttccatttattgttactttgtgtcaggcattacatgaagtagttaacatccagtatcacatttagtccccacaataattttatgagatagggggatttatcctaatgtcacagatgtaaaagcataacatcaggagtgcttaagtgatttacccaagacacagacctagtgaacaagaaaaaaataatctacttttatgtacttcaaaagctaatttccaacaaatgttcatggtaatttactttggaataagatgcaaataatgtttttgctatttattctgcctttctttatatcatgcataggaattcaaccttattgatagaagagaacttgcaccactccaagaactgattgaaaaactcacctcaaaagacagataaaaggatgcagagctgtgcaaattgttcctcaaatgaagcagtgtggagtgtattggggattttgttatattttgtttttatctggattgtttttgtcctaggtttgggggcgggggcttgtttgggttcctttttctttattctgattatgtgaaaccatattctattgctaggggaagccaagaaccattctctatacacttgataagggtaaatttatcttagtgtttttaaacttggttttggttacttgaggagttttttaataatattgtgtgctgcaagaaagtgcttgttgattgaactgccgatggattggtttctgtgtggtataaattgtggcccatttatgaagtccccaaaagagttatgtttttaagtgccttggcaggctcacttctgaggtgcaaaacatagatatagaactgaacagggcttgaaacaatattaggattactacccagggcacttactggtgcatgttgtaacatatctatgataaaagccatagtttacctaaaatggtgatttccagcctttactgctttgaagaaacagaatttgtaaaggtatgcatgtagaacataaaaaatatttcttaattattttttatattgatggtaatatattacgttcaacaatgcttaaagctctacaagcaggtcttttcccacctcttgatatctgtgatactgaaacttgaggatgttgaaatgtattacattttggcttctttctacatgttaactgcactgtagatgtaaaaattcaggttatatataggattgccatcttcagaggtgatgctgaactgtgaggtttcctagtaattgccaaatgagccgtaagtctgcagaattcccttctactttgaagagaaggggataggaatgtatatttggctgggggcatggagatgttcgtatgtatgaggagttagggatggggagtcaagttctagaaagttttgtctgaaaacctttgaatagaatggcatgaagattttaatcaattacttataaacaaagtcttagagacttccttttaggaatcaacttccatgagaagttaaaaataaattattaattttaggtacagacattaaacatggaatttaaggactgttgggggaaattgatcacttcttagcatttccattcagtgaatggagctgatgtttgcctgtcattttaagatgataccataccttctttggttattataggtccagtttgaagcattctgacttctggtttttccaccctgaaaggaaatgtttttctttgcagcagtattagataatgaaaaatgctaattcagtagttattaacttctaaattttattcgccatgactttctagtgaattattaccataaataacaatttcagaaacttagtttttagaataaatattaatttttccacttcagttttattctagaaaataccctttttagaaatccagttttagttttgtcattttcgataaatctttcttcagttagaaatatatatccttccttcagttgaaacatatacctttttcacatctaggaagaaatgcttgctctgaaatagtatagattaaaaacactcagtagaaaagaatctaaaattaaatgaatttgttttgccattaaagtagagcagtgatacaatttaatgccattacaattatgttgactagaaactgcctttttctccacttcatttctagcaattatttaccaagtaccaacagtagaagtaacaggaaagcctggcagagttaaatatcttggacatttattggtaaagcttatttataaactgcagtcagagctagttaatttccttaaatctttttgtattcagatagataatatgaatcattatgggttgattcagaaataaaatttgtgaggtgattttgaatcttgtccatataggaaaatgaagcacagaattactcagtcttccatattgtatttgacttcatatcaatctagtaaaaaaggagttgcaatagccaagtatagagagaatagtgaaaaattaatcttgccctttcaagccttatacagtagtacactgtacttgtttttagtagtaagacctactttcccactatatgtagatagtttgttttcactgtgccagaatctcaggtgcctgcttagagtatttctttaatcacagtcactgggaagtaaggagatgtatatatgtgtatatatggtaacaaagcatagcagttctctaggggagaggcctggcattgcacatggtgttacatggctacaagtaaggaaaaaatcagaaagtgaaagaactgatgtaataaaaggttgatttggttggttcccatgaaagttagtaagatgcccttttaaatataaggatcagtgctttgttctgcagcagagtttgctgataaatgtctgttggattctttttggatttctttaattaatttgtaagtaaccaagataattattttcccccttgctctctatattaatacgtagctataaagcaacagttggttttcttatcctttgataaaagcatcccataaaatataaagtagtaagttaacatagtattattgtcacacacaatgctttttttggttaaatgttgatacgaagcaatgttttggaattactttaattgatggagtagtggtggtagagagaaattaataacaaaaagagtgaaaatattttaattagcagtagatggtgctactggctttcatttgctgacttgattattccctttctcttaaaaaccatggcattagactgcactaaattaacaagcatgttagttgctggtagaggttttggaggttaatttaccttaaattggaagacttttaattgcagtctctttctaccttccctctgttagtcatttgtaaattctaaatggtcaccataaaatgtattaggtaggagaagatacgttttatgtataatatatctcagactgagttactgcctgtcttatcaggatggataaaacactacagtctcttatcaggaaatagagatgatgtggatatttatatattacatatataaccaccagactccattttatatattagcattttccttgcttatgggaaaatagcaaaacaacatttcatttatacttttgtttacccctctctgagacaggttttgataaccactgaaatggtagaatatgtgagatacaaatattgagttgtagaactttctttttaaggtgaataagtcatgccttaacatccaaataagagttcatcttcagagtggttcttttgggagcactgtttattccagctatactgcaaaagtataatgtttttggaactgttctagagcataccatgaaaagcagtttgttattatgcaggaaaatcagtttcatcattttagttacactaaacacttttggcagcttaatatgacctttttaaattttttttattttttttatttttatttctttaagatggagtcttgctctgttgcccgggctggagtacaatggcatgatctcagctcactgcaacctccacctcctgggttcaagcatttctcctgcctcagcctcccaagtagctgggattacaggcagcaccacacctggctaattttcatatttttagtagagatggggtttcaacatattggccaggctggtctcaaactcctgacctcaagtgatccgccctccccagcctcccaaagtgctgggattacaggtgtgagccaccacagccagccagtatgacctatcttaatcatcagctcaactgtaatttaaatttggctgttctctggagctaaaccattagggaagttcaaaggaatgtgccatgatttccgaatttgcacaagagaatgttttaagcattggtagcataattgaataaaagaatagtttcctgatgtcactattttgaagtggaaattatcacttggatgtggaggttttactttttaaaaacattcagcttaattaccttaccttaattaccttagttagatatactaatggaaaaaaaccaagtcctttctctagaacttgttttctatttttgttccttttcatgaaaacttctcaatttaattttaactactgtaggatagtattgattgaatggatactatggaaaagtggatccaatatttaagatagaagtagtttaaggagacaacagcctttactgccatttttttttaaatgttttcactcagatgaacaatttgactttaataaaagactggagatttttgtacaaagaaataggaataagtttcatatactaattatgctgagttttaagcctacatatcacaaaatatttagaattgtataaccttttcatatatttataacttttaatgtctttttaaaagatgtgggaccaaaaatatatttataatttggaaatgtgactgcataccaataagaaaacttaccttattttgaaatttatctgggatattaaagaatctaccaattcttaaaaacacagatttatactttaagcttattttaaaattaaagaatatataccaattcttagaaacactttaaggactactcttaaataacttaaatatcagagttttgttgtaatattaaaatttaccgtggaaatcactgttgttcagctatcaccttaattgtgtatgatatgataaatgtttagcagtaaagctatcttaagatttaatggaaaagtttaatttgaagatgtaacaaaaattctgaccacagttgattctgaatttttaaggctttcctaataggctgatcacagagaataatccattttgaaggtataaaactgcactgtatgtctgtcacttgtagctgaactgattcacattttgacaaaagagagaaaatacaaaaatgagttttgcaaatgtaataactttttctgcatatagaactaaataattgaaaaatatgggctatagttctcaaaggtagatagtaaaatcactggctttttccagctgtatgtttttccactgtgcgtgtacacacacactggaaaataattaggctgattttgcaggtcttcattgttagagattctgaagtatttactgtcaattcataggtttcagtttatttaggaaattagtgtttgacagctttttttaaattatttcactgaagctgagattattagtgatacaaagttaaaatttcaatatttaatttctctatatattattaatattaaattgttttttacttataaattcatgttctcatctgatttaatattaaatttgtataggtgggcgtttcttaccattttgcacaagtttttgtttttctgaaatacttaattgtgcaggttgtaaaaaagattagtgcattt

SEQ ID NO: 111694 - DNA, 1053 bp, Homo sapiens
agttagcacagtaataatcatttgttgacctcttcaccaagctattatttaatattttgtcttcattacagatcattaaggaatattaataatattggagaatcatttaccaagttccaaaaggaaatgtgtattttattttattttatttatgagacggagtcttgctctgttgcccaggctggagtgcaatggcacgacctcagctcactgcaacttccacctcctgggttcaagtgattctcctgcctcagcctcccaagtagctgggattacaggcatatgccactatgtccggctaattttttgtatttttagtagagacagggtttcaccatgttggccaggctggtctcaaaactcctgacctaaggtgacccatgagctttggcttcccaaagtgctgggattataggcgtgagccatcgcgcctggccaaaacgtgtattttagaagtcttctcagagtatcagaagtatttatgttagaggcatttgtgtttgaatcttcaggttaagaatatttaatggtagtagccacagttgctcaaagtcactaatggtatttgggagaaagactagttgaaatgctagccaatgctgttgtggactgtgtctgcatgctttaaaaacgccctgtgggccgggcgcggtggctcacgcctgtaatcccagcacttagggaggccgaggtgggcggatcacgagctcaggagttgagacctgcctggccaatgtggggaaaccccatctctactaaaaaatacattaaaaaattagccgggcacggtggcgcttgcctgttgtcccagttactcgggaggctgaggcaggagaattgcttgaatccgagaggcggactgtgccactgcactccagcctgggcgacagagcaagactccgtctcaaaaaataaaaaaataaaaacactctgttattcatttattgtgtgtaaagaaatatatattgtaaaattacctacattttgataattaggttcatttacctctgttgtactaaatgtattataagttgttaatcccttatataacat

SEQ ID NO: 111695 - DNA, 1051 bp, Homo sapiens
tcacaggagtgaaggtgtggcctgtatgctgcctagtcttgcctagaaattgctgcacctgctgttcttttgcttatgccttaacccttggttaccctaattccctattctcttgcctcattaggtctttaccctgactaaaaatgcactcatctagctgggacaaatcctacactgcatttgtcccatctagatgagtattctagcagagtacatggcacatgagtaggcattcaaaaattcaacatacagtacattttgttacctatgtgccaggtgtcgggcaggctgagttaacagctgaacagaaacctacctacccaacgtgctaacttctatacagcatggtcgtgcatccaaatcaaatggaaagcggtatgggagatctggaaaggcctcctgtgggtggcatctgactacctaaattcccatcccagtttcacttactgactttgacacttggaacaagcagcctctcagtgcctgttttcccactggcaggtaaatgggctaatgacggtatttctggcactagacttcgttaattaatgaaaagcacatagaagaaaacagcctggctctctaagtgggcagtgcgattcccaaggacggcacttcgcctgatagtcttcctctaggctgagaagccagagtaaatccatttgattttcctaccacacagtgccttctccccagatgagttcaaagctttaagtctatccagttctgtccagacgcgtctgttcatctccaacaggcccactagagaggcgggttttccaaagcctggcacggcccactgcaggtgacgccctctgccctccagcgccctcaggcctctggggtccacccttcctccccacccgactccggaacctcttcccgcgccctgcccgggcgcctggctgcttggggtagaggccttccgccacacgcgcggccccgccccggccttcacgtgacctggcgtgcggagcgcgcacgcgggaacccgcgctggaggcgggcgagggccgaggggcagctagggagcgcggcttgaggagggcgg

SEQ ID NO: 111696 - DNA, 1088 bp, Homo sapiens
caataataaattcattacatattaatataaatacatttgacaaaaagttatattttctaaaataaaaagtagctagaagaatatcattgctttacatttttgcagatatctttaatgcctcacttattaaaagacagctggatttttatttatgcttctgtatttaatctgttatggtatgtttgtttgtttgaagtatattggtatatgaagtaatctggcctctcacagaaccccttagaagatcttggggacttaatggggtcctcactccgtattttgagaaccattggccaaaaacatgatggaaagactcttgtctttttctgctttccacggcactatgtgccactggatttaggagaatgtttcatgttcctgttctcttttttatttctttgttgtttttttttgaaatgatacatgtgttgatgaagactctcttttaggtatatttttgcatctaatttgtatgaatctgaatgcatgaatgagacagagtggacaatttatcaagactggcatgactggatgaataaccaatttggccaaagccttgaattggatggaatcatttatcttcaagccactccagaggtaaaacccaataaaaatgtgtttcactgaaaatttaaagaaatatttagaactcttttcagtggtatataatgagggcaatttagtttaactccagcctcccaacctcccactccccacctctaaattagaaacttgtaactgtgtagatagaagcattcttttttctcagcaaactggaatcccagactgggcaagttgctgttttaggctctttgtgcttcctcaattcttttttattttactcattatttctttctaacatttgcagactcttctcattcatcacagttaaagtaatgaatgtggtcaagcaactcctagaatataggcttcatgaggtgggaccttgggcattttgattactattgaatttccattgcctagaacacccagtgctgggcactgttggagcatatagtaggagctcagtaaatatttactgaatgaatggcaatgttgatggaggtccatatcaagaaatattttat

SEQ ID NO: 111697 - DNA, 1004 bp, Homo sapiens
agaaaaaaattaaataaataaaaataaaataaggatttttttttatcctttagtgcctctatctgtaggataggtaaaattataataacaaaaattctttctcaccccctttttctctgctttgtccccatttcttcctctcttccctacaccaccaatctttagatactttaataataaactgcttgtgaaattaaatttatctttttcaactaaattcaatatggaggatatttaaagttacaggatatggatctcatctatttttatgttggccaaagtcttgagattaagggattttagttttgagtttcatttgggatcatgtcaaggattaattgacattacttaatcattgagtcattgtcttaatcacagttcatttattgcccaaatcactgggagttgactatattctgttaagtgagtggtgcccatattgataaagggaatgggtgagaatttattgatgaatatttgagagagaatagtaagggaattggtataacaaatatccctatacccatgttgataactgagtgattaagctataaagaagaaagcacaatttggtttagttttgagaaaaatttgatttttcctttcttttgtggcataatgtctgctgtttaatagagacttgacattcataagggatatatcaaggattttgaaaatcttgacattttatgtaactactgtagcgtatacatgtagttgtttttcccatggtatgaactaaagcttatctggaaaattccaatgacctcttcatactactaatgatgttaaaaatataggataaattcacttacaatactattaaatgaaaagtcagcattaagtattaacagccaaccatcaatttaactgactttgtaaatcactttttaattttatctaacacttctttgttttgactaagaatcatttcacattattatatttacttttattaataatgctagcagttgactttcttattaaggtatttttacaaggca

SEQ ID NO: 111698 - DNA, 1078 bp, Homo sapiens
ttgaccagtttcttttcttttgttttttttttaaaaaagacatttaaagacaaagacattatttctcatagcaggaaatgtagaggtagatggttccagtatcagcatagtgactaaactacattataaaagatccagcttccttctgtcattcccctcttttgtcttcctcagcaggttggcttttttccctggtgcctctcacttcgttggtgaccagtttcttaaactgaaagctttaatgttacatagtaaatggtagtgtgtcctgtgtaaattagtgtacctattaaaagttgcaaagtggaattaaaggaatccctagaataaggattctgaagttttattttaaattattatcttcttaacagtttagtcccacctcttacttcctgcctcagtctgctttctctactgtctggattaattaggcagcctgctataaagttaaagtcacacatttctattttgcaaacactgtgattactctttgctttgtagtttgctttgctttgtagggttctgcttttaagtttttctctttttcagacaaattactgataaaaatgatattgctctatatgtaatatatcctgaaagcattattttttgttgaataggaaataaaattaatgaagacagaggctagaaagcatccattaattaatgagacacacttaactacttatctctaaaccatctatgtgaatatttgtaaaaataatgaatggactcatcttagttctgtatataaatatattttctttctagtttgtttagttaaggtgtgcagtgtttttcctgtgtattaaacctttccattttacgttttagaaaattttatgtattttaaaataaggggaagagtcattttcacttttaaactactatttttctttccaagtcatttttgtttttggtttcttattcaaagatgataatttagtggattaaccagtccagacgcactgatctttgcaaaggagacttaatttcaaatctgtaattaccatacataaactgtctcattatacgtatgcatttttttagtttgtttttgtttggtataaattaattt

SEQ ID NO: 111699 - DNA, 1017 bp, Homo sapiens
tgaaattaatctggttaagaagggctgttgggtgggacaagtcagcaatttggaggcagtgttgtgcagaaaggaaaaatatttggcatacttgtgtttttgatggcaatgggttggctcaacaatgttgtgttttgtgtggtacaaataattgttgtttattcctctgtgatgctgatgaatacaagaggactgtgtcatagtgcttctgcttctttagccagttaactgcataagtctcttagagagccttgagtttctgaaatgcagctctcttgaagtcaccttgaagtgcccttcaaatggcagattttacactattcatttcttgttgccactggctattctattctaatagttattccatgttatcatgccatgagatgttatgagtagtgtgtttacacgtgtcatgggagagttgatgttgttgctatttatagtgacttatgagttcaggagacctcaaagggttctagtgtactccacgtgctggggtgctcagggctaaaaagagattgtgacttagggtggaaaatggggggaaaccagaatactgtgcagaatttcagtgtgaaatttactttagtgaagtaaatggggtataaatgactgtctgccacaggcattaccacctaagcggaaggcaggtcacatcctgtggtttgggattcaaatttacaaggcaggaagcttgaatgtgtatttgtgagtttgtgtgagtgtgtgtgatttgaatgcactgaaaaaaagaaaggtattggcaagggtcttcttgaaatagtattctgtttaggaattttttcatatagaaggaaataattcttaaagaacaagggttcttaataccagggatttaaattcagggctttatgagtgtgaactcataaatgcagaagtagttggggtgagggaccacgggcctactctataaataaattctgcggaattcttccatgaccacaatctggaggcaggaatgttaggctcttttaataactttcccatggataggag

SEQ ID NO: 111700 - DNA, 1064 bp, Homo sapiens
aatccccaacatatactgagggatgacttgttctttctctttctgtcttttaagtgggtgagtttgaagattcttcttttcacactttgctgatttttttcaagaagccatattcatgatggtgttcctctttaactgacagcacttgtagtagtcatagaggtttataggccttggtgaattctagaaagtacgggaagggtgtacattccattccattctcccgtcccttcccctccccttccgtcccctcccctccgttcccctcccctcccctccccctctccctccctcccttccttccttccttccttcctccctggtagtgtcttcatcatctcagatctgaattgctagaaaagctgttggaattgatcccttgtccccattttttctcaattcaatatactttttacatagttgccctcatttttctactctagattaaaaatggttagtggcttcccatcattttaagttcaggacttcttgatgacctttatgatgctctgaaatctgatgttatccgtcttgtcttcatttattcatttgtgttccccagaagagggactctgtttaggtcaggactaatttctttacttacctcccactttacattgagataaattcttgactccttcagttgctccttcagatgctaatgtggattgtcaccttcctttcatctttctacctcttgaaatgatcaggaagaagagcatttaaatatgggtacattggtagatacatacctgtagtggaaaagggagaactcaggccactagaagttttcttaaatttatttcgcacattttgtctccactcattgcttaccaagccatgctgattatttgcaaggtttgccatgagtcttaatactggttaaggcagtgtactaattagcttaggaatatcttgttgatggagttcttgaggaagccttcttttattaagggcagctctccttttgccaggaatttggcaagaagcagctggtaaatgctgacagataaatttactaacttattgggtcttttcatatctgggcatatgcagaagaaatc

SEQ ID NO: 111701 - DNA, 1089 bp, Homo sapiens
acattgaagaatatttttcttcctagattttgttgtttaaattatggggcctaacctgccacttattttttgtcaatttttaaaacttttttttaattactgtaaagaaaatgaattttttcctgcagcaggaaacatagttttgagtagttctacctcttatttgtagctgccaggctttctgtaaaaattgtattgtatataatgtgatttttacacatacatacacacacaaatacacaatctctagggtaagccagaaggcaagatcagattaaaaacaccatgtttctaagcatccatttttccctttctttaaaagaaacttaactgttctatgaaggagattgagggagaagagacaaactcctatgtcatgagaataaccgatgttctgataatagtagcatctaggtacagatgctggttgtattaccacgtcaatgtcctatgcagtattgttagacattttctcattttgaaatatttgtgtgtttgtgtatgtgctctgtgccatggctggtgtatatatgtgcaatgttagaaggcaaaagagtgatggtaggcagagggcaaagtcattgaatctcttatgccagttttcataaaacccaaaccacatatgaaaaaatccattaagggtccaagaagtctgtccatatgaaaatgagggtaaatatagtttatttcccaggtatcagtcattataattgatataatagctctaacatgcaatataaaattcataggagtattaatagcccatttacacatctataaaatgtaatgggattgcagagctgcagagtacagtgtaacagtactctcatgcaatttttttcaggatgcaaaggcaattattctttgtaagcgggacatttagaatatatttgtgtacatattatatgtatgtatatttcaaagtaccacactgaaaattagacatttattaaccaaatttaacgtggtatttaaaggtaatatttttaatatgatacattacatattgtgaatgtatactaaaaaaacattttaaatgttaaaattataatttcagattcatataaccacaactgtgatatatcctaa

SEQ ID NO: 111702 - DNA, 1186 bp, Homo sapiens
ccgggttcaaacgattcttctgcctcagcctcctgagtagctgggattgcaggcatgtgccaccacgcctggctaattttgtattttcagtagagacggggtttctccatgttggtcaggttggtcttgaactcctaacctcaggtaatccacccgctttggcctcccaaagtgctgggattacaggtgtgcgccaccgtgcccagccatgacgtcttaacgttttatcgcccaggctgtctctccatttatttacagagcttaatatttatacagttatgctttttgatccatttagatttatctctaccatcatatattgtgatttttattttttctcttttatatttttgattgtttctgatctttttctaaatttatttccatgctcattttatttttctaataatttgtatgttaaacactttaaaaagtgtcttttgatggtgtctcatcctagtcccaaagaacatgaagtataaagatcttagaatatttggttctagtcatccctttcctagagtgcatgctgctcccccttctgccccccatttttaaatttttatcttaaaaatttaatcccatatattagatgatatcattactgtttaaaccataatttttgagaagagttttaccaataccttctttctctttgacctccattcctttctcatcttttctttccctctgagatcttttgtgcattgtaatttgggtttgtgagcttattcttgaaactctatcagagttttcagaggactgacttggaattttttctccagactggacttgtatttgcttctgccagtattcagatttaaagcaaacagaattccagcttaaattaaaatactcagtttttacactaaaagtcataaaaacaacatgaacttagtttccaaagttgtgtgagcttgttgtggggtcatattctcaaaagaaacacatttcctttctactcagaggcaatgccaagacagacaggttttcttgaaagttgcctctctgtattgtagtttgtctgactctttttataagcgggaaatattttgaagataccctggttatgtgaggcttccaatcttattcttaccccattacaagcaaggtattgtgtcatatcttcttgcatgtttgtgatcattaaaaaaaaaaaagccccctatcctacctgagccaataa

SEQ ID NO: 111703 - DNA, 1183 bp, Homo sapiens
aattttaaatgcatctccacctggaagaaaaaagagcagtaagaaagcccttcaactagatggttcttgtataacaacttcagctttagtgtatgcgtgattttaataattaccttttgtcatttttctaagtggtgctataagggtcattgcatgtggaagaatgctaatcagcaaaaacaagatggcaattgggggtcatggactaaatttggctcctgttctcggacatgtggaactggtgttcgtttcagaacacgccagtgcaataatcccatgtgagtatatccttgtaactcttgttatttttggagagaccagaaaatacttcaatattatgttattagtattctgttttataaagtgcatgtaaaacacagggcaggaaaataaattgttcacagttcataaaccagtctgtgtttttgatacatctccatttattaatcttgtgacaagcagtcagtgatgaagaagatcaaacgaagattgaatatttttaaagaagttgctgttcaggaatattaagaagctgaacaaggaaagtaggtcactgtgccctaagggcgtgggcatgggcactgcgagattgactgccagaaacaagagagtgtccaggaaagagcggtaccaagcatacagactctctctcttcagggagtggaatgtgattgcttcagaggaaggcaaaagaaagattgtgatagaaggccaggtgactgttgggggaaagttatctattcattcactcagactacaattactgaattccctattgtgtgctcagcaatctttacgaagaaaaaaacaactgaattctcacatttagaggattctgccttgtctagggtttaatatgtgagcagctttttctctctgtttctggcagcaggatgtctctgagcacgtcttttgtaagactatctgatgccacatacctgccttcccagtaagagatgatggtggtattagaagtaacaaagacaataaaaattaaaagatcagctaaagttcattatgagccagagttgttaggagtgctttaaataatgtcaactcatttaatcttcacagttttcctcaaaggaagatacattattatttgcattttacatatgagggaaccgagccatggagcgatgaccaaagtttctttgagctgcatctgtgtgttttatacatg

SEQ ID NO: 111704 - DNA, 1107 bp, Homo sapiens
tatacccctgcctatctcataagaatgtttactctgtcatcattaaggagtttgctttaggcagtctacttttttgggggaaggtggctgaacttgtatgacatcattcagcattttacatttttaatttaatccctaggccctaggcttctcccctcaaattacccactattcattcaccagaagctttgtgttaaagtaatttttgtaattacatcctaccagtgggaaacaaggaatagtgagcctttatctcctagcttcctttcaggattttcattttcctgcatgaacccgagtgcttgtgttgctggtgtggttgtcatggtgctgtgaaggcgtgtttttgtcccaggtgggaaacatgtagaagtcagaaatgatttgggagttgctgctggttgccagggaatgaaactatgaaacaagaactagaaaaacgagaagattatttcttattttattgctcctagggacttcctaggcccagagcccttccttgaatctgtagacatgtcagtatatactctaacctgctgtatttggaagttctcatgacctatgccctaatcaaagagaatcattggtgggctttgtaacccacacaaatattgaacaatagaaattaatttcagcagacattttttagtaaatgaagtatggaacataatattactaaattactaagatcaagtagcaatcattattttgggtaagtgttaaattacaaaatttttacacctgcatcatcttatttagcagccaatcatttgtcaaggctattactattgaattcatgtggaaatactaatcatatttatggaatctgttgtctggttagttttgtatgtttcacagttggggtatttataacaattattgacaaaatgaaggcaatatgaagattgacttattacataaaataggaatcagagtgaaggttaaagagctttcatatgtgaaacataaaggataatactttatttttttcattaaattgccttactgagtttcttctgtctctgtatgaataggttcaatgaaaagagcttatttaggagatagatagaccaggattaaagtgttacaaatgtaactctatatttt

SEQ ID NO: 111705 - DNA, 1038 bp, Homo sapiens
gttaataattttatgggctatgttttgataaaatatttttaatatttaacataatatgtactaaaagactctccttgatgtctcttcagttataccatttccataaaaatgtaagcaatagataggaaaatgttttacaagttctccaaaagagtatgtttatagttacattctgtagaacagaagtagtgacatattaaaatagaaaataatgtgctaattctactgcatactgaggccttgcttatcctgcatttttgatcacgatataaaatatattctggattttgtggtagtgtctgtatatgcatttccagaatagagatttctgtaaccttaagtgatagaataaagtacatttgcatttgttcttaagataaaatacttccaacagctttatccttccttccatcataaatttgtggattatataggaaaaaaatattctattaattagtggatatattaaacatctgataacttccctttacacaagcagagtgtgctttagattaaagcctctggcagcttccaaaggggggacctggaatgacacctggaagaaatattggatgttagaattgttattgtgcaaagtgggtgagagagaagaagttcctttaaattttgaacttcaaaaatatggtatcaaaatggaggatttttcttgatgtgcggctgaatgtttatttttataagtcagttttaagtgtatttgagttgaaatatacagaattataattatcatcttcagaaagcaaacaggagacaggtgtacaaaaggacaaaagtccatgtaaagtgaggaggccattggattaccactctcttatatcccagccgttcaaagagccttccttactatgtttactatcttccctcctagatatttcaatggaattaaaatgaatagggacagtataatcgatggcttctgacactaagctgtattggtcctggtgggctggaaaatctaagctccatagtggtcataggattgatgatactaggagtggcagacacttttatatacctatg

SEQ ID NO: 111706 - DNA, 1079 bp, Homo sapiens
atgtcaagcctttttcattttttaaaaatctgtatttctcttttgtgactaattattttatacaaagaatatccaaggatgtgatcttggaataaagtagaaaacaaacaaacaaacaaaaaaaagagttttcaaatttaaataatatttttaataatagttatttgtagttaaattaaaccattcatgtttatttattattataagtaccacctggtcacagtttgctttttatatacatcaatttgattatagtttttcccaagtatctcttctttgatataataatttttaaaaattaaatttaaagatggttaaaaattagggaaaattgcacatttctttttggatagacctggacaaacagaaaataatagaggcatgggaagtactttttctttctattgttggcctgaaaagtaatgctttctattctttttaatgccatgaaaaccatgatgtcattataactagtgtaagtttttgaagataataaagaaatgctttaagaactgtgaaaatattgcttgagcacatctgaaatattttcttctggttaaattataattaaaacaagaacaaaagcacagcacagaattgatatgatgcctttgtagtaatcatgccctgaggtcacagcctccttgaaaactaaactcagcctcaaggtttgacttaataatcttcaattctaggaatcctgatccaagttaaagcattttgaagcactagtattaagttgttgcactgattgctgtggtaagtactgagattggtcaagtgtaactcttgtcttcaaagagtactggaaataaattaagttgtatgatttaacactattagaaatatagagagattggtcataaatacaatttaaaagggagactttactgttgtcactctataacaataaaattgcaaagaaaaaaaggggttgaaaaatcaatttggctttttattaaggtaggctgaattctctgcctctaaaacaagacattttaaacactttgttttcaaaacagttgattaatttttgagcaatactagactactactaaatgtatcaagagattattatt

SEQ ID NO: 111707 - DNA, 1004 bp, Homo sapiens
ggagcaagaataaaatgtatcagaaagtataaaacagaaaatggttatggaaatttactacctctatcttcaatgtgatatgtaagttaaatgccgaaaatgcatttgccttgatgcacaatggattggtgagcttaaagcaagactaaagaatattgagaaattttataccaagcattttatcacctaacaagagaggccaaagagacttctaattatttcacaaaattatagaaatgttatataaggtggtagagaaaggaagcatggaagaagacacaagacaccagatgttgctcatcaagtgttgccggtgagcattgacagcagagggaacattagccagcctctggctgcacactggactagtgcagattatctgggtggcaaaaggaacagctgaggctcttttaaaattactagctagtgttgtacaaaaggagagaaggttagcactccccttgacaaggatggaagaggcccttgggcctgacaacatgcatatggttaaggcattgccacctacttcgtggcatccaaccatcgtttttatggaacagaacagagccctccgaaataataccacacatctacaaccatccgatctttgacaaacctgacaaaaacaagaaatggggaaaggattccctatttaataaatggtgctgggaaaactggctagccatatgtagaaagctaaaactggatcccttcctcacactttacacaaaaattaattcaagatggattaaagacttaaatgttagacctaaaaccataaaaaccctagaagaaaacctaggcaataccattcaggacataggcatgggcaaggacttcatgtctaaaacaccaaaagcaatggcaacaaaagccaaaattgacaaacgggatttaattaaactaaagagcttctgcacagcaaaagaaactaccatcagagtgaacaggcaacctacagaatgggaaaaaagttttgcaatctactcatctgacaaagggct

SEQ ID NO: 111708 - DNA, 1110 bp, Homo sapiens
gtaagtataggagtatttcaggaggttgtagaacttcgtattgacctaaataaatggtcacccggggccacagaccagtactggtccatagccgattaggagccggctgacagcaggaggtgagtggtgggcaagtgagccttaccacctgagctccacctcctgtcagattagcagcattagattctcatagcacgaaccctattgtgaactgcacaggtgagggatctagggtgtacactccttatgaggatctcattcctcatgatacgaggaatggaacagtttcatcccaaaatcttcctcctgtccatggaaaaattggcccctagtgtcaaaaatgttggggaccactgctcaagatggtaatacaaaagaaatttggagataatgctgaggctgtttgtctcagaagaaggcaaagaaaatgcattccttactacactgagaaactggctgttgggaaacatttggaagatagatgactgtatggggaaaattaggtgtagggaggctaagtttgccatcataagtgccacacttccagcattctaccttcagtatgtaagcagttggacaggacttttggtggggaaaaagttatgttccattgtcgaagaagggagataagatctctcttgagcctctgcctaggagcttctctctttttactttctaccctaaatacttctctttttcctttatttttgctttttggtctgtctgtaaccttttttccctgtctattaaatctatcccaggaatctagtagctgctgcaagtcttgcttagtcttggcatacttgtatttacaaagattgtcattttattttttattgtctggactgtgatgtccttgtagaattacagatgctaacatttatgtcttctctttatagtcaattgttctctactggttatgctccagcttcgtgggcctttcacagaatttgctgctgcgttctcctggatttcgccaactttgccgaataccatcgaccaagtcagattcagaaactccttataaagacatatttgctgcctttaataccaagttcatttcaagaaaatgacatattttccaataattttgaaacagttgcaggagtc

SEQ ID NO: 111709 - DNA, 1028 bp, Homo sapiens
tcagatggacagccaggaaagtgggctttccacacagatgatataatacagtacttccaaaggcatgcctatgcggaagtctgatttgttggatgaactaaagtcattcagaccagaatatgcaggtgtctagaggagtaacgagataaaattggaagaataggcaaatgtgaaattatggaggacctagaatgtctttgtgtactgtcttattatacactataatttgactaaattcagaaaaactattgaatgcctcctctgtacaaaatatatgatacaggagatttaaagatgaataaaatagaacactgtcccctaaactaagaatactttagtttttgttttttaactcctattctcttggacctgaaggaagactgtattctaaaaagtaaaatttcaggaaaaaacagtagtaactaatatggttaacagagaaacagattaaaaatatctttgtgagatagttgattgaaaaatggagactattttgacaggccaagagcatacacagtataaaaccacatagctccaaaaggtatattcagggatgaagtggttaagtttggcgggagtggagagatttgattaaagtttgcttttagcttccatatttccaatattaattgtagttataccatgtcagtagtgaaatttacctttaaagcctaatcagccaaagaccaccagagacaaagcctgtagtctgacaatttcagattgttatgtaacttgtgtaccatactgtagaagttttgataaaaggctttatttgcctgttgtttaggcaactccttaacatgcctgtgacagctgaaacccttatacaaatcctttagctaataactacagcaggcgctatttgtgctatggaaataaagcacgattcttagatgacattttctctttccccttttttccccctaacctcaatctaggctcacttatctaaagaatatgaggaggctaatttcagagctatatgtgcgagataactgccaccctttcaaagccactgtgttggt

SEQ ID NO: 111710 - DNA, 1045 bp, Homo sapiens
aagcctgagtaaagagtaaaaagatgacttctcaaacatatccagaaatttgtaaacagtacactcatatcttttagtttaagaagtggtcttaaaatatataaatttgtttttccacctatgtttaatatgcccaaatttaaagggagagctaaaagacagcctacaaataaatatagctatgaaataaaattatagcactttactaaaaaagggatgtaataatgttatttaacgaagtattttatatatgacttgccactattctatacataaaattttttttcttaattctttcctgtgttaactagggttattttctatttaaggtaatcctgctggagaacagatgctatccaatatttattacaacacatgagttgtgttgtttcacaatactgaatttcttaggtgaggtattttatttaaaaaggagggggaaaactcctatattttcttgacttcaaacctgtggggccaggggatatagattgaaatgctccgtatttagtcttggggatcaggcttgtttagtacaataccatggttttagaagtctgtactaggaacatttttaaaatacattttttatatttcagatgtaatgcagtgcacttttatttgaacaataaaaaaacccataactttttgagaccatgaaggtcttttattttttaattttgaaaatatgtggtatgtgtatatgcagactacatcattgttttaagaaatgatttaactcttggacattacacttgggttagttcacaccttaaatccccaagtagttaatatctcaattattgtataatcagtttataccatccattcccaacaaaattccacatttcatgccttttcaacatacatttcaacataatcaacatatttacaaacactgacttcactgtttataaagaagaaatttcccctcctatttcccattactgaaaagtcaagtcatttttattgatacatgaaaattaatttttttgtaaatgactacgtatagtcatttttctcctttggaaaaggtaaatagctt

SEQ ID NO: 111711 - DNA, 1254 bp, Homo sapiens
ctaaaggttatttattaaaggtactataaataactctgagaattcacataaatggttgtatattttagtttagtgtatgtttaatatctttgatttatttttcttccacaaccgtgaatctataaatgctcaggtaatgattttttttttaaaggttgtaaatcagattctgtttgagggataagaggtaggaaaataatagaaaaaaggtttttatcatttttttccattagttcctagtatattgcaaattgaagagtacctccttagttttttaaaagttttattttaataaaatatatgctagatatatattttgtaaaatgcatgctctatattcataggtgtggactggaccctgggcacctcacatgaacagtgtgcatatgaaccagcttggctgatgaggatcagcttgttagcctgcagattccttttcatttggaggaaatcacaagtggccgaaaaaaaaaattatgctcccaaatcattctactgatgtgcttgactgaagtgtgtaggctttttgcagaagatcttactaactgacctattttctgtgaacatttgtgactgcccattccccatcatcatccgttttaccttagttagcatttttcttatcatttttctttttttctttccctcttcccctttggacataactttctgttgaagctgttctttggctggttggttttagtactgtaaactgcttctgagcaaacacggaaatttagcaaaattatgtaaacttgatcctgaagttttagaatggcaaataaatgtacaattgtttacataacagaaaaggctaagcagaaagtaaatttcaatatgtcagtatagaggctctactttatgtagacttaaattaatgtgagatatgtaccttcatattcagaaatctggatgtttccttcatacattaaactattaataagcataacttttctactggtgtaatttaagtataaagtaaaataatgggcattatcattggatgtttccccacattggcttttaaaatacccatcttgctttctttttggtttatttgtagcaaggcacatatagaagaagaaatttctggcttttccatgttgttttattaccttttctcacttttaaaactaatacagacttatctcctcactcctttttctctccttacctttaccactaataccagtaaaattatctttctgatagtgaaaaggttctgtcaagattttcactgtaatggctgctaca

SEQ ID NO: 111712 - DNA, 1049 bp, Homo sapiens
acagcctcccaagtagctgggattacaggcatgcgccaccatgcccagctaattttttttttttgagacggagtctcgctctgtaacccaggccggactgcagcggcacaatctctgctcactgcaagctccgcctcccgggttcatgccattctcctgcctcatcctcccaagtagctgagactacaggcgcccgccaccacgcccggctaatttttgtatttttagtagagacggggtttcaccgtgttagccaggatggtcacgatctcctgaccttgtgatccgcccgcctcggtctcccaaagtgctgggattacaggcgtgagccactgtgccccgcctgtatttttagtagagacagggtttcaccatgttgatcaggctggtatcaaactcctgacttcaagtgactcacccacctcagcctcccaaagtgctggcattacaggcatgagccaccacgcccagcctcgtagtcatttctaaaagatctgtattcctattttttttgttatgtgaatatttaatcacttctttatgagctctgtccccatgtgacctttctcattacatgtatttattactgctttcagaaaatatctaatgcaagcatgttcttttcttcctttcatcatattaaggacataataatatttcctttcagtccctttaggttgtacttaggtttttttcttttgttttataacaccaagtttttagattatttcattaagctattatgtcactacttacaaaccatggaaatattgctgtaaatatataaaagtaggtcattatattgaaataatttacggttcaatgtggaaaatattagaaaaacaaaatatttgattttgattttaaatattatctatttttgttttgcctctttgtttgccctcagacaaagtagactggtgtaaccctgggatgggaaatcctatgatccacagaccgatgtctgacccaggagtattttcacaacatcaagcaatggagcgagatagtacaggaattgtaactccttctggtacattccatcagca

SEQ ID NO: 111713 - DNA, 4494 bp, Homo sapiens
atacatgtatatattatacgtatatacatatatatgtctatatatacatatatgtatatataatacatttgtgtgtgtgtacacacatactattgcaacactcatgacatggtggtgttttcataattagcgtgtagatagtcaatatatgtgggcagaaacccatgtctgtcttatttaccgttagtatttgcattagcacagcacgtgtctacatagtatgtgctttaccgatacaagtgaagaatgataatcaacaaagcaaacaatctttgatagtgagatgagaagctataataaagcttatctgtctgttgctcctgattgccttttctctgttcatctagagtaagagtaaatagaagaggcttattcaacaatattctgtatttatagaaagacattttagtaatactctttcctcttttaaaaattacaataactattgttaatgactaatcttaatttatatatacaacttttaaacaggtcaaagaaagtatctgttccatcaactgtgatatccagagtgattggaagaggaggctgtaatatcaatgctattcgggagtttactggtgcacacatagatattgataaacagaaagacaagactggagaccggataatcactataaggcaaaactttgtctcttacattttcttcctttattttattgcactatagcttaatgaaatacagccatatgagttttcagtggaactttgtgttacatagtatactttttaaaatgggaattttattagtgtttgagaagataaattttatagttttcttttttcctaggtaatacacttttgtgaagtgtttcagagacttttataggaatttgtatgcatgtgtagcaaaggtttaaataaataatttctgtacataaactgtttatatgacattcttaaaaatttgttctgagacttttagggagcgcatttctaacattttaagcagtgggtttttgtctttctcaaataacctttgagatttgttattctgagattgtgtctttagaatttgagttcttgggctgggcacggtggctcacgcctgtaatcccagcactttgggaggctgaggcgggcggatcacctgaggtcaggagttcgagaccagcctcaacatggggaaaccccgtctctactaaaaatacaaaattagccgggcatagtggtgcatgcttgtaatctcagctactcgggaggctgaggcaggagaattgcttgaacctgggaggcagaggttgcggtgagccgagatcgagccattggactccagcctgggcaacaagagtgaaactccctcaaaaaaaaaaaaaaaaaaaagaatttgagttcagatttgaatctgaagtgaagatataacttatcttgaataactcgtcgaatatgtctatgcctgaatattcttaaaataaaagtgatgttctaagaaatcataagaatgtaggaagctatatttaattactttaaagtaaattcatgttcctttgaaaaagagttttatattttttacatggcagatataagtttgtatgaggcagatgcccctttgcattatataggagagctaatagttacatcatacctcaaaaataagaaagcaagtagccatctctattttattcatcgtcctctccttctgactggttttcccctgggtatttgggtagtcacagcctatcttatctagaaaagagggaaccagataccctttattggtaattgctcccttgagtttccataaatatcaaatattttcctgaagatccagcactaaggttttatatggctatttttggcactatcaggattcctgcatcattttaagacatcttcccagaggagttacaataattatcctattaatagacaaactactaatgaatttttagtagacggagtcatcccagataccaagatttaaaataaaatactgttttcttactcagttgtattattttccttgtttacttctattatttttagtgttgattaactgtttcaatatttttaggattaaatgtttcaataacattgtggattacataggcttttatgtgcagtggtttttctaactgtagtgtattttacagtaggaaaatggtttcttagtctaaggaaacaatagtgaaatgtatttttgaaaaataagtcatttactattcttctgaaaaataaaagtagtaattcaggacagtttattgctttgtttgtagaatacctcaggaatggtaagaaaattgctgcccagcttttgttatctgtcctttgtttgtatgtgtgtatgtatatacacacaaaactgtgtgtgtgtttgtgtacataaatacatattaaaaacactttacatactcaaaagtagggaaaattctacctaatttttttttctcaatttataggggtggcactgaatcaacaagacaagcaactcaattgattaatgctttgatcaaggatccagacaaagaaattgatgaacttattccaaagaatcgtttgaaaagctcctcagcaaattccaaaatagggtcatcagcacctaccaccactgctgctaacacttccttaatgggaattaaaatgacaactgtagctctgtcatcaacatctcaaactgccacagcactcactgtgcctgcaatttcttctgcatccactcacaaaaccattaagaacccagtgaataatgtgaggcctggttttccagtttctcttccattagcatatcctcctccacagtttgcacatgctttgcttgctgctcagactttccagcagatccgtccaccaaggttgcccatgacccactttggaggtacttttccaccagctcaatccacttggggtccgtttcctgtcaggcctttgagccctgccagagctactaactcgcctaagcctcacatggtgcctcgccatagcaatcagaatagcagtggttctcaggtgaattcagcaggttctttaacttcaagcccaacaactacaaccagttcatcagcttcaacggtgcctggtacatctacaaatggcagtccaagttcaccttctgtccgaaggcagctttttgtcacagttgtgaagacatccaatgccaccacaacaacagtcacaaccacggcaagcaacaacaacactgcacccacaaatgccacatatcctatgcctactgccaaagaacactatccagtatcatccccatcttccccatcaccaccagcccagccaggaggggtttctagaaacagccctttggattgtggatcagcatctccaaataaagtggcatcttcctccgaacaggaagcaggtagtccaccagtagtagaaacaacaaacactagacctccaaacagcagcagttcttctgggagttcatcagctcattctaatcagcaacaacctccgggatctgtttctcaggaaccaagaccacctcttcagcagtctcaggttcctcccccggaagttagaatgactgttcctcctttagcaacaagttctgctccagtggcggtgccttctactgccccagtgacttaccctatgcctcagacaccaatgggatgcccccagcctactcctaaaatggaaacccctgctattagaccaccccctcatggcacaactgcccctcacaagaattcagcttcagtgcaaaattcatctgttgcagtcctcagtgtcaatcacattaaaagacctcacagtgttccctcttctgtccagctaccttcgaccttaagtacacaaagtgcttgtcagaattcagtacatccagcaaataagcctattgctcccaatttcagtgcccccttaccatttgggccctttagcacattgtttgaaaacagccctacttctgctcatgccttctggggaggatctgttgtttcatctcagtcaacaccagaatctatgctatcaggaaaatcctcatatttgccaaattcagatcctttacatcagtctgatacttccaaagctccaggttttagaccaccattacagagacctgctccaagtccctcaggtgagtttatattttctgagattctgcagctgttcatttgcacaagtgatgtgaaaattcttggtcattttctaatatttttattctctggacgatatagacaaagattgttggatttagttaactcagatgctgttgtttgtgtttagtatggtgttatttttaaaaatctttttaaaagctaccatagatttttatttaattttccataaataagtcttctgatcaggcggggtttttttgtttgtttgctttttgagacagagtctcgctctgtcacccaggctggagtgcagtggcatgatctcagctcaccgcaacctctgcctcccagattcaagtgattctcctgcctcagcctcccgagtagctgggattacagacgtgcaccaccatgcctggctgatttttgtatttttagtagagatggggtttcaccatgt

SEQ ID NO: 111714 - DNA, 1040 bp, Homo sapiens
tttatcttctcaaacactaataaaattcccattttaaaaagtatactatgtaacacaaagttccactgaaaactcatatggctgtatttcattaagctatagtgcaataaaataaaggaagaaaatgtaagagacaaagttttgccttatagtgattatccggtctccagtcttgtctttctgtttatcaatatctatgtgtgcaccagtaaactcccgaatagcattgatattacagcctcctcttccaatcactctggatatcacagttgatggaacagatactttctttgacctgtttaaaagttgtatatataaattaagattagtcattaacaatagttattgtaatttttaaaagaggaaagagtattactaaaatgtctttctataaatacagaatattgttgaataagcctcttctatttactcttactctagatgaacagagaaaaggcaatcaggagcaacagacagataagctttattatagcttctcatctcactatcaaagattgtttgctttgttgattatcattcttcacttgtatcggtaaagcacatactatgtagacacgtgctgtgctaatgcaaatactaacggtaaataagacagacatgggtttctgcccacatatattgactatctacacgctaattatgaaaacaccaccatgtcatgagtgttgcaatagtatgtgtgtacacacacacaaatgtattatatatacatatatgtatatatagacatatatatgtatatacgtataatatatacatgtatatatgtgtatatatatatattatatgtgtgtgtgtatatatactggttgggcatctaatctagcctcaagagtcaagaaagacttcttgtgggccccttttggtgctttactcatatgcttctttttattctctaatatacataactcaaagagtgatgttaaaaattcatgactgggagtggtggctcatgcctgtaatcccagcactttgggaggccaaggcaggcagatcactttatgtcaggagttcgagac

SEQ ID NO: 111715 - DNA, 1021 bp, Homo sapiens
gagctcaaggctgcagtgagctgtgattgcactgttgcgctccagcctgggtaacagagcaagacctgtctcaaaaagaaaaaaaaaaaaaggctctctatattatatgctaaatatgaggagaagtgaaaaataaggtcgtcatttgttatttaaaaataaatttttaaaaattgggtagtagactacctttatcatttaaaaattctacatctgttccatatttaatgtactttccctctctttgttaaagattgtcagaaactatcagtgaagggaccagtaattctctatctacttgtacaaaatctggtccatctcccctttcttctccaaatgggaagttaacagtagcaagtcctaagcgtgggcaaaagagggaagaaggatggaaagaagttgtaagaaggtgagtaattgtttttgtcattctttttatgtgctatatatcacagtcaagtgttatctaccttataattaaattcctcctactcttctaaaggttgcaaacaaactgatggttcaaggctaaatttgaccaacagagagagcctgtgccatattttagatgaaaaaaattacgtgttaatttggcccctcaaaagtattggagtttgctttgagaactattttagattgtgtctttctcagcttcgttatctcaaagccttatataatacaaagaagtattataaaagctacttgtaaacatttgatgaattagtaggtattgatgttaaactgttgatctaatcatagtaactgttgtctttaaatcataagataactttattttaagggtttcaggataaaaatattttgttttgcatgggattttaaaaataatatgtatccaagagtaaaaatacaatatctcagaaacgtaaaaggaggtaagacacctgaaatccagaaagaatgtgatccattgtcactctttgataacttattttaaagaactttccggaaatttcgtaaaaatttaaacttttggttatctgaaacaaaagctatagtgaac

SEQ ID NO: 111716 - DNA, 1050 bp, Homo sapiens
ggttggccccaaggtctcttaggtgttggcacttcactgggctccttctgactccctaccagtgctgtcccggaactcaccagaggctgcttgcggggcctgccccggccccgcttctcagtgctgtccatttcctgcttggaggccaagggctggctggacttcaagctcgactcactcatcttcccttctctaaggagcaggtggaagattgatggctggaatggccttcctggagccacgccagcaccagaaatgccccccaaaatattttttataactacctgctattctttgaacagaacgtgggtacacagagtatatcagtcctatccagctcattaccgatgaatgtgagaataacttacatggctaatagtagtagagtatctctcctgggtttttcttttcttcaagtgcttatagctaaatacattctgggaacacttagaacttgctaattcagtattgctacttttacagatgagcctgaagtcttgacagaacctccaagtgccacaaccactactaccataggtatatctgcaacctggacaactttggcaggttctcatggtaaaagaaataataccataactacaaccagttcaaagaggaaaaacaggaaaaataaaattactccagaaaacgttcaaattatatttgatgatccactaccaatttcatacagtcagccagagaaggtgaatggagagtccaagagcagcagtaccagcgagagtggggacagtgataacatgaggatttccagctgcagcgatgaaagtagtaacagcaacagcagtcgtaagagtgacaatcattcaccagctgtggtcactaccactgtgagcagcaaaaagcagccatcagttcttgttacatttccaaaggaagagagaaaatctgtttctggcaaggcttcaataaagttagttccaatttttattttcaatatttatagtgtcatcatgaaataccttattactgaatttgttggtaaagaaagtaaatttgcaacttgcaaaataggatttttctttgtgctaa

SEQ ID NO: 111717 - DNA, 1050 bp, Homo sapiens
cccttgttttttcactagagatagacattttatataataagttgttgggataagcagtttgtaatttttgttaggaagctttcaaattactttttctaaaatgtaaatattcatgcccgcagcagtacaggagagaattcagtttctcaaacttgtgctgatatctgatacctttttaaatttcgccaaattaatgatcaaaaaatggtattttgtcggttcaacttacatgtccttaatgattaaaagctatgtatctgtttattatttacccattttaaaattagtcttatattgttaatttgatcttgatattgtaaaaatattgtctctttagagtggtttgaatatgatcttgataaaacaatgaattgaactagatgactttgaattttatgatatcatggtttccttatgattaaatgattatgtgacaacttcttctccagggtaaatttcaacgttatatttctgctttattgatctttaacagttaagggaagaaagtcggaggctggctttggctgcgaaaagagaaaaaagaaaagagaagagaaggaagaaaaaggaagaacaaagaaggaaactagaagaaattgaagccaaaaataaagagaactttgaactccaagctgctcaagaaaaagaaaagcttaaagttgaaggtattttctcttaacaaccatcccatttgttttatattctagttaaaattatatttacttgattatcagtcactcttgaaaatatgctttcaagttattaaccccttaacataggccaggcacagtggctcacgcccgtaatcccagcattttatggcaggtcaaggtgagcgagtcacttgagtctaagagttcaagaccagcctgggcaacaaagtgagactgtctatacaaaaaaaggaaaaaaattttttttaattatctggacacagtagcatactcctgtagtcccagctagctactggggattggggggatggggaggtaaggtgggaggatcacttcagcctgggaggttgagactgtcatgagccatgatctggca

SEQ ID NO: 111718 - DNA, 1046 bp, Homo sapiens
gtttgataatccattgatctcttaaatccagctttagtttgttattgggaatatcagattactgttacagggattataattttgagttttgtcatttggagatatgtagataaaattccctgtagatgccaaaatgttgaaaatttttaataaataaatcacaataagctatttcttcctttttctcttattatctctgaccgctgttctttattctacctcttccctagataatctggactaccagtgactctgtatttttgactctctatatttttgtttctcagcaatccaacttattccttctcactggctagctgcctcttctccaagcaagctagcatatcattatcaagttaatctttctaaccactctactatattagagaacctcttcaagaacctttctgtgtctccccagtttctgaaatcatttgaaatccaatcttagtttggtattcacagccaccacaatttagtgcttgtagatcttatctcccattagaatccttaatgtggagaattatcttcttgcttggtcttttccttgttcctatctctcacatcacctttgttctcatctcatagaatgcccatgtctttcttcatttttccaaagttactcattctttagttatagttgaagtctctcctaccaaactcttcatcctatttgagttcacatcgagatctctaatctctagaggtcgtacaagtttgacagtgtttatcattcatttggagaaatacatatttttatatgttattactctaactattagagttgttatttttattagttattactctagtatctaacatgcatatatctttccagatagacttattgacttcagttgagcagtgcttatcttttatactcttatgtatttgttccattatttcttgagtacctaacatgtgcaactgtgggctagagtactatattatatagggtgcaacatagtatatgttgtgtatatatgtctatatacattgtctatatatgtatatacatattgtctatatatgtatatataacatat

SEQ ID NO: 111719 - DNA, 1092 bp, Homo sapiens
gtttgtgtagtataattctgagagcaagacatatttacatctttgaatattgaaaacaatttttatctttacagaatattttcacatgttgatagttgatttttgttactgtgtcatttcattctatttaagacaatgctaggctaggtgtggtgacaatgcctataattccagcactttgagaggttgaggcaggaggattacttgagcccaggagttcgagaccagcctgggtaacataggaagactccatctccacaagaaatttaaaaattagctgagcgtggtggcatgggactgtagtcccagctactctggaggctgaggtaggagaatcatatgacccctggaggtggaggctgcagtgagccatgatctcaccactgcactccagcctgtgtgacagagcaagaccctgtatcaaaaaaaaaaaaaaaaaaaaaaaagacaatgctatctgtgtcattggtttttaggggagctcatattgatgtacgtaacaagaaggggaacactccattgtggctagcagcaaatggtggacacctcgatgtggttcagttactggtgcaagcaggtgcagatgtggatgcagcagataaccgcaagataactcctcttatggcagcatttagaaaggtataagtctttcatcctcatttacctggatgtttttttacttacactaggaagtacatggcttagtgatcactaaagactcattttgtgcttttgcagctgtgatgaaagcaataatatgcaaataattactcttatggcaacattaaatgtagatatatacaggtttttcagaaaagccattaattttaaccttattggacatcagagctaagtaaacttttaaaaagctgttctaagtaatgtgttcaaaatctagttgcagtcttaatcttcacaaagtgtaaatccagttaagatacttaagtaagtacctccagttagttactcttagtgagtgttttcttgtattaccactacagagaaaaatatcacttaaactggttattttgctgggggcgggggttgtgccacgcatggtggctcatgcctgtaatctcagcactttgggag

SEQ ID NO: 111720 - DNA, 1059 bp, Homo sapiens
tcatgcattattgaagggagtgtacatagtacaaccactttaagaatagcctggcaatttcttacaaaaccatacacccagaaattctgccagtaggtgggacctaaaatctaggtagtgaatgtatataaggttttttaatgttatcttagaaaattttcataatcttgtgaaaatataggaccttttataccatgcttttaaaatacttactgattaaaaggtttaaaaatatgttaaatacattcacatgtataatacgaaaaaatcttgtcccatattactctattttaccgctttgtggtgaaataacaaatattaatttccaaagcatgtcacaaaattttcagtccagacctttcatgaacacattgtagcattttagtggatttctacatgggttttacttgagaaggtatctctttgttggcttctaagacctcctgctatcattagaggctgattttatgcagagcatgaaggaagaactttccccttcttttattgtacagtataccagaaaaagaaatttaaaaatacacactttggtaatttgtctctccataagaaaacatatttttttctattttattttcaggtggtggagctattgttagctcgaggggcaaataaagagcacaggaatgtttctgattacacacctctaagtctggctgcttctggtggctatgtgaacatcatcaaaatattactaaatgcaggagctgagattaactctaggcaagttgtattccctttctgtaagccccttatttagtaagactgttatagatatttgtagaacacctattttttagtgccaaatttagtaaatccctttattacaaatttggcattcaaagtgttagagatttttgagatgaactttatttaagtaattaaaacttgatatagagtttgaaaaatattgagtactgtttcttatgatactaaatgtaaacatcttagaagcttttattaagcaagctaatacatgctttaagattgaaagtttatcctaataacttattaatcaccttccagcctaagtcattatgt

SEQ ID NO: 111721 - DNA, 1054 bp, Homo sapiens
tgaaacctaaaaatatttagcatttatttaagtactgatgggccattcacagatcattgtccactatgccatttaatgcctaaacaatcctttgacacaatattcattctcattttataaataagatatagagaagtcaagactggctcaagatcatagctcttacccctgctcttactattaataatatatcctaaaatactaactggcaaataataaatgttaatgaatagtggtttatcttgcatctcagcaaagctatgtccaattttagatatcacattctttccatcactttttgctttcagagcgagtgacaaggttataaaaacaagaaaaaatatagcgttaggctattttataaacagtatagtagaaaactctaatcaaatttctcaagttttctcaatgccattatatttctcaattctttcagagaactcttctgctcccaaaacatccaatatacaacaaaaatgtatgatttttatagtaaaatgactttccaacattttattaatcacttcaaaatacttacctcttctattgacaccaaattaaagtaacaaagtgtttataggcaaaattgttaccctaacatacttcaacaattgttataacctaatctgttatattttaacaaaaatacataattcataaaaattacagtgccctattggctttaatactacttttaaataaagaaaatcaactaatatcttcttgactcaatattgaaaaaatctgttcttatataaagcaagtattttttcaagctaaataatgattgaaaggcaatatgattgaaaggcaaaattttgctttccgggatttatggggatttttactttttctggaatagtagaaataatttatcaaattaagtggttcatttttcactatcttaatatttggcttataatacttttaacctatctattgcccctactatgaattatagaagaaaaaagtgacacaagtagaagaaacaaaacagtagggacaggccaggctccttgtctcttgtgtggagtattctagtaataagtgtatc

SEQ ID NO: 111722 - DNA, 1142 bp, Homo sapiens
atatgcaccaacgtagagtggacataagacacatacacttaacattatattcagcacaatctgctttgccttagggcccctctgtgatatagtggggagagcaggattttgttatcaagatcttcttgggttttttaaagcacatatctaccagttgttagcttatgtggccatcggaaagttatttatcagagcctttatctccttttctctgaaatcagatataatttcttcctataaacctgaaatgaagatcaaatagtataacacagtcagagctgtcactcatttaagtttcatgtccttctccattgttgtagttggtgcatctctcccttgtggccatccctgatctctgcagtcagtagctctgctctctgccagcctcttctgcagagcagcttttgccgtctccctcttcatcactgactagtaggctttttcttttttcttaactcttactgattttgccttttgtcttttgtttttcatttcttataatggaatttggtctgtagagttatttacattctgggagaatatgcttttcctttttataattattatgtacattctacaaatacaatgtgtaaatgtaatcaatgctacatatatagtcccttgcttattatgtttattagtaacagtttttgaatctatgaccttttgcagctattgccattcattttacttaactatcatttattatttcctaagtaatttatcactacaggtagaaaatacaaacatggataagacatgttccttacctcccaggaatttatagtctctgtgggtgataaacatataaggcagattggtgataagtactataatagagatacatatgtgaaagtgagggaaatgcttagagcaacactgttcagttgaaaaatatgatgagattgtaattttaaattctctagtagtcgcattaaaaaatgtgaaaagaaacaaatgggatgaattttaaaatatatttaatttaatttaatatatccaaatattgttttaacatgtcatgcaatcaatacaccacaattgctgagataatttacatttttatttcatactaaaagtcttcaaaacttgggcatgttagacttacagctggagtgatcaaatcattttggttttcctgg

SEQ ID NO: 111723 - DNA, 1127 bp, Homo sapiens
tgttttatttctgatccttgacaaatgctgaagagtttgcattcttcataaggggcttcaactctctgctacacaactagaactcacttgccaagggtgtgccacagactttccaactctccagttttactgaatcaaatttgtctaggtattttcaaaacttttaagatgaataccacatactttgctgctatcaaaatctgttttaggaaaccaataaataatagtttgaaggaattatttgggactatttttattacaccttttgatagcattgctctgacctttgtgtttattttgcttgagtttaagttgagtttattttgcttaagtttggtataaccaaacttatttgtgggttctgtacatacagaaatgaggaattatgtagagattttttaaaaccacaggctttatgtggaacaataattctgacttgaaggttagaactgaataccacaagttaattaaatattttttgtattttattgtgtaaaatatgatcgattctaggagccactaccaatgagaaagaaccagttgttttgttcttgggctataaaaacttgttccagcctcttttttgtcacatgtcctccctatattcctaaactgcttgttgtttttattctgaggccgctgaagtcttttcttgaacttggagtaccttattctagtacatctcaaaactgaaaaaaaaaaaatagatctttatagaattttgctttctttcactttttaataattaacatatattcattattttaaagaagggtagacatcaaatttcacttgtgacgtatcaagactgaaattgttaagtatgtaaaattatattttacctttaatggtataagtattatatgaatatttttctctattcttattggttttgcaatataaagaacagtttaatcacagtgatttaacatgagaaattagagaggccagcaaaaattagttaacagtgatacatatataatatgctaccattaaagcattctgctttaaaatacatgcattctacttgttcatatgaactgcttttaataggttatttattttactgattattctcatttattgaataccttgaagtgctatcccactttttaagcttacatgta

SEQ ID NO: 111724 - DNA, 2445 bp, Homo sapiens
tcaagctttgcctctggcggcaggtcccttgcctccagggtccatcgcaaatcttacagaactgcaaggagtgatagttggacagccagtactgggccaagcacagttggcagggctggggcaaggaattctgacagaaacacaacaagggttaatggtagccagccctgctcagaccctcaatgacacgctggatgacatcatggcaggtgggtttatattgttatgagcaggtatcaaatatgatttgcttaaggcgagtaagaatgtacccaaattttttgccgttacccaacttgagaactatttttggactgactcatgtctagctttagaagtattagttcaatctcagaagttctcagatggatacaggtcaaattaaagattagctcattcagtacaaatgactgaagctttctggcttagcttggtagcttgagaatctaggtttttcagtagtggggttgatgtttgatttttgtttttgttttcatttttttcctttaagttcagaatactgagattgaattttggcattttgcttctgtattcacaccaataaactgggaaattgatagaagttgaagtgcaaaactagtaggacacatcaggaagcttatttatgaacagaaatactttatatcctaatggatcagacttcaaacctgatggatatttaaaaaaaaaaacacttttacaaaattaataaagttcaaaaccaaatagggtttaattatactgtatgtaagtgattttgtcccctgtgaatgttaatgtgtagtctctttctaactgtatcatgagaaggtgtggcccccctgaaagtatcataaatgatatatttttagatgtgtagccagataaattttattcgattataactagtttcattgacaagaagatacactttagaagactgtttttatgcttctagtttttggtacttattttttgtgttttgtaacaaagtaatgggatgaggttttatagggttgtgaaccataagaatgctgtactgagaaggataatttgcttcattaaaaaaagaaaatttgaaaaggaaggaaaacagaaaaatgaaaggaataaacagtggaattttggtgacttccatctgatctcttccccttttttattcattcatctgtacttagaggatgattgactttttctaatttaaaaactgtttcagtagcattaaatatgatgagcttatttttttttaagtttcatcttttaaatggataataggaaactaaactgtatagtgtttagatatttaggtaacgttcagacactaagaatccagctgagatagattttatacttaaaaatatctgtaaagtttgctagtccgcctttaatagcacctcagtagttataacatgtggaatgaaaatttctgctagtcttaagggttaaataaccacattggaaaaatgctagtaataattactagtaagaattgtacgactcttattgatgagtgcaaaatttttctatagatttgaaagtcactactaatcatgactagctgattataataattgagagtaaacttttaaaattattaaatatcctgtgaaagttggagcacagtaaccattaaccctaaatttgatactatgtccatatgaattcagatcataatagtgctctatcatgtgaaactactaaaggatgtatagagttaaatattacgtatccactttaatgaagaataggtattacacagtaatggttgtttaaaaaaattttttttatataatatcagagtttacctgatgtgcttgggcatgcatagttgtcaacaatgatttgctagttgtacagttttgtatgctgatcagaattatcagaagtttgtaaagtatcttttcttttgattcatacatgaaacaaaaacaattctgtgtattctcagtgttctgtataaaaaaattttaagtgcatataactttttaggaaatatgacagatgcttgtcataatacaaaaatattttacttttttattatgctcatttctatggggagagaaacatagccagaaggaggaagagtaggattgaaaacatttggctacttacctgcaactcatccctgacaacaggcatgtgcacattcacacacatgcacatatactcatgcactgacttttgcagcctcaatcttaaatttctgtggtaggatgtatcctttcagttgcttaatgatgatttccacttctttcttaggggtttaaagtatattacagcctcattagtctcatcgtcttcttttcctccctctagcacagtccctgctctttatttcttaggcttcatttattagacttctaccataaaatttgctgaccaaaatcgtctgtctttcctgttcttcacacttgccaaaccagaatcagctccctgtttaacctgtctcaacaccttgcctttgct

SEQ ID NO: 111725 - DNA, 1067 bp, Homo sapiens
atgggaaaaaaaatggtactattctttctatttagtgtttattctctacataaagcccatagagggcagtatagtttatttttattcagtcatcttttctactgaagaacttaaaatacaaataaaacttcatattttacttttaatacagttattacattaggagtaatgggtactttggtatcttttactggtgcatactcaaaccttttcaaattatatcgtgtttgtctgggatttatttactttagaataatccaagatgggagaggagaattaatgtaggatatttgtgaaatgagattggccttgtgtttataatcattaaagctcggtaatgggtatgtggagcctcataatactattttctctactcttcatgatttttaaatttaccataattttaagaaaaaccattctactaatatgattttccatgccttttctgttttaggagcgaatgtgaatagaaccacagctaataatgaccatactgtactgtccctggcttgtgcagggggtcatctggcagtggtggaactacttttggctcatggggcagatcctactcaccgtttgaaagtatgtaactcaaatgtttgtgcagaattgtgaattagtatttctctcttggtcattgttacaacatatcatgtacaagttccattcataatggcattctaagtgtaaattttctcctttttcacttgaagcgttctttaccaaacctatgattttaatgcgtctgggacctgttggctttatcttcctaagtgattctgtaaactaacttatttttcttcactttttttccccttccatattcactcttttaggatggctcaactatgttgatagaagcagcaaaaggtggccatacaagtgttgtttgctatctcttggattatcctaataacttgctttcagcccctccaccagatgtcactcagttaactcccccatcccacgatttaaatagggtaagattttaaaaattaaagcattttatggtatgtcttctttatcctaattctttcacttacagtttctgtttaaattagggtttt

SEQ ID NO: 111726 - DNA, 1136 bp, Homo sapiens
actagagataataggaagtctgtaaagagatggtaatgatgtacttactaaaattcatagagatgggatacactcataagaggaaaataacttggagtggatgaggataatgctcattatattgattgttcggagaaggccatgctagagtaccatacatgcatattcaagtaccgcaattcattgtgtagagagaaggacaaattactcagatgcgtttagatgagggcatcatgatcacgtgactataacttcaaatttaaaattatttccagtgctcactttggcagcacatatactaaaattatttccatagaacatgtttatgatttgagattttttttaaatttaaaagtatatttcttaatttgcttcaaagcattatatttaaatatttagattcagaaatcagtccaattattttccttttgatttccatgaaaaagaatacttgttcactggcaattaaatgtcaagtctttttttttttttttaaacaggaacatgaatctgaaggtggaagaactcctttaatgaaagctgcaagagctggtcatgtttgtactgttcagttcttaattagtaaaggtaggtttgtataaaacagttgtctttttttgaaaggtatctacccctgccttcatttagagatttaagggtaaaggtcttttgaaggcaagagggtatcatatgaggagggatgctactgacatttaatgattgagtggatagttgataaacatcctgccatgcacagaccagcttcaaactagaaataattgtcataccaagtagcacacttgttgtgaaacgtataaaggaaagggaaatttctctgtgtaaaaactgaggatttaggtaacaaactctgctgtgttcatgtactatagcactttcttgaaacctggaattttatgatgtttctgccactaaaaaagtttgtggcaagtaacatttctactatttccctgcttctatgtttccttttttataaaatacagggagctggttataaatatagtacaaaaaatgttcacaatagaaatgtgacaaatatagcaaattgcatgaggattttcattcatgatcagaaattttagtttgaataccaaagaccttaatgaccaaataaaata

SEQ ID NO: 111727 - DNA, 1029 bp, Homo sapiens
ataataataatacctaaataagttgtaaaatgctttgatattgcctgggaaatagagcttattgaatgttaagatttttattatcatcatcatcatcattatcaccagtatctttatcatttttgaatcactataatgagaggatgtagcttatttttttgagttcttttatcacccgacttgtaccttctggctgagtaaatattactccagctgtggtacatcaaatctgggtgtgattttaatagttttatttatttttagttttaactgccttaggagttaggagagaggcactttcttatttattatagtaatataaatgttcattttaaagattcagtttattaagaaacaatcatgtttttcatatctctggaataagttaatgactttctttaaataattagaatctttattttaggagcaaatatcaatgcacagacagaagaaactcaagaaactgccttgactctggcttgctgtggaggctttctggaagtggcagactttctaattaaggcaggagccgatatagaactagggtgttctacccctttaatggaagctgctcaagagggtcatttggagttagttaaatacttattagctgcaggtaggcatttttgcatttgggagaagttttttacatgatttgtttaagtaaaaatgtcataatgcaaatatttttatgatgctatgatacactgaatgtgtgagtttaaaaaaacgtgtgatatacctttgtatgtattctgaacagtttaccttactgctgtttgaagtatctgcagctttaatttcaaccagttttgtttgtaatttttttaatgcctacaatattctctgtttctggaaatgagtgaagtttgaatttgtttaacttgaggaggtatgacttatctagaagaagtttttattttcgtcatatatgtcttatggctcctttattaagtctatgtattatttgttgactactacaggagctaacgttcatgcaacaacagcaacaggggatacagcactaac

SEQ ID NO: 111728 - DNA, 1244 bp, Homo sapiens
atagaaagtaccatgtacgcatttgtgttcccctaacacagcatgtatccttcccccacttctccaaaaagggttccatttttttctaactaatcaaaagtttgcttatccttaaagattcttatgaaaattcttcttttcctctctaaactttatccttttaacatttaagtttgtaccatatagtgttgatgtctcactatagtctcttatttcacatacttactgtttttttttctaatggttaataagcttcttgattgaaggtatcatgtttctacttattttatattttcaatctctatttccctcttctatgttaacagaatataggcagtgcataataaatactgatttactcaactgttaaatgtagctctattcctttttgagtggagatagataaacttcattgtatagtaattgagaagtcttcaaatttttcaagatttttttaatggtgctgatttaattttttaaattgtattatcattaggatggccatgttgaagtagctaggttacttcttgacagcggtgcccaagtgaacatgcctgctgattcatttgagtcaccattaactttggctgcatgtggtgggcatgtggaacttgcggctttacttattgaaagaggagctagcctggaagaggtcaatgatgaaggttatacaccattgatggaagcagctcgagaaggacatgaagaaatggtggcattacttcttggtcaaggtaaccgtatctatcaagacactaaagtataaatgtgtaaaacctaagagtataattttataaaattggattttagtatttcacctttctagtagagttgcaatgagctattacacaaaccagtgataaagtatttactgtgaaaatggctcccatactgtgttaaaacaaaatcaaagaaacttctttcatatagagctttcagagacatcatgtgctatatgtgaacgaaaaacagaactggtgttggcaaggcttgtgagttaaataggggaatataagagccaacatttctaaaggtaatagatcaagagaatgtattcctttgggggcggaatacctactaataagtatttaatagatctaatgttttaaaaaacagtatgggaaaccacgcagtaaagactaacttgctgagagtgcaagaatgcgcacatattagaagctgccaaggggctcagtacataaacttcttttttgggaaaagtgaaacaattacttcaatatgtt

SEQ ID NO: 111729 - DNA, 1085 bp, Homo sapiens
agactccgtttctaaacaacaaaaaacaaaacaatcaaaaacaatatttatgctgtgcaattttttaatattcttatattctggtattgtgatattctttccgtaatagccgcagtttggcagaagcctgttcagaaggagatgtaaatgctgtgcgaaagttactcattgaagggcgaagtgtaaatgaacacacagaggaaggggagagcctcctttgtttagcttgttctgctggatactatgagcttgcacaggttcgtattatcaaaataaagcttatttgttgtttttttaaaaactggcttgcttactaaggaaataataaaataaatccttccaaccattaggattatttcaacaaatagttttgttagataaattttgtgtgcttatagctcttttactatgactaggtagacgttatataaatacgtgttcaaaattttttgacgattatttcctaatatctttttaaactatttttctctcataaggttttgttggcaatgcatgcaaatgtggaagataggggaatcaaaggtgacattacacctttaatggctgctgctaatggaggacatgtcaaaattgtgaagttgctgctagctcataaagcagatgttaatgcacagtcttcaacaggtcatgcctatttctttttcagttttactacatagtaacatcatttggtaataatgattttgcatgaaagtgatgtttagtgctaatttttcagttctcttattagaagtgctacatattctcacacatctgtgtatgagttttgaagtatatagaatatatttcaaatgatattcttcctgttttgtttatgagggcaattggccttttaagattctttaagataaaagtaaaacactgacccagttagatggaccactctcttggaaattgagaggtgtgggccgtagtgctcaaatccatgtttccagttttttaggagaggaatgggaagatagggagaccaaacaattgtggaacaaaaggatagttcattgtttcctactgttactaaattgtggcccacagaaaaaaatattgtgaaaacattgtgtcctgaa

SEQ ID NO: 111730 - DNA, 2119 bp, Homo sapiens
ccagagaccatttcaaggtgtccatgaggtcaaaactatttttatcataatattgagatgttacttgacttttttactatgttgacatttacgatgatggtgcaaaaacagtggtgggtaaaacttatggacccgaaggccatggaaacaaactgtactgatatgattgtattcttcactaccacgtgcttgaagttaaaaaaaaaaaattaaatgctagtttaagaatattcttgatgaagcgataaaattattcattttatgaaaactccccttttgaatgcatgttctttcaatattagtgtgtgtaacaaaatgggaagtacacataaagcacttttgctgcatataaaaagtatagtgtttgtctggaggaaaaataactgcaatttttttagatgtgaggtgaattagccttttttcccccatgaaatgtcatttttatggtaaagtacaaacgaaaaactatagttatcaaacttggatatttggcaaatgctcctctaaaaatgtttgaagtgagtctgtcactttaaggaaaacaacaatacttgttgccaatgataaagttaagctttgaagcaaaaattagaattttggaacttgtttgcctaggcttgacagctttccagtacttaaagactttttggatgaaatcagtggtgatattaatgaatgtgattttttgatagtgatatttgttacttaatttccagtatggtaaatatcaagaaatacagggtttatataaagtccttgggagttcagtacttcattgagtcctgaaagcaaaacatttaaaaactgctgatttagttaggtcttctattcacagttaaagttttcacaacctaagcatcacactcaaccctacatatacctaataaccaaattaaagtagaaaagaatattagtaaagaaaattaggctgcatatgagaaataaagttttgaattcttccacaaaaaaatttcttcttttgttaatcaacaggcttagatgtcatgttgaactttttagggttgcactgtgtttaccattgttaattatgttaacatattttttccctcccctgctttctttttatttctctcccctcttttcctttcgctgttcatttctcccttcctccctctttttgcatttgttttataggtggagtctttcattttggatcaggatgatttggaaaatccaatgctggaaacagcttccaagttgctcttatcaggtactgctgatggtgcagacctcaggacagtagatccagaaacacaggctagactggaagctttactagaagctgcaggtatgtactctacatagtaataagtctaccttgttatgtaaagttgcacatcaatctaataaaagctcttgttaaaaatgaatgatattgggtatttagaatgatactattaataaaggttaattgattactttctgctgaattacatggagcgttttactaaagcatattgtaattttcattaccagagtaaagtccatgtgctacagttgaccttacaaagagagatttttcagttgagtttgattattcgtgaattatgtatttgtgaatttgcctacctgcaaaaatgcattttaacttcaaaatcagtactagcggtctttcataggcatgtataaagtggtggaacatttgaatcaccctacatgcatgctcccagtagaagtcgaacaaagtgatgctctacattcttgtttcagctctcctgctataaataagtgtccttttgtggcctatttaatgccaggttttacacatttttgtgatttttgttggtgttaattttttaatttttaatttttgtgggtacatagtaggtgtaagtatttatgggatacatgagatattttgatacaggcatgcaatgcataataatcacatcagggtaaatgggctatccatcacctaaagcatttatcccttgtgttacaaacaacccagttatacttttttagttatttttaagtgtacaattaaattatttttgaccatagccactctgttgtgctagcacatactaggtcttattcattttttctaactttttttttttgatactcattaaccatccccactgccccaactacc

SEQ ID NO: 111731 - DNA, 1072 bp, Homo sapiens
cttatttcttattttatgtgtaaatctgcttatcagtattcaaagaactataagagcagatagccatatttttccaggcttacttgagagccagaaattattataatttcttaataaattaagaatttattcagtcactgtcataaaatgatcataaactcaagtttcttaatttttctattcactttttaatattcagtttttaaaatatgtattcatatgtaaaatgtatttcatattgataaaaccaaaattaagactgttgttgccttcaattatgttcacatagcctgtgctttgaatatcagtgaatatgttttatatgtatgagttatataattcatcccataatgatagccgtaagtcatttctaatgaacttttattttttgtagccaaagtggtgttagttatggatttatgtctgtaaacccattttatgttactgaaatgtctaaattggtcctaaaaatcaatcattgacacttactaaaagaaaaatttagaaaaaatataaaatctttttggagggatttttctgcattgactggatttattaagagatcttaaaattttaagtatggtaaatttttgactgaagataacttcttttcctggaataagtgtggggattatttgttttaaaatgcttttataatatagtcaaaatttagaacaccttttctgaaatgtagattactggtttaaaattcagattaccagcttttgagattcagtgataaatagagtattttccagaacaacaaaaacaataataaatatttttatttattaccagcttttgagattcattgataaatagggtattttccagaacaacaaaaacaataataaatattttttatttattttttaaatattttttatttattattattttttcttcggaaaacatcagatgggggatggggttagtgttgaatgtaaagaagtctaaattttgcggttgccagcattttacttttataaagtatgtttatgcttagagactggcccttttttccatcttcacctcacataatgcatttgttttacttaagttcgtaattggt

SEQ ID NO: 111732 - DNA, 1302 bp, Homo sapiens
aatctcaaccgtttgcctttacattgtatcctaataccctgttattacccatgttgtctacctgctaccctctttatcttcattattcagagctccacctagatcctacctcttctctagggttttcccaccctagtcttcttttcacattctttagctcctactattttctgctctgtaaaagtaatgtgagaccatatacatttaaaatattttatggtctgtattatgtgcttgactatatggttaatttttagcgaccctgactctttaagttaaaaaaaagtcatctatgtatttaggtaaaagatatttcatcccccaaaatgatttgaagtagtttagagtatatactctaaaaaaataaaaatacaaaggtagaattagtaaattaagaccaaaggaaaatggattatacagaaaaatgtatgtaatatacagttattaaacttagattcagttaactagcaaccagagccaaatttggaaacttgatgaattttgagatttgcatagtccatagcttcataggtatactagatgatttggaggactcatattttctgaaattgagatctgagaaaaaatttcttttgggccctcataatggagatactccaggtagtagataactttttcagcatttctaaaatatacccttcacattgtttatacagagtataaactaaagatttgctaataaaatgcaatttggttgaaaacaataatgtagtgtaagtactaggttttctgatggtcttgtttgtttcaacaataaaatttagaacatctagggcaaaggttccaaacttgtggcttcttggccatatcagacttagaactgtgttttgtgtagttcatataacattggcccacacagtgagcatgacacatatacacacacactcatttatttatattttctttaatttctctcagcactgttgtatagttttcactgttcaggtcttataaatatttcatgaaatttgttcctaggtgttttaggtttttgatattattgtaactgctaattctttttattttgcaattgtttgttgttcatatgtaggaatacagtggatatttgtgggcttaaattcacttagttctactagggttttttttatttgtttgtttttttggtagatcttaggattttctatctacttggatcatatgtacaaataaagtcagtttctaccttcatctcccatggttatgccttttaattctcttattttcaatattctaccttattgccttaagtagggcctccataaaatgttaaatagaactggt

SEQ ID NO: 111733 - DNA, 2276 bp, Homo sapiens
gatctttggctaggtgcagtgagtggctcgtgcctgtaatcacagcaattcgggaggctgaagcaagaggatcgcttgagcccaggagttcaagaccagcctaagcaacatagtgagaccctatgtctacaaaaaagtaaaaattaaaaaaaaaaagttttggattttggagcatttcagattttgaattttcagattagggatgatcaacctgtatattttgcagtgaggatactcttatttggaagtccaatttttcatgtaagggtggggttgatgttataacattgctttcatatgccaattttgggagaattaatggggaagtagtataagatacacttatgttagttaatccctgtaaagaagaatgatattttagtggaatatggaggctccaaatagcttgtggaaaggtagtataactagaagtatgtgaatcaatgtattactcttatatgaaagtaaaggcacggttgtccaatgaaccactagtttcccactgatccatcgtagtctggtaattagtgcatgttatggagcattaattagaaaaggtctacatcatatattatccatttatagaggcaacaacattggccctttactggttctgaattgtgagaggcctttgttttgacacttgataacagctcattctgatatgaagtcacttgatcactacaaagttggtgagcagcacagtcttgttaaccattggtttggtttagtatatatcttccaaatttgccaaaccaatggcttttcacaaggtgtttataattgttaaatgcctatgaggtgataactttcatgtgtggttggattaatactggccattaataatttagtcttggatggaatcagaactctaactagttggatatgtgttgtaagtaggatagcacatagttttatggtggcaacagtaattggcacattagctaccctttattgagtatttaaattatatatagagagggagtgtgccaggtactacataagcattgttttatttaatcctctgaatgattctgtgaggaggtaggtacccacttcataagcagcttataaggaataaatgaagtaatctgcataaacatttagcacagcatttagttacatagttaacccttaactgttaacccttttttaaccctcatcttctatccttatgctgtcacccccgccatttgacaggaaaatttgagcgtcagggattattagagcaatagttttaaattcttttggtcttaggtctctttttcactgttaaaaattattgagaactcaaaagttttttgtttctgagagttatatctatcactatttactatattagaaattatagtttaaagaaaattaaaattaaagttgaaagaaaaatttaaaaacatttacatatttattcatttaaaaaaatgataaaccattgcatgttaacatgcttttataaaaaaataattattttccaaaagaaaaaatttgtgagagtggcattgttttacatttttataaatatctttaacatctgacttaatggaagataactagactctcatatcttctttattaatttaatttaacttttattttagagttgaggtctcattacgttgcccaggctggagtgcagtggctgttcacaggtacagtcataatgcactttagccttgaactcctgggctgagcagtcattctgcctcagcctcctgagtagctgagactacaggtgccagccaccatgcccatcatatctgctgtcatattcagtctattgtgatacattatttggtcgaagtctctaaagaaatttagtgtcacattgttaggaggataaaaaaacaaaaactattttcatagccctttcagataattgtggataatcttctttaaaaccattcctaaactccacaagtggtagtttcttaaaggttagttgcagtgtggaatctgaaacaattaccggtgaactttctgaactttgttagattaaaactcactggcttattgtgcactttgaatttatcaaaaccatgtatgatttttataatattggtcatagtaaaatactggtttcttttattctgcaatatttttaaaaatcacattttcagccaggcgcagtggcccacacctataatcccagcactttgggaggctgagatgggtggatcacaaggtcaagagatcaaaaccatcctggccaacatggtgaaaccctgtctctactaaaaatacaaaaattagctgggtgtagtggcatgcgcctgtag

SEQ ID NO: 111734 - DNA, 1498 bp, Homo sapiens
tttgtttctattagtgagtttccttaaaaatgtgtggtaaaattatctacttagaaatagtagtataaactttcatcaaaggagtttagtaattacaagtggccacatgactttttagtggttcagtttaaataagcctaattagattacagagttctagtgttacattttaatttgcttttaaaattttttggtttggattttaaagaagtgtgctttggagattttgataaatctatttgacaatttttcttagccatttaaaacttcagcatataacagattttagaagtcttatttatgttctgaggaaatcctacttgagcactgttttgtgctttatgcataggtttttttaatgctacctgaacaactggctttttattatctcaattgtttaataccatgttaagatttcatgttaccttatttattcaatgttgctagttattaaaacaacctctgcaattttagttttcctaattctcaatttatcttaatttagtttctatgtacctgttgcatcctatcatactaaataagtagctttttctctttatttaaaatatcatttgacttaaatatttgtcaatcttggtaacattttctaagtagtaataaaagagccttatccaaagttataagtactcataatgacacagtgctaaaaatacagagtgcaaagaataaatttgctaactttgcagataaatgtaccattttctaaagcacctcatattgcaagtaaacagatatttattacataatgagctttccagaaaaatatattccctagccctctaccccccacagggataactccttgaataaatgtccagtaatggataatgaagttcatctgtataccacagtgacagttttattattgtacttaatattgagctacttgaagttcattaccgtaattttcacctttgtgattttatttattgaacatacggaattttatgtagattatgcttatttgcattgaataaatattagactctttttttcctgtctttgtaacttgatcttttgaatcataaacttcttaaaggtactcttattgaatattagttaacaaaagtcaatatcattagtgaacataacacaaatgatttctcataatactatggcttaccttttaaactgtgattactgattatatatgcccacatatatttaagttgactatttagacctttaaaatcttaagtaaaatactctctaaaatgtataataaaattagaaaaggtggatttcaacttacatcattgcttttcaacagtccaaggtaagggattaaatagagtgtcttggctatttcatttattcaaataatccaggcagtaattttcttctccaaaccaaaggcatcaaagtatttccgttccttctgcctaccttctgtaaaaggaactaatactcaggaaagtagccatatacagatggcagaaaaagggctgacagctcatataaatacctcttttcttgt

SEQ ID NO: 111735 - DNA, 1400 bp, Homo sapiens
ttaaatagctttttaaaaaatatgttatttcttttttgaaattttaggattttaaaaattgaagtggtaaaataagagactttattttgtctgttaaaattacttgacagaagtttgctttggaatagagcttctgtatctttaaaaaatacacagtgagtcaccccctgctcttttggtagatgcctggctagtgaacagctaagctgctttaggcatgtaatagaacattccatttcctgttcccttgctgacacagaggagtgttcctgctggcaatgatctaatcatagtgcagtaagaaacatggcagtttgataaaacatggtggagacagcggctgaaatggaagcatatgttctagaagacattcttgaggtagggctaggtttgtaagtgaaatgaaagttgaaatctgaacaaagaaatcttatctgccggaattattttacagatgaatagattagaggagagagcaaagagaagcagagcataaaagcaagacacggtcagacctattccgtgtgagaatgtttcagactggttcacatgattactatagacgtctataattattttgtttaaacttcatgtttcataaattgtagatatatgtttgttagggaaaaaggggagactcaggcttaataaaaagccttgtgctggtggtgacctttagattaactcattagaaggtggggtctgcaaagcagctttgagtaaggtttagtatcatatgtcttagaattcatttacatatctaagcctaaagctttgctgcagttaactattaaaaacggttattttagctttaaactaagcatgtttatatcaatctgattgcttaatttagctggtatactctggtcctagatttttcatgtgactttgattattataaaacaaattattaaattaaaaatattaaaaccctgaaatttagggcactgatgctagagagacatcaatacaaaattactataatttgaatcatgaacattttaaattatattttctcttttctggttgtaaaaattttataagatcctatttgagtataaatcagtccaaggaaatacatgtcaaagtgaaactataattgcttttggcattgaatgtagtatactattagaaatttgtatttataggtataggtatttaaatctcatattcttatctgtgggattgtgtagggtttttcttttttttcctcattagataaaacctgggtaattcagataaagaggctttatggtggtgagtggtattcctaatacttagactgttgagataatttattaactatttcacatcttcaggaagattattttactgtggggagagggcttgggagaagaagctgcaaagggaagctaggcggggttagcaggagaaaaaag

SEQ ID NO: 111736 - DNA, 1117 bp, Homo sapiens
aactcctgacctcaggtgatctgcccgcctgggcctcccagagtgctgggattacaggacaggcatgagccaccgcgcctggccaaagtattgcctgctttcaacagtgttgcctgcttttttctagtctttaagggagacagataataaatgatagccataattctgtgagaaagccataatcacatatgtattgttaaaaacaacagtaaatgtcagaaaacagaagcaccccataatcctagaatggaagagaaggggagagtgaaaggttttattaactttagtcttaggggcccccatttcttgtcagataaaggatttggaaggcctattcttggtttatggaaaaggagagtgttccagcatacgttccttgaactcaaacctatcattgcttgatagcattagaggaaaatttgaggaagggaaactttgttgacgacttgttttaagtctaaagatggagcagtttatttgaagcatagaaagaattgacctgggaggcaggaaataacaaaagccagtttgtagtttctgtttaagccaggtctcaacaatgtaaattactttgagcagcctttaaatgccaggcatacccatacctaaatgtaaacactaggtatggtatgaggtaaaacatagtgtcatttgtttgccattaattccacataccctttgcaatcagttctggatttgcatctggatttgactctgcatataactgtgtgccctgtctgatacttggttcccttattcgtaaaatgagattatcacagggaagaagtatagttgatgattctggatatggactccagtctggtgcaaactgcctgaattcagatctcaactcttcaacttaattagcttagcttgaaataattgggcaagttgcttaacctctttttgtcccatttccacatacgtaaaatggggataataataatatgttttaggattactgtgaaaattaaatgagttaatatataaaaagcatttaaaatggcatatagtaagcaaaatgtagtttaaaaatatgacatagctgggttgttatgaggataaataatatgtttatttttttaaaaaaagaaatcatatattgcttgacacagta

SEQ ID NO: 111737 - DNA, 1026 bp, Homo sapiens
tttaatatctttcacttatacttggtttaggctctttcacacttgggtttcatacttatgctttactataatttacacagtagaaaagagaaaaagagagatactataaagtaatgattaaatttaataattttaagaggtagaattgttttagttttttttctagtagtttatgtgagtgggcaaaatcattaaatttttcctaccaccagttgtcagtccttgttttgtttgaatatatagattttgaagcctcaccattccctaagttaaaaaattgataggaatgaaactcctttacaaggagttttctattaaagttttacatgaagggaacaaacaacaaagtgttaagtcatgcaaaacagagttgcttgcttgtcagcacatttctacatatttttttgttttgattttctttttccttcttcaaggaaaccaatgctggtcctaaataaaattgtcaattttggaagattctttcattcaatctaggtatttactgagcttttttgtcctttaccttctttttatgagaggtttcactcttcattttggatatttgaacattttcagtcaatattttcttttattattttaaattatttttatatgtttacatttgtttgcatagcttaatatgttaattgctatttacactttaatacttctgttggcaaaataatgaaaagtcttgtgccattgaaatccattttagataaatgggaagacaattttcttgcctataaaattaggttgaggctgggtgcggtggctcacacctgtaatcccagcactttgggaggccaaggcaggcggtcacttgaggtcaggagttcgagagcaccctggccaacatgatgaaaccccgtctctactaaaaatgcaaaaatgagccaggcgtggtggtgggcgcctgtaatcccagctactcgggaggctgaggcaggagaatcacttgaacccgggaggcagaggttgcagtgagctgaaactgcgccactgcactccaacctggagtgcaaa

SEQ ID NO: 111738 - DNA, 1028 bp, Homo sapiens
tttggtactttaaataattgcttgcaaaagttacatctttaaataattgcttgcaggcaaaccattcaaggtttgttatgaatagattaggctggaaatagcagagcgcagagtggtaacagatatcttgagaccagactgattggagcttgtcagggaccccagaccattaaggaaccagaggagagccagtgatagcaatgagattccatggttacttgggtagtttttacttcctgattattttccatgcccttgatgctatcttgagttacttggaactgtttcttcattcccccagagtggtagaaaccggtgactcaagaaaattgtctttagatttaagctttttcttgtaatttaaatttttatccccaggtcccctagacctccattttgtgtctgtgtgtgtgtggtgtgtatttctttctgttggtagatatttgctttcaagtggaggacaaatgtgttgctgacgaggttgaaagtgctgtatcatcaatagatttaacctatttaaaatcaaaaacattgaaataagtaatttctgttatgtatgcacttgtttttattttcatttgaaaatgtacaattcagacaaatgggagggttgattgtaaacaataaatattttatcagttttgtgtacatagaacctattgtgaaatgctggaaaaagaatgaattcatggtgtgacccaccatgggtagagacaacaaatgcgagtgtccaacagacacaactattactggggatgtgaaaagaggcagcattgctttgtttcttactttgtttagtacattacttacgttgggacaagactatgcttgtatttcattctgtacataggacacatctggatgaagcgttttgtatctaatataattctcttctgtacttttctaggttgaatttcagatttcatttattagttggattagagaagaatgggaaggggaccaattagagaaaaaaatcattgaagtttttagtattaaacattgtcaagaatcaggattgtgttcta

SEQ ID NO: 111739 - DNA, 1050 bp, Homo sapiens
tctacactttgtagttgaaaaaatcaaggtaaagaataagtaacttgttcaaggtcacagtaagtgatggaaatggaatataaacatgggtagtctcacatgaaagtctgctttcttaactctcatattgtactgccttcttaccatccttttatggcctccctagtaattgctcaagaaatatgttttgtatgcattgtagagttcactagccatttcatcttgcttctaagtcctctttacagatctgtatgaataccgtcttactcaaatttatgtatagtgacctatccccaagtaggataaccagagagaaatgatggagtaaggagggttatggaagacctccttactccaaaacactttacctgaatgtagctagttaatactgctctgttttatttcatcttgtttccctaactcctgtcttgggaacattcatggattaatcttgggatggatttcataggtggaataaatgggaatgtcactcttcaatatttctgaaacatcaaatcaaaatacataccttgtagattacctcttacagtaagtgctcaaaatgtgaagtgggaagaatgctgttttagaccctcctatacctcttaattcatgctgttaggtaagtgtgacatgtaaaaattaaatatctcagtctctcataaaaggggcctggtaatactttcttttgagggaggttaggtgacctaatgtttgtgaaaatatttgtgacctataaggattttcataaattaattgttaaaactgaagtatgaataaaaatagagagtcttatgaaaattctgactactgagatggttggttttttttttttttaatttaggagaatcccttattttaaatttctaattctattaaatttggttatcttattgaatttatagattgctagtaaatattttcagttctaattgtacattttggttaattgttttaggtggagctgatagtagataggttaaggggttgggattctgtaatgaacagttcacaaaataatggttgtattctgaatttgttaagttttta

SEQ ID NO: 111740 - DNA, 1056 bp, Homo sapiens
gggtcttgctctgttgcataggctggagggcagtggcatgatcatagctcactgccgcctcgaaatcctgggctcaagtgttcctcccacctcagcctcccaagtatctgggactacaggtgcatgccaccatgcctagctaatttttttttttttttttgtagagatagtcttgctgtgttgcccaagttattctagaactcctgggctcaggtgatcctcctgccttggcctctcaaagtgctagtattccaggcatgagcccatgtgcccagccaagtcagtgatcttttgaagcaatttttcttcttttattgcttaaacctctaaacaggcttgacatttttttttcttttctctttccctcccttacagattctagtacagaagtacttttatgaagaaaatataagcaatgccagcatctatatagtgttcttactgatttgatgatgcccttaggttgtctttgaacttgaaaatctctatacattattattgcaggacctataaactatgactgttgtgtagttctcttgcactatctttccaatgttctttgaagaactgtttcactgtttattttatctatttcaaatgaactaggagtaatttaaaacttacatagttgctgttcagaaaatgtcaaaaaagaagagcttgtataagatacaatgtagataaatttaattctattgagggggtaatatccttttaagatacaatgtagataaatttaattctattgagggggtaatatcctttaaaccaaacttgtctaaagttttcaccaaatgttaaactgtgagtaatgttttctttttatttatccatttgatttttttatattggaggaatcttaaaattgcagtatctttttccacttttattaaatcatatagtaactgtgaactgaaaatttaaacagtagaggaagatacagagtaagagttgaagattttttatatccctaggtgtaaattgtaagtgtatgtaatcctatgcctttttctgtgcattttcacacatatacagatatatctatgtaattttgtt

SEQ ID NO: 111741 - DNA, 1423 bp, Homo sapiens
acagttggtgtatatcaaatgtttgtttctttcttgagactgagtgcgtgtgtgtgtgtgttagagtatgttaatatttgccacattattctcatttacttatgaatgttccataatataaatgttcataatttatttgatcttttattttggtagacatttagattgttttcactacattgctattagtgaagtgaacatccttgtacagttatttttgagtatgaaactatttctttgggatggattcctggaaatggaattgttgggctagagtatgcacatgttaaatttgataaatactctcaagttttgcttgcatcagcagtgtatgagaatgttcctagatgtggttaatttacttagttttaaaaatctgttaaacaaaaaatggtgttttgttttcatttttctgattactgtcaacattgagtataagttttttaatctttgtttttcatttggatgtcttgaaaatttcctggtttatcctttacctatttttctattaggattgtcttgttgttttcttattgatttgttgatagtatttatagtattaatttttcatagtgttatgtgttacagtattctcccttgacattgttttcacaacatggaaaaatttattgtttagtaaaatgtattattcttttatgacttctggagaacttcctcactccagtatttaacaattcttagaaatttttctttgtactttgtttttcaaagatacatggatctctttttggatatagtatttaattcttgtgtctgtttcttatttactcctttttatagcagttgactgattcttgcttcttaaaatgtaatcctctcttcctcatgtaataccaccttctcctgtttgtacctcactgttttttgttggtcatcttgcttccttttaccccgcacagcaaacatactttgattatttacctcattggacccttttctgttttgtgtctggtctcatttagatgattttaactattgtgtcgttacatatctatataccagtgactatcaggtttacagctccaacctaaacctttgttttttttgagaattgggctcacccttctggccacctaccatttgtgcaaacctttcttccaacacctaattgtttctttcctcaagagaatcaattcaaagtcccatccagttactacatacagctccaagtgaaagatatatacaaaatgcttttcctcctaattcagagaattctagtgatctataaagcaataaacaactatctctccctcttttcacccaacccattgtgtagtagtgagtaggaataggataatcataatgaaaactcttctagagaagggaagaataggaagtacacagcagtcattggtacatattaataatgaaatccttcgggggaggagttgtgacaactttg

SEQ ID NO: 111742 - DNA, 1784 bp, Homo sapiens
acattgcattctattgaatgcatttttgaatatgactgaatgatcttagtattttttctttctttttttttttttggagacggagtttcgctcttgttgcccaggctggagtgcaacagtctgatctcggctcactgcaacttccacctcccgggttcaaatgattttcctgcctcagcttcccgagtagctggaattacaggcatccgccaccaggcctggctaatttttgtatttttattagagacagggtttcaccatgttggccagggtagtcttgaactcctgacctcaggtgatccactggcctcagcctcccagagtgctgagattacaggtctgagccacactgcgcactgcaatcttagtattttctaaggcagaattcaaagggggagaaacatttttgttgaagatgcttaaagtataaatacagtaggagttgatcagaatttcatctgtttttgtaagtaacctgtgactaaatcaagagataaacctagtgaagaaattttagacaaagggagccggtaaataaattagtactgacttagtattgaaaggatttgcaaggccagggaggatctgtttacagacagaaaaagagagttgaaaatgagggagaaagaaaaaatatttcagaattaggctgtgttcagcttcatttggaaatattcttgtttgttttttattggaaaagtgctatctaaattccttttttgtaatgcttagaatcctagattagcccagagaagcttgcttgtttcatctcttaattgatgtagcagtatttgtaaactagattttaagatctttgaagcagtagtctgtcttaattataatttatcttgtcttctctcctgcttaagcacagtactagaaaaaaacaaaacatttttagtgaataactagtacttagggaggattcagcattcatttagggaaagaagagaaggaatggaaattcttcccttcttggatccagggcttctgaatagctgaagttcagatttcaacattttccaatttcttaattccttttcgtagtgatgatgatcttctctaagtattaaggggagagccagttaaactaataggaattgatgaatgcctggtaagtaccttaagcctcctaaaatttttaaagagtaaataaaaatgaatacttattcagtacctactgtttgtgaagtctaggtaaaggttaaaagtatggattttggagcttggatttaaatccttgatccatcatttactagcattgtgaccttggccgagtttttaaatctctactgcaatttcctcatgtaaatggtataaatggtaatgatagtagattctaccttataacattgttatgagagttaaatgagttaatacaattttctcgtattctcattttattcttgccataaccctatgaagtaggtgctgctatatttctttcattattcaataaatgtttggagttcctactatgtgctaggtattgtgctgtactgcgtgagcaatggtgaacaaaacttgtaagtcaccttgatttaaaaatacaccaatgaataaatattataagtttggggaggtgtgagagtgagcttaagtggttaaatgtacatcttgaataatgtgtgagtttcaaagtatacaaatgttggcagggagcattcattttacaggtaaacatactggcatagaaggattttaggcaacctcatcagggtcacatagctaataaatgtcagaatgggattgaacctgggactgttagattctacgcctcctca

SEQ ID NO: 111743 - DNA, 1075 bp, Homo sapiens
ccttttgtaatataggaatggttatgttgactttcaccaactatggtagtatttctatgtttttaacataccttatcctgtcttttacatggtgttaaacaatgggtttgtcatttatgaagatgagtcaggagaaatacgtgtaagaaagtgtgcccattggccgggcgtggtagctcacgcctgtaatcccagcactttgggagaccgaggcgggcggatcacctgaggtcaggagtttgagaccagcctggccaacatggtgaaaccccatctctactaaaaatacaaaaaaattagccgagtgtggtggcagatgcctgtaatctcagctacttgggaggctgaggcaggagaattgcttgaacccgggaggtggaggttgcagtgagctgagattgcaccattgcagtccagcctgggcaacaagaacgagactctgtctcaaaaaaaaaaaagtgtacccatttaaaaaatctatacagatgagggatgagcagacaaaaaggagtacagattgtctctgccccatcttcatcttttgatcaaagtaaagacaaataaaactgtaagctaaatgggtgagttgtgtaatgtttttctcttaattaccattttactgacatgtcagcagaagcctaactttctggagctaggaagtcttgtggctaaaatcacagtgttgtcttttctctaattcattctgttataggctacacaataaaaaaaagtagataaaatgatctttaaaattatccttccagtaaaaatcatcaaaagattaaaaaggaatgtgaaaggttatggttttgtggtatttaacctgaaaggataactttaatttaacaaaaatacatagctttgctataaagaaatgctatctgaataatctctgtatctgccaaaagaggaaaaatggaaggaaacgagaatcaattcaaataagagcttcatttaattgttgaacaataagaatataatttctagacattggagtaggttattgagaataggattttactttaaagtatttcagaatagggtaatcacgtcttagataatttgcataacttcg

SEQ ID NO: 111744 - DNA, 2573 bp, Homo sapiens
aggtgagagctggcggagcggcggcggcggcggcggcagtagaggtgaccgaggcggtggcggcggaggcggcaccgattgctgtgtcggccccagtgcggccgaagtcgcggtagagcgtagccccacgcccctcccccgtccgcgccctccctctttccctggggatggagaaggcgacggttccggtggcggcggcgacggctgcagaaggagaagggagccccccggcggtggcggctgtggcgggcccccccgcggcggcggaggtcggcggcggcgttggcggcagcagcagagctcgctcggcctcgtctcctcgtgggatggtgcgagtctgcgacctgctcctgaagaagaagccgccgcagcagcagcaccacaaggccaagcgtaaccggacttgccgaccccccagcagcagcgaaagcagcagcgacagcgacaacagcggcggcggtggaggcggcggtggaggcggaggtggcggcggcggcaccagcagtaacaacagcgaggaagaagaggacgacgacgacgaggaagaggaggtttctgaggcaagggcctggtttcaaaggaaggagggaggaagggactgtaagggataggggccgaaggtgggaggggatttggagtgggacagattccagtgggttgatctcttaggggccaggctttcgactgccccctttcttccctcggcctaaatcgtgaggtgtgggaatgtgggggagggtagctgacacgtgggggtgggaggaccacggagttcacagagttggtgaacagcctgttatcatgggatggctcacttggttaaggatggagggaattggttagattccctgtttgcacgccggggggtgggggggtggtctgcctggggccagtagggccaccttagtctgaggcgggatcgggatcaaagcgggaggagtaaaataatgggtaaatgagtctcttggggaccaactaggaggttgatcaacttctcccagttgtgaggtggaggggagcagtttgaggggggacgtaaggttgtaatggactcagagctaagtgtttgtgtatgtgagggacacgtgagaagctgtacttttccatactgttctgcagggtttttcgtaactatcctggctgctgaagtaacttcatttcctcgatctcccagggattttcgatgaactgatgctgtatttgtataaatttatcagtaactttaaataattacaaatgaccatatacatttgtaagtggatgaaaaatatatttgatccttacacgtacatacatacatgccttcgaatgtttccttagtgagttagaattaagctaggacctgttgtcccgtaatatgggacagccaaagggtaggctttggagccaggcctggttgtggtgagttggaataggaaggcctctcggtttgtcctagtgatctggtttcataataactttataatttttcctgggtccacagacaggcggcgttgcaggaccttattcctcacagaagcccttacaacccaaaggctcagtaaaacataccatactgacaaccaactgagagttagctttactagttattagctgttttaccactctcttgtctccttcctgaaatagaatctagaaaaatctttatttggagagggaaatctttatcagcagagggaaaacagctttaaaggctgattttaaacttagttctaagaggagaccaagtgattcatctaaaagtaccacttactatttattctcttccacaaacatggaacttattttgatgcaagtctggttttccgaaaattggaattattgaatcctggtctctgttgaaatagagaagtaccttttaaaggatttgacacatgtctatttgtagaagaccagattctcttttatctcagactggatgaagttgtataggtagagatattaagtgctgaagtatgtatgacaaaaatatgccagtccttgtttttattcccttttagcctgttggattctgagaataggtttgtattgatagacttatattggcctacttggatgtttaggatagtgtgttgctctggcggcatttgaaacaaggaagagaaagatgtaatggggtccttatccctaataaaatttgttatggtacttagaatcattcaattgtatgattcttctcaaaggtgagaaacattttacaggtaattcagccctttattttaaaaaggaggaaaacaaggtttagaggaaagtggttgtggtgggtagtagcaaaagtacaaatcaaagttttctaatgtctcagacctgtacactttttaataataatttatttccttttatcaccctcctgatatcattcagaaaaatagttactgaatagcaaggtaacacaatcatgcagctataggcaaaataccattacttaaaattttaaattctcgtgaaactattaagctctggtttagagcaaggttatgatagttgaatgcagtacttactgggatattctgctgcaaacttaacatacctaggtagttttgtccattggaatgcggcctaataagcagaac

SEQ ID NO: 111745 - DNA, 1165 bp, Homo sapiens
tctactcatggtgagaaaaatacttctatggtatccagctaccctgtattacacagtggattacagattggaagactttctctgcgaagagccagattagaaatatttcaggctctgtaggtcatatgatttctgttacaactactcatctctgcagttataacagaaaaacagacatagacaatgagcagacaaattagtgtggtgatattccaatacaactttgtttacaaaaacaggcagcctgggaccaccatctgccaactccttatgtcatttgtagacttatttcagttgaggatttagtcaggctctattcaggttcagaaacattttccaactgcacatgatcctgaagtaaacactttaaaggctgctcatactctactatgtaatgtacttttatcagaagcagaagctgagggaataagattatgtaaggctccatttgctttcataacaactctcacagctcagcatatcaggagttgcatcccaagtgtccctgaagtttctttacagtaaaatttctttatggtgaaatttcttaatagtgttctggcactaaacaatgagtgctataaatcatgttcatgttcttggccagtagtataatttttaggaaatatcctatgacaatgaccccaggagaacaaaatcagtgtgaccaatgatatttagaagagacatgttcattaacattaaaaatggaaagtaatccatttgggaaatgaaccaacagtatggaggacttcaggaggatctttttatggcaattgtgtgaagtgtattgatccttggaaacgtacaccttgaaaattacaagtgagaaaaagccaatggcaacatacatgcttacctgatttcaaacatgtaacagtcagtatatataaattctgtcattcaatattcagtatttattgaagaagagcctactgtgagcaagtttctgctctgagaaccaggaacacaggagtgaataaagtggaccaaactccctgccctctcattttcttatgagacagagacagatattgaggatcaaagggattttagcaattgaaatacttggaattttaatatcatgacttgttgggtcttttttttttttataaaaccgcttatatgagaaagcttttcttcctttgtttattgttgtttaggc

SEQ ID NO: 111746 - DNA, 1110 bp, Homo sapiens
gatctaaggcttctcataaatgatagttctaaagaattaaccccagggccaaaaacattatgtcctgtcctaacctctccatcccttgctcctcatgacactttatttttactggttccctcttgacattagattatgcaatatatggccaacatccacagcttttcttgtacgcagcaaacagtatctcatattgctttgggaacaatagagtaagggcttaaaagctataagagtagagatgaaaactgaaactggccaagctacagcagaggctgggggctgagaggagatgaaatcatgaaaaaataagtggtactgaaacatgacccaaatcttatggggggtggaaaaaggaaaaaagccaaataaatgacagagagaaggagaagtgaatgatgcagggttgggcagtaggaaagtgaaggaaacaaatatgatcaaatatggaaataaagccacagctgaaagataaggatgaactataagcagtgggaaaaagacctgatgcaaaggataaaggatccactgacttattcctcaaacacttactgattactcactgtgagcaggtgtatttttggaccctgagcattcagtaatgaaccaaacaaaacccttactctcatggagttacatcataaagtcgggatgcagtcaatacataagataaatgctgaggaaatggagtaaagagtgctagagatagagagcggaaagggttctgattgcatataacctagttccttcctcagtgagcgggaagcactggaggaaaagcctgcagaaagggagaaagcaagccatgcagctttcgcaggtattccaggcaaggggaatggcaactccacagccctaaggcagatgcatatttgtaagggtcagggagaacagtgtggggaaatggaagtagaaagacagcaggagaagaagccaaatgggctcagaacatgtagggtttgataggccattatgaggcttgatctttcccactaaataagatgagaagctgtggaaggatattgagcacatgagtggcaatatcagtctagctgctgtgttaagaacagagtagagaggggacaagagtggaaacagagaagttaccaa

SEQ ID NO: 111747 - DNA, 1059 bp, Homo sapiens
aactacttattttaattaactaaatggatatcccaagcattccatgtttatcctgttgctcagtgaatcctcaaatcgttaatttggtagattctcttttttgtcttcatactattatttcttttagcttttaaaaaaattgtgtactgcctacaggtctttatggaagtttcacctttctttgtgtcgcactggcatcggctgtataatttttgcagctagaccacattttaaaaaaatctacatttttggaactagtaaaagatacttatttgtgttatttaagtattcacgtcttttaccgtgggtagttaagtttaataatttaaaaagacacattttatcagtaacaatgttcattttatttttcagactcttccctctactacttactctgtatttctgtctcttctaatgactaggaaaggcagtttctcaaaatcatcttctatttagttggcaaatgtgataatgtgggtagtgttcctaccttcctgctgtatgtgttctactgaaatgagatataatagccatctggctacaattttgatttctaagaagttcttatgtcattttaaattcaaaaactaagtgtttcaacatttggtctctcatatcttaagttttattttctttgttccagctgttcagagatagtgtgttctaatatctccacaatcaagatttttgactaaaatggatcagtacatgaaaaagagggactagtattaattttagatcttgttagttaatcatggtcttactaataatttggcaagttctttaatgagccaaatctttgtatttcaaatgccttgaagttgttattctttcctattagtaccctgatgggaggatgaaaacagcagaaaggagcagcaccagatgatcttttcatgggcacgtactctttcaaggaatcccatggagctcagtgaaattacactttggcttagagataattaagttgtggaaggaggtttaagagaggagcttaggtgaaatttgagctgtaaatgagtatgctaaattaaagaaatgattagtaataaatgagat

SEQ ID NO: 111748 - DNA, 1054 bp, Homo sapiens
ctgtctcccaggctggagtgcagtggcgcgatctcagctcactgcaagctccgcctcccgggttcacgccattctcctgcctcagcctcccgagtaactgggactacaggcgcccgccaccacacccgtctaattttttttgtatttttagtagagacggggtttcaccgtgttagctaggatggtctcgatctcctgacctcgtgatccaccagcctcggactcccaaagtgctaggattacaggtgtgagccaccgcgcccgggcacgttcaagttttttatggccctatttatttaaaaactccctcagtgaagtatgagatatgttagaactttcaaaggcattttctgaatactcaagaaggacaaaaaggaaggacactaggtaagagaggcacaaacctcatggtcctatttctaccgccctgggtctgctctgtttgcccctgtctcctctcaggaccttccacccattacccaggcaccctgcgcagacgtattggtcccttggtgattaagatgtagatcaccagagagctagattcccagtctgccactcagctagggatcctatttgtgttctggatctggtagatacctcttctccaggtaactaacatctaaaatgtccttatccttgaaggaagacttacttcaccctgcacatttatgactctgtacttgatatatgtcagcttagtagccttatcacacatatattaaaatacacaaaattgtgcacacacgtaaaggaacaggaaggctgatcatgatttgttgggggtggttgtgaagagtcacttgcattccttagcctgagaaactcctattcccctgaaatctgtggtcacagtcaaagatgtgacatttccttcacatgaaaactgacctgagaaggtggatgaacactctctgttgttatctgatgcatttacagaggcagtgtttcaagatgttaagtgcgtagattctgcagctagattgcctaggtaaaaatctaagttttactacttactaattatgtgattgaggacaagtacattaaccactct

SEQ ID NO: 111749 - DNA, 1040 bp, Homo sapiens
tagcaaatgctcaataagtgttagctgttgttgttgctattatttttattaatgaagtgtactatatgctgcactaattaggtcatcctctccaaaagcagagtttatgtgtttgtacttgaactatgtaaatcaaagatctcaactaatattccagtgcagtgccagctgttccagcaaaccaatgtgcaaatgaagaaaatattctgagcctactaaatgcctaatttgaaaaggttaataatgtgccaactcagatttagtgcaagagtccaaaaaatgctcagtaacaaatagatgtaaagtctcaccaaggactttatttcttccatagaaacttttgcaaactggtgtgtttcaaaaactcaactcagctaaaccttaaaggtcaggtccccagagctacaaacttgagataattcagattaataacttaggaaaaaacaggtcattttgtctgaatgctccaaaacaatagcaataatcaataattgccgtatctctaatttaacttcagcatttgaccccagtcaaattgtgcttgtgttttcatgagaaaaatattggtcaaatattatactgtttaagcagactttcttaagcaataatttaccctaaggggattataacaccccaccggaagcaatggacagcaacattttttaagtgttttcaaaatgaatttgactgtcttaaatctaaatgaaggaatcctgcaataacagttacaacagtttgcttccatttggaagtatctatcactaaaattgggcacattagtttataaatcaaacttatttgtcttgttcataagatatcaaatgaagcagtttcttggaaaaattgatgttttatgtacaagacagtggtaattctgagaagaggtgggtagatagtgaatgtctgctttatccaatgtttgctttttgcctagaaatacagagctaataggttgtcatctagttaatctgcaagccgggcaactattcagtaagattgatttgtgtatatagttcatgacatttctttttttagttaca

SEQ ID NO: 111750 - DNA, 1159 bp, Homo sapiens
gtgttagaattctttgtgggcacatgagggtactaaaaatctatttgttaaattggatgattaaaatacatttctgagggctggcaaaatgaatacttaattcagattttgccttaaatgacccaaaagtgagacattggcaaacttgcttactatcaggtgcttatgtctagtgcttccaaaaagctgtaaaaaaaaaaaaatgagtcaggcctttagtcttcattgaggattacacaagctaaacttggaaaatcagctatttttgagctatacacatacaaaatttttcttcttaaaatgtaagctttatttggtgccatagacatcatttaaaaatagctaaaactttataaactccctggacaattaagaaaatgtcacctttgagctcagctagggaagataaagataccttcaccattcgagcatttttgagaattccaaataactaaaaataacctggtgatgaaaagtgatttgagtctaagggaagcactattgaaagttacccagttaagtctgagaaatttaagtaaattaagatgatgaatggtaaagttataagttagtcactaataagctcaagaacagaatgggcatttccttgaccttagagaccctgtgctaccttcttcggttgttctgaaatatgaattgtgttttatactaagcaatggatagaagggatgcagaagtcttgcctcaaataaaacctgcaccttagctgaggtgggggaaggaagcacttgtcatctacccagcagggctgacacctcttgatgtggctggtgttaaaatccccaaggttggcatatcccccagctacatcatgaaacaaatactcatggtgcacactggcttattcaaaataataatgtttaattatttttaggctgggaaaaataatatgagcttaaaaaataacatgcttgccttgcagccttagcaatcgtggtaaaatgtaagattatatcaacttgaagagcaacctataaacaaaccaaagaagaggatgacactttgtgtttatttaaaatatttgccttgcttgttccatgatgtccatttgtccattcttgagaagggcaggctctcagccatcttgacgtcagcagccttgactgtaaacagaggtgtggccccagagagtagctct

SEQ ID NO: 111751 - DNA, 1100 bp, Homo sapiens
attttttaaaattccagagaaagtcattgttctgccaaagcaatgtggcaagacagcctgggacccaacatcggtgcccaggaggctaggagtaaagagctttagaagctttgaatctttttctaaaacaattaagattaaagaacttaatcaggaaatctgaggttatataaggggtgagcaggtcaaccagctcatatatctggtttggggcacatgctttggatgaccagacttttccatggaagattgtactttatgataattcttccagaatgaaagaactgacaagaaacattaaagtttgaaaagcgatccccaccaccaccgacatctgagaacatcctggcctctccagagacatctgactgagggaagcaggtgagccagcttgggctgcaaccccaggaagagaaagggaagtgggtcacgcctggtgaagtggcctatctctctcttggcaagtcaagctgactgatttggaggctacagactctaccttggctggcctggccacctcacaacctcctctccaaaggtgacatgtactacagcttaagacattacacggcacctgaagcaaaaactaaaagtagatatggaataaatcttctgaagctctaaggctcaatatccacagtaaattattattaagttactgagaagagaacattcactatttcagcaagagctacccaggaagaaccaaaagccttctgagatggtatatgaagggacaggaatttagggaatagacccaatttttcttttacttaatcagcgttgagtttttgggtttctaggagggcatagaaaacttgaactggagaagcaaggttcattggcatgtgccagttgatacttcactaagtctttactagtaaaaatgatgacatttatcttctttcttaagccatgtctattctgttccaactttaccaagaatgacagctaggatttgaaagtgtgcctatgttctttgctgaggacttactgcaaagtttctaacaacgtaaacttgacctgtgtttgactcataatgcccaacaaaaaaacactgctgttttgaaattatggacatagcaaagtatagattgaat

SEQ ID NO: 111752 - DNA, 1066 bp, Homo sapiens
ttatagtttaagtagagagaaaggacacaggacaagtaactcttaatatcagtacttagtttctaatatgagaatgaacctggtaggcagaaggatctttgggatgatgtgatagaacctgttcacttcaaaggtgaagaaactgtgtcccagaagtttgaagtgcctcacccaagatcacatggcccagtggcagcattgggccctgtgcccagggcccagagctctaagccaagtcaagtcctctctcaccactctgaattgctgcactcctcctttattagctagcagaccaagcaacattctgttggtttgcgcttcaggttactattttgggatgctcttatttagagattctttatgctgcctttagtagtggcagtaataacaccacattttgcatagcattttgtctcattctgtgtgggttcacgtagtatgtttctattaatccaaggattcactcactcaacaaatatctaaacacagtcaccaatgaataattctgaaacaaggtgaatattatgggagttaaatttgactatagaccttaagaaagggctccatgatggagagagcagggagctgagttgcagaaaataaaggaaatttgagcctaaagagagatgaaggggatttgggcaaagggagtttcaggtgctcatttacaaaggcaaggaaccaagagcacgatcattaagggtggacacacttgcattcagaatccacgcagaagttgtaagcacttaaactgctcttgttgaataatccagtgccctctacattgccagatctaagggtaaattcttagatcttttttttgtttgtttatcatttcaacttttattttagatcagtgggtacatgcacaggtttgttacgtgggtatattgcgtgatgctgaggtttggggtacaactgatcccatcacccaggtagtgatcacagtacccaataggtagtttttcagcccttcccccattctgcctccctgctcttgtattctctggtgcttagacctggtttgacctgacctgccagcagtgtctgactcagatgatcactg

SEQ ID NO: 111753 - DNA, 1016 bp, Homo sapiens
ggcaaagcactgaaaacccctctggtctcagagacagtaggggcagtgccactttctacaacctgccaacccacacactggagtaattctgaaaaaaattattcctaaactctctaagtgtggacggagaatgagcaagccccagaagtattttacaaccagagtgggtaatgaggagggggcttactggaatcgtcatatctctgaatattgaaaacaacaactaaaaaagtggaccttctcagaaaaaaagggcagcaaatgaccaagggcgccccttctggccgtgcttggcttgagtaactgtctctctttccccacccccatcacagggctttcagtttggcaaaggaaaagcagataaaaacagaacattccatatgtttctttctccatcggccaaaaacattttgacacaatgtttgtgaaacacctttggagaggtgcacttctgaatgctgcctctgccgtaaatcctggggcaagggatcagcctcttcccaggaaccatcgccttctataaaccgtgaactcaagcaggcattttttttttcttaccgaaaggctgctattgtgcaagggcacataatgggtctgttgctcttattggcttccaaatgtgcatggcaaagagagagatgtgggcctagagcagatatattcagcaaggtgacagcttcccataacaattctaacacttcttatcttatgtgagaataaaatatttaagggttgaaccttattttgccaaatgtatcttttctgcttttgaattgggcagaagattttagcaactatattctacaaatgttacttataacacacacacacacatctgaaatatatgccgaaaattgacgtctttgacctcagggagagcacctgtccaggtctgcctaaaggaaatggctccagtgggtctaaacaaccacatcctatccatggataggtctagtcataacactttagagagaatgtcagagcaggagggaggcaagccgcctcttctcggccat

SEQ ID NO: 111754 - DNA, 1048 bp, Homo sapiens
tctctccctccctccctcccttccttcctccccactttccttccttcctccctccctctccactttccgccttccctccctctcagtatttggattgtggtaaagactttatagaaaccattcatatacttagagttactctttttagacttaccagaccatcaatactttacagtggctcccagttgcttcctggagcggggtggagcagcagcagatgagcctgaagacataagccaacagaagatgatgtagtacttgattttcatgataagaaatttggattgtattcagaaagtaatggtaattaatgcatcacatatatttattgaacatttactatggacaagcactgttcaaggcttgaggatatagcagtgattaggtcagatgaagtccctacctttattaagggacttgtattctaatgggaggagatagataatacacacagaaataaagcagtgatatgtggtataaagaagatagagtattgtgaaggagagggtctgactggggacagttgctttagctagggtggtccactcaggcatttctgaggtgagaactgaaaatgggaaggagagaagcatgctgtcgtgggggatggggcaggctggggggcgcagagcatgccaagcacaaagaacagcagacacagagcacccgagatggaaccaagtgtggcttctttagggagaaagaaagaggccagagtggctggagcatggtgctgggtgtgagtagaacaaggcgtgctggagagtttaaaagctggtccattcacgtagatcttggaatgccgtgtcaagaagtgtagatgtttattctggtcattgggaagctctggacagttctaagaaagacagttcatctgattttacctttaaatatcattttggtagttacctggtctgtaagagacaaaacaggttttcttacacagtcgacacaaccctattcccctctggtcaccaaaatcctccagcagacaccagttgggtgtcttccaattcaattctgatgctacctggagttagaatcacat

SEQ ID NO: 111755 - DNA, 1688 bp, Homo sapiens
tcatattttttaaataattattttccaaattataatttagagcaaatttggaaattttctgcttattatagtgtgactattcaaaaactagtgcttttcttgcatagtaatgtattgattttcaggttaacacctttgttatttttcaggttcttacttagcactagaagaaattaattcttaaacggcatcttattgttattgtagggatgagcgaagagcctctctgtttactcaattttaggaacactctttttggaatttaattcattcctaaggcagagaagacagggaacagtatactaaacctaaaaaataagcaaaaatattatttgtgtaaaaattttggttttattaattgagatacatttctgactgaaaaataatgaaatcatgttgttattttgaattataagtatcaggtattcatctgattatgcctaggttaattttcttgcttgtactatttatactatttaatatttggaaactattttaaaataagctttttttttgctcaaatctgccttttcattttctgaattcagagccaccttaatagctttttagagttttcagtgaaaaaataagaagaaatttctacttttggaaatttttagacttatgtatgtattttcacatctttaatatgattttcaagggattatgagtagacaatgctacttgtatttataaggtttaaaatacttaatttgaattaatctcttttcagattctctgcaatgactgtaatggacgatccactgttcagtttcatatattaggcatgaaatgtaagatttgtgaatcctataatactgctcaagctggaggacgtagaatttcactggatcagcaatgacgagcctacacagtactggagaacttggcattttctgatatagaaaaaggctttccttggtatcgtgttatcatgtgtcgtcatctatgcattagagttgatgtgttttgtactagtgtcacagcataaaatcatattacaagtacgtaaggattcagggtctcttgatagacttatcatagctctatattgaatgaaagccactgtgcttgtgttttgattggaaattcctttagtgtcagttttttggaagccaatgatgtttgccactgatacattcatagaagtgtattatattttcatgaagctttgctttaagtgacactacgcgtgcagttcatttctagttcttgatagaactgcacttaattttcagtagtagtcttgactttttaagggctgtgttatattaagttctcccttactgttaaaacctaattaaatatgctttagaattttctaagacagtcctctggatcctctaaatgtgaattttgatgtaataactgctaataaaattatattgaaactgttttatagaaagttttttccaaagttttctatgtttggctcaattagggcagtatcatcagttctataatgtaaaagaaattttctttcttttgaggtattccataaaagtagttgggaaaattattatgtaaaataataagactcttccaaagccttaataaaaacatcaacattgaaaacagttttttttaggttgcccaaaattatttcttcaaagagtcattcattccttcatttagcaagtatttattgagcaactgctatgtggcagatatgtttctagatgctgtag

SEQ ID NO: 111756 - DNA, 1018 bp, Homo sapiens
aaatttttagaaaggaaataatatctgaataattttaaacaaatacagtctctttacatgagtgtattaagaaattaaggttgtttagataaggagtagcttaattagtttataaaaatatatgaagtgtattctacaaagaatatggactaattcctctccattttagagtactgaggaaaaagacttagttttaaataagtatacaggaattaatttaaaagttttatagtgtgaaagttcccaggttcctaagagattatcttgaaatggaggaaaatgcctgttttgaatggttcatgtggcagttagcctgcatcttcttgtatacctgaattaatatattcttgtttaatatttggaaaataacctttctatctctttcagaggctacagatgtccattatgtatgcactctgctttagatatgaccaggtattggagacagctggatgatgaagtagcacagactcctatgccatcagaatatcagaacatgactgtggatgtgagtagaatcaatacttaaaactttgtagactccttgttggcactcttatttttgccctcctgcttgaatttgccaaaaaaaaaatatatatatactggtttgacacagatgctaatgtgatgattaatggaaagcacaaaatgatttttaaattttagttaagtagctcagatcgggaaaaaaaaagtcttaagaatacctttatgtagtttttcccaacactagatggcaggcaaaaacttcattctgaattgtttacatattacttgccagagtcagtcagtaatataactgactagggttggatcactggtgggactttttaagtacattttatttttaattattttacattttatttcaggagaacatatttgctgatttttgagattacgttttggtttttagtgtttattaccctttttattccatcttagacttatttttatggagtgcacacaggagacccctttttcacttctgttgttcacagaatcataagcaagg

SEQ ID NO: 111757 - DNA, 1050 bp, Homo sapiens
ataatattagctagaacttggcctaaatagtaaagtggtgaggaaaattgagatgaataatgaacatatatgatgtggtaatggtattaaggaaaaagaatgaggcagagtaaagatgactctgaagattttcagccccagcttaaggtacttgattagtagattgtaaattttttgaagataaaagattgagtttggtttttaaacttgagtttggggtgatggcaagctatgctaatggagatagccaggagtcaatagtatcttatagattacatttctatgatgttctggtttccaaagcatgtgtagtgtgtgtgcacacactaattcattgcatcctcacctcagcatttacattccatcaactcagagatgccactgatgatcagatatgttgtaattgtggggatgttaaaatgtatgtgtgaggtgcactttagaatcaaatgaaatatgtattaattttattttataaataagaaacgttaagactaaagtggtggctagtccaaaatctcaagggctggtaaatagcagagctaggattacagtctagatttttaaacttactattaagcttattattttgagggtttttctccccactatactgtcatctttcaaaaacttacatctatttttttgttatggttttttttgttatgttgtttttcagttatcttttattgtctatattactaagtggtcctgccatctattaagtgcttccgttaaaaacctgggagtcttccatggcacagtgctttcccttacctccttggatttaatcagacattacatcttgtcaaattaagaactctggctctgaagttagcctgctggagctccagtttaattctgcctcttattaatgtgtgactttggaagttccttagcttctctaggcctccactgctttaactgtaaaatggtataacaatcatagcctatttcatctaggattgtgagatttaattgatcttatacaggtactgtgctgaacatggcatgtagtaaatttcaataatatgaactattattaccaat

SEQ ID NO: 111758 - DNA, 1573 bp, Homo sapiens
ggcataggaagccttcagaaatgagtggatctgcaaggtcacagtgtattggaaagtcactggcctggaaatctcttgatatacttgtaatggtaaagttgctgtaatgaaaaaacccaacagtgatgtagattaaagagtaaaggttttatttctttccatttaacaattccaaggcgagtgatgcaggttggtgatgaggctttgctccacatggtcactccagggatgagatttttctgttgtatcattttgtcatgttttagggcatgtggccatctgtctgatatagctgaacaattgtgcccaggaaggagaggatagattttggtggacaactggcagtctttgccgtgtttgaaaacaagggctgtctcttacatttgttgcattttgtgcaatattagatatgaggttgatgattaataaaagctagtaaaataagaatataatctttattatttttaatgtaaatgaatttatctggaaatgtctaagaagaggttgcctgtttgctgtttaggctcagaatgaaattggggtgttatattagtctgttttcacactgctgataaagacatacccaagactgggaagaaaaagaggtttaattggacttacagttccacatggctagggaggcctgagaatcatggcgggagacaaaaggcacttcttacatggtggtggcaatagaaaatgaggaagaagcaaaagtggaaactcctgataaacccatcagatctcatgagattttattcattatcacgagaatggcacgggagagtctggcccccatgattcagttacctccttctaagtccctcccacaacacgtgggaattctgggagatacatttcaagttgagatttgggtgggaacacagccaaagcatatcaggtgttgtgggattagtgtttcaatctagggatttccttcataattcttttgttttaaagttgtgttcaacttcatacagacgtagtgatgttgaagggaagaattaacataaaatatgccaagaaactagtgaaatgttatgtttaggatcagtttagcaactgatctattggttgtaatctttcagttccatccaggaggaggaggaagaaattttctttttgtattgcacacttagtttcttttgcttcttactatatctcttttttctccgtgggtgttaggcaccttgctgtgacaagctttatacttgccgcttgtgtcatgataacaatgaagatcatcaactagatcgctttaaagtgaaggaagtgcagtgcataaactgtgaaaaaattcaacatgtaagattttatgacatttctattttctttttaaaagctgtattaaggtggtttgaaaaaatttaatcaaaagtatcataaataagatttctttaacttctagaataagcaatatctttggtttaggtgtttcaaaacttataaaaataaactgcatatagttgaacataagttctagatattcaaatggtaactcaaaatgtttagtttattgcagtttttaattatgtttcttttttaggcccaacagacttgtgaagaatgtagc

SEQ ID NO: 111759 - DNA, 1049 bp, Homo sapiens
aatctcatttaccatcactaaataatatccatcatttaaagtgctgctttggattctctggagcattatgcattatagttgttatccaaagacttttttgaaaatatgcagaaatttgtggtaattatgtatttgtgtcttgtgacaattatgttttatagacctacactagtgccaggtcactattgtaagatgttaaaatctcaagaaaatttcacagagctaaagaaatgatgtcaaattagtcacattaagctatagtagaaggaattggacacttctccagatatttggcttcaaaggagtacctttacttacatgtgctttatggtaagtacattgaattttactttaaatgcattttactacaaagcacaattcatttgtaatgcatatccatcttggattcaatccaaggtgctttagctatcagtagtaccaaaggatctttttacaaggcttcctgtggtattgactctgagaataacacatagtgaagatctgtgggcttttaaaattgttcacagccaatttaagaagacccctcatgaagtctcagttttcagtacagtacatcattcctcctcactaggagcactttgatgtaaaccagaatagctttaaaaagacaaaaaggatcgtagatctgatttttaaatggttggttgctctgacagatctgaacactttgcttcatgactatttcgtcataaaggtatatgtttaaaatctgaatggcagtactagctctatacttttaatactgctttgtattttatatgtaaagtagtattgctgacattttaaaaaaatacaaaatacaaaagaaaccattagaaattaataactgtggctcttccagttgaaataggaattggagagaaaggattagaatattttaattaggggagtagattattgtccaaaggcttttatttagagaaacgggtaattaaaacagcagctttagaatagcttcttactgaatatgcaaaagaataattccttgttatttcctaattgatccaagtctcataaatttagctttt

SEQ ID NO: 111760 - DNA, 1331 bp, Homo sapiens
ctgacttactctgatgctaagagctcacatgattacactcggcccacgaagataatctatcctaattagtaacatttaacagctaattagtaacaattaacagctaattagtaacatttattccatgcacaaagtcccttcatatcggtactgaaattagtttgattaactagctagggacaggaatcttaagggcatagctttacaatcctgctgatcacagaatgtttagaccattaacatttaatgtgataattgatatttttgaatctagtcccatctttttattatttgttttctgtttgctcctctgtttttcctttccagttttcttttgtttttgaatagtttcagtattttttcggcaatatctttttatattttttttagtgattgctcgaggaattacaatatacatcactaatttttcgtagtctacattgtaccccttgaaataaaaagtacgaattgcccatccatttctccatcatccaggaaagacgttggttttgaggttgacatacctataaaggacagtaactaccatggcttccaccgctttggcaaaacctcagatgtgtggtcttctggccaaatgtctgcaatttcatattgttggagcctttattgtatccctgggggttgcagctgtctgtaagattgctgtggctgaaccaagaaagaagacatatgcagatttctacagaaattatgattccgtgaaagatttggaggagatggggaaggctggtatctttcagaatacaaagtgattttggaatgcaaaggatttctttgggttgaattacctagaagtttgtcacttacctgtgttcctgagctatgaaacatgaatatgtggtctaagaaatagtttctcttgataaataattaacaacaaaaaaagtaggaacattgctaacatattcccttcttcccagtttgcactttaagttagaacttcatatgtactacatttacatatctccagaaccccaatacgttatatgttttgttttaaacagtcataaatagtttaaacaatttatgagaaaaagttgtcttttatatttacctagctctttaccatttctgtcggtctctcttcttccctagattttcctctggtattattttccttcagcctgaaaatcttcttgttagcatttcttgcagagcaggtctgacggtgacaaatgttcttagtttttcttcatttgagaatgactttattttactttaattcttgaagtatattttattggatatggaatttgggttgacatatttttgtttttgtttttcctcccagcactataaagatgggattc

SEQ ID NO: 111761 - DNA, 1019 bp, Homo sapiens
gagatttggatacttaacttaggtttgcttttcctggtgaactacccaggatctgttcttgataaggtaattcaaatccaccaccaatccacttatatcaagtacaccaaaagaagaaagagttatcagttttgtgttccatgactctgaatatgtaagaacaaaagtggaattcttgattcctcttccatgagtttttccactgatgtgtgtgtatgtgtgtgtgtgtgtgtctgagtgagctgtgtgaattgcatttccattctttttgtattttcccaataactatctgaataagaatctggctttaattttaatcccctaggaagaataaagaaaacagtttcaaaaaggtgatacttatgatattctgctctagttgacaagtactttataagaagaggtaaattttcattctcttcagatcattaaccttattaatatttttgttaatgatcaggataccaatgctgatcccaaaattaaggattataaactatttaaaataaaaggctcaaaaattgatggagaaaaagctgaaaaaggcaatagagcttcaaatgccagctgtctccatgacagtaggacaagccacaacaaaatagtgccttcaacaagcctcaaagactgcagcaatgtcagcgtggaccacacaaggaatccaagcgtggcaattcccccacttacacacaatctttctgcagttgctcccagcattaattctggaatggggactgagactataccaattcagggttacaggtatgaattagtaaaataagatcaaaaaagtgtttaaggacatatttgcaaattgcaagggtttgtcaattcatccacattgtttttattctcagaattctggatgctattcattcttgtcaggtagctgtttcaaaagactttttggctgtgtgatgaagattattagcatttgatcaaaacaattcaccaaagtcctgagaaagtagggttttattgcttaaggtgaagagaatctacagctatatagtctaata

SEQ ID NO: 111762 - DNA, 1051 bp, Homo sapiens
gatccgcccaccttggcctcccaaagtgttgggattacaggcgtgagccactgcgcccggtctggaattgtgctttttaaagtgagttgtaattgttatgtgtgatagctcaagtattgctttattggaattaaaaatatatggaatttcattaacatgacatttagtaatttaaagttaatggcttcaattccatttgcgttgtctattatgaaatgtgtgtgaccattttgaaaacatagcttaatgtgtgtgaccattttgaaacatagcttacatgtagaaacactaggaaattgtgaattaatacaggacagccatgaacacagtgactaatatggaaaacaagcagggaagaattaatttgctgggaaggcggaggaaattaacgtactcaactttgttaaatctatgttttggttttcacagcaaaaagtttctacggactttaaattaaaatggaaaaatatgaaaacctgggtttggttggagaagggagttatggaatggtgatgaagtgtaggaataaagatactggaagaattgtggccataaagaagttcttagaaagtgacgatgacaaaatggttaaaaagattgcaatgcgagaaatcaagttactaaaggtgagtaaatgcatatattgaatcaaaaaatatgagtataagtttcttttttggcaataagaagaaatacaatgattagatatgcaaattcatttatctggtgaatgtaaacctgattttaaaagtgtttgttccttctctctatatctttctgtgtatttatcaatcatctatctatagtctgtgttaggagtcccaaagaccaccccagatttgatgacttgttaggaggaatagcattaatttttgttctttattatttcattttttctacttatttgtatgggtttattttgcagcccttttccctaatttgttgagatagatgcttctctaatttccagacttttttcccctcaaatatgcatttaaggatatacattttcctgtaggaacagcttggtatgtatcctggaaattttgat

SEQ ID NO: 111763 - DNA, 7341 bp, Homo sapiens
tagctttctgagttgaggacatgttctccatatcctgttgggtgttttcagcatcctttgtaggctcatatatttgtctctccttggaccataaatatttgggtagtagaaggtctgaagaggttgggaatactgaaaatgctgttgtcttgaggaaaaggtaatagcagacgccgatgtaattttgttttaaaaataattatatgtttaattcagcagttggcagaaacttttgggaggcatcttaaactgtcctattactcccagacccctagttaaggaaaatcgttgggaccaatacttcaaatgcatatttttctcataaggaagaacagtagggagctaaaggactttaactatttgagatgctacatacaagttcctataagtttctgtcatttttttaacatgcattttaaccttacaggtagcaatttcaggtgttagagcaagctaatttttatactttgaactataaaaatactgattttaaggttatgggcagagatttaggcaatactactgagcactgttacatttgaaggatagcaaattagattttcagaaattatgtgttatgtattcttgtctaagatgaagatggcttttaattttgtttatgtatttacatggagtggttcatcttgcatttttgtgatttttttttttggtagcaataccttttatgctatttcagtgttgatataactttaatgaaaaaatgtgactgtaaaaagcaacttattgtgagttacacagcattaagtgggaaaacaaaagctacctacagtcctagattggtacagaatatcttgataaaaatttatttttctcatacataggacactatgttaaaaacattctaaacttaaaactactgttatgtctgctagtgacttgtcgttaggtgctttggttggtttttctccagtggagtgttttttataatgtttttttttctttatattttagccaagagtcgaagctaaaccagaagttcaatctcagccacctcgtgtgcgtgaacaacgacctagagaacgacctggttttcctcctagaggaccaagaccaggtgagtcagctcctttatagcctttagcatttaacatttgtaaggctgtaaaagactgaacttaaacaaaaaactatgatgcgttctatacacagacccatatagtctcaaattgcttaaagatgtgatgtgagcaacctgctaaatagtgtctggggccaaataaccaatttttagggaggattggttgacatgccatggtgacatattttgaaggtgtaaaagacttaagtcttatttggttattgtcacggttttttgttttttttttttgtttgtttgttttttttttgagacggagtcttgctctgtcgccaggctggagtacaatggcgtgatctcagctcactgcaacctctgtctcccgggttcaaatgattcccttgcctcagcctcccaagtagctgggattacaggcacacgccaccaggcccagctaattttctgtattttagtagagacagggtttcaccatgttggccaagatggtctcgatctgctgacctcatgatctgccctactcgtcctcccaaagtgctgggattacaggcatgagccactgtgcccggcctagtcactggttttaagagttcaaaaccaagctgccaataacctactctcttagcagtcttatctctttacagataaacaataagcccattttgattcttaggtattaagtaagttgccatgatttttgacttgtttaccttgttagctacacatgtaatacttttatttgaactctgtaagaatgtttagattgctttggggaggagatgggagagatggagatagtatatatcacatttacaatgtgaatttttaaagtgatatgttaccaaactagaagtcctaaatttgtcagtgattaaacttgggatcttgagtgaaacccttaaattctgagcttcttttatgtcaaatattacacaaattattcttgtattgcctattttcctcactgtgttccttgtgttattgggagaatcaaataagattttatgtatatctatatacatacacacttaatatgtatagactgcataaatgtgatgattgctgttaaaatttactgattgctgtaatgtcataaagccaaagaattttgaatttcaaaaaactaagcaaatatttagtaagctatacctcactatctgaaatctgcttggttcctgggtgatggcaacagtttggttaaggaggaatacctgtagtactaatatttgatttttgtataatccagtagatctagaagaagctattttagcaacctagtcattgtcctcactttacattttagtgtcatgctgttttctaacctactagtaataagtacttttgcctctttttcaagaagctcacctagtcttattaaactaaaacaggaatatcaatattaagtgatttttacattcactcctttgaagtagtttttatgatattgtaaactttagtatctgctctatttctattctcaggcagaggagatatggaacagaatgactctgacaaccgtagaataattcgctatccagatagtcatcaactttttgttggtaacttgccacatgatattgatgaaaatgagctaaaggaattcttcatgagtaagtgatttattttgctgttggagtttttaaattattttaaattaagcaagaggcatatggagcttttttaataactattttttttaaatgtttctctctttatactgtgtccagctaccagacccaccttaattgtgcagaagggagtagatgacttatctcacatgtttctcagtgactgcttagtgttgatttggcctggctcagtagtgtttagaagaaacagctggataaatcagtcataaattcagagataaaggattcatttggcaaatgggtcaatatattaggagaaaatacattgtctttccaaaattatgcagttaactttacttatgaaaggactaccaaagatgcagaaaggtaacacagcaggcgggcaggctacttggtatcttaggggattgcctgcttgagtaaacgtaccttggctatcactgtgtgtagaagcttgcgagttttattttaaaatggatcggggagataacgatattcatcctgaacaattagagccatcaaggtattctgttaaaaatatttaacccttgatgtaatgtatattttcacaggttttggaaacgttgtggaacttcgcatcaataccaagggtgttgggggaaagcttccaaattttggttttgtggtttttgatgactctgaaccagttcagagaatcttaattgcaaaagtaagtgatttaaagggcataattcaagactttattatttctgttgtatatattaatttggggtatttaaaaaccatagaaaatcttttaataataaagctaaaaatagttattaaatggtatttatgcaaagaataaagatttgttagtttgcagatcattttaaattttgttacttgctttgctgaagaaggtgggaaagattgcaagattgcatgttaagaattttggctgggtatagtggctcacacttgtaatcccagcactttgggaagttaaggcagaaggattgcttgagcccaggagagttcaagaccagcctgggcaacagtgagacattgtctctacaaaaaaagaaaaatagccggccatggtggtagacacctataatcccagctactcaggaggctgaggtgggagtatcacttgagcccaggatgtcaaggctgcagtgagccatgcttgtgccactggctgtcaccagcctgggtgacagctgagaccctatctctggggggtggggggctgataaaagtgttttattccttatgcttatctgactgacctgttcagagtaatcatttctattgctgtctaacctgcccatgtaaatatttttcttctcttttataaagccgattatgtttcgaggggaagtacgtttaaatgtggaagagaaaaaaacaagagctgcaagagagcgagaaaccagaggtggtggtgatgatcgcagggatattaggcgcaatgatcgaggtcccggtggtccacgtggaattgtgggtggtggaatgatgcgtgatcgtgatggaagaggacctcctccaaggggtggcatggcacagaaacttggctctggaagaggaaccgggcaaatggagggccgcttcacaggacagcgtcgctgaagctccactgttggcaaagtcttggcagtggtacattattcatcgtgtttgcattcttgttaattttttttttggctttggaatgtgacacagcctttttgatcatttctttgatgtgaaaagcatctttggttatcagttaaattgaggtggacattatttccccaatttcacaacaggattcacattgttaatttataaatctagacttggagaattaaggactgagaaatgaccatatcttaaactatctacgacaaagtgaacttaaaaggacatgcccactgaattcaggtcctttgagtaaaaaaaaaatcttctgctgcacattttgtttaagtgttactgtttctgcctgttaatgctgggaacacaaatagtgcaatttgtgcaattggagaatcttgccttttttcttggctccccccaaaaatacaaaccaacagaaacttgttatgcactcatcaaaatgtactaatgggtactctgaactcattaacattgacatctgcaacaggaggcaacagggaaaaaatctcatcttcttttccagtagaaaatagtttgtgaaatgatgagggcattttatctgcttgctgtgaccagcgtgtgtacacataaaccttaacaagactacaagtatattccagaaggaaatcattttagttatgaactaaataataaaaattagaacttcaaatgcgatggtcttgactattagaccagatttagtagctccatatctaagatttttctacctgcccctcttcagtacagggatggctggctgctcaacacactcctcctccccttttttcctttctttaagctgtgtacagtgaaaattgtctttactgtatttttgttctctggtaatgtaataagcatgatggtgccttctattaatacatcattccagtcttgctggtaattttgtacagtatagtgtatgaattgctgtgctgcaaagccaaacagctgcaaaatgttgaaaaatcatcgaaatgtataaaaattgcagtatctttaaaatcagtaaaatggactagcatattatttatcttgttcttcagttaacaactttgtgttctctgtgggagggagggagtcctgtgtgtttgtggggagagggaaggaggaagtcagttatttgagtaagcctctagttgacttttctcttagcctgaatgtggacgttgaaacatatcacttcagggcttggaaaagtcagtcaacttgacgtacatttttagtgacattttaaaagcagtcagattctataaatggcaagtaagcctgaagtgaggatactgcaattttcggagaaaagaacagcagctctttaagtgtttgcattttctatttggggggcagggaactgtcattcattttgcacaattcttgaactgatgtcagcacccgagtggctcctgaatttaagtctgggacgacatcttttatttttacatgaatctttaaacaattctgtgagcaaagtttgtagctgctggattattgtctgtctttatagcaagttccagtaaaccacaagtatggcaaagcttatccaattttatgcttggagcagtcagtacataccagtttctgatgtttcaggcaggagtggggtaaataagtgtgaccacttaaagctgctcgttagcatggaagacttctccattctatctttgtaaaacagacaagatatgcacttgacatagtagcaaattggttctgaattatgcaactgtttgctatttagtaaactagcaaatgatgcatgtattttgtttttcatgtactgggcaatatgagtaaaatctgtccctttttccccctttgaatgaggtcttccatgtttgagggaaagtcttgcactattgcatatattttggggacacagattttcatagtttccatttttggggggcttaaggattttttttttttctgtttgaaacagttttatactttctgatatagtacttgaaattcttaccagaaaattactttggagttttgaagcctttattaatactacttttaaagaagcagttgttttattgtcaatgttttttttcccccaagcatattttcttgtatttctgtttccatatatatatatatatatataatttccaattcaggatattgccctgccatccatgaaaactgttctggcaccaaaagtaatgacaaatgttaagtgtaataatagaaaagtagagcaaagagccattcagcttcagtctttacataccatgaataaaacattaaaacatcatatggagaagtttacatggtgattgttcacctgcagtactgtggagttttaacattttgtcctcttttcagtgaaacagagtaaaaatattcatctaccattactgttatttgctgattttgttttattttttgatggtaatattctatccttatgacactattgcaaccaaattggctttaccatcttggctttagtaggtatagaagacaatggattaccatctttattgctgtaatgtgttaagcattatatgctagtagaatctagtttaattgtttcaggtggaaagtattctttgagtttccatattgaatgtgtttggactaaacaaacaataaactactgatgtctgcagcatttatctatgtccctaatttaatctatagtttttattgttcccaaatgttttctcccagttgcatttcatacaaactaagtgggaataataagcagttgggttttaaaacaatttatttgtgaaatttgatacgtataaaaaaagtaaaacatttaagtaacacttgaccattgtaagagatctattccgtccagttagactgctggtatacaggttgaatgttagaataataagtagtaagaatgatgagaatgatctaaagcagattacaaccttggattttctaaagtattttctgccttgcatctcacaagaaaggagaagggaagggatgagaagattgaggttacctgaagttaatggacatgactcaagttcagaaattggaactaatttatcaagctctccaaaa

SEQ ID NO: 111764 - DNA, 1057 bp, Homo sapiens
atgtatcttatctgtatttgcatcaaagaggactcttaagacatgcctgattaaatcctagtctcttgcccagaaaaataccttcatatttatctcaagtagtttgccttaaatatattttcaaagttagttgtaggaaatgaagttgtatttcctatgccacccctttaataaaacaaaaattttaaatgtttagaatttaaactttaaaagaacgttctaatgtctttaggctatacttaaaatggattcatgatatttctacttgatttaataatccttcaattttagtttgttacttttgtgtagtattcatttccttgtactttgaacatagattattgataaaaggaagttaattccagggtattggtaggcattaacttagaagtaggtaagttaatttcttgaataaaatattttgtctggaaattgactagttcacctacaaagcttatgtttaattgaagggcttattatttgtggttatacctgcttttattgacttgatttgatggttctgtacttacttcatattctgtttgaccttcatttgtgggtttgtcatttgatcatactttctggttgcatggaattaattttaaggccctctactgtgtggcatattggccatgttatctgttcagaaaaactagttttaatcatgaaactggagacctgaagaattataagtatgcagctgacttagttaacatatgtcaatcagttactgaaagggacagtgttagctttttgttcttgtatttttcttaaactggcatcatcagatatctacttaaagtcagattcctaaatcaatggcatgaattatttgtaagatgttggaaattattaatatttaactttatctgtttttaattttcatccttaaagaataaggaagaactttattttgctacttgtagttactcgtgttttgataatctgttttgaaaagaatttaaatcagtcaagaccagggcctcaagttctttgataacatttggattgaatgagtctaaggtttttcttaaattttgtaataaaggtgcattta

SEQ ID NO: 111765 - DNA, 6120 bp, Homo sapiens
cccaagtagctgagattacaggcatgcaccaccacacccggctaattttgtatttttagtagagacggggtttctctatgttgaggctggtctcgaactcccaacctcaggtgatctgcccgcctcagcctcccaaagtgctgggattacagccgtgagccaccgcgcccggccggctttttttttttttccccaatatgattgttattggtaactgaaatttatgtttgacagtaattgtcagcataaattgtcaatagttgttcagtttgacaataattgtcaaacatgcttgagttcttaaacatcatttttgtatgaaacatggtgttatattacgatggctacaaaggagaaaatggtatgttttatatcattgatgtattttatacatgagatagttgagacagtgtattaagtttatacaaatctgagctaaaccctatgctataggaatgcacagaaatgtatgtttcctatggcctaacagggaaggaagactttgtgtagaggatgtgagaccacaagatttggccttaccaaataaggaattataagtagacaaaaaatagcatcagcaaacacacagtaaaattatgtgtaagttcaaggagccgtcaacacaatttgtgagaatgaccaaatacttactacagaaaagtgggagaaagctgtataaagcccagattactgcacaatattggagagctattgtgatttcttctttaggaacatcattctggcagtgatgcacagcatggtcgttggattcagttcaggaagattagttaatattgcagagttgtaaggaaatcaatgagggtaggtaatattattgtgtaggtaatgcagtatcacagagtttatatttttccctccctccctaataaaggatatacaccacaaagtattatctctgaacttcagtgaatgtcatactaaaattcgtcatgtggatgctcatgcaaccttgagtgatggagtagttgtccaggtcatgggtttgctgtctaacagtggacaaccagaaagaaagtttatgcaaacctttgttctggctcctgaagtaagtttctcaattcacttagttttcatttatatggttgctagttggttgaagtgtccagaggtttcttctaataggtttagatttgcatattgttatttttggggaatttgtgtttgacctgttgtttgagtgagtgcgtgtgtgtacatgtgctttgactatttggaattaaaaatcaaatactgatacaagtttgtaaatagatgattaagattacattaatacaaaaaatatattggtatatttgaaaggttacatttgaaaacaaaatagaagagttcttttggtttcttttctattaaatagctgtttcttgagttctactaggttggtgcaaaagtaattgcgagttttgctattatgtttttttgagtgacctttttattttatataaacatcatagcatgttcagcattggaaaattatattgagtcaagatctctagtattaaaatgagaaattgtgtatgccatgtaatttgctcttttatataataccagatttctggatatttatggaataaatgttgtttcctatagggatctgttccaaataaattttatgttcacaatgatatgtttcgttatgaagatgaagtgtttggtgattctgagcctgaacttgatgaaggtgaggttactttgaagatatgaagatagaagggttctgttggtactctttatggactaatttctataagtatgacatctacggaaatttgctgctttattgtaactgtgtcaaacatccttttttcatggttttgttgttgttgtcgttgttacaaaaagatgtccattgtttgaaaatatacaaaatttggatgtcaaggaaaaaggttcccctcagtctcatcctctgtagataaccaagtttggtgcctattggagaaggtttttggattctatacttggcaacatgtatttttataaatgtggaattacactgactcaaagcttccttttttttaatgtaataatatgtctttgttggctgtctatgttgtggctatgccgtaattatttaattgatcttccattgatgtacagtggttagtttctttatcattattgctctattaaatatatgttacaaaggaagctaaattgtggctttaatataacttttttccttttactgaaagatttgtttttttctaatagagtacaataaatattaaacttcatccttgctctccagtttttgagagaacaggggatattgtagttgaatgcctttgttattaaaaaaaaaaaaattggagccgagcgcggtggctcatgcccggaatcccagtgttttgggaggccagggcgggtggatcacttgaggccaggagttcgggaccagcctggccaatgcagtgaaaaccccatctctacttaaaaaaaaaaaattagctgggcatgatggtgcatacctataaccccagctactcaagaggctgaggcaggagaatcgtttgaacccagaaggcggaggttgcagtgagccaagatcacaccactgcactccagcctgggcaacagaacaagactccatctcaaaaaaaaaaaaaaaggaaagaaaattgtcaaattttcttttttgctatcataccacttccttaaacatgttaaaaatatgtccgttagaaattgtgaagcctctttaaaaaagatgtgctgtattatgtattttcagaatcagaagatgaagtagaagaggaacaagaagaaagacaaccatctcctgaacctgtgcaagaaaatgctaacagtggttactatgaagctcaccctgtgacgtaagcatactatttgcaaggttaaatttggtctgaactatgtcagcaaggtggtttctgttcctagaattattgttgaaagtaaattcttgataaaaccacctattatgtcagtatttgagtacctattgtgtatatgcaagaaatttggaaagaatggttttatttaatacaaaaattgaacatggcttgcaccaaaacagtggttccttactgataatgtagagtgttgaagacaacacagagtaagcattttatttttataaaagataaggtttatagttagcactaaagtaaacattcttagtaattcagttttgaaatggtgggattaaagaactgctacttgagagtattattccttctgtcttatagctctttttggaattttgctttgaatactttgtagatctagaacaagttattggcatataactagttacacccattggattagagagaaattgaattttttcttacttgaactcctactaaaaagtgaactaaatattttattgtagtaatggcatagaggagcctttggaagaatcctctcatgaacctgaacctgagccagaatctgaaacaaagactgaagagctgaaaccacaagtggaggagaagaacttagaagaactagaggagaaatctactactcctcctccggcagaacctgtttctctgccacaagaaccaccaaaggttagatcaaagaactctttagacttacaacatcacatgttcaaatttggtgctgttaatgaagtatgacctttttctattatgttaaattgtttagtaaattattttatgtatatgaaagaagctgtggggtttgtttgttacctgagaaaatgttattgtttccctgccccgcaaaatacccctctaagagtgaaacttataacttaagatgaatccttgtctgtatgcattgtttagtaacttatatgaaattatttggatccatgtatagagctgtcagttgttctttcattctgtattaaattctctgagcacagatgcaccaggaatcatgcagtttcccaacttaaacaagttggtctataattaaaagaagagatacctgttgtttgtggtttaaatgggatcagtttcctttctacaccaattaaactatcttggaaagatgagtgacatccttagtgtatcatgtaagcctacctgaaacttcttttatctttcttcaaagtcaaaggttaaagtatatttgagtggtgataggaggagattctttgttcaatttgtgaatgtcagagtttccagctaatactctcttctttcctatccttccctctcccgttaacaccatcacacaccctatcttacccccaaaggggaaataaattgtttctattaggttcaggtttttctagcatgtttgttagtggttttgtttgccacttgctcatctacttagagtacgtaggaacttgcttatggttttacttagtagtcagacaaaagttataaataagcttgcataatgagattttgaaagctggcacatagactggcatgtgtgtgtgtgcctttcttttaggagtcttccaatatagagcaatagtttagaaatgaaaagaaaatatatatttggaagtttccctataggaatgttggtggttttccatgattagtagtctaggtttgttgcatttcctgcaggctttctcctgggcttcagtgaccagtaaaaacctgcctcctagtggtactgtttcttcctctggaattccaccccatgttaaagcaccagtctcacaggtaaccaatctgtgaacacattggattgtatccttgttacattgccaattgcttatttttaaaatacttttaaaaatgagtcaatcagaaattatggattaaatatacaaaaaacttgtattatatgtcagtgcacccactttaaatgtcaaatctccattcatcatctacataggtggtatttggggtttgggtgtgtgaaatacagattaagttggtttttaccagtatataatattgtcatttaaaaggcttcttaaaataacaaaaagaatgttcctttttcaaaagcttcaaattctatttagcaaaaatattttaggtaagaaattcggagaggcacaaagtagtgtggcgtaataaagaatcgtttttgtttttttttttttttttaaagcaaaaaaaaaaaaaaccaggaaactttttaacatacgctgcctaagctctcagtgtgtaagtggttcacaccacttaattgaagcctgtaccaacttatgactgtagtgttcaccttaactgatcattctagtattctgctttttgtctgtttgtcatcttacccatttcagagctttcaaaaatgtgaaaataagacactgcctacctaagaagtttgttagatttagtttagaatgaactaaattctaattaagtttatcagcatataaagggtgtccaattttttccctacattttgcattaaacttcattccactagaaaatttatgtttgaaatgttagtatataaatgtatcttttatatgttctaagcagtgaaattttgaggttttaaaagtagtaatttttagttttttggtgttgggacacataatcagctacataaaagtagaatacgcccgtgatacttttttttttttttcatttgggtattcaggcaatgcgtggttacccttatgtaagatggtcacccagagttccatcttaacaaaggaaattagtttgtgcagtattgttttgtgcttttctacccatatgaagacccaataaataacttttggcccttcttttggaatcttcatttcctatcagatttggatttggaacctttggattatttcatttcagagagtttaaacagttaaaagttaaaatagctagtgcttatgcctttgatatgcgccaagcattgtgtgaagcactttttgttcattttcagtgaatcctcacaaccaccctgtcagggtgggtactattgtttctgttttagagatcaaaaaattgaggtctagagtaactcacagacatttatgtacatagtagggttgggctttgaagtcatgcagtgggacatgagtccatatgtggctcatgtaaacgtttatttttttgagacagagtctcgctctgtcgcccaggctggagtgcagtggtagtggcagtggcgttatcttagctcactgcaacctccacctccccagctcaagtgattctcctgcctcagcctcccgaatagctggga

SEQ ID NO: 111766 - DNA, 1047 bp, Homo sapiens
cgcgctgatggaagcttaatacaggaagtgtgggagcaggctttctggaggggatgttttagggtgggtagcccaccgttcctgtttccgaatcgttttcggctcttgtaccttgttccttcggagcggagaggccgtcgccaccccgcccgtggggggaggggaaaagaggttgtgtcgacggaggcagaagcgacgcagatgcgaaagtggcggcctccgggcaccatttctgtgcacggaaacagaatccgggtttgaaggcagccgccgcttcgcttacccagtacctagtgttccgtcgtgtttgaccaacccccctctccctgccaccgcgggtttaatccgaacgtgttcggatactggaactgtaacgtgcgccttcttcgtccccctcttatgcagacgatcccttattgactcgggaatggcttttgggggatgggttcccgcttttgttgggatggggggacagaaaggaacagaagcttccctagattgtgttgattttgttagtggaatctgatagaatttttcctgcgtctctaaaagcagatttcttaagatggccctttgccgctttggggcgaatatagattttcgtctataatttcctgcatagatcagcttttttccccaagacatacttaatgttctaacggatttggggggtgggaggagagtgccttttccttcataacaacaacaaaaaaaaggcacttgcacttttagctggaatagtaaagtcctgttctccctgtatgattgttgtgggatattaacttggattaagatactgtggttttaggttcaaggctctgtaccttgttctggtctttcaaacgttagtgttgcaggtacctggatctaggaaacattaactgtcgttaagagagccccggtgtactagagtgggagatgatggcaatttttctctagctccatatttggcagttaatatagccttaggcatgtgaaccaagtttctaagtaaacttttggccctgttagcatccagtggtctttttgataatccaagattcctgg

SEQ ID NO: 111767 - DNA, 1358 bp, Homo sapiens
ttttttgtaactttagtagagacagggtttcaccaggttcgccaggctggtctcaaactcctgacctcgtgatccgcccgcctcgtcctcccaaagtgctgagattacaggcgtgagccactgagcccagccaagtttttttaaagtgttgtaaattttgagcgttaagtaaccttagagttattctactttatctttccattttgcagataatgaattttactttaaaagattatatttaagggacagtccatcctcattatttgtcaatttcttacttgcaaattcacctactcactaaaatatatttgtatcgcacaaatcagtactttgagcactttatggttatttgtagatggtacagcagtgaaaaatttgattctcccaacatacacatctccaattgaggtcaaagaaggtgatgctttgccttcttgtttcagttctcatgctgtaagtgtgtcctttcatggtctgtttagtgttatgctttttgcatttttgtattttatctttttcttttttttttttttttttttgagacagagtctgactctgttgcccagggtggagtgcagtggcgtgatctcggctcactgcaagctctgcctccgcctcccgagtttaagtgattctcctgcctcaccctcctgagtagctgggtttacagtcatgctccaccacactcagctagtttttgtatttttagtagagacagggtttcaccatgttggccaggctggtctcgaactcctgacctcaagtgatccacctcagcttcccaaagtgctgggattacaggcgtgagccaccacacccagcctcatctttgtattgttttgtttgggatttccctattaaaaatagaccccgtgtagtgttgtctggtgttcctaagcacaagaaggctgtgatgttccttacagaggtgatatgtatattatgtaagcatcactgaggcatgtgttatagtgctgttggccatgagatcaatattaatggtcaaggatgtatattaaataagatgtctttggccacatgcagtagctcacacatgtaatcctagcactttggaagacagaggcaggaggaccacttgagctcattagttcaagatcagcctgggcaacatagtgacacctcatctctaaaaaaattttaaaaaggtgtctttaaacagaaatacacataaaaggttttatattgatcagttgatgaaaatgtgatcagaggcttgcgggaaactaaccctgtattttctctaggaccagtgggttttgtttttagagatggagtctcactctgttacccagtctggagttcagtggcacgactgtggctcactgcagtctcaaact

SEQ ID NO: 111768 - DNA, 1045 bp, Homo sapiens
cttcggaaatacattttttagcttctcaggattcaaagtaaaaaaacaaaatacattttttaaattgccgccttatatgtatgaatttgccatactgtgtttttttattattgagcatttaggttgcttctaaattttcacaattagaaataaaactacacattttttacagtttgcactctgatattttcttagagtatgcctttagaaatggaattttctaaaattgctaaataactaaaaatggtcataacagtttatactctcatcagcagtgtataagtgtaataatttcttttttccagttcagattctgaaataataggttatgctttggacacactatataatataatatctaatgaagaagaagaagaagtaggtaagtttccagttatttttactgtgttttctgtacttaaaaccaactgggttgtgctaattttgctggttttaaagttggacttgttttataaatgtataagtttttttacttttttcattaaaaaatttaataaacacataggcttagatctagaaaagtgtctttaggatgattgctttgtgtgtaagtcagaacattatagtgagatggaataagatccttctttttaactaatatttttgcccgcttgtgtttggttttagttaggcagtatgcatattagccagttctggattaaataattatttatggctattgattgaaaatttatattattatctagtgagcaatataaaattagagagtttttcctaataaatacttaaactttttacataggacttatgttaatttataaagtgcaacaattttttaaatttagattttttttctttacattttgtctgtttggtgaacattgctataaatcggtttgaaatccacacatttctttggcacattcattttcttttttgttttaaaatatttgcacacttaacataaagttatctgtcttatttattgtcactgtgtgaagcttgattggaagtctgtatacattttgtcctgtatacattttgttctatatgttgcaaaaca

SEQ ID NO: 111769 - DNA, 1640 bp, Homo sapiens
tattaaattgaaattctttatttttgaatattacagaagaaaattccacaagacagagtgaagatttgggaagccaatttacagaaattttcattaagcagcaggaaaatgtcactcttctgttatctttattggaggtaaatagggaaccttgatgtttttgtcatcttaataagctgcttttgttgccttttggatgttattgaggaagtaacatgtatatacctttaaaggtagtaaagtttattgtattatagcaagagatccacatggatgtttcaagaactatgtaatcacttaaagtatgctaaacttccatgttttacttgtagtttctggtaaaagttattagtggaaaaaatgtttttctcgaaaatgtgaattacagatgttaaatattttgaattcttacattgcaggagtttgatttccatgtccgctggcctggtgtgaagcttcttacttctcttttaaaacaactagggcctcaggtgcaacaaattattttagtcagtcctatgggtaagtgacttatcttttttatattattttgattcaagcatgagtatcatttcctagagaaagggactgaaatggtgtgttagtaaattgttaataatttgagtcactatttgtatttttggtctgccagcatttttcacatggttgtatgttctaggtgtttcaagattgatggacttactagcggattccagggaagttatacgtaatgatgtaagttaaatttcaaaaagaaatacaaaaatatgtggcttttttttctcttgcaaatgaaatccttgttgttgagttttaggaaattagatttagaaagctggagtaatgacctttttttaaaaaaattaaaaattagtaaacagagatgggggtctctctatgttgcccaggttggtcttgaatttctgggctcaagcaatcctcctgtcttggcctcccaagatgctgggattacagacatgagccactgagcgtggctggagtaatgaccttttaaagttgtacaaggccacattgtttcattctttcctggctatccagtattttgggttagacaaaccattttgccattcaaatttatttcttccattagtttaggatttcttatactatctgctgaaaggttgtatttgacaccaaactctacctctgcaattttcttttcctcataaagagtagcggagatacctccagacattgaactgtgtaaacccaacaaagcattatatttggaatccttgcccttatttgattgagtgtgtatttctaaggatttgccttgttaatcatggagcatgatttgctctggacttattttccattccgatttattttatatttgcatataagtttgaatattttgtatttgatgctgtatattttgttgcataagcatttttctctattgttacctacaacttgataaaaattctgtaatatttaaaatagcaattagaaaaattaaattctggagctaggagatcatatcaagctaattaaatctccatatttatagtgaaatgcccaagacccacagaaaccaagtaaagttaagtgttctttgttagccatgtcttactcatctttttatttatggtattggccgtgtgactttttcatcc

SEQ ID NO: 111770 - DNA, 1045 bp, Homo sapiens
taagagcatgtagctggtgacgctaacctagtcctgtagtcttggtaatcattcctgaagaaatgatgtttaagctgggatttgaagataaacaatgagttactaaggcgattggttacttgacatagaagtcaagagatctttggggtacctgagaaagagcatgcaggttatggcctgtggccatcaggtgtcagagcagactgtctatctgcctggccatattgaagagatgctgagcatggagatttatctttttaaaaatgtttgggagttttgcgtcaggttttacgagccttaacgcttgtgttttacattatttccccaggtatagtagttgaagattgtttgattttgctccaaaacttattaaaaaacaacaactccaatcaaaatttttttaaagaaggctcatatattcaacgtatgaaaccttggtttgaagttggagatgaaaattctggctggtctgcacagaaagtgaccaatctacatctaatgctacaggtatactatccttagacataaatgtggtaagaattttgacagtgatcttttcaaagagaagaaaatcgcttgtatttgataaatccagaatatttgatggatttcaggttggcttaaaaaaactgtaatatggaaatttgcagttatcctctagctagagatcttgcctacccattacttagctttgacagttattaacatctggcaattttgtttcatcgtttattcctctctgctgtatgattttaaagcaaattcagacatacagtttcctgatgggttttacattaaggaataataggttacattgttgatttgaatttttaaaaacctgctttcttcacttagggctctaataggataaattttaatattcaaactattaagttcaaataaattcattcagtaagcatttactgagagccaggcactggatgctaggaaataaatgatcatgtcctgcccccaaagatgattagtctgagttttaagtccaaaacatgttaaattgacagaccacctgtgatttattgatcct

SEQ ID NO: 111771 - DNA, 1061 bp, Homo sapiens
ctaggcaacatggtctttatcagcccggtgtggtggtgtccacctattgtcccaactactcaggaggctgaaggggaggatcacttaagcccaggaggttgaggctgcattgaaccataatcacgccacgcactccagcctgggaacagagtgagactctatctcaggaaaaaaaaaaaaaattaccaaaaaattattagagtacagcatgtaaacagaaaaatacagtattctcgttatataacaagttgattctttaagaattctttacttttaaaaagtgaataaactgactttctgtagcttagtaaagcttttatctcttacacttgtcgtgaagaccgtaaactccaaagcagaggaactgagtttaattcattttaatatattctccacctgcaatactgaatagtagattcactcatgactttacaggccaggagttatcttctgctattctgttagaacctgttggaatactttatgtataactttatttagagttgcttggattttaagttctctattatacactaaataaaaatgcatcattgttttcctgttgggacatacacattctgtgttggaactattcatcatcacagttatcatgattgcattctgagctactaaaaacagaattgatctgcttgctgagttttaattcaaattttgcagactatatttagggaaaacatcttttgaaaagttttttagttataaaatattttatttttttaaaaaattatagttttatggctagtctactttttatccctgcaggagtctcttctatggcattttattgggaagatactgccaatagctcccagaaagttcataaccttataagataatcattttcattctagggtagttttaattattagaaactttatatattaagtcataaactgtcctgatatgacttctgtaaatttacttttgctttctggaatgacacatgttcattccttgtgaatatttcatatatttacatgttgctattagatctctttttatcctcataaatattccctttttctttatttacatcatca

SEQ ID NO: 111772 - DNA, 1484 bp, Homo sapiens
tttgtttcccaccacaggccacctgcagaccctccattctcctactccaatctgtgctctaattcttccccatgtctcttgtcctgggaattttttttgccatcttcctaggatttcctttacttgtctcctgacttggcttccttgattatctggatcctatatctttatttatttatttatttatttttttttttttttgtacagagtctcagtctgttgcccaggctgtagtacagtggcatgatctcagctcactgcaacccccgccttccgggttcgagcaattctcctacctcagcctcctgagtagctgggattacaggcacccgccaccatgcccggctaatttttgtaattttagtagagacagggtctcaccatgttggccaagctggtctcgaactcctgacctcaaatgatccacccatcttggcctcccgaaatgttggaattacagacaggagccaatgctcctggcctggatcacatatctttttcctctatcccttggttcattaactttatttttcttaattttcttttcttttcttttcttttcttttttttttttgagatggagtttcgctcttgttgcccaggctggagtgcaatggcatgatctcggctcactgcaacctccgcttcctgggtttgagcaattcttctgcctcagcctccagagtagctgggattacaggcgactgccaccatgcccagctaattttttgtatttttagtagagacggggttccaccacattggccaggctcttgacctcaagtgatccgcccacctcagcctcgtgaagtgctaggattacaggcgtgagccactgcacccggccgttatttgtcttaattttctaaaaaaaagaataagtaacgagaaatttttttattttttgctctttcatgtctgaaaatgtcatttctctactttcagaattaatttaatgtttggctagatatggaattcagggttggaaatcactaatactcaactttccaaacatcattccagtgttgctattaggaagtttgaagtttgaagccattataatcctccttttttttttattgtaatctttttctctctagaaacttttgagatctgttatttttgattttctgaaatttactgatgatgtgctgaactgtggaccttttccccactcccttgctccccagttattatcatcattcactgagcactttcagctggaaatatacatccttcagttctgaggatgtttttggcattgcctgataattttctcttttctgttttgtgttgctgttgttgttgttttgaggcagtcttgctctatttcccaggctggagtgcagtggcactatttcggcttacttcaacctccaccttctgggttcaagcaattctcctgccttagcctcacaagtaatggggattataggcacaccaccttacccagctaattttgtatttgtagtagagacagggtt

SEQ ID NO: 111773 - DNA, 1901 bp, Homo sapiens
ttgcatgtcttagactcctaatgagaacaacaaagctttattgaagtgtagttgctaggcatttaggaatgtcactttttgttatgtgatttccccacatgtaccagccttgctattgaacagttcaagttcatgctttagcaaaactctaaagtcattgacgtttagagtcactcagggaaagtaaaaatgtgactaaatctaaaattgttctgtacactgctctagcagtagttatcctacccactccccataataatgtggttgtgtccttctttagttttaatcctgccacactcgttgaatttttccttattttgagcttttaaagaaacattagctccatccatagaaattataaatgaaagcttaaaaagtaactatagtgaaaaggaagttgaagtttaaaattggtttactttaattgaaagcttattttgtctttatcacttatctcttagagattaaaaaaactatcccaaatttttatgtctttacttattacttggcattctcatgttgctatctgttaacaacagttttattttaaagccaaacagtaattatctctctcatcaccatcaccacagacttcactttaacattgaaattacaatgaatgcctgatgagaagtgctaaagatggtggtgtcttccccactcttaagtaatcacagtgctataaaattatcctttatcttctaaaatatatagcctctaaatgtatcctctaactttttattgtataaaagaagtatcattagaaccatcctgtcccaaattattggcttgagtttgtagagagactatgaaaaagtatttgagggatttttccagatttagacttttctaaagtagtaatatgtatgaataatttgtaatgtataatttgcagggtgataagatcgacagacgggtatgtatcacttgattaagcttaggcattttcctcttatagcaaagctttttctctgtcttgggttttgctgattggtttttttttaactgcttgtttgaagttacattctactcacacttttgcgtgtcagccaatttatttctattgtaaatggctctccagtttttctccatgggatattgtattggtgttactaaacactgtgggaatgagaatctgaatctatacttgtgcttcttctggggatgcttgcactttctggatttccttggtttcggttttttgtgttttttctccaagcttgcctatttatttcctctgaagccatttcaaaggaagtagaattcaggattaagaattttgtctttaattaatcagcatatgaaagaatctgatgatgatttttatactagattatttaaaatgtgcaatagtaagtataattttataatttgaaatattttaaatgaaatattatggattattctgaatataatccatatgctacagctaccactgaggattcgtttttgttgtgtgtggggaaagtgctatttttgttttgttttgttttgttttgttttgttttgtgtgagtatttggcagaaaaggagtgtaccttaatatctatgtttgggcatgggtttcagttgaataatgtgggtagtaataaatgaggtcctgttatgaattgtatctttgtgtatgagcatgatttaacatgtgtcattaacttacacacacacatacatattttgcagctttagcctgcagaattttatattagggaaagtattttataagtatacatgtcagtcatttgaaagggaattttttttgaggtattaatttatatacaataaaatgcacagaccttctgtgtttcatgtgatgatttttggtgtttgagtgtatctctgtaaccaccacccaaaactagatgtagaacgttttcataatcccagaaagttccatcatgctc

SEQ ID NO: 111774 - DNA, 1038 bp, Homo sapiens
tggtgttttgttatggatttttttttttctcagacttatcttttatggcttctgcattttaagtcatacttagaaaaggcctttccatgttcagattttaaggaatttactaggccaggcatggtagctcacacctatatgttaacactttggaagctgaggtgggggcatcgcttgagctttggagttcaaggctgcagtgagctatgattgctgcactccagcctgatagacagagcgagacctggtctccaatccccccaaaaaagactttataaggaattatacttcaatgtttatcttatactttctggtttctttttttttcatttaattctttgttctgtttttctcagcgaactgtatgagatacagatccactgatctttttctagatagctctccagttgtcccaaaatcttttaagtctatttgtaactcactgatagttgtatgctactttttcatatattaaattctcatttgtatatgggcccatttttctggatttttgtattctgtctcttgattcctgcttgttcgtgatccattattctctcttttttctttttttttacagtgtccctagttaatctcacttttttcatatgatcttcagaatcatgttgttttgttccagaagcaaaaaaaaaaaaaaaagccttttagtaatttttatttgaatcacattaattttattcatttatttatttttaatttattttacaattattattttttttgaaatggagtctcactctgtcacccagactggagcgcagtgttgtgatctcggctcactgcaacctctacctcccagattcaagtgattcgcctgcctcagcctcctgagtagctgggactacaggcgcgcgccacctcgcctggctaatttttgtatttttagtagagacagtgtttcaccatgttcgtcaggctggtctcgaactctggacctcaggtgatccaacgcacctcagcctcccaaagtgctgggattacaggcacattaattttataaattaacttagaattaac

SEQ ID NO: 111775 - DNA, 1032 bp, Homo sapiens
tgtaaatgtgttgtattaaaattttgaaaactaattttgctggatatgctaattttcattattaactatacttggcagctgttaatggtttgggggcacttggctaatttaaatcttcctcttgattatgtttgtgatttctcatctggtgtgtgatgactgaatttgtagtatggtttatttattgttagagaatatattctctcatggaatttgactaaatgattcaggggattattttttgcatttttcttgatttttttgttttttggttttttttgaaggaagtagaattttccttttatcaggaacttgtttttaaacttgtgactgaaatatcataaatttgcttggcaaatttattgtaaagggtcttgggattaatagattattttaaagcctccacactgatttttttccttagcagacaaggtttttaaactaatcatattttaaataacccagtatatgcctctgaacatgaatcagttctaatttctgcactctgttcattttaggaagtgcagcctgtggtgcatacaataatttattctcttgtttagttttttaaaactggatttctggctcatctcttgtaagatgttaaagttcttttcatgcaaatggaagggatcttagggcaactttaagtttgaaaaatataaaatgaatggaaagatttctaccaatttatctgttgcagggaagcaaaatacaaacaagagttggattattaatgttgctttgtacctggctaagcaattgtcccattgcagtaacgcattttcttcacaattcagccaatgttccatttgtatcctttatgttttagtaacgtacatgtaagtatttatatcttttttagtttttctcctcaattagaagtagttctatgcccaaaatatttgaattctccactatcttatctgtgttgcaactttttaaactgttaaagttgttatgatgcttgtttaagttgtgtgtgtgtggtttgttttatgccgggttggaatatatatatgaaatttcttt

SEQ ID NO: 111776 - DNA, 1971 bp, Homo sapiens
ttttaatattaaaaataatatagaagcatatgtatacatacatatactaaatttcttaaatagtttgatgtaaatttttaaatggttttatgaccataaaatggagttttttcattttatttcccactataattgcaggctatgccatgatgtttattaatggagccttctttgaaatcttgtagttctgctgcatgttaattggccttgatggatatattaacacaccaagttgcttaattactgaacgattttggaagtgttaagcactttagcatactgtcccaaaatgacctctaatttttaaaatgtgttcaccttcttaatgctaacgagtatgactttaaaacacatgaattatgttttgtttcacaggatctccaacttgaggaattaaggcagcaggtttctacattaaaatgtcaaaatgaacagctccagacggcagtcacacagcaagtatcacagatccagcagcacaaagaccagtataatcttcttaaaatacagctaggtaagcatagctaagccatcactatgatagcactcaggtcattctttcctcaagagctagacaaagtaaaagattctttctgtggactagtatttttctaaccttaatcatggtgacaaaaatgtaaatcggagtttaaagcaaaatagcatgatagttaagagcagttaagactggacctttagagattgaagtccaagcttcttgctacctgtttatctggcccattgattctcaaccctggctgcatattagaatctcctgagatgcttttttaaaaaaaaataccaatgctgataccacaatagtgtttctgatttaataaatctgggattaggtccagggatcagtaactagtataagcccaccaggtgattctaatgtatagctgattaagaatgaccgctgtaatctttcagtttcctcttctgcaaaatgaagatagtaataacatttgagaactaaatgatataataaatgaaaaatttaagttgtgcctggaaaatggcaagagctccactgcttttaaatagtattatcctacggtgcttgtgaagattttttaaaaggattttattttctcatattcagttgacagaattggaattaaaattactgtaattcttaatcatagatcaccagaccatgcagtttagtcaaggctgtgctgttttttctcccagaaatctggaaaatactatcagttcactatttttatcagtataccattctgcaaagatgaaatgtgattgcaaaagtgctgccaaagtaattgaatgaagaaaattacatatttgaatcttctacttcaaaaatgaaaaactgaagtttcccgttggcttttaaaatgttatgtctgtctaacaggaaaagacaatcagcatcaaggttcttacagtgagggggctcagatgaatggcattcagccagaagaaattggtagattgcgagaagagatagaagaattaaaacgtaatcaggaacttttacaaagccagctgactgaaaaggactctatgattgaaaatatggtaaagtaaatgtttaagaagttaaaataagagttcaagagtggttctcattatcctgccttttttttttttccttggatctcttaagccagaatatcatatgttaagattttacaggatgggccaggcacagtggcttacgcctgtaatcctagcactttgggaggctgaggtgggcggatcacctgaggtcaggagttcaagactagcctggccaatatggcgaaaccctgtctctactaaaaatacaaaaattagccgggcatggtggcaggcacctgtagtcccagctacgcaggaggctgaggcaggagaatctcttaaacccaggaggtagaggttgcagtgagccgagatcaccccacttcacctcattgcctgtgcgacagagggagactttccatctaaaaaaaaaaaaaaaaagat

SEQ ID NO: 111777 - DNA, 1047 bp, Homo sapiens
tgaaaaactgttattcaggagtgtctcctctagcacttgagaaaagatttgcatttcactaataatgatatttggctcaatttatctacctatctagggtggtagtatggacttataggaaatttatgaaggaaaggctttgaaaaatattctgtgtttattaaatgctgggttacagttacattagagctgccttgctgattacttttctgggcttacctaccttgaggcaccttagcccagccttcctcgtactcttatgagatttgatgctcttccatgtgggaacagctcatctgacagtggagagcactttgttgcacataaatacataaggaattatattttctgttagtgaaagtaaaatatcaaaatggcaaaaaaattaaataaccctttgggagttcatattgattgtaatgtttaagagacatctttttttccaatttctaatttcaggcaaaatcagttgaggtacaaggagagaccgagactataatagccaccaaaactactgatgtagaaggaagactgtcagcattattacaagagaccaaagagttaaaggtttgtttttggtgcaacttttatttactgcatatgatatgaaatgaactctaggaaattttatatatctttcaaattcttagatttatgaagaaagctaatgatgtgtaattttatctcacaacattttcactcctatattgatgatttaagatggcacaaatgaaaattttttttgttttgggtttttttgttttgttttgtttttttgagatggagtttcgctctgtcaccagactggagtacagtggcgcgatctcggctcaccacaacctctgcctcccaggttcaagcaattctcccgcctcaacctactgagtagctgggactacaggcgtgcaccaccacacccagctaatttttgtatttttagtacagacagggtttcaccacgttggccaggatggtctccatctcttgacctcgtgatccacctgccttggcctcccaaagtgctggaatgctggaattacaggtgtg

SEQ ID NO: 111778 - DNA, 1038 bp, Homo sapiens
agcctggccaacatggtgaaaccccatctctactaaaaatacaaaaattagcagggcgcttggtggcaggcacctgtaatcccagctactcgggaggctgagacaggataatcgcttgaacctggcaggcagaggttgcagtgagccgagatcgcaccattgcactccagcctgggtaacgagcaaaactccatctcagaaaaaaaaaaaattatcagtagtatatattgttaaatgttgaatgtgacatgaacagattttcacaatattaaatacgtctttttcctctaggttgaagaagaggatgaacttgaatctggagaccaagaggatgaggatgatgaaagtgaagatcctggcaaggatctagatcatatctagttttcaaatctctaggaacaatagagattatatcataactctgaagatggactctaaactttggtttacctccatggaaaataaagatttagaaaccaggtggaaaacattcactattaagactattgatatatttttgtaatgttgccacccatgttgaaaaccttaaaactgaatttatgtagaacacacatcttttatttaaatccatctgaactgtcccaaaatgtaatttgcaaagagcttcaaacaccaaaaatataccattttaaggcatgtggtgacaatgctatttgccttagttcattcgttgtttactttgcaaaatttgtgacttttaagtactaacacatttgattgaatgtgtattgaattggaattattatttctaaattcagcatttgagtccttagttgatgattttcttttaaagaaattagtttatttaaaagcaagatagcctgggttgggagttagtgcatatcatcagccctccatctaatgtgattgctaagatgtgcaggataggacagcttagaatgagtgccttgacacctacatatggctgcattccatacctcagtgaagaagccgaaggatgctgacacacagtgatgtggagggcattccggagaaacttttgcaacagtgtattaa

SEQ ID NO: 111779 - DNA, 1051 bp, Homo sapiens
gttaggtaggtatctagctttactctttttgcatgtgaatatctgcttgtcccccatcattgttgaaaaaaactattctttccccattaaatgatcttgggacccttgtaaaaaaatcaattgactatagatgtatggggtccagaggattttaatggccagaataaattaggatatgtttgagatgattaaatgcagggtttctcaacagtggtactgttgataattctttgttttagggtccatcttgtgcattataagatgtttggcagcatgtctggcctttatttattagatgccagtagcacctcacctccatcttagtcataacaaacaacaatgtctccagacattgccaaatgtcccctggagggaggggagcacaattactcccagctgaaaatcattggtgagccagtgggtttgtgtgatcctcttgggagtttaaattagatactaggatttgtgtgtctctctgttgagcagtagggagcaggtgtccttgtaagaatgtcagagaaaatgaacattaaaaactagactaactcactgaagtgatttcctccctctgataagggttcatctcactggacgagttcaggcagacctggaagctgttcagctctcacatgaatatcgacattacagatgactgcatctgtgaccttgctcggagcattgatttcaacaaagatggccacattgatatcaatgagttcctggaggccttccgccttgtggagaaatcctgcccagagggcgatgcctcagaatgcccacaagctacaaatgctaaagacagtggctgcagcagtccaggtgcacactaagaacagcctggtcttcatcacccaaagtgcctcataggcaatgctcagcttctcactagactatctcccttattctccatgtgaaactttatgctgaaaatttacctatccatatgcatcagaatcacctgtgtatttcagtgtggaggggtgggttggggtgttgtgtatgtatgtgttttaagtatatgagtgccccaaccccacctcacaatcttcac

SEQ ID NO: 111780 - DNA, 1040 bp, Homo sapiens
aatcacccaccttggcctcccaaagtgctgggattacagacgtgagccactgcacccagcctgagctgctgtgcctggcctgtagtagtgttaacagaattataggaacttgctggtattcaaccatttctgacccattagaatggcaatctcatacagttcacccaataaagaaatgaattcagccgggcgcagtggctcatgcctataatcccagcactttgggaggctgagacaggcggatcacgaggtcaggagatagagaccatccttggctaacacggtgaaaccccgtctctactaaaaatacaaaaaaaaattagccaggcatggtggtgggtgcctgtagtcccagctattcgggaggctgaggcaggagaatgtcacgcacccaggaggcagagcttgcagtgagccgagatcgtgccactgcacttcatcctgggcgacagagcgagactccgtctcaaaaaaaaaaaaaaaaagaaagaaagaaattcagaattatttaagagctaaaattagcagaacttgctgattgattggatggagggtagtgagaaagagaagttgcagctgactctgagtctagaagcctcggagaaagagatggtgagtttagttaatgttctgtcagttattgatctgggcttcaacaccaatttagaattgaaattataaagtataggtctttccttttgcaaactgactcagtgttaatgtcttgatctttacaaatcgaatgaagtttttcttttacaaaagtacttttagaaagcattaaatgttggctaagtgtggtggctcacgcctgtaatcccagcactttgggaggctgaggtgggaggatcatctgaggttaggaattcgagaacagactctggttaacatggtgaaatcctgtctctactaaaaaatacaaaaattagctgggcatggtggcacacgcctgtaatctcagctactcgagagactgaggcaggagaatcgcttgaacctgggaggcagaggttgcagtgagccgagattgcaccactgca

SEQ ID NO: 111781 - DNA, 1065 bp, Homo sapiens
agtttttcctcttcctatttctcacctatatactttgattctttttctttgttttagcatctgtggaatgacaggaaagtcaatgaggactggcctgagacagagttgccctttcctatccttgtctaaaaaagtcactggtctcccagacagaaacgatgaactaggttagtgtttctcgaaattatatgtgaaggaccaggttttataaacttccaatttgttgcagatcaatactttcgtaaaatacaataaatatgaattattagaaaaatgatgaaataatatgtaaaacaaccccctgtgacatgtgtgtacctatgtaaaaaaccttcgcatatacccccaaacctaaaataaaagttaaaaaaaaaaaagagaaaggaaatacaaacaaaagatacaagcccactgatcatgtgcttgactgtcatgacaatgtcatattgctgtcaatgtttctcagacttactctcaagggctgtacttaccttgtcccaggccaggaacagtgaaccgaccagcacttgtctgtgggcaccagtgtttaggactgacctgggtgtcaaagtggtactctcaaaggacctacagttccttccttccttccttcccttctttccttcctttctctctctttctttctttttcttcctcttctttctttctctctttctttctctctctcttttttattgtttattttttttttgagatggagtttcactcttgttgcccaggctggagtgcaatggtgcaatcttggctcaccgcaacctccgcctcccgggttcaagcaattcccctgcctcagcctcccaagtagctgggattacaggcatgcaccaccacgtccagctaattttgtatttttaggagagatggggtttctccatgttggtcaggctggtctcgaactcccaattcaggcaggtgatcagcctgcctcgggctcccaatgtgctgggattacaggcgtgagccaccgcacctggcttctctgtttcttttctttctttctttctttctttctttctttcttttttcagggtctccctctgttgc

SEQ ID NO: 111782 - DNA, 1168 bp, Homo sapiens
acatgactaagtgactacagcacacttgccccctagcccaactgcaggttctcaatcttttttttttttttagaaacaggttctcactgtgtccctgcaagatggagtgcaatggcaatcagagctcactgcagcctcccaagtagataagactacaggcccatgccaccactcccagctaagtttttaatttttttatagagacaaagttttgctatgttgcccagactggtctcaaactcctggtctcaagcaatcttcctgtcttctaaagtgctgagtttataggtgtgagacactgtgcccagcctccatactcttaatggcctccacactcttaacagccataatcagttgactgcagtcagcatgtaagatgacatttatattggcaatgaaactgggcattatggtgaaatttgtattatttcattaaccactaccttgctcctctctattttgtccaaaagctccagatcagttatgtctgacaccccaccatgaagaattagaactttctcatctatcagagtggccagtggaagccaacagaaaacatcttgcagggttcttagtatttccttcccgtgtacctggaaaaaatgatataaacaaaatgttatcaaataattcactcaacttatctgaactgagagaaacttttgtctttaaaggcagcgcaccttgtatttattcatcacttccttggtgaagccatatctagatttagaagcacaaatagatattagagtaaactgggtgacaataatcagggcataatcacatttttagaagaatgcatattctgggtatatgtacttaaatacatagaaaagagactgaggaataatcaccaaaatgtttaaaactatgtcattatccctgggtagagaaattatgggatattttaattttcttccttttacttatctgtatttcctgctttactatcatgaatctctattatttatatgatagagtatgtgtatgcaaaaacaaattcaatggtttcattggaatagtaaaataatgtgtaaattaaaaaaaaaatctgggctgggcatggtggctcacgcctgtagtcccagcactttgggaggctgagatgggcggatcgcgaggtcaggagatcgagaccaccctgactaacacggtgaaaccccgtctc

SEQ ID NO: 111783 - DNA, 1063 bp, Homo sapiens
ccattaaaaaaaaaaaaaaaatcagtctttgaattaaatgcgtttttttcttcccttacagatgattttttaaaaaatgaaattcttgaagagctgcaccttaaaaaataagacaaagtgaaagtattgtattatgttacaaacaatgcaggctccttcctcatttaactttacaaccttgcgaagtgggtccaggagatttggagtttgtggtaaagccagtaatgggcattgtcctgcattcccttcccttcatggtttgcctcgatcctctctaagcttctatcctggcctgaataactcaaagataattggtctcagagatcaagccatatcctcaggccttatttccatcttctcatgattctgccatcatacctttgcttctccgctaatgaaatgagctggcaagacctctgttcattgtgaagtgcttctgaaagagcctaagaaaaaaggctcatctgaaagaaatggagaactctatttcgaaccaagcctgtttgaatgtgtgttagtctgatctttgatcatgtgtttccatgtaatgggagtctcgttttttataatgtttctaacgttttattgaaaaacctatggccctccttctttctcaatagctactttcttactgctttttgaaaataatatgcaaccaaattatttcttaatgtcacataattaagtaataaaatgtcaaaagaaatgttggcaaggagaataaaaaaatttccaagaaacttagcgttatgctctccctgctttctttacctccgaagtcttatggttctgaactgctgtcctgagaaagcaactctcttagttgtgatgttatttaagtgtcagcattcaagggaatgaacagctgcttggtagagtttgatttttcacatgtgcatgaaagaaatgtccttgaggatgaagtcagaaaaggttaaaagtgtaaacgaaaatgtgcctgaagcagcactcagtccatgagagagttattttgccaaggctaaggatgtgcccgggaaaaagaaacaccagtcacaggaggacctgtcctgtgcttttccca

SEQ ID NO: 111784 - DNA, 1051 bp, Homo sapiens
ataatccacccgcctcggcctcccaaagtgctgggattacaggtttgagccaccgcaccaggcaccaggctgtaacttaaaattccctgctaagggtttgtttatgttaactgactaggcagaaacaactgggaagtacaaacagaagtaaagacagattttcagagctgcaagataaaatatcttacaaattatatctcaaaattatttataattatgtatcgtaattgaaaactacgatgtgacttttgatctcataacttcaattttctcagccctccaagagtgaccctgacgatcacggtgtcacgcaaatgaggtggccatataattactttttattttccatataattacatttgagtagtaaggaagacttatttctgctttaccaccatgcgtggagatgagacattcatggaggtcctcagtaagtctgagggctgaggtcatttataaagctaaggacactgcattctcccttgtaattcagccaccttaaattatttttacaagcagataaggtaaaaataaataattaaatgaaaaacattactgacctaatttttctaaggaaaatatcaatctaggactatctatttcttaaaacataatggtattagttaacttttattgaacagtatgagtcagatactgttttaagtactttttttttttttttttgagacagagtcttgttctgtcacaggctggagtgcaatggtgcaatcttggctcacggcaacctctacctcctgggttcaagcgattctcctgccttagcctcccgagtagctgggaccacaggtgcgtgccaccacacccagctaatttttgtatttttggtagagttggagtttcaccgtgttggccaggctggtcttaaattcctggcctcaagtgatccgcctaccttggcctcccaaagtgctgggattacaggtgtgagccaccatgccttgccaaagtacttctttgaaaaataaaatttggtatcagaaataactgataaaggctagctgtggtggctcacacctgtaatcccagcact

SEQ ID NO: 111785 - DNA, 1378 bp, Homo sapiens
agtattatttattatccctggagacagggataataaatagtagtctctgcattccatagctgctcctgttttgagcttatgcctccatgagttgggaacagcagtcaagagttttgcatatttcctagcagtaatatgccccatcctcgattcagatgtgatctgttttggaatattttatcatttatagtttttcaggatggtgtattgacttggtgattcctttttagtaaactttcatgtaaccaaattcgtataatagggtacccaagagttatcatgtttcaatacttttttatcttacagttggcactacgagatgcacttttgaaaaagagaaaaagaatgaagtaacttcctggcaagttttccattcctagaagaatgctaagtttgtgtccttgctctgaaaattggtaaatcaagcatgtttgtttacattaaaaagtccagacacactgtattgtgaaaactgctgaacatgtggcagcaattttgtgtttttattttggagacggctaatggtaggaatgttaatgtaaatagtggtggtaatgtaaaatcatttcatttatcattcatgcaaaaaaaagtatgtattgagtgcctattcattgtcactgtagatgcaaaacgaatgagctgtaaccccttcactcaaggcattgacagcttagctgtgagggtggacacacatatgtgtatttacagtgcagtgtaaatagttctgtagtagaggttaactccatatttctgtgaggtcactgaggccttatggactaactctgtgaggataggagttatatattcttataagacaaaacaaaacaggacaatgttacaagagtaagaggttcttacttgtacataggctttcctgctgaaaacaggcccctgctgtacagattttgggtacataatttagctcttttagtcaatccaagagatttaagtgacccccccccccccgtgttttttttgtttttgtttttgttttgaatgccatgtaaaggctttttggttaagacctcacttttaaaactgccttaagtataaatagtacctttggaatatatttagttcatcatttgagctgccttcatactggtttcctcagccttccttcagcctgtaatattttcagcccactgtttaccttgtctcaataaaaggtttctaatgccaaatacgtacctttgtatgtggagtggtgtgtggtgttctacgttccacaggcgtgctacatccatttcaggggacagtctgtttgcatgcaattttttgcatttggaaatagtttggtgccttttgcttcagctttctcagataatgttgtggtagatgttacctcaagttagagtaaagggcaattttctgc

SEQ ID NO: 111786 - DNA, 1870 bp, Homo sapiens
ttagggaactaactattagaatgtaggatacaagatggaacatagaaagacaggaggcttgagatagagtttggtgaccttttcatacttggttatgtatatgccagacaaaagagctggcacgttctcttaaagatcatagggagtcatggaaagattgcagtgtctgtgatttagaaaatttaaactgtggtggctccattaagaagcctgatacctttttattgaggtgtcttcaggattctttaacatcccaaatattctacctcagttgtctgaatgactaactagattctcatacgtgggtaacacgcataggacaaattagatgcctgctgcgtggccaggataaatgtacaagtgcagttttgatggacacagttggtttagttgaaagaacatgaccctaaaggtagacatgattttcatgatttcagtgtaggatgcctttttagcggtgtggcttggggcacattactaaactctgagcatctgttccttttctttggagttatgagggttagagagagtgattgtaaggttttgactcatggtagatacttgatcagtgcctatttcctattccttagattaactaaaggcacattgtttatttaacaataaatattgctcagttcttggttaataatgtatctgttcaaggttcattacttttctgttgcttgcttcatctcaactttatgttgaatgtgcaacataaaatggcagtagtgggtttgcttttttcacgcagatggatgggaaagtaccagtctcagtgaggaggaggatgctgatggtgaatggattgatgtgcaacactcttccgatgaagaacagcaagaaatcgtaagtctgaaaatttcatcttataacctggtgtttattaagacgtaatttattctgggccttgttgggaggctacaatttaaatggctgagctctcacttgagctggtagccatttaagcccttgtgtggtttcaagtccaagaagctgaacagcatgcccatggaggagcggaaggccaaagctgcagccatcagcactagccgagttttaactcaggaagacttccagaaaatccgcatggcccaaatgagaaaagaacttgatgctgcccccgggaaatcccagaagaggaaatacattgaaatagacagtgatgaagagcccaggtaaaatggcacatccactttagtacttcagtcagctcatgtggtaatgaaagcatcaggaaacagaattccattcttgtttcatgtgttatttttccctcaccccaggggtgaattactttctcttcgggacattgaacgccttcataaaaagccaaagtctgacaaagagacaagactagcaactgcaatggtgagtgagcatatcattcctagttttttaaacagaaagcaaataaaatgaaacataagccagaacttgtatagccacagaatggcaatttttaaaaatgttttaaataaaggtataattaacacagaaattaaaatgcacagatattagatgttcagttagatgaggggttttgtttgggtttgcttttgttagtatgtttgtttgtttgttttttgcgacagtctctctctgtcacccaggctgtagtgcagtggcacaatctcagctcactgcaacctctgcctcctaggttcaagcgattctcctgcttcagcctcctaagtagctggggtaacaggtgtctgctaccacgcccagctaatttttgtatttttagtagagtcaaggtttcgccatgttggccaggctggtctcaaactcctggcctcatgcgatccacccgcctcagcctcccaaagtgctgggagtataggcatgagccattgcgcccagccag

SEQ ID NO: 111787 - DNA, 1064 bp, Homo sapiens
gaggtggggcctgagcttctgcatttccaatgagcctccccggtggaccagcagctgctgggtctgtggactacccctttaagaagcaaggatctagagagctattaagtgaagcgagcacctgtcaaacagtcactctagatgttgatgctaaaaaacttgggaattattaagacttaactttgggcaccattacatatattgacatattcacctgtttgtcagtctattcactgatctaactattgtcttttcctacgcctgttacataaatgtcacatagaccatagactcacaatgtacttctttcatcctctccttgccagattttgcggaaaaactactaaagcagcttgagtgctgtaaggagaggtttgaagtgaagatgatgctcatgaaccttatctccagattggtgggaattcatgaggtttgaattatattatgtttctcttggtgaatatttgaagtagaatttaccatggtaaaagaaaagccattaggtagagcagtggcttaattttatccctcatacatttaaacacataaaatttacagaagagtaacatctctgaaaataactatttttatcacttcattttctttgcagtaatgtggatgttaatttgtacatatattccatttatggacaggctattttattctctgctttttttttttttttttttttttttgagacagagtctccctctattgcccaggctggagtgcagtggcgcaatctcggctcactgcaacctccacctcctgggttcaagtgagtctcctgcctcagcctcccaagtagctgggacacaggcgcatgccaccacacctggctagtttttttgtatttttagtagagacggggtttcaccatattggccaggctggtctcaaactcctgacctcatgatctgaccaccttggcctcccaaagtgctgggattataggcatgagccaccgcacctggcctgttctgcttttttactttctttttgttcactttgttacgcatacacattttcttgagccaatataatgcacatattttaattgactt

SEQ ID NO: 111788 - DNA, 1044 bp, Homo sapiens
gtaataaatgatagcctcagtggttttttactgttttctcctgtgattcttgacttccgttgggcttcggcactgctaaaagaaatttaaggtcaatgtttgacttttgtctgttagaagaactgcaatgtcacttttcttataggggatgtagaaattctcgacagtcttgaaggataactatatagagcctagcagtttttatctagtttttaaaattatttattagagaaataacataaaacaacttttaattaagaaaaaatgaacaaaaatcccaccactctttgaatttgttcttcagatcttagttcatgcacatgtataaagcatactcaaaaggatttattctttattttaagctgaatcaagtagctgacttttttctcattggtgtttagatattagttgccgctttgacattctttcttgggaaagatgaagatgaaaaacaggacagtgactccgaatctgaggttagtttaatcatagctgcttctgaatcttaccttttattattgctctgagtacacattgtaaagtctatgactgctgaagttagaaagaaacttagatgacacctttgccctgttattgaattctgccatgctattttactctacttggaatttgtcacttgtattcagtaagattatcttggttatataattaataaaacagatttattcaaccttgatcttagttctaaagttatacctatatctcactatgtaaatttaggatgaaaattgtcaccaacatttttttttttaagacggagtctcgctctgttgcccaggctggagggcagtggtgtggtctcagctcactgcaagctctgcctcccgggttcatgccgttctcctgcctcagcctcccgagtagctgggactacaggcacccgccaccacgcctggctaattttttgtatttttggtagagatggggtttcaccgtgttagccaggatggtcttgatctcctgacctcacgatccacccgcctcggcctcccaaagtgctgggataacagacgtgagccaccg

SEQ ID NO: 111789 - DNA, 1550 bp, Homo sapiens
acttcttggtctaatttgtggaataaaagtggtccatgggagcatggtgtgggcaccagtgatatatgcattcacagtattttcctgcatgcagttaggtgcttggtaaattggagcattttttttttaataacacttttattgagatataatttatgtaaaattcatccacttaaagtgtacaattcagtgttttttagtgtattcacagcgtggtacaaccatcactgcaaacaatttttgaacattttgtcacccccaaaagaaactctattccaattagtagttaatcctgttcctcatcccttttagctctaggtaatcaccagtctactttgggtcactatagatttgtgtgttttggaaattttatataagtggaatcataacaatatgtggtctttagtgactagattctttcacttagcataatgtttccaagattcattcatgttgtagcacgtatcagtactttattcctttttgttgccaaataatattccattgtatggatataccacattttgtttatccattcatcagttagtggaaatttaagttatttccactttttggccactatgaataaggctgctatgaatgtttgtgtgaacactgatgttttcattttctaggatatatacctaggagaattgtgccgtattacattaaactccatgtttaacttcttgaggacaactttgctttgctttgtagttgcttttttgtttgtttgcttggtttgggtttcttttgggatagaatgaaaaataggtaaaattaagtcatcctgtacattcatactgttctccaaatttagcaaggttaaaaatgttggttaggtttaatgtatatatttttgtttcttttcctcagactttatacacacatattgtgactgatatcaagaatataaatgcaaaacacaagaacaataaagtgaatgtagtaagtactcttctgtcttccatgtttgcagcattgtaccatcagtgcattaagtcttctttctcctccttttctgcaggtattgcaaaatttcatgtacaccatgttaagagatagcaatgcaaccgcagccaagatgtctttagatgtaatgattgaactctacagaaggaacatctggtagtgtatatatatttgtctcttgagaagtagactcttttttcatttgtaattaatacagagcacatatacaaatacttttcttgagcttgagctctttaatatacttatgtcatagatttaagttggaagtaaaaatagaggcaattcaaatgactaatgacattggttatcatttcttgagcagctactgaggtcgggcactttgacatgacctcacttagaacaacttgagaacagaagatgtagcttatctggaattatccccattttataagtaatgacatggaagttcttagagttagtaaaagtttagctattaagaggcagagctgaaattcagacccagatctaactgactccaaaatctgtgctctctcttctgccgctctgaagattttcaagtcaattcatcctattta

SEQ ID NO: 111790 - DNA, 1071 bp, Homo sapiens
agcgattctcctgcctcagcctccctagtagctgggattacaggcatgcgccaccacgctcgactaattttgtaattttagtagagacggggtttctccatgtggatcaggccggtctcgaactcccgacctcaggcccgccttggcctcccaaagtgctgggattacaggcgtcagtttctaattttagactgcgggattaaaaataaacgattaatcctcatttatgtgcttcatatgggtgtcggaatgacgatacatgctaacacacgtgaaaaaatttacatttcagatcctttcagaaacgcaaggcaatattaagtagtagcatatgcccaagggcgaggggcgggtcggcggtggctggctctccaatacaccacagagtattttggcaacgagagtaattttgacactctgaggcttccgtagcatagctcgctttaggaaccgctaaggtgtcgcctgcctagagtcccatgcgctatttccggtcatacccggaaacacgagtccaagctgcagctggcagggattgcggggtgccggccgtctgagtttttttaaaactgctcgccgcgaagtctgtctgcagccaaaatgtccaacagaaacaacaacaagcttcccagcaacctgccgcagttacagaatctaatcaagcgagacccgccggcctacatcgaggaggtgggagtgcggcgcggcagacgctagaggccggatagtggatggttgagacgccggtgcgggaaagcatggagtggggctgggatccaggctcgccgcctattcttctgttaggttcaggggtccctccagaggagagaaggggttggggacgggacatgccttagggttcgttccccacctcttgaaaatctgttgcccctttggattttctacctgccctgctgccgctgaaacacctttaaaacctcattttgttttaagatatttttcttcgtccgcacggaagtggagagagaaatgggccgcacccaaccaccaacttccacgcggatttctcagcctcttttcagaaatcccaaacttgaattagtcggtaac

SEQ ID NO: 111791 - DNA, 1047 bp, Homo sapiens
attatctcacttttgcttttcagtccaaactcttataatagataaggcctatattatttgacaccagatgacctttattcaatttcatatttttacctgtaaatgagtgcctaaagaagtttccctgtgtttctgtatttatgtccatattgttttgcattttcaacaatttttactttatatattttattttgttttgctttattttatttttaaatttaatttaattttattactttattttatatttattttattctgcaaagctttcattataggcagatggcagggggctcagtccttcttggcagctgctttcctcatggcagccaggacgttgctcagctcctcctgccttctcttggtgcagatgtttgtccctacccttttcttgatgaatttgagggcctgtttgaccttggagaccttcagtaactccatgccacgccactcgttaggggtgaagccacacacctctgggatcatgtcccacacaaatttagtgagtttggtcaggcgcccacagtggctgtgcctgggcttgctcacattcttggtcaccttgtggcccttgttgaggcccacagctatagggtagtgcagtgtcatggctgctgccctccaatggtggccatggtggaaagctactttatatatattttagcactgttacttagtacatgaagttgtatgagttgtattagggatcataaaaaaaagtgatcctctttgctcatgtgatagttttacctctgagattctactttgatgtaattcctatttttttgtctttatcttttcctcttaagcttcctaaatctttgttttaagtgtgtcacttgtagatgtttaagaaaatcatatcaaaggagctttctaatgggtaagcttaataaaatatatttactgtataactggtaatctgtaatttttaaaatgcttccttgctgattctttatgttttctttgatttctttctaactttaaatatattttatttaactttttgaagccatttttgttttttttaatgagatgggtctcact

SEQ ID NO: 111792 - DNA, 1033 bp, Homo sapiens
atcatactgctctatgataagctctttaggcctgctgaacatcctgaaatctctcattaccattctgagatattgcttcttccctatgagagatctcctatttcttggatttgcaactctttcttggattactactttgtttggtgtggtggggatgggggttctgcagaagtttcggagaaatggtccactaaagaaaattttctaagtctctgcatctctgagagatctgcctttaagcttgattaatagtttatgtagatttgcatttctattttagaaactatttttccttggaattttgaagatattcctccagtgacttctaggttctgtagctgttgttgaaaggtatgaagccattctaattactaaaactttgaataagactttttaaaaacaaaaatctggaaggttttaggttgttttctttattcccaacattctgaaattttatggtgttgtgccttagtgtgtgtgagcaaagggttagtaaactccttctcctgtcttctgtgaaaatggcctcctggtgatcttccagcactctctctgcaatctatgaaaggtggaatgacagctgtgtgaccttacagcattgcctgtggtaaacataacccttgattggtaaagtgcatctgagctgggaggattgtgaatgaactataaatacttgaggagaagccatagctttgggctttcctgaatgtggtgtgacatacccaggtgttcttcttgttgagtcctggaaggacagcagtactctcgtaccaatcctgcataggttcaaaatatattgtattttatatgtggcatgaggctactaagctagagaggctcctacacccacctgtgtaatcttgtttccttgaacctgagctgtaatttggaagcaaaagaacagccctggactcctgtgaagacttgcattaaaggaacacatctgatgctgctctgctgctagacagtatgctttattcactgctgtatattcttctgcaaaactgagtaaactggtgaggggttggccttt

SEQ ID NO: 111793 - DNA, 1248 bp, Homo sapiens
taaatagagttgatatatgcaataaaactgggaataatttaaacacctgtcttttttaaaattatgagcagtgtattgttttgggattgaatcatggttcaccatctactttatgaccttgggcaggttatttacctgtagtttctttaactgtcgagatgataatggtaccccaaagggggctcaaaaggattttaaatgagttaagtgagtgaataccagtactgttaaaacagcaccttaacccatgaggaggagtcttaaaaaaatgttagcatctgtagtcatcaccaccattatcactatgtactttgtacttcaaaacatgaatattctcagttttcagaatgttattttgctagtcatctatatttgaatacctcctttgagttctgttttattatcatgcctttatcaaaagttggtaaaaggaatagctatctaaaaaacatttttgttggaagatattgttcattatatatttgtttgattttattgttctttagagtttgtctttcactgttagcaaaagatgtagtacaaatgtttaaatatgcatgccctctatatttagagcacttactaggtactgtgttgctagtaaaatagtcaaagtggagtcttttttcctgtgactagcttgcagttttaagaaattaatacattaatatgttgtttcttaatttgttctagcatttgaaacaacaacaggaaggccttagccatttgattagcatcattaaagacgatctagaagatataaagctggtcgaacatggattgaatgaaaccatccacatcagaggtggtgtctttagttgacagttcacaaacttgtgtaaaggtttgtgaaatgcatcttcttactgcatcagaccttccttaagaatgaaaccgaccacatggagggaaaaagaaaacaattctttcttggattggttttttgagaagtttactgacaaattactgttcatcaaatctgaaatagtcacctcacagctcttcaaagaaaacctttgaaagatttatatctaaaagctgtatttactttaaaagaagtgcataattaccaaaattgtatgtactattgtacatttttacaacagcattttcttaaacataatctgtgtttaatgattattgtccattgagcctgtactctgctttccataccaagtaaatatgaaataatctactttgcacataacagaacaaactataattacttggctgttggagatttgtact

SEQ ID NO: 111794 - DNA, 1100 bp, Homo sapiens
atgattctgttgttattggtggtttttatttgtataggtcctaatcaaacaggaaattcaaaggaagagtggttatgccattcaggctgatgaagagcagttgcgagttcagctggatacgattcagggtgaactaaatgcacctactcagttcaaggtaaccacttctaagaccataattctaaaatttgtttcaggtggatctgcagacaaaaagttatgtaatcttcaagcaggaattttgtatacttgtgtttcttatctccaattagaacttcctttctaaagtaaactcagtcatggttcttttggctagtattagtgtttcgaatataatgtacagagagagaaatagaaatttttaatagatggttttgaaaccatcctttcagaagaaaacattgtcttttacaagtcttcgtcggcagttgtaatttgactcagtcttaacttttagggccgactaaatgaattgatgtctcaaatcaggatgcagaatcattttggagcagtcagatctgaagaaaggtattacatagatgcagatctgttacgagaaatcaagcaggtaagtgttgcatgaggctgcattatttaaagtgtgagctcaccacttcacacctattaggatggctattatcctaataagaaaagtgttagtgagaatgtggagaaattggaactttcttgcactgttgggggaatgtaaaatggttcagcctctatggaaaacagtgtagtgtttactcaaaaaattaaagatagaattacgatatgatctagcaggtctacttctggatatatacccaagtacgttggaagcagggactcaaaacatatttgtacacccatgttcatagcatctttattcacaatagtcaaaatgtggagataacccaagaatcaatcaaagaatagagaaacaaaatgtagtatatagacacacaatggaatattattcagccttgaaaaaagaatgaaattctgacacatgctacaatgcaatttgaccttgaagaagttatgcttcatgaaataagccactcataaaagggaaatatttatgatttcacttatgaaaagtacctagtagtccaatt

SEQ ID NO: 111795 - DNA, 1020 bp, Homo sapiens
gaaaagaggcatcaccgtagatatacaaaacagaataagaagatactgcatgggccgggcacagtgtctcactcttgtaatcctagaactttgggaggccgaggtgagtggattgcctgagctcaggagttcaagaccagcctgggcaacacggtgaaaccccatctctactaaaatacaaaaaaatcagccaggcatggttgcttgtgcctgtagttccagttacttgggaggctgaggcacgagaattgcttgaacctgggaggcggaggttgcagtgagccgagatcacgccactgcactccagcctaggctacagagcaagactccatctcagaaaaaaggagaaaaaaaaaagaagatgctgcatgtactttagggtaacagatttggaactcagaggaagttttattttgatttttctatgaaaatgaaaattaccaaaatctacagagaagtaagaaaacaaataccacagaaacagttggaaaaatgaaagatgaaacatgaaaaaggccttagggacagatagtttcattgccaaattttgtctaaccacaaaagagctaatccagtgttattttgattattctagacaattgaggaataatttatacagcttcatttgttcttttttcacagcttaagataatttgcataccatactatttactcatttaaagtgtacaattcaatggcttttagtatattcagagacttgtataaccgttattaccacaatcaattttagaacatttctgtcaccctacagacaaatcccgtacccattgtcagtcacttccccgtttcactgcaaatctgtcagtcctatgcaaccagttttgcctatatgggtttgcctgttctggaaacctcatataaatggaatcataacgatatatggtcttttgtgactggcttttacttagcataatgttttcaaagttcaactgtgttgtaccatgtaatagtacttcaggtactaataaatgattattattcatttattgctgaatattc

SEQ ID NO: 111796 - DNA, 1011 bp, Homo sapiens
gaattgaattttaatattaaatcatttcatccatgaatgtggtatgtctctttaatccttgcagtcttttatgtcctttaaaataattttaaaatattcccttttaaaatctcatgcgttctttcttggatcaattcctagatggctttcttggatcaattcctagatggttttagtatttgttaataaatactgtggctgataacatgtctaatttttttagttattactggtagaaaataatgttgtaagtactcttgtatctaaaaaccctggtgatttttcaaaattgggatggggagattgcctaggttttgtaatataaaacatggccacctaattttgtcctttcagcatggcctggcattggaaagtttctgtaaaaggtgatgtgtgcaggtggatgtgctaaaatatgtcttgcacaatcttaacctctttcttgtaacatgtaaatgtaagccagtggcatagaatgattaattatgatagagacaattatgggattaattctgattgggatgctttaataaaatagtgagattttaacctaccctgtaaggttaagacttcctaaggcagaatagtgggatttcagtcaggtaaaacagcaagtcaaagatccagaggcataaaaatgtatcctgctgcataattaatatcattccttttcctctgcactctgattactccctccaagtattctgtaacagttaatgttgaaatgtactgtacttgctgtcagtagttagatacagggctaattgtctattaagacaccccctagatatcatcttacacatcttaactttttccactcagacctggttgttggctgtattccatgttacttcagattccttaattatttctgaagtatgtgttttctttttttccttttgagataggtctctccctctctctctgtctctctctctccctccccctccccctctctccctctctccctctctccccctttctccctcttctccctctctctccctctcc

SEQ ID NO: 111797 - DNA, 1042 bp, Homo sapiens
tgaaatgtaagcatatttacatgtagatcttttaaaaaaggattctccatatacaccttcagcttgcctttttacagtattccttagcacttttcatgtcaatacatgaagataaatcttactgtatttaaacattgcatagtattccatggatacacctttacttaacacctctaagttgttttctttttactattataaactgtacagtaattaacaatatccttgtaaacatgtcttagaacacattggtatatatttctttagaatagatctctggtaatgaaatttttgagtcaatattatgtatgttagatattgccaaattgccctccagggaaagttctaccgtttatattcataacaggaatgttattttttctggccactgatggcaaaataattaatttaaaaattaatacttatttttaatatgtttattagctacatttatattttttgtgagttacctatttgtgtcctttgcccattttctagatttttttgtcttcctttttgatgtataggaactctttctatattctggaggttaatctattatcctataggttatagatagttcctttcaatctgtgctttttttgaactttatttattctgcaaaaatttgtatttttaccatgattatatttgacagtcacttttcattatagcttctaggtatagggtcttgctttaggaaagcctttgtcatacacatattataaaaatagaaaattgttttagaaaaaatattttttatttgtggtaggtgttgatcctattatctgggaacaggccaaggtagataaccctgattctgaaaagtaagtatgtcttcatcttgtttcatttaagaactaatatttgctactaggaaagcaaacatgggagctattaattataattcttacatatgagacaagtttattttcattttcctggcctttaaaaaatattgattattgtccagctaaagcttcagccaaaacaaaaagaaaaaaataagaaaaaaaaagattatggtaaggcagcatagcat

SEQ ID NO: 111798 - DNA, 1411 bp, Homo sapiens
ttgcagtcacttttataatgacatgcagatggttcagaaacaaccaacaataatgaatatcaaaattttttaggggagaaagctgtttagttactctctcaaagaggaaatgttaatcttactctataggttaatgttattcctgggtaaaatagtttttctttataattttgtgacctcctagggcacaaaatggtgggaagaatcattattcccttaattaccagacattaagttgtttttcccattttagcagatattaagctattaatattaaacacctgatttaagatctgtacatattttttatattgtttattttgtcattccacaggcagtaggttatagttgcatgcccagtaataaagatgaagatgggctagtggttttagttttcaacaaaaaagaaacagagattcgaagccaacaacaacagttggtagaatcattgcataaagttttgggaggaaaccagacccttactgtaaatgtagagggcactaaaacattgccagatgatcagtaagtatacataaatatactgtttatttctgtgtatttatttctggtcctaagggagtgatcaataatgtttttgttgctaaagcacaaattaactctcagagcagaatgccttttctcagctagtgattattcagtattgataaaaacatttatttaaaagtttttttaaaattttggattttttaacttactagatgctaataattttctagattttcattcaggccaggaagggaccatttgtcatagatgcgtgcaaattgagggccataaagatgttattggaaaatgttattaactcattactgttcatgttcattcatgaataaatattattgctttacttcccttgacctaagtataattctcagtgttagtggcaagacatttattttaggatatttggaggaatgattattaatgagatgcaataattgaacagattttacttgtggttgtaattgcagagaagcagcccataaatttcaacagaatttcctatagtaaataacatttacataggattttgcaactaagcaaacccttttataaatattatcttattggccgggcacggtggctcacgcctgtaatcccagcactttgggaggccgagacgggcggatcatgaggtcaggagatcgaggccatcctggctgacacggtgaaaccctgtctctactaaaaatacaaaaaaaatcagccgggcgtggtggcaggtgcctgtagtcccagctacgagggaggctgaggcaggagagtggcatgaacccaggaggcggagcttgcagtgagccaagattgagccactgaactccagcctgagggacagagagagactccgtctcaaaaaaaaaaacaaatactatcttatttacctggttct

SEQ ID NO: 111799 - DNA, 1173 bp, Homo sapiens
tgcattcagcttttctgccccaactaacacaggcactactggtaagaggccatcttaagtcattcatagaagtaaatgaagtagaggtcagatttttttttttttttaacttacgaagttccaatttttcattcaaaggactctttggtggtactcagaacaaaggttttggatttggtactggttttggcacaacaacgggaactagtactggtttaggtactggtttgggaactggactgggatttggaggatttaatacacagcagcagcagcaaactagtaagtatgaggttttcagcttcaaatacaaaaccgtgatgatactagctgacattattgagtgcattcagaatactttagtggactttttataagaattattaatatattccaaaggattaggaatgttacttttcatgtttaaatatgatagcaactggggagaacactgattggcacagttaggattataaggtccctgtgtttaggatcattccatttaaatttttgttgttaaaaataacaaatagagaaactgcacaaaagtacagcttaatgaattatatataagtttacaaaggttaacacccttgtaatcactgcccatgtcaggagatggttcctggccagccagttcagaagcctaccacatttccctaccaattgcttccccatcagaggacctgcagtcttggcttttatggtgatcattttcttactttatattttgtcattcaagtatgtaaacagtatttggttttgcctgtcttaaatctccataggctcctcttttatctctcttttttatttattttttattttttgagacggagtcttgctctgtcgcccaggctggagtgcagtggcacgacctcggctcactgcaacctccgcctcccaggttcaagcgatacttctgcctcagcctcctgagtagctgggactacaggcgcacaccaccacgcccagctaatttttgtatttttagtagagacggagttttaccatattggccaggctggtctggaactcctgacctcgtgatctgcctgcctcggcctcccaaagtgctgggattacaggtgtgcgccaccgcgcctggcctctcttttttattttttaatttgttgaagaaaacagatcatttatcctatagagttttttagtcaa

SEQ ID NO: 111800 - DNA, 1051 bp, Homo sapiens
tgttaacctttgtaaacttatatataattcattaagctgtacttttgtgcagtttctctatttgttatttttaacaacaaaaatttaaatggaatgatcctaaacacagggaccttataatcctaactgtgccaatcagtgttctccccagttgctatcatatttaaacatgaaaagtaacattcctaatcctttggaatatattaataattcttataaaaagtccactaaagtattctgaatgcactcaataatgtcagctagtatcatcacggttttgtatttgaagctgaaaacctcatacttactagtttgctgctgctgctgtgtattaaatcctccaaatcccagtccagttcccaaaccagtacctaaaccagtactagttcccgttgttgtgccaaaaccagtaccaaatccaaaacctttgttctgagtaccaccaaagagtcctttgaatgaaaaattggaacttcgtaagttaaaaaaaaaaaaaaatctgacctctacttcatttacttctatgaatgacttaagatggcctcttaccagtagtgcctgtgttagttggggcagaaaagctgaatgcagaacctgcagttgtagatgttgtcccaaatcctccaaacccacctaattaaaaaagaacaaaaatagaaaggaagaatcttttgtatatataaaggcaacttctttttaaaattattttataattgctacatataaaatcaaaatatattgatctaatttttcctttccctactttcaagatcaattttttaaaaaactatactaccaatcaagaagtcaaaatgttacaagaaatgaactaagcatttaaaatagaaatatcacaatgtaatatatacccttcaattaaaggggtggttaacagttacagctgagaaaacacattaagcctattgccataattctaaaatgactatgtatgtacttttagaggaggtgttgcaaattcatatgcctagaagatttagactgataacagtaaagagtaaagtagactatgtgtttactgataggtggaact

SEQ ID NO: 111801 - DNA, 1033 bp, Homo sapiens
ttgctctgtcgcccaggctggagtgcagtcgtgcaatcacggctcactgcagtctcgacctcttggactcaagttattatcctacctcagcctccctagtggctgggactacaggtgtgcaccaccacacctggataatttttgtatattttgttgagacaaggttttgccatgttgcccaggctggtcttgaactcctgggctcaagcagtctgcccacctcagcctcccaaagtgctgaggcttttgtttctagggatatttatctatggtactatctagggtactaaagttattagttctaaaattcagattacctttaaaacctttctcatcccaatattgcaacttatttttgaaatcagcaaatctagatcagtcttaaaatatctggctcagtgttacaaatgtcatgtatcaaggacacttgatccctaagatacatacttcctaggaatcctaactctgcagctggtttatgtcacagggaagctccttgtacctatttcttcttactcaaggtagttagagacacctggaactttgtaacatgccaagcctagttatttcaaatcagggagtaagaaaaatccagaaaaaaaaatttaaaacaataaggtatgttaaaacatatatccattagcaataagaaaatagtataggatgagtggtatagaatacaaagtataaaaagatgtatacacattcagcacaagataaagatctcatttccaataactatattttttcatttagtcaagtttttaaacacctttattgaggtataatttacataccataaaagtcacccattttaaatgtacaatgatttttagtaaatttactgagttgtgcagttttagaacatttccataacctcaataaaattcctcatgccagtttatagccactcagcgttgccaaccctagcccctggcaaaccactaatcatctgtcggtctttatagatttgccttctcgagacattttatataatcatacagtatgtggtatttggatcctggcttctttc

SEQ ID NO: 111802 - DNA, 1188 bp, Homo sapiens
tcaatctcctgaccctgcgatctgcccacctcagcctcccaaagtgctgggattacaggcgtaagccaccgggcctggcctgttttatgattcttaatagttacttggtttaaatcacatttgatactatccttctgaaaagtctgagacagatctacaaactacagtcaaaattatagattaagaggaatgaatgcacctatttggctttaagttgaagatgaattatttctcatgctcattttcttgcggcagttatcttagaaagacccccaaaggctttgtgattgtaagcactgtcatgatcacagaatgcaagcttctggtaccatgatcctcaacttagagaggaagaaaccaagacagagagcttaactcacttctctcagggaaaattaggagttgagcacaggacaggaaatgggctttgccacttttagctccaggcttttctaaccagacttgatttcctcatgttctagaaagatcactaatggtcaagtggaacaagcactacacgactaacccctattggggtttttaacttaagggaggctaatttttaatttaaactgctcgagatatgagttctgcaaaaggtggtccgcatccttggccctctggacattatcactaaattgcttgtgcctgttaacaagaatactgaccagaatgctcttcatgtagcttatacagttggttcacttcatgcggttcttgacatgtttatttctacccttaatgcaatgaaatgtttcattaataaaaaaccactttatataaaattgctctagaagtcatatgtcattggatgtcctgttgtttatggagtttccctggaaagatgttccttgacagatgcagccctgagtcacacacttgggccatgtctgatttcagcttcgctgtagtggacagttacaatcagcctgacaagtttcactccaagcagtcccacattctgcttttctgtcttaagtctttctcaagagccctcaaagcaccataggagtatcagggagttaataacccaaggcaaccctcaactaaatggggcaggagtcagtcagctgatagatgtttcaatcctcagaggaccagttctcaggcttattccacatgggtcctcaattagggttgcccacagtggtaactactttctatcagtgtttctttattccctgtctt

SEQ ID NO: 111803 - DNA, 2241 bp, Homo sapiens
aagttgaatagagtctaagttttataatccagatcaacacagagaagggtactgctctggtattgagggtgggagtggtcagagaaggcctcctggaaaggttaggcctgctgaatcttcaagaacaagcagcagcccaagaggggaggtgagtgagatgagccaccttcctataggtctctcctccttccatgcccccactccccacccaaacttttcacactggggagaagtttctgacatgaacatctaacttgttttctctcttctgtgtttcagggaacagcggatgaaagagcacccctcattcgaacctaaacattgcctttgcttggtgaagaaactgtgtgagctgtcctgacctggacgatgacgtggggaaaccctccacctccttgcaggcttgttgcctgttgaaagaaggaaaaagacacggcgctggcaagtgataggaacattctggccagaggttaaagagcaggctgacatggctggccattaagctttataaaatcatgtgggctctgaaattgttcttttatgtgtctagcaagtatttaataaacccttgtatagtaattttgttgttgttgggtgctggtagctccagaattttgtgaccactattgtgggtaaaatgtctctgcatcacttgttaatgctactggtctaacttcattcagtatgcttcattcaccgaactttgtgctcaaaatgcgtatataccattttatgttgtattcctccatttcacttgcaaaacagaagtaaataagagttcgggacccagggtaaaatggtagcttcatccaatatatcattcaaatgcatctgatttctaaaacatattacattttatgctgatcttcagttcataattcttccaggaaaactcagtcttccaactgcaataaaatactgggtagaatcaaatgggaaaggggttgggtggggcaatacccatgagttgatagtgataagctcctaaggatttttaacttgtacttttgtgaacgaagagaatgcataaataatgttggtgaggataaagtacagatatttcatgtagaattaattgctagttatgatgcttgtggatagttaactgttttttttttagtcaaaatgatcatgctacgaaaagatgcttctgagagaatgtaatgagtaactgatttttcttcctgagtcgcccttgccaaatatgttactgtattaattaatctaatattgagtgattatttgtaaaattatgaatatgggaaatccatctatctacagcctaagttacacataagtttcagaaagtctgattagactaaagagatatttcttctgggacagccgccttcttggtaattttgaagttctttttacaagttccttcctcagtttcagttctttccagtgttttgtagctcactgtcactcactgaatagagaaacgtgtgccctatacttcctgtgacaatcattttgctgacagaatgatggatgtttaaaatattgcacaaagtactttaaagaaaggtctgttaggaccagaagcagagacaccacttttcaaaggacttcttggtttcagcataacctaagacagggaattgggagccatcatatgtcacagtgttcagaattcaagcatatttaagggcattttctttgattctcaaagttcagcattcattttgaattgagaagcctatacatttagctgacaaagtgcttatagaatttcttaacaactgaaccattcaaaaggattttttttgtttaaaactggatttcaatgtaagcaaatgaagaaaaaaatatagatttcatttccatagcttcttatccctgtattgaggtaataaattgttttactgacaatttttcctttttctacactaaaacaatatgtgatatatttcccctcttgaagaggcaattcattaaactctcaaattttctatagaatcaagatagaacctttagatactccaactcaccaaaatgtaaaaaaactaacaaaaatatttggtcttcaataatgctaaatatctacatttttagaatttatcaacatttaactagataattgggcatgtcttaattatgcatgtacttatccatactaataaaattgacaatgctagtgcatacttattggtttagtcctattatcaggatataatcatctgtgaggaggatattttaaatactgtaaatgataacagttaatgatatacacattta

SEQ ID NO: 111804 - DNA, 1060 bp, Homo sapiens
atgacaagtgctgcagctgtgccccatggctacgctaggcgggccctatactaggatgccactctctggcagtgaccaccaccctcttcttagctctctggacaactgcctggaaatccagacctgacaggctatcttttaggcctccttcctgttggatcccttctaaggctgtgctattcagagtggcagcatcctgggagcttgttagaaatggccagtctactgaatcagagcctgcattttaacaggattcccaaggacctacattcatactcatgtttgagacacactggtctatcagccacctaatacaacccatggttctcattctgttctggggatcacttttacttgtttccactctgcctgtcacacatggtaatggtcaccttgtttatgaggactacacagaaatggtgctctattgaaaaagttgtttgcagtttaataaatcctaatgtttccttttcacttctctgatttgcagttgactggaataatcctaaaagcagccaagaggttccaaatcaacatttatgtcaaaaaattagatgactttgtgtaagttttgcttctttctatggaggggacagcagttttgctccattgcccgtctggtggggttgatgtcaggaggagtacagcctacttcatctaagcctgctcacccctgcccttcagggatggggcatgatcagcattttcatgggtgccttggtcttggaatttacttgttttatttaatcatacacttacagagtacttcccatggatcaggtattgttctcagcaccttatgtggattcacatataaccttgtattatccccattttacagatgaggaaacagaagcagagtgtttaggtaacttggctaagccttactatctagtcaacttttatccactccactaagcctttccctcatgcaccttgactctcttggtgtattagactgttcttgtgttgctataaagaaatacctggctgggtacagtggctcatgcctgtaatccagcactttgggaggccaaggtgggtggatcacaaggtcagg

SEQ ID NO: 111805 - DNA, 1107 bp, Homo sapiens
tggagggggggattgagtatcaaagtgtgtattccaataaagtatctgtccaatgtgacacttttcaagtgcctaagaccctacgaggccacggccatcgctgcctgttctaccttagctttggctctgccgtgccctggcttccctggctttgccggtggcccgtccacactggcatatgtccatgcaggtctagagaggcctcttatttcttttttatgtgagtctccattctaaatgttatcatcttaattttgtaccacatattgttttttcttgtttggatgatatcaccgttgctacaataaacaccttccactacaattcatcttctgctttattacacgttgagttgacagaatgccttccaaacattcctttctacttaccctgtgagcttttggccatgttgtacctgagaactgttgctaacttgcggatttcgggcagattacactgaccagagtccacattcactttttattcttacatcctaacaggtcagtgtatattactttcagtgactatgagagtgtacagggactgcctgcctttcggtataaagttcctgcagaaatattagccaatacgtcagacaatgccggcttctgtatacctgagggaaactgcctgggctcaggagttctgaatgtcagcatctgcaagaatggtaagaactcagagaggggacatgataggggtgtcaagaatgcagaaggattggagttcaacaaagaatatgtagctgggcgtagtggcgcacacctacagtcccagctactaaggatgctgaggtgggatgatcacttgagcccaggagttctcaagtccatcctgggcaacatggcgagaccactgtctctaaaaaacaaaacaaacaaaaaagaatatattgtcagcccaatagaaagatcagtttctttcaagaacaatgtttcataacatggctattgaatggtaaaaaaaaatcatggcttttctgtgatgctttttatttctagaatgccatgttgtgtttttttttctggacagtggtttagaagtcttaacagtaataatagctcatgtttactaagcacctgatgtatgccagtcactgtcctaagt

SEQ ID NO: 111806 - DNA, 1020 bp, Homo sapiens
tcttgtaattattattctacaaatcaagatggtggtaaaacatcttacagattaaatattagtgatttgtagatttatcatggccaggcatgaattacaggccagtgaaaagtcccactcttgcttagtagtcattgagtgatgtgtagtagctacagcacaaatacttttcaaaccaccacatgttttgggctatttggccattgcctctatgaaagctgatttgggccagggacctactttttctcccccttgatctaattaaaactgttgtgtctgtgtatgaataagatactgtggatagacagctccagttaaatcttgcaaagtcctgaccatttaagagaatctaaactcaaatgtgatcatctttactctttcttgtgcttatcaattataggtcacttgactggtggataacagacaagtgcaatatgattaatggaacagatggagattcttttcacccactaataaccaaagatgaggtcctttatgtcttcccatctgacttttgcaggtaaaagctttaaagataagttctttttcaaaaataaggtctttcactgcaagaccaccaaaagcatgaggaatatatgcagacacacttattatgcatggatatttatgcataatcagtgataaatgctgatggcacatcgagacagtatagtgtactggttcacagcacagacttctgactgttggtttgaatcttggctctaccacttatagctgtgtgaccttgggcaaattacttaaccactctgtacctcactttccttatttgtaaaacaaagatagaaattgttaactatgttagaggttgttatgaggacaaatgagttagtattagtcaaatacttagcccagggcccatcacacagtaaccaatattaagtgttggctcttagttactatgatatgctctgtcaagcatcaactgacctggtctacttccagtcaataggtagtctctacatggaagccaaataaaagatactgttgtccatatttcag

SEQ ID NO: 111807 - DNA, 1135 bp, Homo sapiens
taaacattctaattcacctacaccaacccctgccgactctcccaccctaacccctaggtgaccgctccatatgcagctggacactgatgatggacccaggacctagacagtatgaggtccctgccacctagtcccaggggtgtaggtcgggtttataatgagcctctggccctgcttaggcggaaggtagcgccaccttgtggccaaagatgcccacatgtttacaagagcttttccccttttgtggtgtctggataactcagagcctgcaaatggtctctttgtaaatattacacttacaaaatgcagtactgggaaaggacagagaagaggctttgtcttccatatgcagccagaaaggagctcactgcctgatttttcagctatttaatctcaacctttacatttatatttccaaccccctttgctatggggtagtaggagagagtggatggaggtgctttggaggggatgctgctgtcttaatatacctctgctccgcagactgtcatagagtggtcccaggtgcacttcctcagggagatcatcgaggccatgttgaaagcctatcagcagaagctctttgtgactcacacagttgacgaattgctctggggctacaaagatgaaatcttgtcccttatccatgttttcaggcccgatatctctccctattttggcctattctatgaggtaagtagatttttcttttcagaacctctttttttagctgacagtgggttggggcaccccaagccagattaactttgagtttcttctagaaattgcctagagttaagttatcttatagagtgtgtgaaaaatggagtgttttttggaaagaaaaaaaacttgaggccgggtgcggtggctaatgcctgtaattccaggactttgggagaccgaggtgggtggatcatttgaggttaagactttgagaccagcctggccaacatggcaaaactctatctctactaaaaatacaaaaattagccagctgtggtgatgtacacctgtaatctcacctactcaggagactgaggcaggtaagttgcatgaacccaggaggcagaggttgcagtgagctgaaattacaccactgtactccagccagggtgacagagcaagactctgt

SEQ ID NO: 111808 - DNA, 1095 bp, Homo sapiens
ccaccgaatgccagcctgggcgaccgagcaagactttgtctcaaacaacaacaacaacaacaacaacagacaaacaaaaacccttttgctgggcacttctccttgctgctgccacgtgaaaaaggacgtgtttgtgtccccttctgccatgactgtaagtttcctgaggcctccccagccatgctgagctgtgagtcaattaaacctctttcctttataaatgactcagtctcaggtatgtccttattagcagcatgagaacagactaataaatatgtgcatccattatgacagtgactaattgcattttaataattggcttaggtatctgtctttcttcccaatgtactggaagctccatggggtgcagtgaccaagtcctttggtctctgactgtctactatttaatgaatatttgtggaatatgtaaattaaacatcttcaactgtggtttaaattcataggacacatggaaaaactaacactataggacacaattattaaaaagtatttaaaagtaatgacaaaaaacgcagttactttgcacccacctaatagccggaaccataggacttagttcaggaaacccaaatataggttcaagaaaggggaatcaggccctgaaaatgaatggctttgttaggaatatgcatatgtgcagtgcaggctgctaagagctccttacagggctgagtgggtcgtgagatctgggatttgtagaaaaacatggctttttagggagctgtccaaaccttctatggggcctgttagtctctacatgtgccttttgcggtcattcactggatttgatttctgtcacttgtggctttatgatgctattgtttaggctggataagacagaacattccagaagcttctgctccagtgttttctcccaactgagtcagctgactccatcaattgtatgccagggggcctggggcaaaggaaggggagggcatgtagcccctttcgccagttagtacagattggtgtggtggtgggaaacctctgagatggggaagggccaagcaagactgtggagggcctaactcatctgacacaggatttacagtggcacatttcccaaacctt

SEQ ID NO: 111809 - DNA, 1075 bp, Homo sapiens
ccagcttctcttgaaacatgtggatgttctttggtactcgtcataccaagttctgtgtggtagctgtctcggcagaaaagaggctgacccttagaagagacctgccttccctgtttcccactgtcttagtccattcaggctgctgtcacaaaatagcatagactgggtggcttataaacaacagaaatttatttcttacagttctggaggctaggaagtccaagatcaaggccccggcagatttggggtatggtgagggtccactgcctcatagattatggtcttctcactctaacctcacatggcaaatgagctctctggggtaccttttatgagaactaatcccattcgagagggttctacgctcgtgacctaatcacctccaaaggccccacctcctaatctcaccaccttgggggtaaggatatcaacaaaggagttttgaggggacataaacattcagaccacagcacccaccgtcctttgcgcccttattggctcccaaggcccagtgaaggtatccgttgttgtgcatgtgctgttgtgtttcttagagtagagaaatgtttctctatatctgacactccttaccaaaagaaggaaaatgaaagatagcttgagaggatcatgtgtttaacagaaatgggggagggcatgtttctctgtagaaatgaatattgctgctggggtttgacatgcaaacaaatgtacaaacccatggcctgtgtcactcatttgccctagccatctggccccttcagcatctgaattttacacactttccagagacagtgtgaggcagagtgccattgttacactaatgtaatcactcatcacaagtcccattttttaaaattcattttttaattgacaagtcaaaattgtacatatttagggcatgcaacatgatgttttgagagagatatacatatagatatacatagtgaaatggctaaatcaagctgtttaacatacaccttacctcaattacttatctttgttttgtggtaagaacacaaaatctaatctcagcatttttcaaatatacaatattttggggttttattttatttta

SEQ ID NO: 111810 - DNA, 1618 bp, Homo sapiens
aggcacagatgcatttagataccctacaagaatctgaacttgtctcttcctctagatgattgggctggagagccagtcctttaagaagacttcatcttttgatttcactggtcatttcatctgccctttcccccacatccaccaagctgtgtcaaaagaggaacaaaagagaattactgggatcattttttccttaaaaaagaaaaataatcactggagcagcagcctttcttgttagcatccataactgcacgcttcatttctcccactggtctgcacttgctgcggccagataaaaaagcccaggcctagtctactttgaatcactgcactctccagtcagtaaagctattttattccaggtggcaatggatatcttcctttaactgagtttccaaaagtaattaagtgagtacctgaaatctggcagttaaaggcagtttttcaaaaagcaccatggcaaagcataatgtaatttttaaagttcacattgccaagggaagacaaggcccactgtctgagcgtctcgagggtcagtttcctttgagcaatcatgttcaaggaaaaaagaaactgaatcctttctccactcctgtccatgtccaaatccatggtgagctgtgtttgaggatgtaaactcttgctttgggtgactagagtaaagcaatccaattatagtaaatatgtgagttttcttatatggccttgaaaggctgtttcaaggagccctataggatgagtgatcttccccgtggttcccatatagccagcccttagattctctgtgtgtctccatttctctgggtgagggggtggctgtaaggcaacttggctggggcctgagtttgtgttgatatttccaagtgtttttctccatgaggaatggactctgttctgataagtaatagtacagggaagtggactttcagagctgctcaatcccagctaaggaggactgcacggtgtattgtatgaaactaaaggacagggctagtttcagtgggcaggtgtggaaatactgttgtcattagaggtaagtcacacatcgctattctgctttttcctggattacctgtagggtggtaggtagcatgggacagtgggaaagattgaggatgttacactcctgggcatgaaacctagcttccactatgtcccagctcggtgaccgtgggctgtttaatcttacttgattcatgttttccccatctgtaaatagggataataaggactaacgatcacatctgctttgtcaaataattcttataaccttaaggtgtgatctttctgggatatagttagtgcttaataggtgatagcaactttatttttattagaagccacacaaagaaaatacgtgagatttggagtcagattccatatgttcaaatcctatccttgccagtataagctttatgacttacgtcaaataacttacttggtcctcaatttcattgcttgtaaaactggggatatgagctgttagctaacttgggcacagtgatgcatttaccatgaaactcgcaaagttaagctttgggtctctcacttgcacagacccttgcgaagccctgtacctcattctatatcccaaattttcttttttcttaagaaggac

SEQ ID NO: 111811 - DNA, 1378 bp, Homo sapiens
cccgctaacttgcgagcgcctctagagcaggggaatgtcccagccaccttgaatccccagcgcgtggcccatgggaggccctcagacctatctgcggaatgagtaaatgagtgtgtgaaccaggttcggcaatttcggtggggcgagcgctgggcctgcggtgcagggcgctgggagcggccaggccgggcctggctcaggcgccgcagccactcagggccaccggggaccggccggggagggcgcgggccgaatcactgccgccgccgcagggcacatgactgcggcctccgcccccgcccgcctccccgcgcagtcgccggcggttgcctcgcggggttgcggcgagcccggcccgcgaacgtcacgtccctgcgcgctccctgcactctcccgagctgcgctaggcgggcgccacggctgcccggcgaaggaaaccgaaaccgagtccgggcccgtccctccgcggccccatccgcccggtgcacccggggccgcgctcgccaggccgcggagcccagagctgcgcgcacgaaccgtgcgccgggagggcgtgggcgtggcgccgaagggtcccgggtcttcgacgcctctgcggcggctcctccctccttgcagttggatccctggcgggtgcggcccggcccggcccgtgagcggcgcacagaatgggccgatgctgcttctacacggcggggacgttgtccctgctcctgctggtgaccagcgtcacgctgctggtggcccgggtcttccagaaggctgtagaccagagtatcgagaaggtgaggcggggcgggctgtgtgtgtgttgtggagtcgtccagctcaccctcccatccctgctgctacatcttgtatgggaaagaccagcactcaggcagaccctccgcgctagagctcttcttgcgtccctgtcttccagggcttggtaggcgagggttaaagaaggatgaggaaggatggagccgactctgttccctttacagtgataagtaaggctatggatcctgacttttaaaaaggccttcggttgtgttctgtcgtttgcatctctccccactccttccgtctacaccccaatctcaggtgggcccaaacttgtttccttcccacttcatgaagaaacagaactgaatgaaagacaccgcagaagaggcaggttatgttgtctgcttgctgtagcctttgaagtggtgtgcgcctggggatgagacgtgggtgtgcggtctattgtgttcttgccctcttgggctgggcaggggcagttggtagctgggccagtcctttaggctgggtgacaattcatccatcagtctttgctgaacgctgacttagtggctttgtatcttgtaccaacagtctgtgttgctttgtc

SEQ ID NO: 111812 - DNA, 1054 bp, Homo sapiens
taaaaataaaagaaaaagaaaaaatctttaatacatctcagatgtcaatatttattctggatattttaaaaggcttttctttatagtgttttttacagctgtttatatcaactcagctgctacttcaatggttttccctttcactctctatttatctttttgattgattaatataaatgtttttactctaaaaagtgaaaggtaaaagcagacctatagcagctgagtcagtactgacaactacaaaacaaatgttcctgcagggggctggaggaacttcttatacttaatagacagatggaaagataagacttggctcgtttctttttctttctttttttaatttggtctcatgtcaagtttgatgttatgaaatgattatccagaagttttttttttttaagtgaaagcagacaaaagagaaaatcttaatttaagcttttaaagcatatatacaaattattttctttgctcaaggatagaaatggtttatgccaggctaggagtagaaaacatttattttaatcatatgattaattcaaattggaaatgttcttgttaaatttatagctcaaaagacaggtggagaataaattgtttcagctttattaatactgttcttgtggaataaagtattagaattgaaaggaacatgagagatcgtctagaatactctttccaattacagatgaaaaaaatggaaacacagggaagttatgtaacagaaactagacaagaacctaaggtgtttggctcttcgcctgatcatattgcccctcggatcatgttcatgtacccattccttgccaggcaaacataattgtgtaacagtaaagtttgtgtttcttccccttactgtatttactaagtgtgtactgatttagtctttcctgataataacaaaagtgaagagattttatcaattgatattgttcattcatttttcttaggaagtaacctgtgttacagagcttgaatttttatgggactttttcatttcttttcctgtatatgccccaaaaggagcacaagaagtacttttttgtttttttaa

SEQ ID NO: 111813 - DNA, 1031 bp, Homo sapiens
gaaaaacctagcgttaaaaactcccaaagcattctcactgtacaattctacacaattataattaataggattcaaactacacatcagagattatgttaccattttacccagtttgatggccacggatgcttctttcctttactggttatgttcaaagagatttgggcctgttataatcaaatgtaggaaaaaacatccctattcttcctggattctatggaggtagcaggaataagagaataaaagaaaagccaattttaaactcccaaatgaaccgcagctgctccaggccctttccaatccccgcccccctgctgctgttgacctgttaatagattcctgctctttagcttaactcaactttcacagggagctggacctaaaaccagttttgaacagtttttgaaggtacacagagctcctgtccaaatacaggatgcaggtttatggtaggtaaaattcacatatcattattcctctataatttgtctccaataaattcaagaacattcacttccaacgttgtactttctgcctggtaaaaatgcttccatcaaacaaacaaacaaactacaaagagggtcacagaacttccaaagtatgtgtgtgacaggataattgtatggcatttgatttatatctcaataaaactgttcttttcttaaaagtatatgtgtagttgggaagggggaaaaaataaaattattaaatgtagaattttcttgatttaaagctattatcactagaggaggggcaaaggggaattactgtttaatgagtgcagagtttcagtatgggaagatgaaaaagttccggaaccagatagtggtgatggttgcacaacaatgtactcaacgctactgaaaaagtaatattatcatttaacaaaaccattactctaacaagattacatgttcattgtagagacttcagaaaaagatacaaaagaggaaaatatgaatcacttaaaatcccactacaaagacacaatcagttttaatacttttatatacatattctcccaaattttg

SEQ ID NO: 111814 - DNA, 1050 bp, Homo sapiens
ctggaggcagcagcaattttttagaataatttgaaaaccctttgttttgaaggatttggttacctaattaggttagagaagcttgtgtgctttgtacacaaggagagatgatctctatgcttttcctagactctcaaagccatttgtgttaattatatgacctccactaagcactcaaggtctggcctatgatatgttttctgtactcttccaaatgctcatacattcattattaagaaacttggcttcagagcatcagattactgcatttcttgtaaaccagcttagtggcaacaaaatccaattcatctctagacattgggttttcttagatgagctcttctatttttctgtcccttggttaaagaagagctgcaaataggtctgcagagctacttggttatcagttttacttactatcaaaagatctgactgtataacctttgttcttagatatttgctgtgtgtaatttattttattttttggttactaaaacattttcctttttcttaagcagaaatagcacatgactaagaattagaatatgcagtctctcctttcatctcttaatccctcacatataacctgatgcattaagataatgcttttgggaatgtgctatgggtttcaacaacatgtgtgactgctaatgagctgggataggcttggctatgatttctctaaggctggagttcctacgagtgtggagaaatacatattaaaggattaaagatataagagaatgttcatgaactatatcttaactagttcttgtttttaatttatttattttttgagacagagtctcactctgttgcccaggctggagtgcagcggcctcatctcggctcactgcaagctctgcctcctgggttcacgccattctcctgcctcagcctcccaagtagctgggactacaggtgcccaccaccacgcccggctaatttttaatatttttagtagagatggggtttcaccgtgttagccaggatggtctcgatcttctgacctcgtgatccaccccccactcggcctcccaaagtgctagg

SEQ ID NO: 111815 - DNA, 1034 bp, Homo sapiens
ccaagtcaggagtgacctgagagtttgcagatgactacaacaaggaagcatggcaggtaggaatctgatagcaggatgttccaactgggtgtgggtagaaaaaatgttctgaaatttgaatattggtgaaggacttaaaaaaaacttcaagtattaagggcctactctacttttcctttattaattaattcattcatgcaacatgtatttgttcttttggggacaccattatctactcatttggccatatctgcagatgctcccaaacatggtggagctggcttttgatggccagaatcccagattctgttataataatctcctttcaatgagttccccaaggacctattacccactagtatagtggagggctgttctgatcagtatgcagcctttccttgatcactgtcatcatattggccatcattgtttagttacactaatatagtatatggctttatgtttcttaggctgtagggagctgcctgttttagaattagatggaagaagttgtgataagctttgcctttggacagatctgggtttaaatcttagctctgctatttataacttcataacttcgggaaacttaatattgctgagtcttagtttcttatctacaaaatatttacctcataaatattggtgagaattaaataacatgtgtgtgtcaaactccaaacagatagtaggcacaaccagagatgttagttctctttcctttcccttgttttccttccttcacctttatgttaatgttgcttctgctattttatttctagcttctatcatgtccagggtctgggttctgatcagaagccttcctctagggatggttgaaattatcaagccaacttccagattggcatagagtcactctgattgtttactttagtgtgccatgttatgcttctcaaggtgttttataaaatgtttctaatcttactctttaatactgtgaggtatataagtgaggcattagtattcctaatttatggaagagaatataagatactgaaagtagctaacattta

SEQ ID NO: 111816 - DNA, 1044 bp, Homo sapiens
tctgaagaagttgagatttgtctttgtgctctgctattaacagcatcctaatgaagcactcaagctactcccatcttctctctgcttcctccatactgcgccccccagcccaatctccctaaaatctttccttcctgagaattgttcctccatatctgcctctttcctggatcctcatccaaacttgcctttgcatttcttactccctcagagccttgctaggagatgatttgctaatctttgacatggctaagaatagtaaatgtcctttgagaacaatacaatcttgcactaacatacaacgggaataataaagttactattcatattttaaagggcaattttgcaggttgtcaacatcttaccctaaaggagtgagttcccaatggtgtaatctcagtgacaaactgtataccgtgataggtgacaggaccttcaggtcatgggcagaaagtgatcttaataaaggctgaccttggccactgcagcctgcatgttctggggcatcctgaggtctccctgtgtgactgacacttcccctgaggactattcccagtgcagtcagtaggaaaccttagtggtcaatgatggtgggccagggaggtgagggacagaggatgtgtcagatatcctaatagtatatacagtttaaagactcatttcataattttgggagttgttttctagggatattgtgatcgttcaaatgtaaatatctgcatcttgaatatactggaaaaaagtgattggcatgttttaggggcagctctagcagtataacagtgtacgggtttgcccctttatggtttgtgggtaggaagagatttattctgaactagttttctctgctacccaactgcttatgaaatatgaacacaggctgggttcagtggctcaagcctgtaatcccagcgctttgggaggccaaagcaggtggatcacttgaggtcaggagttcgagaccagcctggtcaacacggttaaaccctgtctctactaaaaatacaaaagattagccaggtgtggtagcacacgcctgtagtc

SEQ ID NO: 111817 - DNA, 1207 bp, Homo sapiens
aatctgtgctaatcatcctcaagtgtgttttttcttccaatgattacagccagttggagttttccatttttttcagcagttagctaaagtgtctttataaaaacattttcctataataaaataacacattagtgacatttaatataaacataaaaattactgctttgatgaataaaagcaccagaaatggcattacccatcagatgaaatatgatcatcacacaagtctacagcaatcacttaaaaatatagtgtatatgcaagtgattttaaaatatggatccataggtaggtagacacaaagtgaatttataaatgttgaagttgttaaagagaaatgaacattggaaagctaaatagatattgaacatttttatatttcaaaaatctaccttcggttatgaattacaacctagagaatatataaatcaaaggtaatttcctgagttaagtgtaaatcattttttgtatggagagggataaataccctcatcttattccctaatcttagccctaatcattgtcttccataaaaaccccagtatcctaaaaaggtacagaaaggaagaggagagagctggttgaaaaacttcttaacaatacttaaaagtaaacaaagtcacaaaccccacgtttcatattaagagtgtagaaagcccttgttcaggtctgcagagtaccagggcactccaaatatgtaatttaacacattcattaataactatgataaatagatattttattccaagaacaatatcattagagagttagattggagggcaaggggattaagtatcttaagtttattgtttcccgagtgaccatttttaaaagcctccttccaggaactgtggaatgcctgccaggctccctgactgctgtctggtgagggtccctactggtgctgtggacagcacaatacacaatggggcacaagaaagccacgcagcctccccctcctagacacatgctgtgcacccccttggctctgcttggaaggttcagctctgcaaatggaaggttgcaaacatcagacaccttctttctgtttctgtctctctccccttcttctccccacagtgtccagccttggcccctgacttttcctggggttggggaggcctgtaggttcagaagctgagcagctgggtgaagacctcccttagctcaatgtgctctggccatagggagcagacaagcaagctga

SEQ ID NO: 111818 - DNA, 1979 bp, Homo sapiens
gtgagggcagagaacataacctattgataccagtgcctagtgtagcgcctggtgcatgcagatactcaaatatttgttgactgagtgagggagtgagggtgtgacatgaataaacaatagtaaggccatagaaatgccatcctagtctcaagagtcacagagatgtatgtaatcgcaggatgtcacttacataaaaactttaactttgaaaagttaaaaaacataaaattagaggtgaggacatcatgggacaattacagtgtttgaaccagtgtcaacaatttcatcccttgttaggcactcattcatagtttaattaataaatcacattgcattggaagtgtagctccaaaggaccctgatgtcagactaacacctgctatgtgacaattggggagggaacagggaaccattggaacgccatgaattccactaaatcagtgcaaatctggatttggtgcatttaacaaatggacattgagactcacagatttgttatggagtagagaaaggaagcctgaatcttgacaatgccagtatctaagggaacatttgggtgtattgaacataaacccactaagaccaactcaaataaaaagagatgaagatatcaagatatgaaggaagcttgtgaaatccaactataggaagccaggaacacctcaacattaacttagtggtgaaaagctcttagagtcagaaggcctgcatgtgagttccaaccttggcattgctgaatttgtgaccttggataagttacctcatatttctgaacctcatttacttgtctaaaaagaaggaataatcaaagtttctaccttgttgtgttgttgtgtagtttcagtgagataatacatataaagcacttggaacactgcctgacacgtaataggaactcagtaaccattaactcttattattatttagaaagtaggcagctattcactttctttttggattacatagttgttcatttcagctgactttgaacgtcagttccattgctctgtctgcagactggctttctgacagacatggtgccagggttaatttaatggcatggtgatgtcatcaaagctccaggtttgtctgtgttttcattctgccacccttagcatgatgattttcttccttacatttgttcctcatggttgcaaggtgtttgctgcagctccaggcatcacgtcctcacagagtcttgtccaaacaagggaaggagttctagttttgtgtatttcatcaagaatgagaaatactttttcaaaaatcctcctgcaaactctctttttttaggagtcagatctcattagttaggcttatgtcctatatccttgcctacactagtaactggcagggagtcagattaccaagaatagtatagaccaggcatggttaatcccttagggtgatgaaggagctgcctttctgagcacatcattatctgatcctgcaatggaatcaaaattatacttgtggagtaaaacaggggacagtaaccattgagtaaacaattatgagggcctgttttagataagcaagtttctaagccaggcaaatcagagtgtttctttgtaattttatctttttgtacatggagtctaagaggaggcagaactcttgcagttgttaatctgggataaggtaaacctgaagttctctgctccatggttgttttctgtgtactttacccctgcatgcacacacactgaatcctattgcaaagataaaagtgaggtcttttttttcaccttgctctctctgtctatatactgtcatgcaccccataataatttgggtcaatgatggaccccatgcatgacagtggttccataaactgataatggagcatacacagaagtgatatatagtacttgatattatccctgcagatcaagtaggggaaatgtttgatattcagtaatgtgctgggacattttcatatgaaaaaatagagagccaggtgtggtggcttgtgccta

SEQ ID NO: 111819 - DNA, 1003 bp, Homo sapiens
ccttctcacccaaatacccaatagtatgtttaaataatagcattgggattggaacccaggcagtctgggagctccaggcccctagtctcaaccaatatgctatcctttaataccaggcaaatggaagggagactccggaaaggaaaagcagatgacattttatcaaatcagtattggtatagaatgacatagatgttataatgcattgagctagaatggaaaattttatcctggagaacccttcttaatggtgtttttaaatctgtgtgccagtagagcccatactaatggagtgctagtcctcaatattctcccctaacacccattctcactctgctaataaactgtccctcaaaatcaaaatgaaagtgtcacgtatgtacactttccttttggaaagcattttggtatttttctacctgacagctaggaaaacagataattgattgatttgttgcctttattgtttttaagtgcctcttacttcgtgcatagaatttggggcatttcctgaggagtaataagccctcaggaggagaccttatcctccaaggtatagaaagtcctagcagacgttggtggccaggaagtgccctagactggaattatttttgttgttctaatctgaaaatgacaacatagaacacagccaacagcatgcagcattttattatggtgatgcagctttaattggtatgtagagggcatgcctgtgaaattagtccttagtgtattggccaatcagatcactttcaacgtttcccaatgtttagtttcatcttataattaagtaataatgatcatttcctggcagctaatgactagctagaggagttagaagcctcattaggtttataatttatcaaactctaagcttttcatcagtagtgttgcaaaaagagaaagcatcttcaaattccaaaatgattcaaaacaatctctaaccgtatttcatatatgtattcacttgttctttgaagggtgactttatttttaaactttt

SEQ ID NO: 111820 - DNA, 1250 bp, Homo sapiens
gagttcctaatggttggggtatttattaaataagtacagcctgatggagggacagccagacctaccattcaggttgtagaattctagaaatgtggaactcagggactcttccaaagaaattctgtcctgcctaaatcaggtctgaaaggcctctggagaaatggaacaacagcctatgtgtactcactctcttggtctttcattggagtcactcctgggaatccctcaaagatattttctgtccacacactcatgagttccttgaagcagagtaatcttaggtgctcagagaaactccgtagttccttcaccataggagccacttgagatgtgaggtcctctggatcatcagggttggcaaaagcacgcagcagaactccagggaaactgctggcatttggtttgtgctgtcagatcaatcctaggatttcaacatcagaaatacccattattgtcctctctgaaatctgtgggcattagccctggtgcctcatgtaaaagttagccttctggtttccaaaccaattctcttcgtggtagactcttcatgaccaagaattgggacttcccagctctcatgttaccaagtccagttctccaagatggttcctgggaatgcttcttcacgtctgagtaccttgtcctgagcatgtttcataaatgggtaaaatgtgtgattgatgtctcttttattttattgaaagcttgttttcttctgtagcagttctgaaatttcaagatgttcttcattactttgttttaattgccatgtgacaaatatttcaagaaacacccagctattttaaaatttttgacagacttcatgatggaaagacatacacacagccctacttgtttaataaatactccaaccattaggaactctaagggaaagaagttggtaattatttaatgaaccttctgtgtagtcactttcacataaagtatagctaaggactcagaagcagccttttacttcagccctgaaattactactattagtaatttaaaatcacttttcctaatgtgcctagcagtctcatttacctataccacaggtcctcaaataacattgttttgttcaacactgtttcactataaattgatgaggaaaaaaaattgatttccagctggggtcactatctgtgtagaatttgcactttcttcccatgtctgtgtgggttttccccagggactctgttttcccccacatcccagggatatgcatgttagatgagttggcgtgtcta

SEQ ID NO: 111821 - DNA, 1113 bp, Homo sapiens
gccctcctctcccatgccaatctcattgctggcctgttgtggatatggtggtaagcaagggcggctgcctggctctgatgcttcccagacttgggacccaaaactcaagaagacaacgaaacatgtaagtgagggcttcatgggcctgtgtttcctattagccagtattcctgggtaaagttttctggggagaaggggcaaatgtgaagacaccactacagcgttactcttccttcccccgttaagtaaatgggaagttcttacttggcacacaagaataaaatgaatgttgactgcctcttccagtcacctttgggctgattttaggttagacgacgttttccctaaaggaatcttatttctgcaaacttcttttttaaaactcaaaataatgtctgcttgttcacttttatgttagaaagttataatacgagagtaattatggttactcttgtaaccataattttgcttatacattggttttgctattttcctttctgaatggtgtttattttagattttagctcctctcttgtgttatgttgctaacatttttgtcagctgccagattattacaagcagataaagggggagttttcttctaaagagacccccatagttcacgctcaaagaatttgttttgtataccctgtgagggggtgagggaaataattcattggtgtctttgtgtgtgtgtctacgtgtgtcgttagctgtaatctgcaaagatttctgcatctttaagcataaagatcgctttctcattttgtaacatgatttcttttcaaacttgtcatgtaattgaatccagctttgagtgacactttaaaatatgctctcccgcgtcagaagtgcttctttaagccaggtgctcttcacgctcacctgctggcgtgtttgattagcagccagccacagccaggtgccaaatccattctaaatatgggagcctgtgcttgagaagactagtcatactaattattcagacctcctccttggaagtaatgtggcaaaatcacagaagcagaaaagccagaaacagtatgagacttgctattgagggaccataaaatcagaattttgcctcataatattgttttgttcttgggtaca

SEQ ID NO: 111822 - DNA, 1034 bp, Homo sapiens
caaaattttttaagacaaatgaactttaaataaaggccactaattatagcagagaatgtgttggataagagtaggtatatgtaattatatagtaattatgctgaaaatgtaatcacatgccaccggctagctagttaaccattttgctgggggatgaatccacccccagcaaccatctccttctgatctcagagacccacattgactttgttagaatgtgtgatatggtttcttcttagaagggtgaccttttcctggccaattaaaaggtgctgctttgaggatattggaacccatactcaaagggataaaaggaaattgaaacttctattaaaaggagctaatgatgcctggagcagtggggattaaaaaagaacaaagtcagtcttaaaaagatcccccaaatcaaagagctgcttctctcatcaaataccagaagaaagcaaaatgatttttaatgaaaagtggggcaatggattcagccttttccctggatcctagggcttcaatcaaaaccagtgagtagttttaagcaaaattctttgaacatttgggataattatgctacataaatttgacatggtgttgtaaaaggtaaactagcttttcttccaaattagagaaataataaagacaaatatcagaaggataactctaaaaaatcatacagataagagtgctttataactgattccccatctgatacaaaataattcctgggttaaaatctagcattttgatgataaaagtataggaaatcactgtcaaaattgtcctgtggtggacaattgttaggtgattgctgtgattgtaattagcacaaccttggtaggttgtacattccttaatacactttcttatcaccatctgcattagtctacttgggcagccataacaaaataccacagaccatgtggcttaagcaacagaaatgtatttttgacagctctggtggctgtaaagtccaagatcaaggtgcttgcagaattcaatttctggtgagggcattcttcctggctcgcaggtggcttcct

SEQ ID NO: 111823 - DNA, 1064 bp, Homo sapiens
agctgggactacaggcgcccaccaccacgcccggctaattttttgtattttagtagacacggggtttcactgtgttagccaggttggtcttgatctcctgacctcacgatctgcccgcctcggcctcccaaagtactgggattacaggcgtaagccactgtacctggcccgacctataccttttacaagtgaatttacaaagtggattttcttctctgaaattttgctcggggaccaaaatttaaataaataccataagtgaaagacattaccctatttctcccacataatcgtcactcacccccatacatgttaagtgctgcctgattaataagagctaaaattcaataagcacttcctttatagcagggactatcctaagtgcttcatataaagtattacatctagaacttcagcaactctgtgattcagattcaatgtttagctaccattttgtaggtgagaaactgcttcatggggtaagtggtcatcacaagatcacatcataagcgctgcagccaggactcaaatttacctattctgcttcagagactacacttttaaccattaattccatgatgcaatactgtctcaactgaaatgggattccaccttggtggcaaagtcattatgatcaaaatcaatgagcccggcacctcccattcaatatcctccccatgctgtcagcatgacttcttgaacagtgcagatctgatcatgacactggtataaaagttgtagtgatttctctttgcctacaaaataaagtacagatcttgaagatggcctaaagggccattatcttccaccatctgcctctccatctatatcaactgccacctgcccatgccctagtgatgtcacttgcagttccacaactggcctgtgctgtttgatgctttgagatcttcaaactttctgccctgaactattcctcccctcctcttagttagcaagttcatgcacatccttcagaacctctcccaagcatgtcctgtgcatccttccctgacataaatatcctctcctctgtttgctaccaacacatagaactatttatcaaa

SEQ ID NO: 111824 - DNA, 1135 bp, Homo sapiens
aatgtacaaattacaagttccagactggccatgcacaccctttctaagacaggctgtgcacctttttcctatgtgtaactttctcacaaaatattttcgcatttttaaagctttatttcttcattaatatatttgattttaataaaaagtaaaatgctttcgattctaatgtgatgcattatttctgaaagcagtcttaagacaggaactaaagggcagtgtgattttacagagaacatctttaatagtggctgggagtttacacatacacacacttgatatgtgtaactatttcaggtcattctttcgtcttgtggaggaagggacagacaaggagaacggaggtaccagttgagcaaactaacccccagctcatgcagagagacattagcataattttgtattgttgctgaaatttcttcatgtcttacttttgatcccatgagacaagttgtttgcttccatctaaaaatatcggatgatgcctctacattgcagatacaagttaaaagtgtttttccagaatctatgttacaaaggaagcccagggacctctggtcatagtgatgaatttcactggtgtaacatccatgctgtgtgggaggtgagatttggacccaaactgtgtttttaatcaccaatttacagtgatgtttcacacagaagtagagggatctgttccacccttatgagatttcacctgacccagagcacttagaaaacaagataaagcagcagcaggagaggaggccttatctgttctgcccacagagctcctggctgtgttctccagctaatacttcttactcccccccacgcgcaatggcagcggcaatgtgcgttataaactgcaagggctgaccacttcttcaaagcttaagttctggacatcacctccctctcccccaaacaagattgccacaggacacgaggacacagaacaaaccatattaacctctctgcttccaatgcctagcaacaatgtttgtggttaccccatgactgtgtgacagctgtgtatgtgttgatacctgcttgtgataccataggtaaaacaaaatacaattttaaggaggataatactttatggcagggaggagcctgtccatgaaggtttcagtaaagaggtttattc

SEQ ID NO: 111825 - DNA, 1053 bp, Homo sapiens
ttgccagcagaagtaaactccaaagagaggaactacgcactaggcaaactcctttttttttttttttttttcctgaggactgatctgaggactgatttaatgatgattgtcgaagctgagctcccagatgaggctcacaacatcttctgggaatccaaatgaaaggttaacatactatattctcttcccaaagatgtaggtagaaaaaaaaaacaaaactcgatctctctatcaaaattaacgtcatgcttttcagtaaaatgctttggacagagtggtaaatttataatagtttatttaatctattaagcttcagtgatttaatttaagttcaacaaagcatttgggaaagatgttatatattttgccaactccaagtgaggcattttgttgttgggttggtttaattcattcagtaaacatttgtcaaacatttactgagaacgcattagcctctgggaattcaatgatgaataataagacattgtaccctcaagggttcatagacactccagccacaagtgtgaatgtgtacacatttcttttggaatttttctcagagcagagaggtctgtctcaggctagtctttttgtttgtttttttttgtgttttgttgtttgttttaaaagctcctgcttacagtggaggtttaaaatcctagttcttttaattgatgttattttcttaaacattggcatttctcattaaggcttcacttgttattccttactaaaaatagcaaaaacaaaatggtcttatataaaggcaattgagtacagtggaaaggtcagagactgtgcaagtagaatgacctacgtttgaatctgagctctgctacactagtaatttggagagtcctttaagcagctgtttcctcatctgcaagatggtgataatgataccttaagagaggtattaatatttattaggttaaggctgttataaggattaagtgacagaatacatgtaaatataactaggctggcacctgataggtgttaattcctaacatttattgagtacttactaggagtcaagcactgtctaatacg

SEQ ID NO: 111826 - DNA, 1299 bp, Homo sapiens
ggaagaagaacctacaaggatcttagctgtctgcttgtctctgacactctcgaggccttgtgccaggctgctttgctgtgcaaaagctccacttcagtcttttagtctgactcacaatagacgcacatggttgaagttaggagaattgcaggactgtcacttgaagtccctctcagcctcttcaccatcgcccccagcctctttccctctaacattaagccctttgtgtcggttcccatggttacctcctcactactggcagctggaatgtgatagtgagaggaggctgcctcccctactgagccaggtctggctggggcggaggccattgatccgcagctggatttgtgaaatggggtcacagtccagtaccttctctttgtcgtgggttctatacctttcccaggcttgacatatcagggttgcagtgggaggggacatggtgggtgatggactgctcacaggacatgtcctgtcataggctggcctggcctggcgtccctgacctgccaaactcctccctgaggtcacccttccatgtgtgaatgcccattgagggggaaggggctgctctgcttggtcaaataaaaatgatgactcacttctctacctgctttctgctcagattctgttcccaataccatctgttcttaagttagtcaacattaacaagggtgggctccagtctggaaagaatttgcatcaaaggcatgttttcacatccagcttggaagaccaggcaggctctgggaactgggggatagcatagggattcaaggttcaagatgaaaacaaaactagccgagaggtttttgttgttgtttttataagagacagggtcttgttctgttgcccaagtggggtgcagtggtgcaatcatatctcactgcaacctcgaactcctgggctcaaacaatcctcccatctcagcttcctgagtaactaggaccacaggcacatgccaccgcacccagctaattaatttttttttttttttttttggtaagagatgaggtctcactgtgttgcccaggctggtctcaaattcctggcctcaagtgatcctcccaccttgacctcccaaaacactgggattaaggtgtcagccactgtactctgccccgagagtttgtcttgaagctatttcctgacatactatttggaggcttcttaaattccttctcatttagagtctggtgggccccagagttgaggcaggacttggaattacaggtggaaattaagcagccctggtggtgagggtgaggggaggtagtttctagtagaaagcaccaaaaa

SEQ ID NO: 111827 - DNA, 1079 bp, Homo sapiens
gtttgatatgtggttgatacctaccaaagtatacaaagcccagtaatcctaaaaggaatctaatggggtaggtagtggagagggtgaggcctttagccatagctctttctactttttaatttaatttttcttttcttctttacaataaggatgattattgcctcaaatgataagaagattaactgaattactgtttttaaagcacaaataatctggtacataccatgtgcccagtaaatgtaagtttcagttctacgggtaaaaatttaataattattgccaggcactgttctgattgctttatacatattaattcattcaagcctcacatctaccctttgatgaaggtgctattagtattcttattttataggggaaaaaacaggcataagaggttaagtgacctgctcaaacaccttcctaggtgacagagccagaacaggaccccaggcagctggctccggaatccacatcgtccatatacattacacagcctgctgcttgttggagttgtcttaagatctaggctctgagtgcttgtagctaggggcacaccgcttccatgaagatatcatctgttcactataaagcccttgtgagagcccttggttttcttatgcacttgtcctgggctactagctgtgtcaaagggctcagtgggtagagggactgatgtcagcagtaaactgaagcagattaatatttattaggcaggttaaaagatttggcaggtcatttggctttttctcctatccaccctttcctcatctttctgcaaggttgacatagaggtcattggctaagatctggagataattaagcttacggtttcagaaagagtcagaaatatgctgaatgttactggggtatattgtacacctggatttgtttggcaagtttcagggggaaatcaagtgaaaaaaagcagcagccagagcaggaggtgcaaatggacagaggtttgagacatacaaagtgcatctctgcagagctgaagggttatgtgtggccctcctgtaataaaacaagctgtagaccagggtaggtaagcagaaagacaggaggaggctttaagtaca

SEQ ID NO: 111828 - DNA, 1046 bp, Homo sapiens
tatggaaccaccgtcataatgtgcactccattgttggctgaaatgtcattatgtggcacatgactgtaaattgtaagccctatgttagtgtacctcctaattttcctgtcccccaagaagtctctctgcaacccaactgttactgatatgggactaacctaggaaatcagagtcattctcatctagttacgctcagatcctacatcctgtttgttttgctttttacttttttgttttgaaatcattgtagactcacagaaaagttgtaaaaatagtacagagatttcctgtatacctgtcacccagctttctctaatgttaacaccctttataaccgtagtacaaatatcaaaactaagaaatcagcactggtgtaatactattagctaacagacttaactttatataaactataaactttactcagatctcaccattctttcccattaatgtcctgtttctgttctaggatcccacattgtgttcccttagcctcctctgatctgtgatatttcctcagtctttccttggcttttgtgaccttgacacttttgaagagctctgggcagatattttgtagaatgcttactatttgggtgtgtctgatgtgttctcatggttacattgaggtgatggcttttgacaataccacagaagtgatgttgttttcttctgtctcatataagggttacatgatgtcaatatgtctcattactggtgatgattaaccttgattacttggttatggtgaagtccgccaggtttttctattttaaagttactatttgtccctttgtaattaataaataaccttggaaagataattttcaggctatggaaatatcctgtttctcctcaaactttcttcactgatcttggcatctatcagtgttgcctgtgacaactattactataatgttctaaatttgattctttatttctttcattttttctacatttattaattagaatttttaaaaaagcctatttctctcctctacttatttattcattattcattcatgtcagtaaggactcttccatat

SEQ ID NO: 111829 - DNA, 1051 bp, Homo sapiens
actccttcaattcagtaaatctttgttgactgactgtttgaaaaaaaaaaatttgtgtatttgtttcccttgcttcacacaagaacattttcctatcaccctaatctctaaggagttgaagtatatgtttgtgttttgttttgtttttaagtcatcatctattttgggaagctcttcagtgtctgctatatttttaaagttattttagattaagatgcagttaatccagcctctgattaatcttctgactttctagatgagcaaaggcttagctaagaaggggaagtaactcacataaggtcagacagcaagttaataacgaagtcagggcaagagcccaggtctcctgacacctggtctagtatttttctgatgtcctaatacattaaattttattagcttcaggggaattatttttcatttatattacaaaaactaatttattttttcacagaaaagagataggtgcatttttagctacaaggccaagtacaatgagttggaataatttacagctattattttcaccatatccagatggattcctggatcccataaaagtgtttctaaactgcagaaaaatccccctacagtcttacagttcaagaattttcagcatgaaatgcctggtagattacctgactttttttgccaaaaataaggcacagcagctctctcctgactctgactttctatagtccttactgaattatagtccttactgaattcattcttcagtgttgcagtctgaaggacacccacattttctctttgtctttgtcaattctttgtgttgtaagggcaggatgtttaaaagttgaagtcattgacttgcaaaatgagaaatttcagagggcattttgttctctagaccatgtagcttagagcagtgttcacactgaggttgctgctaatgtttctgcagttcttaccaatagtatcatttacccagcaacaggatatgatagaggacttcgaaaaccccagaaaatgttttgccatatatccaaagccctttgggaaatggaaaggaattgcgggctcccatttt

SEQ ID NO: 111830 - DNA, 1050 bp, Homo sapiens
acaaaaaaaaagtcaagtgcctaatattccaggcatataatttgttggtgcaaggtacttagcagagtgtctggcacacagtaaatacccagtaccggtagctgcaattattaataatgttcaggggtttgtttcttctgcctgctcccacctttgaccctttctattgcttattagtttctcaaccactaaacaaaaacaatgaggaacggggtgaagagcagttaacccattgggcagggttaaatggcaaaataaattactgaaattaagttagagattatatatggatttaatttttctggtttttgcctgtctcctgtcataaataattgggagtttaatatattatcatcaatggcaacatcatcatcttcatcatggacctgatcacagggaccaaactgtatactatcaaaaactgacaaccctttcaggactccagtatataccctcattaaaacaaaaacaactacccctgaaaaggccccagagttattgatctcacatgtgagtgaactttttcctagaatttattgcacccgattacaatccaaattcatatcttcactaattgtaactaggaacatttgagatttttgcaaaatgtaatagactgtcctttcccgtcatctctcatatttccctattgccatttgaaaagtttggcccattgaattcattgtcttcgttatcctatttcaagtttagcagttgttttgaactccagagataatcgttaggagacttctcttagttaggaaacatccttgttagaggaggcacctggtgagacagactgaagttcaaattctgactctgctttttttttttttttttttttttaaatcttcggcttatctcctgcatcgatgccatgggattatgtaagagtgccaccacgtggcctgacaatagtaggttgccagtaaataggtgttccttctcctttttacctccaccctcttggtaaatttaaacacccgtttattggcagtaatgctgtgcctttcttgtgtttcaaggatgtgcttttggggcaagacagtg

SEQ ID NO: 111831 - DNA, 1038 bp, Homo sapiens
tgggagctatttcctgaagtagtcctaaaaggggctgaagaaatgtactgtttgtttttatagcctgaagcctgtcctcaaaagctgccttatgttgcatggtgtgtacaggatgtgggggcggtgagagggttaataaaagaaaatgccttgtgaacccagtcattccatgtgacattttcctgtaggaatttatgcctgcctagtactggtttaacttgggtcttcctgtgagcagccagggaagacagtgtgcagtttctgggggaaggaaaagaggtcctccttcctcttaaatgcttttctcatctatgtaaggagcattgggctgcatgtttgcccctttcttcagagctgtaaccctcctgtctgtgtgccgttccaggtcactcagttgttcagaaagaggccaagaagagatgctgccgctcttccaccatctcacccctcgttggggtggttcaggctgcaaagccattggtgattcctccgttcctagtgaatgtcctggaaccctggaccatcagaggcaagccagtaggacaccctgccccaggccaccactggcaggaacgcaagggctggtcacagacaccagggctgcacccctgaccccaattggcacccctctgccttcagccattccctctggctactgctcacaggacggtcagacagggcgacagcctctcccgccctacacccctgccatgatgcacagaagcaatggtcacaccctgacccagcctcccggtccaagaggctgtgagggcgatggcccagagcatggggtagaagagggaacgaggaagagggtctcgctgcctcagtggccacctccttctcgagcaaagtgggcccacgcagccagagaggacagccttcctgaggaatcctcagcccctgattttgcaaacctgaagcactatcaaaaacagcagagtcttccaagtttatgcagcacttctgacccagacacacctcttggggccccgagcactccagggaggatctccctccgaatatctgagtctgtcc

SEQ ID NO: 111832 - DNA, 1039 bp, Homo sapiens
gagcttttgcagcactgagaccttcctggggatttaaaaaaaaaaaaaaaaaggcatgcgccatctcctggtggaaataagcattgtcctgttgggcatgagatggccagtagccattgtgagggttggtcagatgccagagaatcccatttgtaatgcggtggacatatctgaaaacaaaaacaaacaaaaatgtatcagaaaatcttttccctgtctttcaattaactggattaaatgtggtcattgttgcttactgggacagttatcaagcaggaaactagtaaagatgattttttgtgtgtgtggttcctaatttcatagtaaaatgatgggctagatgttaaataatatcacaagattaaataaagttcctctccaagagaatcgtacttccatagagtcatttattcagtgggtaggatatgaattataggctgaaaggcaactcaaatgtggtaaaacagagaactactagatagcaggtttctcaattctgagttttttcttcagccttaaaacatccctattatattatcaatgagtagattttatatcttgtattagttcactgcggaccagcaaactgcagatttcccaggattatatgggatagcaggcacacttgagaaggaaaaattttgtgtgttcaagcaacagtgcatagtaggcactagaaagattacatgtaaccaaaggagtataggaaataattgacctaaaacctgaggtttgtgcagcaccttgaaaatactttcacattgattgagtcatggttccacactgcctttctctgaaataaggagtcagtgtcgttcttatatgaatcacaaaagcagagaggttaaatgtcttctccagagtcagctggcgaggccatagccttgactcccactgtcatccctaatgctgcttttggtggttttccatcccaagtttgcctggcttcaacagccctgtacatagtaatcactcattagttaacagttactagtttatcctaatttctgggaaagaaattaaatagaattgttacgca

SEQ ID NO: 111833 - DNA, 1042 bp, Homo sapiens
gcagtgctggaatctagttgttagcatttgatactcctacagagatttcaaatgttaagacacttaaaaaatgaccgtgatgctgctgctgtcttcccacatgccatggagatctaaactgggctgtgtctgcaggggagaaagttctcgccttccactttctctatagcaccagaggggctgccttctgctgtgcttgcagctctctatgcagctcaggcatgtgtgctgcaaaggaaagcttgcttgcttcttgctgagcctggaaggtaagtggttttcagtgatcctgattccaggagaaactttctagggtgattttatttcatttgatctacaatgtgtcccaagctgtcttgtctgttggaatgaaaccacaggatatagaccctaggagcagagggtaactggacaggagggatctttgcagcacctctgggtcatggctaacatgctgatgcaaccattgtagtagcaagctccctgctagcccaaagttttcctatttacatacttgtcattgtatacccctgatatatatacctaccccagcactgctgagcacttcatttaacgggtcccctgattgcaaataagaccacttggcttttggtctgtctatatttatcccaaagagagagctatgtatacacccttacatgtatcacgttgccatggcatctttaactgaacgttttacacaatttttttgttattttgttttctgcctttgggcatacctgctttacagttgcagtgtggcaaatactcattgcttttcctccctatcttaatttttaagtgtttttttttctaagttttattttagaatcggggcataggcaggtttgttacaaaggtatattgcatgatcctgaggcttgctgtatgattgtatgcatcaaccaggtagcgagcatagtacccaataggtagttttttaacctttgtcccctttccttccaaccctcttttattccccagtgtctgctggtcccatatttatgtccatgtgtacccaattaactgttttcccatcact

SEQ ID NO: 111834 - DNA, 1903 bp, Homo sapiens
tagctggtattacaggcatgcatcaccatgcctaggtgatttttgtatttttagtagagacggggtttcaccatgttggccaggctgggtttgaactcctggcctcaagtgatccatccatcccggcctcccaaagtgctggaattataggcgtgagccaccaagcccagctgatgattggtttttaaagtcaagaatctgaaagcaattttatctccagccaatttaatgtaacagctctcaaactgaagctatcctatgatgttacaatttagagaatgctgtaatatgtaatataaggataatctgattttcaaaaagttagcctccttacttaggagtgacaataggaatagagcttagatatttcccagtcctgtcagaggtgtccttgcagggagtctggctcttttctccctttccctggccttcattgatctgtccaattttccctggcagagctctctttacgagaaaaggaagatcctggctggtcagcatgaggatgcccgggagctgaaggagaacctggatcgcagggagcgagtagtgctgggcatcttggccaattacctttcagaggagcagctccaggactaccagcacttcgtgaaaatgaagtccacgctcctcattgagcaacggaagctggatgacaagatcaagctgggccaggagcaggtcaagtgtctgctggagagcctgccctcagatttcattcccaaggctggggccctggctctgcccccaaacctcacgagtgagcccattcctgctgggggctgtactttcagtggtattttcccaacattaacctctccactttaacctcttctaaaatacccaaccaaaagatcactgtttctctcaacactatttaatctgaaaaatgtttcagtacaaaccactgtttgaactatctgggttattggtgtttgttcctgatgaaaggaaaaaaattctctccaggaggaagcctttttccttcttgcccttcctgattgatcttctgagagctcgaatgctgctggacacgtacccctttctattattactttgtagtagaaagaaagttaatgaaactgagaactgattggagggtgtttgatcatttagtttttaacaggctgaggcaacatggatcagtgtgtgtccccctcaggaatgtatccacagtggccttccttgctggtgggcagtgtatcctgatggcagggtacaagtaccattaatgaagggtctgcaacataaagccttaaaaagacacacactaagaaaactgtaaaaccttgaacattgttatttatattttttaaaatggaaaagatcactatgtttgttgtgctaaccacttatttgattctgttttgtggtggacatagatgattacgtttgagctttgtattttgtgaaaaccttaatgaaatgaattccaaagatagtcacgttgagcgtgaagactttttttcttacattcctgtcttatttttaccaacacgagcaggcattctgcgcttccactggactgagtatgggggagtcctgctcccctcctgtctcacaccttccccaggaggaaggcctcatgcactgcggttattgcatcatttcctagtgcttcatgtcattatcactggtggggaaacaaagctaaattttattaacaaagacaactctcagacctatataataggaggaggacgtccagaatccaacaaaattcaaacggagcccatgctgttctcctgaacaagatttgggctaaatacggcctgtttattgaggctgttttaatgatgctttaaaaaaaaaaaatgttttctaaaatgtcaaacctgttgaccacactttgattaaaaactgcctccttaacctctgaagactgattttgctttatcatgtt

SEQ ID NO: 111835 - DNA, 1002 bp, Homo sapiens
aatgagccctcacaagccaagccaggtggaagacagccagcaaacgtctacagttattcttagtgaaattcctcagaggaatccagggggctcccagttcccaacactcttcgagatgaccatttttcgggatttgactggggaacattttacatattcagtctttctcaaaaatttttatttattttcttgagaaagggtcttactatgttgcccaggctggagtgcagagtggtgcgataacagctcattgcagtctgaacctctgaggctcaagccatcctcccatctcagcctcccaagtagctgggaccacaggtgtgcaccactatgcttggctaattttttgattttttatagagacgggggtctcgctatgttgcccaggctggtttcaaactcctgggctcaagggatccttccgctttggtcccagaagtgctgggattacaggcatgagccacttcacccagccacttttctaatttatagacataaaagtaattgactcccacagcacagtaacaggcaatgctgcttggcatgccacaaacatctgaaagcttgtgacactcctaggattgtgtccattctttcattatgtggaaactttgttctgttatgtgaaatgggtaaggcaccaagtgagactttgaaatctaatttttaggtggatgtgatatttattgtaataggacttgacctctgtactttaaagaaatcactaaccaaattttcaaagtttccttttaaatgcgtttagctagaaatctatgtatttatccctttcctattttgcattcttctcccactatttttaaaaactcatttacagtagaaaccattcttctttctcccaacagtatcctttgccaagaccatgagaacagtaaggagcatgttgttggtcagggtttcagaatacgcgtgatgtcactgagaatgtttgctcacagtcaataattgtctttgtggatgtgataattttggagatacacttct

SEQ ID NO: 111836 - DNA, 1077 bp, Homo sapiens
ttcctggggaagcgaatggtcccttccaggcgggtggccatgttgctctaataaagcgggaggggcggcggcgtggggggagcagatgccgctggctgccagcgggacgccggcgagcagagcgcagccgcgagggaggcgcgagggaggcgagccggagcccgagcactagcagcagccggagtcggcgtaaagcacccgggcgcagccggagccggtgccgcagctgcgatggccgtggccgtggggagaccgtctgtgagtgctggggcctcgcctgctgctcctcgggcgccgggtggtctctgctctggggcgggtgcggtgaggaccacaggggagccgggcgggtgctcggccccgcggcggcggcgacggctgtgggtgtgtgcacgaatttgggcgcgcgtctggggtcggggttaggagcccaggggctcagttacgtgatgcaacagtggatcgcctcgtcgcgcccctcttctgggaatgcgaaagaaaaaggacccctctcctgttccctttaaaataattctttgaggcgcggcgtgtctcagccgcctccctctgcccgcgcacctcttccctcgtgacagccagaagggcgccgggttcggggctttcctccagtctcccccgcgccgagggggcgctcagggcatgggaattgcgagctgaagtgctgcgtgtggcactgctgtagaagcaggtcagaggggtgggatttccgtggtggcctccccagcgcattgtgagatcccggacaccctcgggcatccacccggctgagcgggccctgcccaggatgtggacaaagccccagataacacacacaaagttttctggaggctcccttgtggtgtgggtggaaggactgaaatgttctgcggctgaaaggccgggggcggcgggctgaggaggctgggacgcgaggaagaggaagggcgggcgggtgcgtgaagaatcgagtgccccacggcgggagggaggagagtaggagggaggagatacctttgccccgagtgtgtgggccaaggcgccgcgcctactgggttgcaagactcggtccgcgccccg

SEQ ID NO: 111837 - DNA, 2146 bp, Homo sapiens
gcggcggcggcctttccttttttttgaaaggagcggagctgggtgggaaaggcggagtcctcctgttttccctttccccttttcatcgtcgatgttcacagtccactcgccttactggctttgggggcgcctcgggcgatgtctttccctgtctatcacctcctcttccctttttcttcttccctttcccacagctgtgcagctgcaggtggtggctcgggagattttgtagttacagacgaaagacttactgagatactggaagctcggaaatcccagaaatgcaaggctgtgctctcaggctcccggctcttccccctctccccgcctaactcctccccagatacgcgcgccttttgcaccctaccccctcgggagaagttcatgggtccctttgcggattctaattcgatttggtggttcggctgcccgcggtgctttcaaagacgttttctgcagtcagaaaacacagcggtcatatcgaatcatgactgtcttttaggccttttcaactctacgatttaatgacatggctcttttaagaattctggtcttcttttgcacataaattgtgctcttgataattagtggtcacatgtaggttattgttactgagggaatttgcatagtctctgggctagtcgttttatttttggtgagaaaattgaggtctatagaggtgaaatttatctggttaaattactcctccccctgccccccattatacttattagcaggcatagattcagagaactaaaataacaatatctgctttagataaattggcaaacgtttaggattgcaaatattcagtgggggtgtttggctttttcagtaacacgtattattgctggtgcattcttgagggatggaggaggtggaagaaataattagctgcacattttctataaattagttcatatatgtcagttaaataggaacagtatgtggatttaaggtttagttgtgtggccgtaatcacatccaacaccaagtcggccaaccatatgtgagcttaatcccacagaattcttatgttagacctccctcttcagataatagaggagattttttttaagtatacgtgcacagaggaagtgacttctttctgcgcactctgttgtcactggaattaaaattaaattacaatctaaagacagaagacttttcttttggaaacctaatgtacgagtgattaggaattgactataaagttagaaagtctacagaaaatatgtgatcacatttcacagataattgttgaatcctttcactttgttcattgggctattgtcttaagtgtggtctctgcagttatggctttaaaacaaagtcaatgaatggggaagactcttgagacacagctccatggaatctacactgcacctttaaagttaagagttctctggccctcccatttcttatctagtctgtgatttcaccaaaagaaaggaagggtgcgctgagggaaaagaaccactccgaagttgatttatgtgtgaatggaatttccctaggtatttaattagattttttaaaaagttatttaggacatatatctccttttgcgataactacctctccccgccagactgaagaaaaatgcaatctgaataacttaccctaaatttttgatattcttgaatgggaacatctgagtgtgatatcccaggtaaatatgacattttagtgggcaaaaatgcttacatgtcaaatgcactattttctatcttatgaaatggttatattctgttacaaaccattcaaacctcaaggctaaattcaggtaagtttcttaagtggatttgttgttgactgcaaaacaaagcttcaatttagtgtgatactgtttatttcagttttaattttgatccctagcttctccatttccccactgatggtttttgggcttagccctaagaagaccctgaagcacatctgctgtttgcctagtataactgatgattagcaagaacattttactcccaagggatgtgtctgcattttggatgaattagcatttttgcgtccaaatcccggggcagctattatctttattttaaacagaacatggcaatttactctacttgggaatcaggctttatgtagctgatggcctctcctaagctgtggtgttcatcagttt

SEQ ID NO: 111838 - DNA, 1138 bp, Homo sapiens
agatttccctatgatatccttcaagaaatgcacttaattgctgttttatctgttgagctgaaggaaatggaaaaccaagtttccatttgctcatttaacaccatttattaagcacctgctatgtgtcaggaacttgttctaggtgttggggatatagcagtggacaagttttcttcttaccaggagctttattgtttgagagatttggtgtattaaagtgacagacttcagtgtaaatgtgtaaatcatttagggagaaaaggaattatatgcctattgctgactcagcaaatatgattcaggtgaaggatcatatctgtctggggataattataggcaattcttaaagatgagggcagggagtgtgggaagtggaggagtactgccaataaaatgttactttcccttgttataaaattgccatttttgtgacttgaaaatgtggccccagatggatggctgtggtcggtgtgcctggagaaacatgaatggagccaagaaaggtccaggggagggccacctaaacaataaagggactgtcatctcaggtcagttttcaaaaattagaactttttagtcagtgatataaattatacatactgaggctctataagcagttattaaggaatgcaagaagtttctgaggtacaataatctctccttttaaaatctttcgaaagttatagattaatttatcttttaaattatcatctttaaaaatgatgtgtctacattacagtgaaaaggagacccaaggaattgattaaaagaacaaaactgcccataacccactatcctgatataatagttcttaggtgtttagtctatttcaccacttttttgagcagacataacccatcttgtataaactgccacctagaaaccaaactgtgtgcctgaatgagtcctgtgtgaccatttgaataatactcttaaaatgaaggaagtggatgcttagtgtttgggcatgggccatcctatgtctgcaaaaggaacaaatgattgtgggactctgctgtttccttgatttggatggcctacttgattgattgccagcagaccaagtgtttatattctacccaatgatgatgtcacactgatcatgatcatcggatttagactgtggcgcagcccacag

SEQ ID NO: 111839 - DNA, 4325 bp, Homo sapiens
gctgctcttggattttatcattttattgggatccatctttcatagtcttagctagacctgtctcaaatggggttagcaaagctgaaccattatttaaatgaaacccaacacatctaaagcttctatacttttttccaaggagatctactttacaatataattgataacctcccccgccccctttttaaaaatctggattgacagaaaactctcaaataacaatacttcccctgacccactcatgcctgctggcagcccatcaatgcagcagctgttgaacataaaaacaatacttgggctaaggtaatagagacagacttctaaaaggaatttgctgggcgatctaaaatgaaattcacattgttccaggcttgacctgagatagaaatcaggagtctgttccctgatatgacaaagccaaggcaccagagccacctctttttaggatcgacgccaatgagtgtgagcacatcgctcaagccaaatggcacaggaagtccagttctgtggacacattctgcccacctgctgaactgtgactgggtaggatggagtgtgaaacattgagagaggggtaggctgaggtggtgaggtgggaaagagaccatattctaaaaggaccatttttctgacaagtgggagctttgtttgttcttgtctgtgtgtgatttcttttttatttatttatttatttttttttgcatttttattgtacaaaaaggaaatgaaaatatatatagcataacattaaaatttacctacttgtttttgataataacattcctttgggaagaattgattttttttctcttatagaagttgaggcacaataatgtggataggttagagattgaaaaacaaaataatcctcaacaccctaacacatcagtactcattcttgcctttccaacccacctgttttatcagacatttcttgtgtaccttctatatgcaggtgctgaaattatgttggtgagtacttgactgcagtctttgctgctctcatgaaatctctctataggctgagtaagcaataggatttagcaaggaaagggagatggggaggtggttgtggaagtgttccaagcccaggaaacagcatgtgccaagctctggaagtgagggagagactcttaagaaatccaatgtagcaggaacgtcagccttagggttgggtagggagagtggacagacaagaggctgaggaggtgggaagagactcagttgtgcagtgcattctttataggcatgtatttactgtgtagctctttaaatgctttatattccatccaccctttgcccataacttaagatatctcagatccttgaaattggttgaaggaagacaaagaaaatctgcagactactaattcttcaggattcaataggagagttgagaaacgatcaggggagttgattcctttcatgcccaaattgaacccttaaagaatagaggaaatgaagactgacagaggacacagagaaggagagtccagtgacaacatatgacaacgacaatgctagatcttcctctgcccagttttatgcattgagcctttcctcaggattcagaactagaagttattattttcttagacctaagcaactgagtcctgaagagtgtggtggggctgggggggaagatggtaggactctttccaccttggacttcaagtggcaatcagtgttctccaaaaaggaaattaaaaactcattggattttatgaaaacaggagaagagtctgttaaaagccagggtttacttaagacttcatgctgttttagttatctcatctctttgagtactgtcttcataccagtataaattttgtgaatctcattaaggtactcattaaacttactctgacctgctgttggagggcaaaaggcttgaccaaaaacttctgtgcacgggaagcttgttcagcatcttgattttcaaatttattcaattcaaattactgtcaagacaattatctcaccttatactcacaaaatacctgagaagtaatatagagaaggaaaatgagacaggaagaagttgtcagttaatctgctacagcaaatttgtgggagagctaggctttggaaccaaaggcttttagaccaacatgcatacagacctcccatctgattcagtcagttaagctaaattatgttgcggtaacaaattggccccatgttttggtggcttacatagcaagggtttatttctcatgcagctgttccaccctcggaggtctgctgcatactgcattgcctccaggacccaggctgagggagtatcctctatctgggcattgccagcctggtggcagaggacaaagagacatgctgaaccctggcttctcaagagctggcttctcaagctcttagatgggtcacttccatgcagattgtattggccaaagtaaatggtcattcctaaattcaaaagaatgaggatagagaatcctcctgtaaagagtggctctgaaagacccttgggctggggaagtaaatccccctctagggagggcagtgaatattttgaataacagttggctagattcctagtcaaggaatctactatgaagccaagtctttatttttaaaattgtatccctgtctgtaaggatttttctccctctatttggcctgctctgattctagctgggcatagtagaatgatgtgtgtgtgtgtgtgtgtgtgtgtgtgtgtgagagagagagagacagagacagagacagagagagataagagttaggcagccacaatgaattgaagtcagagtgaattctcctactcactggtgatgagcttccagggacatcaccatcaagtaagtcatgggtggtaaccttctgaaaggccttctgtgctgctctctgatgacctcagctgtggaagtgtactctctgggaaatggttctgaggccattaggacttccagctgcttgacagaatgatttcccttgggacctcggccctttggacctttcccagccatatgtccctaaatgcagatgaatcagatggcacccttctttcccttgctctgtttttctctctactgagaggccatagtgtatagcgtttgggtgaaaaatgtgggctctggagccaggttgctccggttctagagtatcggttttaccatttaacaagctttgtgtccttaggcaagttacttccctcatctgtaaaacactaacagtacttccctcaaagagttacagattaagccagttagtacacacacagtgcttacactgctgcctggaacattcatcctcaataaaagttggttatctgaggaaaatggtgctgaaatagtaatggctttatactgaagactgggctcaaaccagaactgccactccactccaccccaccccagtgggaactgagcaattgccccttctcttgcacacctgaaccacacaggcttcccattttctaatcatagcacaccttagaggcacggatcaagcataccctccatgaagcctccacccatgaatcaccaaaattttggcgatttttatttatttgaattgctggcaacacttatgtgtcatccacatagtgctctggagtccccaccccacctttccttaagttaccttttttaaaaaaagtgactgtcaaatataattgtgaacataaaaacacaaaacaaaaaaaccttattacctaccataagcaatatgttccactagcccttgaccacattcttgcattcttagtctagatagccagacttaagggaaaggactatatgtcctataccccccaccaataaacatttgactcaataagtgaaaattcacccttcagataaattggataagacgtattgtctaagacgtgtgcctacctggctgttgctgtgtcaacccccggtaggtgtagacctcgcaagtccactttctgccccaggcttctctgccatcgccacctgggttctgcttagctattctgacctttgtgcacttctggacatccaaaggagttgccatcccagggggcaacccccttgagatggtggatctacatggctcctcaattgacctggctccttagaagttcccctctgggccccagcctcagccctcaggggtgattactctacagtccccttagggtggccttccctcttcccctgtttcacttttccctgtcccccattctgttcccctgggtcacttcccaggactcacatgcatgcaagtccctgtctcaagtccttgcattttggggaaacctagatgaaaacgccttgtttactagtgtggggctcgtcttttccttatacaaataagggagtatgaatgttaatttt

SEQ ID NO: 111840 - DNA, 2169 bp, Homo sapiens
cttttgaaaaaaaataatcaaagttttgggcttatattgtctgcataaattggaaaaatggggtaataagaaacaactttaattagctaacattgaacagttttaaggatggggattaatgtagtatttccctaagagtgtttattttattttattttgaattttttatttttgtgggtacatagtaggtatatatatttatgggttacattaggtattttgatgcaggcatgcaatgtgtaataatcacatcagggtaaatggggtgtccatcacctcaagcatttatcctttgtgtttccaacaatctaattgtactcttttagttatttttaaatgtaccccaagagtttttaagagaattgttcaaatgatcactgcacttcgtgtaagccattctcagaggcagtttctgagaatgtcatggaaactacgtaaaccaagctgattcatttttagattctcctcacgtttgtcacctttgctctcattctttgaggtgtttggtttgacttacgtgggtaggcagtctaagactagtactttggcctgataatttgattgtttgtcacatgcctctttgttttcaaagccttttccaatccttagtcaacctcttaaccactgggaatgttggattgtctgaagttgaagcacagttttctctctgagccctctaaagaagtcttttagttgttgataatcaaatttgctccttcagaaactaaaattccaaggtattttatgaacttaaggcagataagatgaggtctcaggtatcaaaatcactaataattaatttgctgccactagctgctgctccaaagctgacatttaagctatgtgaagaggaccaagtctaaactggattttataacccagtcaaagctgggggtgatgaagactctcattgactttatgtaatggagatttatatagggatattggagagttggggatactgctgaatatttctaaatctcctctttcttgaaaaacttatgcttttattcctcagtggcttttcctatttcctgttcattaagtcaacaaatattgagccccagctaacaccatgcatgagtgacaatgtcaaaaccatatccttctactcccccaccaaaccaaatcagaaccaaaatttgtctttggaaaatggatctctttgtcactaaggttcaaaattttggaataaggtttgaattcaggggcgagttatcaggatgtgttttgtcgttccaacctcctgtctcaagtcattcatgactgtgcagcatcaaccagtcagatatttgaggaccttctgtgttacttgtcctgtgctccatgttgttggaaagcctacaaagtagctggggagaaaaggctaagactcagataatgctcaacctccatgactgggaggatcttgtcaggctcttttaactagtattcagcccaacacattttcttagtaaacatgaggaacttggcttagcattcagaaataataaggcccattttatttcccttctctttaccttttataatgtaattcgaggacccttgaaaggtaacctccagctttttttcttcccaggctatctttcgaaatttatttttttagtttaaggcgaggataaaaagggcacaccaaagggaattgggaagttttattagaatctggatggaatgtcttcaggctcactgacagattaatttgtgccctatttccgctacaaaacattctgactgcctgcaccattccacatgcttttgactggtagactagtacagatgctcctcagcttgcagtggggttatgtcctgataaccacattatattgaaaatatctaagtttaaaacgcatttaatacacctcgcctactgaacatcagagcttagcctagcctaccttaaatatgcttagaacacttacattagcctgcggttgtgcaaaatcatctaacacaagcctgttttataataaagtgttgactatctcaggtaatttaccaaatactgtatggaaagtgaaaaatagaatggttgtataggcatttgaagtgtggtttttactgaatgcgtatcacttttgtaccattggaaagtcaaaatcgtaagttgaaccattgtaactggggactgtccgtgttctgttttagagctgcacatgcatttctgcacct

SEQ ID NO: 111841 - DNA, 1054 bp, Homo sapiens
ttcatagccaatcttgtattgtctatttaccattctctttagcctcctcgctcccttctctaacctcttccctcacctctccccaaattattttgaagcaaataacaggcactgtctgatctcatttttgttttaagagccaagctgtgacctggggaaggaggggcagtgaaagggatcaaggagagatactcgaggatcttcaaacgtatctgtgatttaaaaagaaaggatgaagtatatggatggtaaaagttatggtttaacaaagataggtcatgagtattcagatacgtgatactctgtatgcttgagctatttcatcaccatcatcatcatcaaaaagccaagttggaactcacgtggaagttactgtgccaggcctcgcttacctgtgcttatcttgaactttgggtttatgcataatttaaaacacttaaacattatttctgtgcaatatttatcattgagctttattgaataccagcagtgctgtagagtcatgggacctttaaaaggtcaaaagaaagctgaggatcattttagtctagtctcctcagaaagcttagctcctgagagaagtagcttgatttgagctcatatcaagtggcccagtgcttcctgtcatttaccacacttgccagaacgactgattcactgagttaaaacttggcattgctaagtcattcttacctagcttttaaaatgacagattcttatgacctctttgagagcagagatatgcctaagtctgcttgcttggcattgtagatactcttgttagagagaaatgttttcatcattaatagtataaaagagtcatttatcaggccacacatggtggctcacacctgtaatgccagcactttgggaggccaaggcaggcggatcacctgaggtcaggagttcgagaccagcctggccaacatggtgaaaccccatctctactaaaaatacaaaaattagccaggcgtggtggcgtgcacctgtagtccaggctacttgggaggctgaggatggagaatcacttgaacctcggaggcagaggctgcag

SEQ ID NO: 111842 - DNA, 1128 bp, Homo sapiens
gtattgatgtatcttcctattcttaaagaaatccgtggcattttacatggtcattgaacactccacccctctcaatttattctactcaaacactgttacgccagagcatttttattgagaaatatggagttggaagttaaaggttccatgtgtacatgtggaatagtcttcttcccacatgttatgtttggcttgaaacatagtcttcttgccttgaagaaaagactccctagctaaagtcagatgctggatttgtctctaatttttcaggccaacagaagcaagttggcggcgggagctcttttcatgctcagtcttggtcatgagcacaatagtttcatatgtagttcttaatattacaacttgcattgaggatctgggactcttgaacacattgtcttgttgtaatcgtatcctaattctgatttgggagacagggtgaatgagcctccagagaccagtattgaactttagacctcttcttctgctggttttctaaatcgaatccactgaatatttgtttggccaaacaaatttttaaaataagtggcattttagcattttggagattacaaaaggtacaaaatatgagacatttgaacttcactttgaaagttacagagaaatttgagaaaatgttgggaactctgaatcatatttcaggcccctaactaaataaaataaatctttgactttgggcatcaagggaattaataaatgtatccatgcgaatttttcttaagaaattagaaaagagaagtccatatgcaatccagtcgataggagtagggtaaactctaccgacttcatggttcataaagattagagtgtatcacagctgagtaaacacaaccaaggaggcatcacaaacagcaacatagtaatgggatttttctctactactttaaaccagagggttagttaaaaattcacttctgacatttctagcccttttctgactattagttaaaaattcagatgctttcctccagttcttaaaaagcatttcataatacttttgtatgaactgtagaactaaagggcccttttcttggggtttccaaaagaaaaaaggtattggagagactaaatctattttttctctcttatttctgcaaaaatgccctt

SEQ ID NO: 111843 - DNA, 1562 bp, Homo sapiens
cttttgcatttcacctaaatgcctttctctttggcctgtttccagtctctctatctagtcatccttcaggactctcaaccaggcagagttaggaggactagttttctgaattcccatttttcttaggcttctctaatcagcagatactgtgttgtaccataatagttttcacgccttattaatttttgtatcttaaacacagcatagagtagtggctagcacaaaggagttattcagtaaatgcttcaaaagtaattgtgcagttacaggctcaggtctcttgctatgtagagcgacttagtcagaaaacattactgtggcaaaacatcctaaaaggagattgcagaacaaagaatttaacgatctcctaaattttctccaggaattcttacagttatcagtatttagtggttgagcatctgacaacaggaagctttgaagggctgagaaataaagacatgcaatgaattggcttaagattttaattttcatttcacctgttttctagtctcagtccaatttttctcagccctggattgctcagaccatactagttggattggacagagtgtaatataatttactcctatcaatcagaaaatactacagtgactggtgaggcagccttagcaaatgatataggtatttctctttgatgctgtattcagggccttcccctgggcttttcttagtaattgaaattatgtgtataggattgactcctgaagctgttttttatggaaattagtgggcatctttcagtattttcattttcattgcttatttgcttccagaaaactaccaacatgcttgatgaaagttctagaaataatgtgagaggtgattattcattagatgtctttgtcctgtggaagtggggaaacaggattcattggaacaataagtatttacattttaaaagtttatatatgatatctgtatgtatatcttacataaacatacataaatgtctagcagaattgatgttgaattaatagagaacaacattttaaatattttctactgtggaattgtttaatgtgggaaagactatacaaggtgcttcatagtttcaatatagttccaatcagttgaaaccattaaaaacctatgatacattaatatatcaaacctatgagatgttaatattatatgcattttacaagtaaagatagaggctcagaagtaactttccccaaagtcattcccctaaaatatggcagagctggagtctttacttctgactcccagccaatgtttatcccactattccatgctgcttttttttatattaattatggagaggtttttttttttagcctttcacctaaaatattgagatttgagtactaaatttaagaatagcacatggacttcatgcagacatcaatgtatactggtgaaaggaaacactaatttttagcttaagattagatttagatttagatttagattaagattagatttaagatttaaatctttctacgtattgtgatcagaatattgaggaggttgttttagctaagtactttttaattgtgacctttgaatcttgtcttaag

SEQ ID NO: 111844 - DNA, 1058 bp, Homo sapiens
tactactttttgtatgacacaaatcgagcaaacagcacagaaaccaaaatctatttatttggaaatattctgaagcgattcactggtataatttcatagtgttaaagcgggttagaacccaggctctgttacttacttgctctaagaacttgggcgaatttctttgtgtctctgtgactttgtttccacatctgcgaggatgtacactttaatgcattttttatgcaccttagaccagtgcctggcatataaataataccttctgaatgttagctagttttagagatgtaaagcactaagccactatttccagagcggtggtcctggcactatttcaatacaccaccaacattttatattcgtatcactaatagttttggtgatttgataccacttttacctctcctcataaatcaaggcattttgtggtctctagagaagtagggttcatttgagccccagaatacagcttctggctttggatctatgcttttccagcaatcttttgatcactcacatgttgtcccctcatttgagcctaaagaattggtttctctcccctctcatattggtggtgttcataagttctacccactagcagttgaaattgggacaaaaacatcccagatgtcccgtgactcttcctaattccttttcctgttgtcctctttctttcttaaaattatccccctttgccatggtactggtccactatttaaaggtcagtgactcatgttgtgcctcaacactctgccaatccctgtaccggatgctggggaggcaaagtgaataccacttcaggtttttgttactggagatttcatagagtgttagagcaggaagggctcacaaagaaacaatctcatctagcccttttattttacagagaaagaagccaagacccaggagagtgagtgacctgcttaagacccataggctcagaactggagccaaatcccctgacacttgcccacactacaaacccaaggacagtagaactaaggcgttctagataggtcatttgtagacagattcttcagtcgtttcacactgccaag

SEQ ID NO: 111845 - DNA, 1866 bp, Homo sapiens
aatgtttgactgtcagacgacaatggctttcaaccgttctaagccttctatgtcacattgatcctggccctcaaagactcgttggttgttctcctttccactagataataggctgattttgtggtatctaaacaatcataaagttgcacttcttggaaagggtaacccgctatttgacttatgttgggagccatcccactctgtagtatcttcttgcttggcgtcagcattttagacttttgttttgatgacccaatacctctagtgaggttttatttgaagtctgatacccactctgacataggctctggcagcctttaatcttttatcccattgcaaatgttagaatcccgtaatttaacaactagagtttatgtacctttcctcaatgacccttctccacccatctatgttacagatgatgatactgaaaaccagagaagtggtggtccctgtcacttatagccaacctagctgaaataggattggaagccctgatggatgtttagctatggaatataatggttaaagtagtttttatgtttttttccttatttgccttaaggtagataagcccagctacacaatataacatggaatgaggtagagaaagaagagtatagtgttctaaagaaagcatttttggtgggagagaaatttaaaccatagtaaaaagctcaagagagagagaatatggcagtaaataatatgtgactttgaattttttaaagtttgattttagaatgctctcccctttgttacacttacaaaaatattactgcttaagtagatgatatctgaacatggtttccaagggcctgagtaaactatttgtaattacctcatggattgttaggaaatcaacaaaacaggtattttatgttgctgccatggtggctagtggttgaacatttgttccaaattgcaagttgcagagaagtgcatgtaaaggaatgtgagtgtaattaaaatgccttcagaaatgggggtctaagtaaatattgtatttattaagtgaaacagcacaagtgaaattaccaactaatgcctagctcagggtaggctttagaataatgaatattagttttcctgagagtaaaagtattgctagtttttaaagacttatttttaaatataagctcagaagtggataatggagtttcatcagtaaatcaatattttttttcattagtctaattttaataccaggtaatgagcatttttagcctttctaaaaaggatgaaggagtgagtctggggatgtcctcttatcccaaaaggttcgtcttttttttttttttttaggatgattaagttgataaaatggcttaccagttccttgcacatactaggtagagatacagaaaatatttcttctctagcccatactaccgaaaggttatttgtttgtttgtttttggtaatacaagcatatgtgtgtttgctcctcagtagtctataagaagctaaggaggaagtggtgggaatatctgatatgttagtcatgtggttttaatcagtcaggactgctaactgcatcctttcttgtttttctttgcaacttctatgtaagctttggttgatttttctctgcaactaattcttacagctttgccagagaaaagtaagaaaggagacttgataatccttgctcttagaagagtgtgagagagagtaagagtgattgctgtaggctgcctaaccttaatctgtactctctgggttagacttactctgcttcttttctgtgagaaatataagaaatccactccagcagctggtggtggaggtctcttcttggattcttccttctcttgtttcctgctgttcccacttcccgtagctcccacgttgctttccttgtgt

SEQ ID NO: 111846 - DNA, 1083 bp, Homo sapiens
ctcccaggctctactaatgtagtggcctgggctttggaggaagcctgcttggctttgactcctggccctaccacttacttgctgcacaaccctgagcagcttaatctcttagagcttcactgacctccaccgtaaaatgggaataataacggtgcacacctcagaggcgattgtgagaagtaaatgagacctatgtaaaatactcagcataatgcctgccatatatgtataaaataagagctttatacttgtgaactttagcagaatagtttatttcctgagagcaaacacccctacaacgtttgacctcttcactaccgtgtctctccctccctgcagttgattgtgactaagtgttgggaagggttcatactgaagcatgtggctggagtattgacatcccttttctccattttccaagggccctcttaaacttcacttcctccatcaaacataccatgggcatttcagcccatagtgaatgctccctcccatgaattctctatcactgcactgctgctccatggctgttgtttttggttggggaagtcaggttgtatagactttgtgagaaataagttgctgcattcattcatcctaaacatatggccctggctacttgtgatgtcatggtacatacagttcaaagtaagatgaataagacagggttcctgtcctcaaaaaatgtacattcttttgggggcctgaccaagtgagaaactaagtgtactgctagatgcaagatgtgaccaaggacccaaatagagtggacctttataaaataagaagcaatggtgtctaattcaaggaaccagggaaggcttagtgaagaaagtggcattttgcctggaattttgaggatgagtaggatttgacaagtggagttgaaggtggaggcatgctctgtgcagaggtcggtatgctttgaaaagagtcagttgtccagtttagtgtatgggcggtggtggacttagaatctggcaaaactggtttgaatgctggttctgccatgaattgaactttagtttccttctctgtaaaatggagccaatagtatctacttcacaagttataaggattaaa

SEQ ID NO: 111847 - DNA, 1009 bp, Homo sapiens
ggattacagcaaggatctcttgccaagctataatctttcaagttttgattttagcttaatgcttccctgtaatcatgctatcaagactgtcagaaacatattcccattcacatatcccatactcttaatctatcaatctaggaccattgatgtggaattggacccgatcttgctgagaagtctgggctgctgacccaaaccttttgtgctttgtggtaacaacatgagtaaaaatgtaacctgtgctcttgcacatattttatcatctctttttgagagctgatgggatttataacggattgttgtatgcagttgcattttccctgtgttctacttgggccctacttgattattcagacatatcaacatgatgataatgataaagaaaatggctctttaagagacatttttagtggacaatggagggggtggagaggactgtgggaacattcttgtgagctgcagcatgtgaaaaggtttgttttgcattaactgatcaagacaagaaagccagcatataaaatcttctatcaataggagaactttgagaaaagaggaaaattgtaatacagcctcttgggtctgctttcctaagcacaacagtatgtgtgagaaaaactctaaaccaactttctcttacacctaggtggatgcttctacaatgtgcagttaactttctgtaaggcagaaagttgtctctgctagtgggagtatttattgatttattaggggttatttggtcctattttttgagaaggagaacagagtaaggaaggagtaagaaagctttagcttgattagaatggctgaacttgtagcggtaacaaatagagtctgtttattagcttctctgcaagatatgcattttttttttttttcatgctctgcagaagtttgcatcaaatagcttaccatttggatggttgccccagctggtaatctgggttaaaaccttgactgaggcaattctatactcatgatcccttggtgtgctggtctggtgggaaga

SEQ ID NO: 111848 - DNA, 1066 bp, Homo sapiens
ctttcatttttggaaggcttcctccaaaggctagctagtttgtggttagctgcccttatcagattcagtgtaaaaggtttgccttggtagcctgagagggatctagtttaccatgcttttactaatatctatcttttttctcctggagacagttgtgtgttttttttgttgttttttgtttttgttttttttttagctggggaaatgccaatattcattattatatcttatcctaaagttacacaggagaaatagggatgttgaaataatgtatactttggtaggcagaatccgaaaatggccccaagatcccagccccctggtgtacacgctctgcataatccccagaacttgtgaatatcactcccacaggtaggttatggcacagctgtcgtttagaaatggagattgacctgggtggaccttacctcattaagcagtcccttaaaagggaccagactgttcctgaagaaggatatttgacatgtgagagggacacagggagatttttcattgctgactttgaagacagaggtgacctcgtggcttggaaccgtcagtgactttttggagctgagtgcagcctctgacagcgagtaaggagagaaggccctcagtcctacagctgcaaggaattgagtctgcccacatctggaatgagcttggaagagggtatttccccagagccttgagaggacaacctccttagcttggcccacactttgatttcagccgtgtgataacccaggcagaaagtccagctacaccatgcccaaagttgtgacctatgaaactgactgctaataaatggatgttgtttcaagccactaaatttgtgataatttgttatatggcagtagaaaactagcacatgccccacatttatgtaaacaacccctattccatcctgatattgttttatccagggttgagattaagacacagtagaactcttagaggccaggtgtggtggctcatgcccgtaatcccagcactttgggaggccgaggcaggcagatcacaaggtcaggagttcaaaaccagcctggccaacgtggtgaaaccc

SEQ ID NO: 111849 - DNA, 1219 bp, Homo sapiens
ctcacagagactgccatcacatggccattactgtaactgaaaatcccctgccttttcagaaaggcacagaaatatatggtatctttcagaaaggaagtggctaatttatatccggtgatagaaatggtggcatcgggaaggaagcgtcccatccatatttcattatttgctgatgaatgcattcagtgaatagaaatagatgaactgagccacaatatttctcaaacaggaaatactgaggaatagatgtgtgaatatgagtagcacaggacataaaaagttgaggaaaaaacttccaactgctttgagcctcttaattctatttgacctcctattcgtcactgttttgaagatattccataggataaagacagggcaggagggacaaaaatgacccaaataaacaacagtgagacaagtgggtggttttatgctctgcaagagacgtgatatgtcttaaatggaactgggttgtttgggacccactggacagcaagagggttttgaaatggtttatgacctcttccccacttccccgcttgctttgctcattagtgttcctaggtggctgctgggtgacgggcttttcatcatctctgatgtgggccagtgcgaaagagcagctgcaacatctgtttctaattgggtcgtgcctttataaatacttcttgcctatttgtcacattgcttccctcccaccctgtcttccttggagtactgcagaatctgtaagcgtccctggaatgcacacgtggaccttgtcattcccaaacagactttctgctggtcagcactttgtaatgttcggctgttacaggcattagtcacttgtgctcagagagagactgtggtctttggaaactgaagaaaatgtcttttttgttgttgttaattcttggcatccagttagatttaacttctcaagagtttacacagacttttagaaaaacattctgtctctaagaaaaaagtgctctagctttgtacagtttttggattttcacacttggtggttgtttgctgaaatgctgttttgctagtgattcccctcctccccctatctggggttgtaagcagctctggggctctgttcacttcggatacctgtttctggggactgcttttcaacagcgtttttcctaagggcatatgagaaatttaatttctgatggaatgaaggtgaaactctagtcccaggtaaacctgggtaggctgtaga

SEQ ID NO: 111850 - DNA, 2354 bp, Homo sapiens
aaataaaacttactttgcggacagttcgtgaggccagaatttctccagatactgggaggtggctggtggtcagtcaaagattttgtgtgcgagacagcatgttcttttctttacctctcttcagctcagaggcgtctgtactactgaaataggacctcagaaaaagacatgacctaagatgaaggggtatgtacttcttctcttttccaagtgggtattctgtaaggagaaaagacagagctcaaaggagtgtactgtacatgtctcctctgccctctgctgccccatggtttcatctcagctctctttaaaattggacatctgttcccttgaaacctgagttctgatatttctaccttctcccatcaggtactgctgctcagaaagactatttgttttcatctgaatatgtgaaacctgcacatcagctgtacacaggggccgcctattaaattaatattcaacagtgctttggactaatacatatttttacatactataggctggtgaattcactcaaagaatgagtagttaatcacatgagttataaggctacacagcatcctgtcctttggatagctttatggttatgtatttgtgactatttgattgacatctgtgtgccccattaccctgtacgctccatgagttggggaggctttgttttttcatcatggtatccttagcatttaacacagtgttctacccacactggtactcgatgaatatttgctgaatgaatgaaagcatgaataaagatttgcttttctttttgagaacagataactaacttatacagagaagtcatttcctaggttttttgtttgtttttttattttggagataaagtatatcactctgtcacccaggctggagtacagtggcacaatcctggctcattgcagcctctaactcctgagcttaagcaagatcctcctgcgtcagcctcccaagtagctgggattataggcatgagccattgcgcccagccctaggttttgttttgaggatataaatccacttttcaaaaatctcgtggatgactggagatgtagccaaacaaaaagaaattgcttttaagcagggcatttgtaaacagtgggtacataactttcttagctaattcatatgtattgtagttaagcagaaattaaaagttgaggtggaaaacacagaggttatgcacacagatttccatttggtttggagtttcccagcataactgatagaaactccctttcatgggtcaattaaaacttgagccatcttgatctggccagagcaaatatgcttccaggaatttttcaccctgtgttggctttccttaagcaaaatgacggaattggatttatgcatctctaacatccagattaagaagccttagaattagaaaaaacaaagaaccagagactttgtttagaggtaatttgattaaatctcctcactttacagaggaggaaacataagcccgaggattaagtgacttggatcagtatactttatttatccataatctgaggcgttgagaaaaatgtaatcaccatgtcttgttaataaaaatctccagctctccacctgaatacataaatgttatctcttaaatttaaaaaaaaataaattttaaagagaaaaatctttctaaacttaaattgtaatacctgattttaaaggtaaaaattaaatattgctttcgaatggaaacgtaattttaatttgtttggattaaacaattcaaatatcaccttggtaacatgctgtcttgcttccgcctgctgataaggatcagaggctacggcctatctaaccacatctaccgaaacacttcatttttaaaagtaaagaaaagggatatcacttcagtttaagtatggtgaataaaatccatctgggcacaccgagcttgttaatttcagtagacccagggctggattaaaatacagtcatgtactgctttacaaactctcagtcaacaatggaccgcatatacaaccgtggttctgtaagattataaaactgcacttttactgtaccatttctatgtttagatatacaaatatttaccattgtgttacagttgcctacagcattcagtacagtaatattctgtacaggtttatagccaaggagcaataggctatcccatatatcctaagtgtctagtaggctataccatctaggtttgtgtaagtgtatctggagtttgttcctgccggttggtttgtggtcttgctgacttcaagaatgaagccgcagaccttcatggtgagtgttgcagctcttaaaggtggcacggacccaaagagtgcgcagcggcaagatttattgtgaagagcaaaagaacaaagcttccacag

SEQ ID NO: 111851 - DNA, 1050 bp, Homo sapiens
aaaagttctccaagtctccactcgacccaggaaggccagctggcttcacgtctcacaagtacactctaggatggagtccccaatccccaggctgccaactgagaccagtccgtggcctgtccggaactgggctggccagcaggaggcgagtgatgggctagtcagcattaccgcctgagttctgcctccttcagatcagcttcaggcattagattatcataggagcctgagccctgttgtgaactgtgcatgggagagatctaggttgtgcgttccttatgagaatctaatgcttaaagatctgaggtagagcggtttcatccccaaaccaaccctgtccgtggaaaaatggtcttccacaaactggtccctggtgccacaacggttggggaccactgctctagaatgttcacacaagaacaaaatcacctactggcatgtttctcagaatgtttcctcatcacaaagtggtgcatgactgcagaagcaaaagtgatggggaatccagaatgcttcccagctggggaggatgtggattctgctaactgctgattctgcaaacaggaatgtgattttgtggcttttcctccagctttgtaaatgagttttctctttaggaatggattttcttcaggctagaatcatcattctcgttttttatttctttctgttcactttatttttattgtgattttaccttattcatatgtccgagagccctgctggtcagcagcttctcctggaatgcctagcagctgtaatagaacttctgattaatttcagatttttaaatgatagttgcctcttcctcccaactactgtaggtaaaggaagtccaagtttcagaagacctgttaagtgctaggcactctcatccatacctctttatctcctcccaacaaccctgccaaggagatatgtatgagagagcctagcacctcttcctgtttttactgagggcagaatagagactaaagcaagtagaaagcaaagctgggattcaaacccatgtctgtctgactctaagccttttgctgcccttctctggtg

SEQ ID NO: 111852 - DNA, 2239 bp, Homo sapiens
atcacaccactgcactccagcctgagtgacagtgcaaccctgtctctaaaaaaaaaaaaaaatggctgggtgtggtggctcatgcctgtaatcccagcactttgggaggccgacgcgggcagatcacgaggtcaggagttcaagaccagcctggctaacatggtgaaaccctgtctctactaaacatacaaaaattagctgggcgtggtggcgcgtgcctataatcccagctactcgggaggctgaggcactagaatcacttgaacctaggaggcagaggttgcagtgagctgagatcgtgccactacactccaacctggcgacagagtgagactccatctcaaaaaataaataataaaaataaaaataataaataataaaaataaaaatggagctttgaggatcattttctcacctggactccagtattttgaatataaagttcattgacaacacagccagaacactaggagtcctgtctccaaggagaagactttcagtgtctaatttctgaaattgcaaaccataaccatgatattataactgagggactgtagctgatctctgcatcttgagaaaaaaaggtttcacagattatctccaacacccacgggatgcattcaaagttgtgggggcagccagtaccattttatataacagcataaatcacccagtgattttactttagcttccagccatatcctatgtgattttaaaatgtatgataactaccttaccctagtctacatcggtaaactctgcaaaactccagcagttacagagcctgtgctaggagctacagggtgaagagggggaagaagactcaagaaacctgtaaaactaatggaggagaggaaaccagctcatgtgctgagaagttttaaatatgctgcatttatggtaggtagagcattgtcatcattgtaaggagtatgaatcctccactgtgagcttttcaaagttcttttatgtatctggaagagtgttaaatattttttcactatgagttgacagtaaattgaaagcttttcttgaataatgaaagtgatcaaaatgactggaggtttttgtgtttttttggtcacttaatgcatatctgaaatagtcacctctagaagctcaaatttccctggaccagtacacttgtaacaaggaatgagatgctcagggagatggtctgctttgggagactgtgacttttgtggaaagagcttggctttggagttgttagtgccctcagctgtgtagaagccaaggcagctgtggagggtctcctttttccatgtatgtcaagggaagaagaagaaagaatgtaatgtttgtgatatgtgatatccaggtggcatggttcatggacactcaaatctttctcccctgaaattgcagaatgaagagcttcgaaacttgtctttgtctggccatgtgggatttgacagcctccctgaccagctggtcaacaagtctacttctcaaggattctgtttcaacatcctttgtgttggtaagttattcatcaccccacagcaagaaatttgatccttagatattgacaggtaactgtcggagagacatgcttcagtgaaataagaatgacatgtttattctctttctttcatcagtaaaacaaggcaaaatatctgccttatacatgtcacaagttataaagattgagagctgtatttaggtaaatgcgttgtatgttttgtcatgttactcaaattactattagtatttctgtcacacagttaagcaactgatcattacaatattgttaagatcccttaaacattttactttggactaggcctctgccttggtatttttcttcacccctctagccatatctttttttttttttttttgaggagtcttgccctgttgcccaggctggagtgcagtggggcgatcttggctcactgcaacctctgcctcccaggttcaagcaattctcctgcctcagcctcctgagtagctgggattacagtagccaccatgcccagctaattttttgtatgccatatcctttttggactaagaagaggaaggtggaaaggaagggggataaagaaaatcaaaatataaatttcctgttagtttgaaggagaagtgtgtgtggaacagatggctgttcctctctctccccatcacgcctgatgaatggcaggtgaaacagcagtgaagtggtttgggctgtgttgatctgttggcattgtcctctgggcatttccctctgagacat

SEQ ID NO: 111853 - DNA, 1255 bp, Homo sapiens
tccaagtaaagcaaagagaatttagaaaaggtgtgtgttcaatgtgagaaccaccatttgcttatttgtcagttatggaagttggggggagtgcagatatttttcttttttaaaaacttcttgaacttcttgatgactctactgcatgtagcctctgtgctgggcattcattagtagaaagccacaattggcaggcacgctacaccaacttgctccctggcattgtatcttaagcactggataagagaaagactggagagaacacagccaactctcatctcatgctttccccttttccctacgtgaagccttttaaaattcagcaggagacctcccgaatggcagctagttctacagagtggcgtgaatgggttgtcctttctctcatgataaatgctcattgcagagcagggcaattcttcattagcatagcaatttgttggcaatttgttgggtttctattgaaaagtatgctaaattgtaatcgcaggccaattactattctggcttctcttcagtgcctccccagccctgtctccaaaatcagctctaagaacatgtctgagagttctgtcctggctcctgcaggggacggtaggggaaagccttctggtgggatcctggtttaactgggtatgtggtgtgcagtggggtgtgctggctgaggggctgactccttgtgttaaataagacaattcagatgctgaattcctcagagaccaaattgatgctgccctgttagatgtgtaaagcagccctatttggagtctcctgggtgggttacaatacctgtgattcttagatatttgtcaggttctattcttaaacatgtttaaaattagtttttcaaactaatgaacataatatatatttgttgtttaaaatgttataaaacacttccctttcatctcccacccccatttccatttcacagagataacactgtgggatccttctagaaacttttgacatctttctgtattaggaaattgcttttggtggcttacagttctgtaggtaggagtccagtatgggtccgcagggctgcattccttcctggaacctttagggagagtgcgcgccttttccagcttctggaagctgcctgcattccttggctcttggctccttccatccattctcaaagccagtcacgttgcatcgctcttttagtattcttgtgtcaggaaattttccacagagaattgcagaaatacagcttaaacccagttaagactctcccccaccctccaac

SEQ ID NO: 111854 - DNA, 1301 bp, Homo sapiens
gcctgcctatagcaattaattgatgaagtattacatttttctctcagcttagtggtcagagcatggagaaaatttattaattcactcattcattagcagatatttagtgagcatgtgttatatgctaaacacaagcaaaaagtttaacatacgacagatttatagtatctataaagtaaaaacaaaatgattgctccagatgaaacacagctttacctggaaaaatttctccatggattttcagaaaagagatttggtgtatgtagtggtctgggttcctgggcatcctctaagtcagtgcaattgtttaatgaaatgccaggtgccacacgctggctcatcttatgccggagtatgtttcatcaaaggtgattctatgaggaacaagaacaacgcaacttaggtatgtagctttctgactctctgattccatccaagagtaaaatctagaataattagggaaggcaggcagatccccatgcacagttacttactcaagtagccagtcttggcaattagagtgaaagatgctgaatcacagatcaacaatttgttcaatctaccgttaccttctaattaataatacaatccctctgtttttcccccgccttgttcaccttagagctcgtaggttaaataagcctgaggatagaatggaaaaggtaggactgctttcccctgtgatgtgggcatcatgtttactagcattggcaggaataggaaaaacagaagtcccagatagcactttaataaggtctctaattactgtagcaatagagtgtttaggcagatgaatttatgataaaataaacaacaaactctgaaaaaaatctatcacagtggcatatctctgtataaatcatcaccatgatcatttttgttttcaattaacttttttttttttttaaagatggagtctctcactctgtcgcccaggctggagtgcagtggttcaatctccactgactgcaacctccgcctcccaggttcaacggattcttctgcctcagccttccaagtagctgggattacaggtgcccaccaccacacctggctaatttttgtatttttagtagagacggggtttcaccatgttggccaggatggtctcgaactcctgacctcaggtgatccgcctgcctcagcctcccagagtgttgagattacaggcgtgagccaccgtgcctggcctgcaattaacttttaataaatgtctcctttgtgccaggcattctgctagggagttttgaaatactttagtcattgacttttctgaaaatattgttatggttgtttggttt

SEQ ID NO: 111855 - DNA, 1364 bp, Homo sapiens
ggtatgctaattgtttgtaatttccaccttaatgtaaatgataattaaaattaccatgcctttaaaaagtatggtgttcctgattcacatgggtgcttaagcaattttcaacctagtaaaataagatgataatttcagtcttgtccaggtaacctggaatgcttgccatgtaattgaagtctttattgctattcttagggaagaagatgaaagttaagtaggtcactttctactgacagagcctttcccatgaaggagaaacttttatagggcagatctgcttctgtgccttttgtgttctaaaaataggtaaatcctgaaaagaagttggctctgcttgagaatgttacacttgtagcatgtacttaaaatgactcaagtaccttcggtattgactagcagtgagaactctgttttatttctgtatccactacacagtaactttgttttgctcaaagttaatttgttaagccatgaatggtgagtgtgaacttgttaaactctttcaggttagggagcagagactggttttatattgcttttatggagggtttttttttttgtaagactattcaggaaagtaaggaagacaggaaaccgtctcaactgctgcacagccagaccccatagagatctggaatgacattcaggatgttacaaacgtgcaaacagtgtcagtgtctgtttttattcattacttcatccctgcacctatgcttgtcacacagtgagcgcccaagcattaatttcatgatggatttccgatgctctaccccatctatctgctctttcctgtattcccagcctacattctgtctgcagcatggcttctgtttacttacacagcctttgctgcctcatggtttctgcttacttacctctctttgtatattgtttctttttcatgccatcacgctgtgtggggattgcatgtatctcattcaaatacccaaagagaaaaactgtgattagatagaccactctccaatgtggagccccagctcatagtgaaatgattgggcttctgttgttgccttgaggtcagggacctagccatggtctggttgtctgtggccaactagcagggccatggatgtaaaggatggtcttgcttataagaggaaagcggttatgacaaacacttagaatggtgttcccataattataaattagagtctgactggtattattcagtcatgttctagaccagattctaagatgtgggagaacaccctatcaggctagtttcttgaattctcagaacttggcacagaacttgtatatagtaggcactggaaaaatactggctgaatgatggttgactaaagaggaaattctgtgatcttagatgttcagggacacac

SEQ ID NO: 111856 - DNA, 3151 bp, Homo sapiens
ttcaacagtatagtcttttatcccttaagtaatatagatttatactctaacatttaggagagaaagagacaaagttcatgttcttgttcttgtaatatacaaactgagcacaggcaatcttacaagtacaatttttctattcagaggtaaagaagaatctcttgatctgtaaatttgaaatctctctgctaaatagtttctgaaattcattgaggcatttttaggaaggtattccatagattacacatagaaagaattatctcttcacagtgacatttctggtgacagtttttcttttttaaactttataatcatgactaataaaaaatactgatgaattgaactgatgtctgagagacattgacacattctctgatttttcttttgtggttatgtaggtgagacaggcattggcaaatccacgttaatggacactttgttcaacaccaaatttgaaagtgacccagctactcacaatgaaccaggtgttcggttaaaagccagaagttatgagcttcaggaaagcaatgtacggctgaagttaaccattgttgacaccgtgggatttggagaccagataaataaagatgacaggtacatcttgggattttggggggacatgaatggatgaggagatagcaggatccatcccaggtaaatttaaaggccaaatgttttggggattttttagttgtggggcttggtcctctattgcctaaaaggtgtgatattcttgtcctctgagaatttttctgagaatattcttccttgaggtcagaatcagacatcaaaattgatcccagctagtaggatcagaaaggggctttattagagggactaaattagcttacaacatctttccacaaaggccatgaaaccaggtttggggctttcctaccaggaaaagcaatctagagaaacacccagccaccctacagaacagttttagcagaaaccccagccatcaatcacttcatactgcttgggaagccaggacactagaggggaggtctctagaagctccaccaaatctgccccaggtaatcaaatgccttcaccatggcttgctatataatgataaaatagtacactgagtttttataatgtaccccatttataaaccatgtaagtttgggtctttaccatgagttatcttttgcccttatttgagggaagttttcaattcttaaaatttcgtggcatacaacccatgttagtcttagtctcaggattttgttcacattccttctcaagagcaccaattctgttcatcagtctcaacctcagatgtcttatgactattttacatagtacattcattctcaaaagaagtttgagaaagttaaaataaaactgccccaggtccaaaggtgattgtagaatggggcttccagaaacatctttgagcagttacaacattatgggcataagtgtctacctgcttagtgtgaccaacatgtagacatgaacaacaaatcagtaagttagggtgtgtttgcttacagctcagacactttgcttgtatcaggattttttccccatattcctcaaaactgtatattatacacatgtgttttgtaaagaggaactcgactatttttatctagaaatgcctagatatattttatctatgcctgatataagtatgagcaccacagtaatgacagataaatgtttaattcattctttagctgagcaccaagctctttattttatctacaaagcactttaaatgctcttcagtagacattgtcccgtgataacaggaacaattggtagatagagtgagaaagattttattttgcataccaaaatggactatctgtacattgtgctggggcagggaacaagttcagctctgacactgcagctgagcagttgctcttaatatatgacctcaatgacagggaatgatggagaggcccctgcctgaaggctgtttgtaatgccaagagcagtaaatgaagagaaaggcctggtcataaggaaaggggcacaagtgcattgtgggagctgggaagagagccgggggtttcaatcattgcatactcacagaatatacccagagcaaggcctgttctccatctctcagactggtatagattttctcactggcgttaggaaaaatcttgcttgtccattccttgattggaagacagcaactgtactttttcaggatccctcccccaaggaatgagaaccatcctccacatagcctcttgctgagattccctgtgctcttccagctcactggggttgccacagtgctgccactcaatttttgcctctcccctaaactgggactttccctcgggctgctggtggcttttcactccccaatcagcactcagcagcaaacagttagcacaatgcatatcctcatatttgcagctggagccctccttaagaaattatctgactcatttgggtcaaataatagtttccaaggagatttagaagagaggaagtgtgatattaacttaacctagataccaaatattttttttcctctgaaatttcttgacagctattgcataacctctttaaatggcacttaaaactctctgttaccctgtgcctcagaaggtattgttgacactgttgactgtaaagccaaattacttgttcacaaattgttatctggacaggctctgcctccctcaagaaactggaagtgggatattcatttctgcatcaatatataaccatatggaaagggatgtggtatttctctatgcccatgttgatttttacctactttggggattaggcaagcttttctgccatagatgcaagacttcaagaatgtcccagtttgtttatgtaggctttggacatgtcaacattcctgtattattatctgcctcagaccaggctagctagaaggaggcaggaagagagatctggtaaggtttcctgttatgtttaaaagcacatttcactctttgttatttaagggcttccttgttttggctgtttgtactcttcagtggagaaagaaaggggcctggggaagaagggaaagcaagttttgttgttcaattggaaatagaataattagtttgccccacactggggagatgggaggtgagctgtccatggcgtatcactagctgtaatgatagttagccctcaaaggcagagataattg

SEQ ID NO: 111857 - DNA, 1807 bp, Homo sapiens
taattggcaaaaaaaatataaataagtgttagtaggaatggggctagcaaaaggctaagttgggattaagcttcctatctttctcactttagatggagaagtggaaaggatttggaggaagaggcagataattcatctcatctacaggatgatgatgaggagtacaaaaccacttggctggcttgagtctcatcaagaagaaattatttcatcagcataattaaatctttgacatagggaatagtggttttggtaaattgttgtccaggaatacatttctttttattggttaataatggtatggaaggtaaagtagatgggatttcatatttattatgtgtatgacataagagaaggaggctccaggttgaatcccaggtttctgacttggccagtggtgtgggtggtggcccaccatgctaaggaatacagggaaagtgagggtttgaaggcaggatgaatagttcagttttggacatatttagttggagaagcagttgaaaatataggataaccaattgtggatgggtctgaagctcagaggaaagatctgggttggaggtagagatttatgacttgtcatcagatagatggtgagtggaacacaggaatgagtatgattttctagagggaatacatagagtgaaaagaagggagactgaatgattggccaggactctctaataagaacaggtagaaggaagcctgagatattagagaacaaaagatatcttgaatccagtggggaaagcattcctcactgcaaaatgagtgttgttatgcttctcattatctttggaggatcagaatcaaaaccagaggcaagaagggaaactaatagaaaacagaaccatatttggactactattgagaggaggaggtgctaaaagctaaaaatcagacacaggggaggcaggggagcaattgctgtgagctgcttctcttaccctttgggataagaggctgctggggaagagccctaatccccaaatctgcctcagtgtcaggagacagaaggatcagccccagactcaaagggcaaagggcatgggtggacctcactggagtggcttgctctacttccctactggacatgagctccatagcagaacagataaccagcagagaactgggtgaatgtaaagttcctttttttttccttaggtttttctaaaaagtcaggcttgattctatagtggtggttgtttattatataattatgaaatagttatatctgacttttatgtgccagccctttacatgtattgcatgtattggctcatttatttgtcacaatagctctctgatagaactactatttttgtctctgatttacctgtgaggaaattgagacacagagaggtttagtgacttgcttaaggctgtgcagctagtaagttgtgcggctgtattatggttttaggcttgaatccatgtttctaaccaccatcctctataactatctcattaaatattattattattatgcaatatatgtctatatttcaagattagaaaatatagaagaatcttattgctcattcattcttcttattggaattttgcctgtcatgatttggaactttattattgctgaggtacatcctaccttttttttttttttaaagcctctagagattttgtctactctaattgaaccaatatattgtgataaaatcaccaaagaaaaatatcaaaaagctttttatgactgctttcagttttgctcataagtttgtttgttgttattgtttattttggggatgtttgtttttcttaggatgtctgcgtcatttttattataaaa

SEQ ID NO: 111858 - DNA, 1299 bp, Homo sapiens
gagttatggattatgcacagggctatgggagcacagacagcccccatctctggaggaatagggcagatgaccagggaatagctcgcagtaggtggtggtgtcatatcctgaaaccacacaccagtttcattttgtgcaccagtggcaatcagtagggagaggctatcacagtcacttttctgagatggatttttgaggcccagttttggcccagcaggaaagaatgccacagtctcttagcaatatcttccacggataccccttgggggagtggcagtcagctccacgtatgtacagtctctgttttagaggatgaatgttagccaggagaagagtaggaaaaagacaggtttctcgcagaggggccagcgtgagcaaagacacagaggaaataagggcttgacatgggtggggggcgggctgctacaaatgattgggcgtggctgggacaggagaggtgagcctggagcgctgttcagggatcaggtgatggaaggcctggatacctaggtaaggacttgggctttagcccttaggagagaagaagccattgtgatgttgaatggaggattgtcctgtgaaagaggtttgagactagaaacatgctgtttctgcattctagctataagccgatagtagaatatattgatgcccagttcgaggcctacctgcaagaggaattgaagattaaacgttctctcttcaactaccatgacacgaggatccatgcctgcctctactttattgcccctactggacattcactaaagtccctggatctggtcaccatgaaaaagctggacagtaaggtacttgctgccattctgattatcatccactctccttttagatcttctttatcctaatgccctaatttgttctctgctttcagtgtgattttttttttcctggattacaggaacagtgtttgacagcatgagaaaaacgcttcaaaacctcttgcctgttagacaaaaataaaataaaacaaaacaaaactagcaaaaaaaaaaaaaaaagtcaagttgctttccaggaagtatttttaattcttaaatgggaggttgaaatataacttccaggtttgtttactttcttaaaaaaaaaaactttctctaaaaggtgtttagaggtttggttttaattcaaagtttacaatggaataaaaggttaaatttttgtctctgtgatgataatggtccagcttcttcaattttaaaactgaactgcacatgtgtgttcaagtaaagcaaagtcttaatttcagtgtgatccctgagcttgccacatttatacctt

SEQ ID NO: 111859 - DNA, 1030 bp, Homo sapiens
caccttactatatattaattagactttccattttgaaataaatagaagacaatacattctgaaataaggatgaaacaaatggcaacaagaacaaccacaaaactaagctgtggatggtatttaccgttagattcaaaaccccttttgcattcacagaaaagtcttatcagatgataaagctctttagaggactctgctgggtgttgttactatgattttatctaaacaacactgataaagatgctgtctctccagagggacaaaacagtgagagaatgctcagaagatcagcctgtccccaaggcctctgtctcaactgtcctttaaagggctggagaggctgaagccaagccaggctcctttggcttccagcaggcacagacacagtagtttacagaaaaatcttctaatggcctggaaggatcactgcagctagagtactcttcgcagaataaatagaaaccctccttcatcccatctgattcctcagctccctgggagctgtgccattagccatgatagtggagagatcacgggcagtgagggccgcttccgggtctgttgtgtccttggaagcaggggcagacctccctgttctcaagagtgccccattctccacagacattctgaaggaagtagagtgaggaggcttcctaatcgagggctgagtatgcagacccagccggataatatccaacactattattatgtttaatagagttcattgaaaacggaaaagaaaaaggcaaaacaggcacaactaataaaagcaaacagtcaaccataaagcaggttaaactttcaaagaagtgatattgttggagagttggagagctagctagcatctgaaaatgataatatcaaagttttatttatacaagtaaagggaagggttaagcaaatgtatggtcatttcagaaaagactttcaagtccggctagtgaggaaaaagaggttttaaaactaaattgcttgatttctctatctcctctgatcaatttggccaagaaagagtgaatctctgccattt

SEQ ID NO: 111860 - DNA, 1029 bp, Homo sapiens
actttgctgttatactgttaggaggtgcgaactcaagagcctaaagtagatgggaggggtctaaaaggagtggttggtcattcaaagaataagttcctttgttatcactatttgtcatagaagagtaacacttcctttactctgtaaagaaaaatgaggtagcataggagaggaaattacaagtatactttcagtgcaggatgggaggaagtaaaagtgtttgaatatggaactaaaagtttatctcaggtcttcttaatttttcacctaggtagaaagtctgattttcattatcatctctaccccaaaaaaaaaaaaaattgtaggtacataggaggcgtatatatttatggggtacatgagatgttttgatataagtaggaaacatctttattttttacagtaaggttttgcaatttttatttgtttgctatgttttattcacttgtctatttttcttatgttggaattgtgtaaaaatggacgtgtctgttttacaggtgaacatcattccaataattgcaaaagctgacaccattgccaagaatgaactgcacaaattcaagagtaagatcatgagtgaactggtcagcaatggggtccagatatatcagtttcccactgatgaagaaacggtggcagagattaacgcaacaatgagtgtaagtcctcaagtcaaatgggaacaagtgatttttatgaacgcctgtcttagtagcagcattgtagagtggctggagcactggactgactaggaacctgatgacttcagctgtagtccagctttgccaccacttcaagtcatttaaccagtctgctcctccgtttctccatctgtcaaatgggagctttagacaagatgatctcaaatttccttcccactctaacagttacgatttctacagcaaatcttgtgagaaggaaatgccagcccagtaccatttcataaaaagcagctcaaaggaaatagatctgtgcttgtttctaccaatcttggcagaaatacattagcttgtcccaattttgctt

SEQ ID NO: 111861 - DNA, 1011 bp, Homo sapiens
tacatctggctttgggccagatgttctggcatttgaatctagaccctgctacctctctttgggaggtcagcttgctcaccaagctcctgcgtctgcaaagcaagagtcatgacatctagttggcagagttattatgaagggtaaagacaatatttgttttcaagctcctccctctgtgctctgtgctgagtaggcactcagcagtcagcgttgtcatcagtattatggtcaatgttgtcagaaatcttgtcttcgtcaggaatgtaaggtgaatccagtaaaggatcttcagatggtcttgagaccccagagatttcaggagtgatggtaataacatcttggaagcatcactgcagatatttcagtgacatcattgctaatcccacttccgccatttcccccctctcttgtagttgagaatgaaaatcattgcgattttgtgaaacttcgagagatgctgatccgcgtgaacatggaggacttgcgagagcagactcacacccgccactatgaattgtaccgacgctgtaagcttgaagagatggggttcaaggacactgaccctgacagcaaacccttcaggtatgaaggcatctagcaatcaggtgtctcccagacagtggcgagagtggcatggtggtacatcacagaaatgcttgctggattgagatggtgatgatggaaggatctggtgggtgaagattaatacatatgttgtcaggcattgtgataattgctttatttgcattatctcaactaacttacctagttgatgtcattattatccacattttacagatgaggaaacaaaggcactgaaagtgtaaacaaactgcccaaggtcctccaagtagtaaacaatggtgtggtgttgagctcttgccatctgggtcctgagcccaggtttctgccagttctcttgcagaggtgcagagcctggtcgatatatttacaaaggtgcggctgctgattacagtttgccccattcatttttgccaaacacctttaact

SEQ ID NO: 111862 - DNA, 1864 bp, Homo sapiens
atagaattgaaaataaaaattaaacttctccctgctctgtttacaactggtaatatacttgaaaagtagcaattttctacagtacctttaaaggtaatgttgtctctttagtttacttgctgggtctattttccacattgggggctggagggagatgagaggggagggtaccatttactgggcactgactatatgttcgatgttttattcccttcccctcatttcattctcagggtcatatccctagaaggtaagtgtcactgtatccacgtcttagaccttggaggctgagggaggctgtgcttttctaagaacagccggttacttagtatggcccaaattccaatccggatctgtgggactccagtccctcttcatttctccccctatagcaggccttctccatcttctcaaattctataccacctccacctcctcagcccaggttttccttgtatgaatatatgtaagataaaacttggctagtcacagacacacctttagtgctgtgttgtgcttactgactgatttctagttcttgatgcacttgtctttccaaccacagcataactaaaagcaaaacagtgtcattctacttatgctttgatctggcaagcagcagctttatctatgttttgaaagtagataggtagaaattatgtgaactgaaatttcttagtatacaatttcatgatgctgtccttcgtttgtggattttcaatagtcttcaggagacatatgaagcaaaaaggaatgaattcctgggagaactgcagaagaaagaagaagaaatgagacaaatgtttgttatgagagtgaaggagaaagaagctgaacttaaggaggcagagaaagaggtaagccatctgtcctgcttcaagggaaagatttgtaagagagagattttctaaatacatcacgctttagaggacttcatgatggtccaagtactttctacatgcattttgtcacgagtgacctgccaacctggccaggaaaatgggtcagatattctcatccctgtcttacagatgataaacaggttataaaagttaaaactatttttgcagtcacatacctagttagcagcaaaaccgagactaaaactagatcttaggtctccagatctgatcacatggcctgtgtagctctgtgtttcttcaatttacaagtcttaaaacatgagatttgggattctgcgactattattatcttcttagtctatcagccaactcagctagactttggcagtgtctgggggacaacgatctgacacaaagcctgcactccacatctgcgcccgtgcttctgccctcacggggcttgcactccctgcttcagccttaccttagtcccctcccctggccagattaactgcttcctagaagttaacatagatttatactataacattcatcccattgtatttgagtgtgtgtgtgtgtgtgtgtatgtgtgcttgtgtgcataatgtctatttctgctggtcaataatgagtatctgaagtgtttgaccaatgtctctatatgtttctaagtgaaatcatttaaataaatttcctcgttttcttgttttaatttattttgtctaaaaactactgaaatttagaggctatttaaatagctaagcactcaagatggttttgctgcagagaaagttgagccttatttgctgttggcttcaagaaccaaggggatgctgggtaaaaaatctaaaattgtctagaattccttcctttccttttctttttcattttctttcttcttcctttgcttttcttcttccccttccttccctcaagggccagaaatttcccaacacattatttaagtagctaatacataatgcatatatatatatata

SEQ ID NO: 111863 - DNA, 1077 bp, Homo sapiens
agcaaaatggtactttacacctgtattaaagccagtgcagccacatgacacatatttgtttgttttcttttattttcttttgagacggagtctctgtcacccaggctggagtgcagtggtacgatctcagctcactgcaacctccgcctcccaggttcaagcaattctctgcctcagcctcttgagtagcagggattacaggcacccgccaccacgcctggctaatttttgtatttttagtagagatggggtttcaccatcttggccaggctggtcttgaactcctgacctcgtgatccacccacctcggcctcccaaagtgctgaaattacaggcgtgagccaccgtgcctggccatgttttgttttttgaacagatccaaagaactttacatcaaaaggattttcattccattcaccaagcctgttttctttttctctccagcttcacgagaagtttgaccttctaaagcggacacaccaagaagaaaagaagaaagtggaagacaagaagaaggagcttgaggaggaggtgaacaacttccagaagaagaaagcagcggctcagttactacagtcccaggcccagcaatctggggcccagcaaaccaagaaagacaaggataagaaaaagtaagcaggtgtcacccccctgtatcggggacctctaacaatttattcctcttgcatgtctctacttttcccatttacagactggaaactggtcctttaccagaaagataaaagcaagtattttctctacagtgcagggaagatgatgaaggtttttaaatttttttaaaaggtacacaaagattaatttataaaactttaccacaattgaccaagcaatcaggcctggaggaacctgttgtctccagtagcatcttccacaccaacactaggagtctcaaagaagacaggttgatgtctcttcagcaccctctgaagacaattctcatgactcttgatagagagcatcctaaaatcacaattgttaaaattattttcctattctgtgttgtaagacttcgtaagccagtcactgaaattctcgttcccaaaatgaaacatttgg

SEQ ID NO: 111864 - DNA, 1411 bp, Homo sapiens
caggctagacagagcagcactttgaaaagagctgggaagatgcctcctagcatagctggaacagatgtgggagttgccattcaggaactgactttgttataggtagaaaatgaaaaggcagatgcttacttatttacctgctatgcttccacctccaagcctaacttagtttttctaatagttttaaattctcttttttctgttctaatgacacgctccttttttaatgtaggtaaggctttatacttctccttgacctgtagtggcatgagagtgtataacatttcctaagatgacaggcaaagtagaactaaccctggcactgccattagctggaccccaccttctgccatctctggccacgaagtcactttccttgtttgcggctataccacagtggtgggactgcccaggggtaagttggtcagtggacagtgttcctcttttctgaaaactgtctgcacaattgccagcaggcatttgctggttaagatgcaaacagttttaaaattcgtcattttaaaaccatacttggcatctaataactacagtttacccaaccatccactcatcttttaaaaaaaaatcattttgattcttgctaaggaataaggttgcatgttttgcagttgcctaaaattagacacgtggaccgtgggtttggcattactttgtacctaaaagagggggaaagctcctggcattgctgtagctgtaaccattccagtgattgtcctttttttccccctacccaactagattaatagcatgtcctccattcactatgtaatttcaatccctaaactgctttagaccttttcttcaagtcaattgtacaaaggcatttattgtatatttattctctgactccttcagcagctcagaagtggaaaatgaagctcctattcagtactaatgggacacccaaacctaatagataatggttttgtgttatttgagaaaacaaaagccaaacagtaaatcctcccactagacatgcagtggtttcaagaagtcacttgtgaattctaaattacatacaaatggaaactaaccatatgtctttaattcagtattaaattttgctttggcttgtcatgtagagtagccttctcaaatttttggttttaatttctgtcaattccataatcattgcatgagcattcaccatcactgaatgctggtgctgtcgctcctaattttcctttctttttaatttattattatttctaacttttttgttttgttttttaacttgcagtgcaagcttcacataaagcctggcaagccaaggatgttcccgcattcacctgcttttgcagtaatatcgtatctctgccatgtgtgttctttagttttattttattttattttatttttttacccttcctcaaacaccagtaactattat

SEQ ID NO: 111865 - DNA, 2416 bp, Homo sapiens
cattatattttatttttacccttgcatgacattttcattttaatcaataacattatttggcctgagcttgtgggtctgttcagactgtctcctctcatggtttgaaactgcatctgaatgcctgccttcaatcctggccaagttggagtagactggtatgagaaaactatgattagttcacatttactggtgcatccttgatcctctcacagatagaggtcttaaaggttggatcatgtaacattgcttagtagaagaatcttcttctaaggatgatgggctttctacagcctgcttaccactaacagtaaggaatctttcataaacacacctcagtttgttcccagtgggcttagagggaggacctgatgactgattccaggatacttgtacttctaataacatttttcatgaatcatgagaaaatttccacagatacttcccttagaaaatttgctataaactctgtatcattggtagcacaaatttgagcgaggccttgtcaattttaaggtggaaataggaaggaccacaacatgacccgtaagtcaagaaggtagacatttcatatccagcttccttgcttagtctcctttcagtatttggcaataaaagaaagaagaaatagaacagctgaagtctcaaatcattgtctggaattttcctcaccttggctagctccacctgctctttgtctaaggcccttgcctcatcagggattagaactggcccatatgccagaacctgtactaaatgcctaatttgtatggaagagtgcatatttaatctcttttctatactgctcctttctgatgcttatcctttcatctgtgtgattgttttttcccctctactaacaagatcctcccagctttctctctacatgtagaaaggataacatttctcatgaacccactgcccctctgcattttcctcactggttagagattaagtaaataggatagaatatgctgcgtctcccctgacacacactttcttttttgaatgagcaagtctccattttgatttcagcaaagattttttctccttttctttgtcctcaaccatacttagaggaaagaaggaatggtcttccatgaactgattatgcttaattaagcaaagtaaggaaattagtttcatggaagcctaaacaaagctggaatagaaactacacactagacacagcagtagtcatagtcttcacaggtttaggagctactggaccaacattcttgtttttgcttttgtttttttaaataattctagtctggagctaactgtggagcagccaaatagtagctggcatgttgattcaaaccatgggctgaatttgctcataggctgtgcatcagacaaaagcttgaatatttgtgttgtatgcttgttccaaccaccgcttgtgtgagcatttttgtggcttgtacagaaagtacacttttaaattgtctcttgcatcactaaaatttttttaaaatgagcataacaacgaaaggcatccagctgactttttgattccaagattattgattggattgacttttttgcattaaatttttcccagcaaaataaatcatatggcgagtcagggaataaaaagtcaaaagaaacaaatagaagcttttttttttaaaaaatgtattgcttctgaacttttttctgccactgctccctagccctgtttagtttgttattgctgcttttcttttttctttctgtatctatgcctttttttcacagtagtccttggctctgcacggaataaatgataccctcaaatctaattggatgtgctttcgcctttgcatgtaagtacggtagtaagaaacctttgagatctttctgacttttcaaaattagagaaagcaaatgggatggatagattttttttttcttttcaaggggggcaggaaggtaatggtttgagtagcctttgtttaaaaaaaagactaaatatatttaaaaggccacatttatatttttttcacaagaaccacataataaattccacttcttgacctgaatttggaaatccgaaattactaatccaggccaggtgtggtggctcatgcctgtaatcccagcactttgagaggccgaggtgggcagatcacttgaggcctggagttcaagaccaccttggcgaacacggtgaaaccccgtctctacaaaaaatacaaaaattagccaggcgtggtggcacgtgcctgtagtcccagctacttgggaggctaagtcaggagaattgcttgaacttgggagatggaggttgcagtgagccaagattgcaccactgcattccaacctgggtgatgaagtgagactctccaaaaaaaaaaaagaaattattaatccctgcctgtgctctacatagcctcatgggcatcattggatagctcagagggcccttgattct

SEQ ID NO: 111866 - DNA, 1047 bp, Homo sapiens
acagatgccaaattaccaagcatgttgctaagtgatcactttcatatttgaaaaaatgatatgcttcacatcaatacaattactttagtttaaaaaagacaaatgtctaacatgcagcttacatatatgacaattctgcattaacaatgaaagtagattacacgacagttttagaaaacacattggttattttcaaacagcaaaatgacaaggatctacaactacagtttaaggcatatcagcatattttaaaattaagaaatagacaaagttctaatgctgttcacagcttttcaatttatttaaaaaattcccttcatacctacatacaaactagactttgtaggtcttaattcccactaaagaatgtgtcctgtcagtggaaccaggacttttcgaagctgagacctgacaattccagactcttgcaaatggcaaagcaaaggggtgggaatggacagtttttgtaggaccacacagagacagcaggacgtgggtcggtaacagctgaaaaacctcacccaatagtttgtatgtgaaacagtcatggaaatgtcaagaaagcaaggaaaccaagtctgttcatttgaggtgcacaagatgtggattgtgtgtgttactgctggtgagtcacaaagcagagaaggaagataagtaatctgtgcccactgttacattaaataattcccattgttgaaatgccctttttggagaaaaccttaaccaattaataaagagcctaagttgggaaaacacaatctgaactgccaataaattctcatcaatgcttttccatcacattctacagtacatgtgttatggagatctaaagttcagaagaagcaaaaagatggtattatgtttgaacaaaagatatggggtaaggccagctagttatgtaggcccctcaatccccaaaaaagaggtggccactgtcagcagttagcaccagggagagaccattaaactaagattaaaaaattaagtggtcataaaggcatcctagcataaaaatttttctcttggttttctctagtagaagatggt

SEQ ID NO: 111867 - DNA, 2664 bp, Homo sapiens
tctccataacacatgtactgtagaatgtgatggaaaagcattgatgagaatttattggcagttcagattgtgttttcccaacttaggctctttattaattggttaaggttttctccaaaaagggcatttcaacaatgggaattatttaatgtaacagtgggcacagattacttatcttccttctctgctttgtgactcaccagcagtaacacacacaatccacatcttgtgcacctcaaatgaacagacttggtttccttgctttcttgacatttccatgactgtttcacatacaaactattgggtgaggtttttcagctgttaccgacccacgtcctgctgtctctgtgtggtcctacaaaaactgtccattcccacccctttgctttgccatttgcaagagtctggaattgtcaggtctcagcttcgaaaagtcctggttccactgacaggacacattctttagtgggaattaagacctacaaagtctagtttgtatgtaggtatgaagggaattttttaaataaattgaaaagctgtgaacagcattagaactttgtctatttcttaattttaaaatatgctgatatgccttaaactgtagttgtagatccttgtcattttgctgtttgaaaataaccaatgtgttttctaaaactgtcgtgtaatctactttcattgttaatgcagaattgtcatatatgtaagctgcatgttagacatttgtcttttttaaactaaagtaattgtattgatgtgaagcatatcattttttcaaatatgaaagtgatcacttagcaacatgcttggtaatttggcatctgttaaggtaggagagtggtgaacagataatctatgcatatatcactagtgccaagacataaagcgggggaaaatatatttttacccaaacattatttgtgtgcccttttttgtgagttctttttagtcactgcttggtttgcatatgtacacgtgcttactggataaaagaaatagggataagagtctcatgctttcctgcctcgtgtggtagacttcaaatggctgccgtctgggttacaccagtttctcaaagatacgtgccatgtggtgtcctgtacttcacatatcatgttatcaccctttttcccccatgcctgtccctgtccaccctgccaattcatgtgccttggtgcccagctgaggcatcgtcttcttcactggcctcctcttccctgctgctgctcaccctcccgtcgagctcgaggaagtcaccccattaactgacacactgctgttctttcacagcttgttgtagagaagctccttttcttttcttaagccattaagaatcaaatttgaatctgaacctttcttttttctcttctgtagcttcttctttatgtaaccatcctgttgacaagccctactctctcctaatggacatagagcattagaagagcaggagctgtctgttcacacgtgttggggaagagttacctcatttccaccatcgcctcctgttcttttaaagtctgggtcaaatattgcactgctgtttgtacttgtcaatgtctgcccatagtggatactgaagtgacttaccactaccaaaaatagtcatattcaataatattaattaaaaaggaaaaaggaaattgactgaaacagaaaacgtgggccaagacccaaggtcttgtgctgggatccccttgcttagaactatcatgttcttgaagctgctgatccaagaactgatggactgaagacagcgtgtaccctaacctgagggggccaccacacccagggcccacaaacttgatctcatggtaactcctgtcctttctgtcccatgagccacattctgaacagcctgatcaggatcctcaaccgtcaggtcataagatccgagcaacattttccttccttttgttagttttatgggttgttttggtgtttggggtttttaaaaaaaaaaaatcatttgatattgcatgaacagagatggctgcaattttttttctttggagtgttctattgatacaatgtttttatttttcagctgaccatctgcctcttgagagagagagaagtgggcatccttcctttaaattcaggaaccactgttgttttatttgactttttctgttacttgcatcccttatataagttgttttggatttgggactatgttttgggggagaaaaactccagttagttctgttttttgtattggttattcagcttacttttggtatcaaaattatgccagttttaagctcacttgagtgaagtttaagtcacaagattctgtttaacatgctttccttgttttggaaacaaccaaaaacttcccttttttgttacgggattttgacctacaaatcctaatcatgtttaaaatgtgccggtgttgggtagatgacttttctgcctctggggttcaatttatatttaaagataccttaaaataacttactggcccatccctgcctttttatttgttgtgaagctctgtaccttgtgtccacagctttttaccaagacccatatgtcttggaccatgggaaatgaaccccaaacaagtacatgtctcttctcccagataacagcatcattaacaatggttctgattcacattgtcttctcagagttacctaggtggatttctctacaatatct

SEQ ID NO: 111868 - DNA, 1040 bp, Homo sapiens
tgttatcaaataatgctatgagttttggccactagatggtgcttttagaaaaatacagcatctttttcaatttctgggagaaattgagttgagtttactgtatgttagtgagcagttgaacactcatctggttgctgagccaactgtgttggcttagttagaagttcatattacttaaggtacaggaggcctgtgtgtgtgagagacagggaactttggcaagatcagccagggttaaggggcagatggtgactggataccacgtttcagaccaagaaaaaccagaaccagtcttacaaatcccaattagtgagttgtgtggttctgtaaagtagcctagaaatacaattgggaaggcttgaatatagccaagtcccaaaaccttgctgctttcagtttgaattggatttggccaatcattaggagagaaaaattgaagagcacgcttacttagcacagcttgcatcaagaaatagcaagttttccctcaccatatttagtggcttttatgatgtactcgtatgtaagaccaatgtcagacataactctcccttgtgccagttttactttaaaaggcgtaataagataaccaagaatgtcttatcagagaaatttgagaagaactcacttttttagttcctaagagcctctggagttaaggatgaaatgagaaggatgaaatgcctttctcttaactctagaagtatagccttcataccagatcaaatgccagaattgttgaccttattgtgttacacaacagtaaggttgtaaaaaagcagtttgaatagccctaggcctagtgaactggtctcccatttcttggaaatagcttattttgttaggcaataggacactccagaatgaaggccaactttaggcaagcagccacgacaaagtgactggtggggagcagaatcctttttgcttttcaggatatgatctatcttcagcaaacgacttagcatagaaaaggcttgccttttctttctttcactcttaacgttgctgtgcttatatgagttatacaagttcaattc

SEQ ID NO: 111869 - DNA, 1034 bp, Homo sapiens
cacttgattcggtgtcccatgagaagaatgctgtgttccaaactaacttaccagcaatttgtaaatgttgaaaaccttaagactgaaaagtgaaaatcctattgtcctctaacattctgctcaatttgcagctactggactacaaatgaaatactgactctaaactcagttttatccctagctgtctacataacacaactatgtcctcatctgttaaataggaggaagtttcatagtatctgtatcattttacagatactatgaacatatgcagttgtaaacttcttagagctcctacaattcagatgaattaaacagatgaagatcaggatgagaaatttttaaaatgtctatctgtgaagccaatcctttgctatcttccctcccactccctttactgacatgtgagtaaatgcttcccatttaattggattttaaggtcataaaacaggtaagtcaaccctaccacaagaattttttacaaatcagatgatgacctgaaaatactcttgttctgctaaatctgaacattacaaaatggctaaaaatgacattttaaagataggggtctgagcctactctcacaagcagtcacattaagatgtaaatttactatttggaggattcacagtgcaccagtgaaaaaatatcacgaaagaaaaattcttatgtctaaaacctatatccctcgatcacattcagatcctcttcatgttttattttcagtaagtgtattcttggtctttctattgttttctctagttgaaatagcagtgcctagccaatcaggaacctgtacctcttcacaaccagaaaaaagtcacaaaaacaaaagttaaggacaactttttattgctaccagaggcttttatcatcagtacacagttctgactgcaatacctttttcagactgcaaagggagctcaggatccagaagtcattaaaagaaacataaggctggggaggcagggggagtaagttctattagaaaatcctaatagcttaacaaaactagggtactaaattcagttata

SEQ ID NO: 111870 - DNA, 1218 bp, Homo sapiens
aattcaattaaaattcatggccagcaatcctgttccccctcagcatcctgatttaattttcctgttgcttttgcttgcttctccatttaatagttactgaactttatgcatgttgatctatattgattttcactgcagttgaatgaacaaattatttcagtgtgacagccatgactcaagttccaattagtctgaaaagggtactttggaattgtcccatattaatcagagatggcaaaagaaaaagttctcatattaccaggttgattttgtgtctcatttcaaattttaatttaaaattatggttttcatttttgtttaccttaaagtgatgcttaaaagtggcatgtaattaggacacttaggtttgttgaaagcattttcgacatttgtataaaagaatttgtgataaatatatccaggtgctcaccaaagaaacatgtattaacaacttaaattagatttttctaactgatagttttcactcatttataatcagtaggagagactgtctagatgttggggcagctctatgatttaagtctgtaacatgttataactgaatttagtaccctagttttgttaagctattaggattttctaatagaacttactccccctgcctccccagccttatgtttcttttaatgacttctggatcctgagctccctttgcagtctgaaaaaggtattgcagtcagaactgtgtactgatgataaaagcctctggtagcaataaaaagttgtccttaacttttgtttttgtgacttttttctggttgtgaagaggtacaggttcctgattggctaggcactgctatttcaactagagaaaacaatagaaagaccaagaatacacttactgaaaataaaacatgaagaggatctgaatgtgatcgagggatataggttttagacataagaatttttctttcgtgatattttttcactggtgcactgtgaatcctccaaatagtaaatttacatcttaatgtgactgcttgtgagagtaggctcagacccctatctttaaaatgtcatttttagccattttgtaatgttcagatttagcagaacaagagtattttcaggtcatcatctgatttgtaaaaaattcttgtggtagggttgacttacctgttttatgaccttaaaatccaattaaatgggaagcatttactcacatgtcagtaaagggagtgggagggaagatagcaa

SEQ ID NO: 111871 - DNA, 1405 bp, Homo sapiens
ggactcatttctgtttttgctaagtttgctgtgttcaggtagggaacaccaggtctaatatctttgtgtttagacgtgtgacaaggccacaatatcagatttcttcctagttttctggttttaatataggaaagtcttgcatcagattgatgagatcatgccaaaattatttgcgacatgattcccagtgtcttggtttgaggagagtccatcacagacataccgtgctgtgaggaggccactctcactagttctgcctgagcccccactttgagacaaagtatggtgagtgttcccaggtttgaaaggcaatcttccttttgtccctgttaacctcccactacacccccttaagctcttgcgccacctgttggtcaccattctgggatggctaaacctctttctctccttagccttataaactcaggctgttaactctacctagattagtgtggtggtctttgtagttcctagctgggcagtagtcaaagtacatgttctagtttaaaactagagtaggtgcagccataaaacagaacaaaatcatgtcctttgcagcaacatggatgcagctggaggccattatcctgagtgaattaacgcaggaacagaaaaccaaataccacacgttctcacaagtgggagctaaacgttgggtacacgcggacataaagatggcaacagtagaaactggggactactagaagggggagggagggaggggagcaagggttgaaaaactgttgggtactgtgctcactacctggttgacaggatcacttgtactccaaacctcagcatcatgcaatatatatctagttaataaacctgcacatgtaccatctaaaagtaaaaagaagcaaatttaaaaaaaaaaaaacaaaaaaacagacccctccccaccagtctcctggttctttttgaaggtggctgtggtcagactattccagcaggttcctcagtgcttcatgctgttcatcaaacctggatccatctggacctaccatttatgtcatttattgttataaaaaataatacatattctcttgacaccttataattagagttcatttaagtcctttttatcaactccattagagtacttgtctggtgtcgagagttttggtagttccagtatatgtgcttgttttgtttcttccactggatctcaagaaggaacaaattattttggtgtcttatagaacaaattcagattgtactagattagaaggaatttattttgatgttattttggagaaaagacttacttgggacttgggtggaagtggagttcatatggatggttttgttttgaataatttctaaggtcttttagctctatcatttcttgtcagtctcccaccgctaaaatataactctatttacttcgttttttcacacagaa

SEQ ID NO: 111872 - DNA, 1032 bp, Homo sapiens
gtaatttacttcagattaatttcctgttcaatattttttcatcatctctaagtgtataattcatctgttgtccctggtatcttttacttattactattgattttagtttttcaaatgggctatcatttccattatcatagttcatttatatttcctaagataagttaatggctacttgctgcgggagaaattcactgtattttcttaatcttaagaggtggggtaacttaactccaaattactatcagttgataatagtgttacttaaactttaaaatgttatattctctgagcacctaaatttaattcaactatggatatttggtgagatgacatagtgaaaattttaataaagagtaggagaatattggatattgatattaaatgtgataatacataaagttttatttcatgtgtctcaagtctgatagattttgaataaccttaacatttttaaatatattttgtagtattacctaaccttttatgagagagaattctaaacatactcttgatgatagctcaaactttgtcttctgttttcaaaattgttcccttatagaatgtttctccatcccagagagatgaagtaattcaatggctggccaaactcaagtaccaattcaacctttacccagaaacatttgctctggctagcagtcttttggataggtttttagctaccgtaaaggtaagtgttttaagatagacttacatataacctcatttgagtgtatgtatgctaaactagaggctattagtgaacattctgtaaggtagaaagaagtggagaactttgctggagaatgatgtatgtacccataagaagacatggtgatgtcttctgctattgtttattttatttttattttttgatagttttgctctgttgccctggctggagtgtgtctgcctcctgggttcaagcaatttttgtgcctcagcctcccaagtagttgggactgcagacacgtgccaccatgccagtctaatttttgtatttttagtagagacagggttttgccgtgttgg

SEQ ID NO: 111873 - DNA, 1062 bp, Homo sapiens
tgggaggcggagcttgcagttagccaagattgcgccactgcactccagcctgggtgacagagcaagactgtctcaaaaacaaaaaacaaaaacaacaacaacaaagaagaggtaggtcatagatttgtatgccatgctggggaattgtacttaatcttttaggtaatggtgaaccttttagagtttaaagctggggaggttgtatattttaaggagaagactagcagcatgtggaatataatatatatacagaatatatattaatagcagtctatattttaccatgtttgatcaatccattataaattctctttaggattatttgttcaactactgaatccttctaatcctatttaagcagtccatatgagaaacagttcacctgatggaatcaggaaatactgttttgggctttttctttttctctctcattctttattttagaggaataggaatgaaatgaattaggcgcagaacttactatttgtaatgctgtcatgatgatattactgtttagtacatatttgaattgatttgaaaaagtgaccttagactcagtattacttcagttaaattgagtcttcttaaactgttatcttttggattttaaaaaaattattgctggttttggctagtgatgataacattggctatgcaggaatgcttttcttggccctgttgttaaattttactatctggtatatgggccaaacatagtggcttacacctgtaatcccaacactttgggaggccgaggtgggaggattacttgagcctgggagttgaagaccagcctgggtaacatagtgagacctcgtctctacaaaaaagtaaaattaggccgggcgcagtggctcacgtctgtaatcccagcactttgggaggctgagatgggtagatcacttgaggtcagggatttgagaccagcctggccaacatggcgaaaccccatctctactaaaaatacaaaaattagccaggcgtgatggcacaagcctgtaatcccagctacttgggaggctgaggcagggagaattgcttgaacctaggaggcggaggctg

SEQ ID NO: 111874 - DNA, 1083 bp, Homo sapiens
ttcccctttctccctcctcagttggccgagtcgtcccgcgcgcaccgcctccgcgcgcctatgagaatgaggtggtaacgggcccccggatgaccccgcgtcaccactgtgaggcctacagctctgccggggaggaggaggaggaggaagaggaggagaaggtgaggggcgggggcgggggcgggggctcgacgcgtctccgcggccggcgtcgacgcgctggggccccgctgctccccccgcgccgcccccgtggcagcgcccttggccgcgcgctgctcgccggagacccaccctcccgcatcccccagcccggggaacctcggggccgccctcttcgtcctctccggcccagacagacccgtcacctgcccacttgaaaacggcactactgtgttccttttcgggccagtttttctgtcagcgagtaacttttttttgtggcagcggcaaattagctactctatagtgcgtgttggaggctctacgagcccgtgttaatacacaaagaaggggacacacccccaccctcaggttgaacgattctccggggacaccaggaggattactaactttgcacggcagactgaatgccaaatgaatggggtgaacctccggtgctgtgaaattcgggggagggcaacgttacccagggcttggggcgggtgggtggggggaatccgggggaggtgagatttgagttgtgctctaaaggctagattaaataactggaatttgaaaggaggacagaggagcctccgctggagctagggggctccgttacagatccttttggcagaagttgacaattgggtatcaaaacagtggaaggtgtttcgggaggtaggatggattcagactctgaaggggtttgaactaaaatgtttatgttttattctgtcagtggggagccactcgacttagagcagcagagcattacagtaatgacgttaaataacaacatttgatgaggcttattatctgccaggcattctcctaagtggcttgcaattcacttaatccccccaaggctggtagtaggagcctcattttacagatgaggaaaactgagactccacaaga

SEQ ID NO: 111875 - DNA, 1904 bp, Homo sapiens
taggaatctagcttttgaacctgcatggaaatttttgtacctgcatttgaatttacataatttaaaggttcaaaaaacttttttttttttttttaaatagagatggaggcttgctgtgttggccagaatagtcttgctatgttggccagagtgttctcaaactcctggcctcaagcagtcctcccacctcagcctcccaaagtcctgggattacaggcatgagccactgttccctgctgcctttttttttggggggggggggaggtcgagaacgtctaaaatgtgaaaatgtgtataattgtgggtaaagagccagtacatataagagaaacaacttgattgtgttctgtcttaagaataggagcatcattacaatattctaagtatctgctaagtcaaagtgacagttgttaaaagaagcctcttgtttttttctcaggtgaaacctaaacatttgtcttgcattggagtctgttcttttttgctggctgctagaatagttgaagaagactgcaatattccatccactcatgatgtgatccggattagtcagtgtaaatgtactgcttctgacataaaacggatggaaaaaataatttcagaaaaattgcactatgaattggaagctactactgccttaaactttttgcacttataccatactattatactttgtcatacttcagaaaggtcagtgggattaaagatacattttgtactttgaacattgctatagctaacagtaaataattggaatggcaatgaaatttatatttttaccttcttcaaactttcaactttgactttattggtaaatctttttttttttttttttttggagaaggaatttcgctcttgttgcccaggctggagtgcaatggcgtgatctcggctcactgcaacctccacttcccgggttcaagcgattctcctgcgtcagcctcccaagtagctgggattacaggcgtgcgccaccacacctggctaattttatatttttagtagagacagggtttttccatgttggtcaggctggtctcgaactcctgaccttaggtgatccacctgcttctgccttccaaagtggtgggattacaggcgtgagacaccgcgtctggccctggcaaatatttaaaatcatttaaaatcatttaaatctttggaagtttaataaatctttgttctttgcattgtataggaaagaaatactgagccttgataaactagaagctcagctgaaagcttgcaactgccgactcatcttttcaaaagcaaaagtaagtcgattccttgcttatgtatatatctcacagtttgtattttgaatttttaaaaaatatttttcttttttttcttttttcttacagccatctgtattagccttgtgccttctcaatttggaagtggaaactttgaaatctgttgaattactggaaattctcttgctagttaaaaaacattccaaggtaattacagtcattattctttaaggcaaatttttttcctgatgtttatttttttctgtggtgacttaaacattaagtaatactttatgggactcttaacttttacacttgttttttttcttatatctctagtgttaaagttctcaaaatgcagctttgacccagacagtattaatccggaagggaacctggtcacttagctcagcttctttctgcatataggtgccccttctgtagtaatcatgccatatgatagtacagctgttacattgccacatatgcattgttctgaaatgcatactaggtagtagactcagaacaaacactaatgggataggatgggatcccatcacacctgtaggactgaactgtcatcccattagcagcagcatcaattaacaccagcaatgttgatgttttaaacccgaatgtcttttc

SEQ ID NO: 111876 - DNA, 1961 bp, Homo sapiens
cattttcatagcttgttagtttactttgatatttgacagtgtaagtggtataataaatcactgatgcaagaaatacatctaaatagaccatatgctaggaggtatgttgtttttagtcttcattactggatttaaaatacttagaattctacaattctaatacttgctgatagttattaattggtacaagaataatagtttggcaaatagtaacttgtttaaacttaagaaaacctatattttctttctttctttctttttttttttgcatgtgccaccatgcccagctaatttttgtattaatattttttgtagagatgggattttgccatgttgcccaggctagtcttgaactcctgggattaagcgatctgcacacttcggcctcccaaagtgctaggatgacagggatgagccactgcacccagtccaaaaaatctatattttccaatgagattactatagacttcatttaggaagtccttataaattttgtctctgtaaagcataaattttgaatataaaaatcctcactagagatatagcagctttattttggctataaaacatttaagtgtgttttaagtaatggtatcctctttttttgtctctttttctctttagtgaggactcttgtgaagatatgagttgtggagaggagagtctcagcagctctcctcccagtgatcaagagtgcaccttctttttcaacttcaaagtggcacaaacactgtgctttccatcttagaaatctgattgttctgtcagaatttatatttacaggtttcaaagcaataaatgggggaataggtagtttcctggtttagcccccatctagtcaggaattaatatactggaatacctaccttctatttgttattcagatcagatctggcctattttcatatttatcctaagccatcaaatggggtagtgcctcttaaaccattaacagtactttagacattggcactttatttttctcgtagatctttagctactttggggaggagggaaggtgctgataccttcaatttgttacttttcaagatttttaaaaataactagtgtagcttatcttaaacattttataaaaccttcagatgtctttaagcagattggaagtatgcaagtgcttccttagcagggacagtggataatccttaatggtttatcatagatttcaccctccccccttctcagaagagtgagtatgctcttaaatgtcaaacacatttttgttgttttgttttttaaatgatcagtgtctatttgatgtgatgcagatcttataaatttgggaattataatattgacatttctgtgatttttatatatgtaatgtcttaattgagatttctgttaaggcagaaataattaggctagggctcttagttttcattcctattgcccaagtattgtcaaactatggtattattttaatgttactttaaaaatccataatctgctagttttgcatgtacttatatgaaaacagtgcagtaagttgaaaactcagtatctatggaattgataaatgttgatctggtgtagtatattttatcgcattttcttatattaaaaaatgtctgcatgattacattttatttcctttgtaatttacatttcagaatagtgtattgctatatgggtgccaagattgaatatgaagaacccgagtgtttgtagtattatagttttaagcaaatctgtgtggtgatacagccataagaatggggcttatataaactctgtacatgtaagattttgtacagagaatttttaactttataaattgtatatgaacatgtaaatcttttaaaatgtacataaaatactgtatttttttaccttgtgtgtgatagtctagtcattgcatgtaaatataatttattatgtattctgtagtataaatcatacattgatgacttacatttttactggtaagtcaacatccgttg

SEQ ID NO: 111877 - DNA, 1907 bp, Homo sapiens
tgtattctttgtggctctgctattattgtgcaaatcctgagcctgacctttggcactgtttgccccatggctgctgaaatgatagtctataaacactgccatggatgcattctgactttcacagtatgccttgacttatagttagctaatttgagcctgtcattttctttttttcaaagtgtctaaagtccattttgaaaactgggtaaccttacagtccttagacttatcgttgcccccaacagtttaagtgccactgtttcctttccacttgcacttcaaacccactactaaggaaagtgcactagtgcactgtctagtcacttcaccaaccagcaatgaagtgactagagagtgtgatacaggtccagaatccatctaaagcctttgcttccttgggctatttctggtactaattgtcctagactaagttcctccggaggacagagcctgagagatcttccttgtaggtaatttattttgggatgtgatcttcagaaacaagaatagggattgcaaggagtcaaataggaaaggaaagccaatttagtggtgagttattgagctgatcacatctgtgggcaactgaggcttgatcctagcaggatccttctgaggagctacataaaatgcacctcagaatgtccactggaggagtaaaagaggagaatatccagtggctccaataccctattggccaaaggtcacttacctaggtgttaactctctcccatatacaagtttagcttttcttatgacaatagtgaaggattctgaacatttgaagcaaatccagggaatatacataaaattaactacaaatgataaagttcttatggaaataaatttaaatggctgggcatgatggctcaagcctgtaatcccagtactttgggaggccaaggcatttggatcacctgaggtcaggagttcaagactagcctggccaacatggcgaaaccctgtctactaaaaatacaaaaattagccagcgtggtggtgcatttctgtagttccagctaactgggaggctgaggcaggagaatcttttgaacctgggagatggaggttgcagtgagccaagattgcaccattgcactccagcctgggtgacagagcgagactccgtctcaaaaaaaaagaaaaatgtacgcatagttctgtgttttctaagcacattgtatatacttttattccttatttgtagatcatggcaagttaatataaaacttagaattggctgttgtagggtttgttatgtgccaggcactgtttatatgcttcatataaactcatttaatcgtcacaacaacataataaaatatgtattgtgattctcttaattttccagatgaagctgaggcccagaaagattggtaactcaatagctatgtaatcttgggcatgagttggtacaggaaagggctctgcagcatgtccagactatagtgaaaagtagcccctcctactgggccgtcgaaccttacagacctatggtgttagaggttgagctgctgttatacagtggggacagggaggaataaatctggcacccagcagtatgcatgggcaactcttggtactctttggtcccattttgctgttaaattgacaaggacaagaatcatggcttgaaaagagcacagtaactgggttctgggttagcccactaggtcaaccaacaagaccagcagaggtgctaattgatgaagagaagccgtaggtgaatgggtcatggaaggagatgatgaatatcagttgtagccccagaacagctacaacagaagaagctgtaggttacctcactagcctttcccttctacgtatccctgggggatgtgggggcacaggaagagggaggaggtgctttcagaaattatacaggcggggtgtggtggctcacacct

SEQ ID NO: 111878 - DNA, 2066 bp, Homo sapiens
gcacatgactgtaaaaccaagcaaggtgttttagtaactttttccctgaatacttggtagtttccattgatactattccaaaacaaattctgctgttttaggttgtatatttactttgcttttgttctaagaaaaagccaaggactaaatcaacttgtttttgtgtttcagtaatcagtttaaaatctaagatttttttttaaattagactatttaatgaagtgccatgtaattgtagcttgctagtgtttaatgtttaatagactggttctgtaggtgttttaaccatttaacactctctgccatccctggagaaagtggttctactcttactgaacacattctctctgacaaaatcaccagctgctttatttttctatttattacagttaaacagttgatgaggtctgaatcttgaccaaaactgctcagctgagatgtttttcacaatagacactgtacaaagtgtgcgtgcaaaaggacacggttggtagtattttttcattaatgtgaacattgactaaaaaaaagcagtcctgccttttaaatcttgtggcagctcagaagggaggtgcttaagaaccttaactactatgtcagataacaaaatatttttttccattttggagattggttactgctcacacatgatgtatagggctaaatatatgcttgtttccttgcacctgtgtacttcccctctctccctccctttccttcccctgtaggcaataaatggccattttgcaactgcatacctttgtcttggtttttgactctttatttgtgcagtataaacctctgcttttaggttgatacgtctcttctaaagtgaagtagggagccaagataattcagggcaaaatacataattacaaattcatgctacatttttttttctggtgaaaactacattactaagtacattgtttaaaaaaaattctgaagctagttatatgacttgctttgcccgaagaaaccagtgcaaagggatatatgtcacttctgagtggaactttaagggccagtctttaatttgccatatttccttttcttgcctgtgtgatcatagaagtatatgttgagatgaaacctctcattccagatccttaagtgactttgttgaagagaactcccctgctgtcctttgggcatgtagcgtaataaacaactgctaaatctcagtgtgttaatacaataaagttgtgttattagggcttaatttagttgatcctgactgacagacaaccaccagacagatttgctgagttatcaatattgaagaaactcaacagctggacctgctaagatctcaagtaaattcattcaacaaacattcaggtatcttctgtgaacaaggtgctgtgggcatattaagatgaaagacatctttataatgcctatcctccaagaattcatattccaaatactccttatgacacagaagatattccagtgtttcagtcaaagtaaagatatcttaaatcatagaatcttggaaagagagagagagaaggcacatagtgaaataattaggaattctgcaaactgtgcttacagatattcagctgaaaaatgactttaaaataaggtgatagagaacagattatttttagtgaaacagaaaacagctgtgcggcttagtaagcgcttggaaaagataatggtagattattttggaacagattgtcaacattgacagttcagtgcctattgacttgtttttaccaaggatccagtgtgagaaggctgtcactgaccctgaggaccttgtcttcacagaagcctttgtgttggccagcctttaggaagtcctccaaaagtggaatcactctcatgtgaagtgaatcttgaagttgtccagatttcaagacacctgccttgttaagagacctttgtgatgaggcattgaagacactcaccaagtgtcctttcatttcaccatctggccttgggcaaaatgtaggctcaatggtaaagtggagatgaactaaatctcacgaaatcggtctccgaaaagcagaaaccaagacaagggtttgcatggaggtagtttctttgggtaa

SEQ ID NO: 111879 - DNA, 1025 bp, Homo sapiens
gttcttcgttcaacagacatgacattgaagtaatagaatattttttaagtaaaatagttttcactttcaaagcctatgacataaggacatttgtgcttattaattgttaatttttttttatggtacattgtataaactgagtagcattgaactgcattttagaagtatgtcatcagaaacaaatcacattatggaaaggatatacaaatgccaagtgatatgactcttttggcatggtggtagcatggtccattcagctttcagaatctttcggaggctctagtttggtgcctagtactagttatttttgttagaacaatctctcaaaatttagataattttccagttgtatgtctgtcacttttaactctaaagcgtaagaatcatggtaaccctctcagaagtggtcctttcttgctcatttcagtttcgtattaacttcaaatcactgatgtattgtctttcaagctatcaattgttatatgtaccaatttaatttagtttgtagttatctgaagtcacaaaattggttcagcattgatgtcaaacaatggctttgcttcttaccaaacagacttagtatcctgctgcttgtttcaatcttgatgcagtaagtgatgcagtatctgggtctgtatttacttagaaactgtactgtcctttctctgtgcttaacttgctaaaaatatattcccttacctgtgaaattcctgagcggtgctctgccaacttttcaaggggagggatttggatggctgtgttactgcacactggatctggaattgttcagggttatgagtgacaaatttcttaaacaccagcagcactgagatgtgcactatgggcattcgtacagttgttgtccaaatgcaaacaactttttcatcttggagaagctgagatacagagttcaatagaactacttggaatattttgagaaggttgaatgtttcatctttggctttgttgtctctggagtggggaagtatggagggcttttttttttttttttttttttttttttt

SEQ ID NO: 111880 - DNA, 3221 bp, Homo sapiens
ttggaatcttttttttgcctaggaggggccagttgaaaatctgtgactcaagaggcagtgaacagaatactgttttctggggaaaaattggttggctacttgatgttaattatggcacagtaacaggaaaaggttgtgtctgtgtttttaagtttttctttattctgcttttttgctgctataagagttttctgaaatttatattttaaacttttcatgcactttactgtttctagtctcaaaatgtgatatttttaataaacaagaaattttccattatgtgaatgaaattttaaaagacaatagcctatatttgtgtctcactaatatataaagtataggtcaaatttaaattatttaattagttttaaatatacacaatttgtctcctctttcaaacctgacatcttcggctgttttattagtcttaaatgatgcatttactttggtcattttatgctaatttcttccatagtaaattaatcaggctatataaggtaatatttccccagagggtaattttagtgggacgagggtggtgggatgatgtcatatcatacatgggattgcatcagaagggttctgtaaagcctgaactcccttttaaaagtgcctagtgatagaggcgttgtttgtcatctattataattggaatgtcattgtagttcagtgaattttgatgtaaataaaatatcttttaaaaatgttaaagtaccaggataaacaaacaaaaagaaacaacccttaagatgacagattttcctcaacatgcaggtttcccttcttatatacctcaagtatccaacatctagccatgcaaattgattacctgaagcatagtactggaaagtagaatagcatgaaaaacttaattttgtggacattacctttttttgtaatcagctactgtatgttttattttagatcttttgttttgggtgggttttctgctctggaggtatatgcactaacaaaacattttcctcctttcatatacgcatgttaattagcaatgtgagcaatatttcctaccatacttcactcccaatattttttgagatgtttgtataaaatggaatttaaagttcacttatgattgtatatgaaccacagaggagcccatttattaataaaaaacttttttaatagttaaatgtagagggaaaaaataaaaaaaaatgggaaacattgtaaacagcttaagtttattttgtgtatgatcgaggcactctgttgcaggaaggtgtgtaattgggttctctctgcttcaaatgcgctctttcaaaccattcattatcctgtgtatttttaatgtggttttagtaaatgttggtagtagctctgttgaagtaggtaattgtgttatgttttgggtggtacacacttggggcatggtaacccaaatttcatgtgcacggtttccctttagcccactgcccaaatttcacatacccttcaccctttgttccctttgtaaaaggagtggtatctgttttgagctgccaattcagatgatcagaaatgctgctttcctcagcattgtcttgttaaaccgcatgccatttggaactttggcagtgagaagccaaaaggaagaggtgaatgacatatatatatatatattcaatgaaagtaaaatatatatgctcatatactttctagttatcagaatgagttaagctttatgccattgggctgctgcatattttaatcagaagataaaagaaaatctgggcatttttagaatgtgatacatgtttttttaaaactgttaaatattatttcgatatttgtctaagaaccggaatgttcttaaaatttactaaaacagtattgtttgaggaagagaaaactgtactgtttgccattattacagtcatacaagtgcatgtcaagtcacccactctctcaggcatcagtatccacctcatagctttacacattttgatggggaatattgcagcatcctcaggcctgacatctgggaaaggctcagatccacctactgctccttgctcgttgattttgttttaaaatattgtgcctggtgtcaacttttaagcaacagcactgcctaaaagcaagcagagaacagaatcccagcaccattctataggcaactttttagaattcagatatagtaaatctgttccagatttatgatgttttatgtaaaaaaaattttgtataataacatagctgaatatttttgtttcatttctttgatgtaaggcgtgtgaacattcgtttgaatatcacatgttgaagtcaggtatggcacaatgggttctgagaccagcttttcctcccctcccatttgccttgttccaagctctttcttttcaaattacttttctgatattcataggcaggtatttaattttactaattagcatcctgtgtgaatgtattaaagaagccactgtgttttagtgtagttggcaaaaatataaaagctgtttcttatttgcccctatttttttggtgtcttaaagttatatattaaatcacagagaagcaagggagaaagttgaaagatatctaaggctcatatcacttgattctatggtagattatattagaattgaggatgtggcacattaaaactggaacatgggcaaatatagtgttccattttaaaattctaagtttatattgttaaatgggtgaaaatttaagtttatatttgcatttccaagcgtttctaaaaatcactaatgccatctatacttttagtatgaaacagcagactatagaaagcacagggaagaataggctaaatacattctttgaagaaccagaggcatataaccacatcattatgtcattcctaatacatggctagattttctaatgataaaattgactgtgtcccaatgcttatttgattctaagcttttttattctgtttctgagatattttaatagctttgcaaaatatgctgaccagtttttggaaaataatggtttttatagcaagcaaagactttatggcacattttcaaaatagcactcatacatacttacattttgacagaaatgtgaattctcacattgatgagatattctttttcccacctgccctaccctttaaaaaaggtcacttttctaatgtgtagtagattcatttacgcctttccctttgagtcataccatgtttggagaactgtgtgaattgtaggtagagaaattaactagggaagccagaagcttgaactaaa

SEQ ID NO: 111881 - DNA, 1618 bp, Homo sapiens
agacttactgatcagacaaatccagtcatctagctctgacagataaaactgctatgtatggcttcctgctgaatgatttttgctgagttgtctttatgtagcaaggaaatccagaatttacacatattccagtatttgtgaaaatgagtattttaaattaagaatagaatagttaactgtgtagtgttttgtatgtatgtagcaaatctgggaaagctagactaggattagcaaatccataaacatggtttactatagcttcagtcaggtgtgtttggatatcttgatatgcaaataattgaaaataataccgttaactatgtatgtgctcatataaatattcttattttctacttattatagccaataggattagtacaggctccattatatttatactgatatgttggatttcactaaaccaagcaggccaattctaaagatgactagacataatttaatgtgtttagcttctcaaattatcacttacacacaaatggaaggatttataattccaatagcatgctgtgtttccctattgagccacctttatttcatgtaatacccattgaatatttgagccttatttgacccactatcaagacaacaggtaccagaagaaagggtagtcagttttttggtttttataaattatggattgttctttatatatcttgaatttttctttttttcctattcccaatctctttccagggcgtgattgactacattttctattccaagactcatatgaacgtgcttggtgtcctggggcctttagatcctcaatggctggttgagaacaacatcactgggtgtccacaccctcacatcccttcagaccacttctcactgttaacacaacttgaactccaccctccactcctgcctcttgtcaatggtgttcacttgcctaatcggaggtagtggagtactgccccgccaagacggggatctgttgctatggacctgtacagttgtaaatcaaagtatgtaggagtgaagtatggccatccttaagctgcttcttcaggtttctttcattatgtgtttgctgtaagactttgtacatttttgtgcatattggtatcatttggcagtagggctggaaccaaagtattactctctttacaaaattttaatttaacatgtttttaaattggaccttctttatattgtattaacagccagcattcaaaattgataaattaccaatttgaggcccaataacagtgtatttgtttttccaaaacaaatactttcttttgaatggtttcagtgagccaaccattttataaaaggcaatttttaaaaactataaatacagtattttaaactgaatgatgatatgccttccagggaaaaccttgaatttttcctttataactgacttttggattccaaagtcatttgcacattaacagagtacttaaatttacttgttcagtccataaactatgatatagcctctatacatggtaagaaaatttgaaaaattaaagatggttgcacagtatacttttataatccagcatgtaacaccacatgacaatttgttggccaaatgctggtttggagtttttttgaggaatcactttggtttttttgtcctttatat

SEQ ID NO: 111882 - DNA, 1102 bp, Homo sapiens
cattagacattgaaatgttgaagatgcaaaatctgtttttgttgtaaactatttttattaatatgctctacttatatattcgcaaagttgttgattgcttagaatggggaaatactaaagagatagtggtttggaataattttccaaaaacatttagggttaataccttcctggtgaatgccatcctaggtcctggaaatcatctttagcctgaaaaaccactaagaaaactaaggatatctttgagtgttcctgatatattttgttctgaaataggcaaacatcctttgattcatttgcttgactcatatgaaatggctggtatttgattttttatttttaaacaacaacaaaaggcagttttatatggctcaacctaagaagaccactctgagcctggtggattaacctggtaacaagtcttggctgtgaagccttgtgtaaggtctaaatgctaaatggaagtgtctcttctttattctaccaggtgttgtggaatacttaagcaatggaggagtagctgacaaccataaagacttcaaggaactaaggtacaatgagtgtcttatgaacttcagctgcaatggaaagaatggaagctcagaagggagaatcacacatggcttccaacttaagagcgcctatgaaaataacttgatgccttacaccaattacacctttgatttcaaagtgagtggcagcctttgggcaggtgtagaaattatttcagatacaagcatgtaacaaaaaaggtgtaaattctttatgattaattgtataatcttcaggaatttttagattcttaaaatgtctaggctaagtatgcacctaaatataagtaggtttattgggttttgtggctattgttgtcttaaattcttcttgctctcttgcttgtttagatttcaaataatataataacaaaaacttctaaaatgctcactaggtaccaggcactggtcaaagcactttgtatatatcaatatagttaaccctcacctgctcaaaccatccctaactttcagcagtaacctccctcccctaacctcccgccccccacagaaaagcaccgaatatagcaaaactcactttgaatgaattt

SEQ ID NO: 111883 - DNA, 1036 bp, Homo sapiens
tgtctcagaggttaaaaacattctggagaaagcctctagtaggcctggaagcccaactgcagatcctaattccatcccgctggtgctatgtgcagatcttaactcattgccagattcaggtatttataatatcatttcctcactgctttcaatttcacttttactcttggttcaaaggccagctagctcctaaattttgagtagataaattaaggaatgtatcataagaattccatggatgggacacaaggtaatagaagagagtttaataaagaagctattaccaaaggtgttgcctggtttaagggaaacaaagcaataaatgatgcagtactctgccactaggggatttagtaatagatctctttaccactcctctacctaaaagggaaagtggtgggagctgtctgtcattagaacttggaaaaaatacagttgtaggaaagggccacataataggagtgatggctttgaattgcatgaagcggtcaatccctggcaaaccaaaaagaagggagccagggaaatatatattcttacctcactctgcttctgtcctttcatctcctgctaggctgcccattgatcaaatccaaccaaaagctagagcggggagggatttgcagttgatgcaataaagatcagctgcctgaggcacagagtgtactgcagaagggtgatctgaaggggcagccagaaaatattcattacgtgtagctctctagtttaataatgttagcaacttttaagtgaattcattaaatgatatttggataatgttagtagttacagaagaatgatcaaaattatcctagggcttcatattacttcttgagctccactaaactactttatgtctgaacttttatcattttactttttataaaaataatttctgcattttaggtatcaaatggaaaacattagactattactcttttgccaataccaaagcatatgctaaattttgtatattatcactgctaggctattttaagttatttaaagtaagtaacaataaggttactataagata

SEQ ID NO: 111884 - DNA, 1009 bp, Homo sapiens
tggcgatggctaattcagatggatccgaagctatgctgaacagagtgatgacaaaagataacattggtgtcgctgtggtattagaggtccacaaagaactatttggagcaggtgagtgcaatgtaaaatattcttactaaaaataaacaccatcccaagtttttccatctcaaaacaagtgaagagaattttgccgttatttattgcaaagttattttcttttgaggaaagttaagggagatgggcaggaaaatagcaccattgtgtaaagcatcatatatttgttgggatattttgtgctctctatcacagtcttttttacttaccagataatctatgtaaagtcttttttaatatgccattaatcccaaacagttcttttaaatagggaatattttggttaggctgaatttagaaattatgatgacttggccctctttttgaattatatttttagcttgagtgtgattcttttgtctttaaggttaaggacttggcacatttcctctagtttctttgttatatctcagtcattgtcagggtaagagcaggatcttttatctacatggtacttactttagcattttagattatttatagcttccttcagagtcagaaactcattatgtacttcatacacagaccttttttatccttcttactgcctgcctttgagcatctcactgtttactagtacattttaagcaagaaaggagtgagactacatcagggctttttttcccctgtactttttgtagaggaaaagattattttggactagagtattgatttgaattattcagaccatgcatatgtgtcaaaccttcttttctcaccatacttcaatttattccttatcaaaggtaatctttgatatgaaattttggactttttacttttcttagcccctccgtttttatttacctttatgtcctttacaatcttattcttcccaaagtttggtacttttttttctgatattgtggagaatatcttttggagttttact

SEQ ID NO: 111885 - DNA, 1036 bp, Homo sapiens
agccaagatcgtgccgttgcactccagcctgggtgacagagcaagattccatctcaaaaaaaaaaaaaaaaaaaaaaaaaaaaaaaaagaacggtacaaatataggatgttatttatctacttccttatttaacctggtctctcagcttaccttttccaattagttaccttctggcactcccatgattacttaaagggaccaagaacacattttatatcattttatactgaatatagtaagaacttctatttggtttggttttaacagtgttgggatgtgatccagaaagggtcagagttaactttgtgtgattatactattgtcttgactgtgtattacattgcccctttttacttgtaaatgaattcagggatggaatattacttaaatcctatagattgctttagtttctcatagttggcagtcactgtcctctctctagcattaattaattacatcagagcccacaaagttatttttagactacaagttggtaagaaattgagttatgtctttatttgaaggactgctctggacgtgttctttttgcacatgaaacatccaacctaataataattctcaaatcatataaggggattttttggtcatagcagtctttattatattaatatatgttcttttatccatttgacctttcgtctagtttttttttcaaaaatgtgaatatacagaagaattcttagaataaaatatcatcaggaataatgcttttagcatctgtataccagtcacagagtatgaatggtaaactaatgtatcgaaagagacaagtttaagattttccgtattaccaaggctgtatggcttggaacaatgattggaaagtaactataaactaatatgtctaattgagaagaaacatctaataatagaaagaatggcagaaaacctctatatttcaaaatgttacctgtatggaaatctgtgaaacaaagtagatgcagaatagagtgcatttggtttgtatgggaagggaatgcaagaagtagcattgttaaggtagtagggatagaa

SEQ ID NO: 111886 - DNA, 1432 bp, Homo sapiens
ctttcaagataatatggaagatttttattattactctcacagttttgagaggaaaaatctaaaattccttaacaatttactagaagtagttaaggctttgaaataacagttagaactgttatctgggtatttgcaaattgattcttgaattattaaaaatgctgtgaactagttaagtaatgagcacataggaagtacttagatgtgtcacctgtttttcttttcttcctcaactcttttttcctgaatagtaacatggatctggcaacagattgaatgtgatacatcagtatattgtacctcttttcaacttctttcctggaatgacaggactatatacctcctataggtagaacaaaaccaccttctgtcccagtaccagatatttatccatgtcttagctgactattcagtgccaactatttggaatttaaagtattataccctgcctttattctttcttcagactggaaatatagggcaaaaaaagactgtgagttttgaagccaggtgcttcttctatttatttagctatataatgttgaaagacttagcatttctggacctgtttcttcatttgtatattcttatcttgtaagatcatttttgtagaggttacaaaactaacaaagataactgtggaagagtagtcaacactgtacttactctcagtctctttcttctgtaatcagagtatctgataattcctcatcttcactgatgactgtttaatcatacatgaaaaactggtacagaatacgcaacaataaatggaaactatcataattgccatttatagcaaaatactataataaaaatctctaatccatcatgatgaaaggatagagtattgtttagtaaaggctaggacacaagttaccaatattcagataattagaatataatacactgttctttaaatcacattattctagtttagttttgggggattcagaatctacttcaggatttggcagcacctgtttggtcatcattatgaacatcattttttgggagttagatgcatagagatactagaaaatagaactttgagtgataaaataccagatctcagcttttgctttgtcttttaacaagtattatttacgttccaaagcattttataaaatacattcatacatatgcatatgtttcttatatgtatataatgtatatgtagaaactgagttgtaaatacattttttttttttttttttgagacggagtttcactcttgttgcccaggctggagtgcagtggcgtgatcttggcccactgcaacctccgcctcccaggttcaagcaattctcctgccttagcctcctgagtagctgggattacaggcatgcgccaccatgcctgactaattttgtgtttttagtagagacagggtttctccatgttggtcaggctggtctcaaactcccgacct

SEQ ID NO: 111887 - DNA, 1044 bp, Homo sapiens
taaattttgtatgatagactccaatgatgttttagtagattagcaatctttatcttgcctaggcattttacaatgatgatatgtggcgtatgtgtgtgtgcttgtgcaggtgtacacatgatattgctttagaaaaagttgcctaattttctcccgtttgtctgttgttttttctcccacttcttagcatcattcacggttatgtgttacaatgtgttatgtgataaatacgctacccggcagctatatggctattgcccatcctgggcattaaactgggaatacaggaaaaagggaattatggaagaaattgttaactgtgacgcagatatcattagtcttcaggtaacaccatagaaattaaactgtctttaacttaaaaggtgaacttaaacataagagaagatctgaccactgggagagatcctgtgtttagagccaaagctcaaaaagaattgttttctctcctcttaaaaataatggacaatttaaataagcatttaagacatttccatagtgaaactattttgctgactgaatacaaccacctacttatatttatttactgttttcttaagtggaaataatcttacccgttcatgttaatattcacctcatgatcattggtattgctgaaagagaaaaccacagaagattgccagtcttttaggaatataaatttaccttgtattggagtctgtttttttttaaaaaaaaaagcttgcccacagttattccttaaacagacatattttaatatattgtactataaatcatgcatatttgccttaccttactttataaaccatctctgaaatttagattcttctgttttatagcactttataaattgaactttactgaagaagcagcatcttttcatgaaatgtgttctgttgcttcaaaatttagctaatgattagccaaaaagatgtttgaatagtttttagtaacttttttcttagcaactttcaaaacatattaagtgcttaaaggtttaaaaatttttaattgacaaataattgtatatgtttatggggtaca

SEQ ID NO: 111888 - DNA, 1938 bp, Homo sapiens
ccagagcagcttcctccgaggccatggattacattaaaagaacgagaccaaattctgccgtcaggtaaatagtttttcttattcttccttttttttcagaaattcttaaaatgttatttgggcttcatgatctgtaataaataagacttcatttttacctttcatgggtagatgcatttaaaaatactgatggatagacttttaaaaagtccacattaagatagacctgtcaataggtgtcttatatctttcacagtaatgcagcccttggttttaaaattatttctgtaatacagctttccaaatagcatcttcatagagagtattgggtgatttaagatttaagtaatgcagcccttggttttaaaattatttctataatacagctttccaaatggcatcttcatagagagtattgggtgatttaagaaaaatgagaacaatgatatttcttgtgaaaaattttaaactactgagaagtacttgatctttcttgagagatagataacatttatggaagaataatgtagactagacatatatttactatactggcaacaaagtataataccagcccaggggtgtagaagtagtacatagtatttgagcaatataaggatataatctagcatttctagaactgaagtaatgtagaaaacataagcctttatctgtttgcagggaccaataatggtttgacatttataaagcttcttcatatttgacattttaggcttgggaattctacttaaaataagttatgaattaccgtttttcgaaatgtcttttttttaatcacaagagtaataattttcatgatatctaatttcattttaaaattaaatgaaaattctaagtgtttggatatgaagattaaaccagtcacagaatagtactacattaatagattttggctgggcactgtggctcatgcctgtaatcccagcacattgggaggccaaggcgggcagatctgttgaggccaggagttcaagattagcttggccagcatggtgaaaccccatctctactaaaaacacaaaaattagccaggtcgtggtagcgcactcctgtaatcccagctacttaggaggctgaggcacgagaatcgcttgaacctgggatgcggagtttacatacagtgagccaagattttgccattgcactccagcctaggagacagagcaagaccctgtctcaaaaaaagagatagttaatttttaaagggtaaatcacaattagactttatatatattttgagcaatataaaggccttttgtttgtgagttttgggctttttttaagttaagaggattcagaacaagtcttttttttttttagtatttggaaatgtgggatatatagcctcttcatggttctatttgcattttaataacactacaaaatattataatatgcagtacatttttgtgtctttcagaggtaataattttaaaaccaacccactctagagctgcaatatcagcttgttttaagaggcattgtgtcagtgttatgaataacatttttactatcaggttgcatgttggtgtttaagtgaaaggagtacctaaggttttctacaaaacttaaagctagatagatttattttatacttggcctttcctagtgtataattaattattcccttctgatgttaaaaacaccattttctaattcttcatagtaatcccttttgaatatgagtgaacataatcttgaagaaaagattttctaatattgcacagctacatttctattaagaaaaggaacaatagaaacaaattttcattaattgctgaattctcaaagtaatctgttcttgggttttctttattgaaaaactagtgtggacttttcttgtgaggtatggtgcttctctgagtaggatctgagtgctgaaaaaaagttactgttaaaaatgcattttacttctga

SEQ ID NO: 111889 - DNA, 1033 bp, Homo sapiens
ggtaacacattttcttcttacttgaaatacgtttgttttccctatatgtaatataaatattctacgaagacccttcttttttaagatatcactcattctttctcctatatggctatttgagtttgtctgtggtcttaaaagataaatgcaggttttcaaagattaatgtagaacctataggattacttcaaggtgccaggttgtgatattacttcagaattgactatgattaatatatatgcttttatgtatatgtgtatatatgttttggacaagcccaaattttagagttcttaaagaaaatatttatttacacatacatttttaaatgtatataatagattaaatatagtagaattcaatttaagaaattgaatttaagaaattagtattttattttatagtatacatttctgtcttgccttgcagttataagttttaaaggttttatttttgtcttctgctttaggcaatcctttatcacaggatattctcaacttataccaggacccagatggaacccgaaagctactgaacttcatgcttgacaatctcgcaggtaactgttagtgacaaagctgtaaaataaattctacagatattatgaactagctaatatatgttcctcaagagcatctgactgttttttataattgcctatgggtttggagttccttccattgtatatcctacgttagtggaacattcttcttttcatatactgaatgttttctatttaccaagcaatatgttaggagattagttgcattattttgtttaagaacctaggacataggaactttaactcacagtttagagatgcaaattctgagattcagagactaaagtaatttatttatacatagctaatcagtgccagagctgtgaatctaagattatcttgctcttaatcacaaaaatacacagttattagttgtttgcatttgatgcaaatgacttggaacccacacattttacacatttttaatgaatgaaatgactagtttgattcattacacgtttgtggaaattt

SEQ ID NO: 111890 - DNA, 1030 bp, Homo sapiens
tagggattctttaaaaattccctaaagaaattctaaaaaaattttgcaggaatcttaagatcttatctaaatgtttccaatgattatctgttgagtaataatttttaaaaattgctatcacgtgtttaaacatattgttttaaaatcttgttcttcactatcctttacttgctttttttacttttggtcatccactaatgaggatgctatttttttcctataggctgctcaaaatttcacaatcataaagttagatcttatttatgctatcctattcttgtctgtactatctatgctttattttaatatttatgtttcatgtcagtgattgttgatcatagtatattttttcatcttttcacattttcttttgtcttctttaatatacttcacctgttgtttcttattctttttatttttattaaatttttggtttgttttcttagtattttgatgtgattagagtagtattcagttacttaaaaagagataccggtgattggctactaattacagtttattcctgaagtttgtgtaaaaatttgtacttttttctattaattagacgagtttcaaggatatctgttgtttagctgctaaggatatctgtcgcatttgcatttgataggcattttgggtgagaaaaaagggggtagatttagcctgagaatgatatgcagttcctacacctccaactttaatgtgagctagcaaatgagtaaatcctagaaatagaaccattgttaatagttgtggcaattgcacattttgtagtacttttatattgtgcaatgtttttggatgagcacatagaaatgtgccttgaatataaacaatcactcatagtatgttagaaggagccttaagaatggcaaatacagatgttaataaaacttagtatattaaactaattttttttttttttttaaaacagggaattgcttttaaataacaatctgttacgggttttgccttatgaacttggtcggctcttccagctacaaactctaggtttgaaaggtaagtgatt

SEQ ID NO: 111891 - DNA, 2486 bp, Homo sapiens
ttattgaaagcatgcaggagtttaatttaggctcaggacattgtgtcatttgctattcttgttagatatgaactggattttattttttgtctagtaccaagcagtacttcttatattggaccccttgaataaggttacctttagagccatttgtcacctacttcatacatagcacatttgatgagttttatgtctagctggtcatcattgatgattgttcagtgattattttggcagttatagcaggaagatggcacagtatagttatgtgctgcataacaacgtttggattgcctaacaatgcatttctcagaacatgtctttgttaaaccacacatgactgtgctagttttgattagggtggccatgtaactcatccaaattggactcttttgagcatgaaaagggatgataataataattgcttcagaacaacagatataaaccaagactgacccaggcaaactaagatatgtactcatactaattaggacacttttgattactagtaacagaaaacacaattcaaagtagcttaaacagtaagagaactatattggcttgtgtatcagaaaaggccagtatttgggtgtgctacaggtgtcattcagtgaggaccctgcctttgtttttctgttttccagactctgccttccatggctgactttccttatcgttgttgcgtggctgccagcagcaatttgggctgtattcttctttgtttatgaccagcaggagagagaagcctgcttctcctataaacatagaatgagttctgcggttttgtgattattagatactcctgaactaaatctctgcaaggggaatgtcatgtgctgattgtcttaggcatgggatatctgaatatcactgaggaaaggaggatagaattaccttattctcttagactagtcagagtccattcacgaaactgctgtgtgggaaagcagtgcagctaaatgaagggaaggagttaggaagcaaccataatgttcattgcaaagtccagtgctgttgcttatttgcattttcccttaggcatctgataatgagttcctgcaagatcctagcatactgcagataatgtgtgtgttttctttttctgcaagtgagaatttgtagtataaaatgacttactagactggtaatgggagagaaaaggagtttaccatcctattttctctttttttaaagtaagactataataattattgatctcctcctttttttttttaaacagactaatagggatgccaaaggaaaaatatgatcctccagatcctcgcagaatttataccatcatgtcagcagaggaggtagccaatgggaaaaaatctcactgggcagaattagaaatctcgggtgagtggaatctgaagcatttaatctggaatgtaatagtgataatacaaaagttgagtattgctatattttttgttgtacatttttaattagatggactcattgaaaaactacaagatggtaagatactagtgttttctgttttatgtgtgactgaatatctttgtttccattttttgagattaattacattgagcaagcatctggaattgaggatatggggagtttagtttctaagtaaaaccagtttctttgatataatagattttgtttaggctatttcagagtaattatttttgcaaattgaaatctttgccatcctcctatctcagtgtcggcaaagaaggaaacctggaagctatttattctaataaatatataataactgtgttacaggaccttaatacctgtttaggatttggtaaaatagaatgtgattcctaaaaactcataattccagtctaataatgagaaaaacatcagacaaactcaagctaaaggaccttgtgcaaaatacctaacttgattaatactcaaaattgtcatggtcatgtaaaacaaaggctgaaactgtcacagaccagaggagactgaggagaggtaactaaatgcaaaatggtagcctgcgttgaatctggaacaaaaaggtataaaaactggtgaaatccaagtaaagtctagagtttaattagtagtaatgcaccagtgttggtttcctagttttgacaaatgtaccatggtgatgatgtagattctaatgttagggaagctgaaggaggggtatataggaactctctgtgttatcttggtaacttttctgtaaatctaaaattattacaaaatttaaagttattaaaaatagaatataagtatttttcttttatgaattggtataatacagattatatataaaatgccattttttccccagtaggcattcatttggaagagttaaaccccacattgtaatgtcaatagcaagaattacttgcacatttagctaaaaggtaactgggtggatggatgattggtagtcaaaagaatgaatatgagcagatcttactaagttaatctagggtttcttagccttggcactactgacactttgagctggataatagtgg

SEQ ID NO: 111892 - DNA, 1023 bp, Homo sapiens
tattgctcattatcaatattgcagagactttgttccagtttcttgtttgttttttgactttgtttatgactttgctctttgccttatagacattaaatttttaaaatactgtttatcattccttataaaaggtctttgccttgcttagaataagttttctgcaccccaagattataaaatattttctccgcattttcttctgggaatgtctaaaatttggcatgatttagtagaagcttggtttttgtagttggtcttaactatgttcagattcccgtctagccacttactagctgtgaggtgttagatgtctgcacaacttctctgtatctcaccttcctcatctgtaaaatgatagttgataattagggtctatgcttttggttaagttaaatgcaataattcaaattctctagcataccatctggccacatactgggtgttcagtgcatgttttcttttctctctcacccataaactccatcttctatcagtctagttaaaatctggtccagaagataagggaggggaaagtttcaagaaataatgttgcccttagttttcaaagtcagagaagccatgtgggatgagtactgtctgaaaaggagattgaaaattcatttagtaattaggaagtaatttatgtttaatgaaaacattttttagtagcatgataagaggcatattttaatacaaagaagactaaaacctatataacatacctaaaggatatgtgcatatgcaacatgtatccatcatgatttgtaatatttgggagaaatagttgtaactctactcttcttattgttggaatactggtaagaggatagagaatcaatgctgacatacagtatatttatattgtatgtataaggtgtacataaatttaggtaatttttactattaatagttacaaattactgtatttgtaacacacctcacaatcatcaacctgtattagaactactgctccattggaatcttcttagtagcattataatggactttaatggaatttacaca

SEQ ID NO: 111893 - DNA, 1085 bp, Homo sapiens
tgtgtctgcttttttcacttagcataatattttcaagattcatgttgtagcatataacagtatttcattcctttttttttttttttgagatggggtcttgctgcatcacccaggctggagtgcagtggcacgataccggttcaccacagcctccgcctcccaggttcaagcagttctcctgcctaagcctcctgagtagctgggattacaggagcccaccaccacgcctggctcattttttgtatttttagtagagacggtgtttcaccatgttggccaggctggtctcaaactcctgacttcaggtgatctgcccaccttggcctcccaaagtgctgggattacaggcatgaaccactgtgcccggccaatatttcattcctttttatgagtgaacaatatattattatacatacttggttattataaataattcatgtatatggttttgtgaagacgtatgttttcatttctcttgggtgtatacctaagagtggaattgctgggtcatacgtatttctgtgttttaactttttgaggaattgacaaacttttccacagtagcagcgctgttttacatttccacacctcacgcttttttcttttttttttgagacggaatttcgctcttgttgacaggctggagtgcaatagcatgatctcggctcactgcagccttggcctcccgggttcaagcgattctcctgcctcagcctcccgagtagctgggattactggcatgtgccaccacacccggctaattttgtatttttggtggagatggggtttctccatgttggtcaggctggtcttgaactgccgttctcaggttatctacctgcctcggcctctcaaagtgatgggattataggcatgagcaaccgcacctgccctacctcctgctttttaatggcttcattgtaatccattttattgatgtcctgtcattcagtcccctgttgattgacaatttatttctgtatttttgatgattatcaacactaatgcagtgaaaaaacttgtataaacaccttttgcacacttttttaaagtataaatttttaggaaaggaattgctggatcaa

SEQ ID NO: 111894 - DNA, 1036 bp, Homo sapiens
gccatgctggaatgcagtggcgcgatctcggctcactgcaacctctgactccctggttcaagcgattctcctgcctcagcctcccgagtagctgggattacaggcacacaccaccatgcccagctaaccaaggcaggcggatcaccaggtcaggagatcgagaccatcctggccaacatggtgaaatcccctctctattaaaaatacaaaagattgtgaggtttttaagggcatagatgatatatgccttacctttgtagctcaagtgtttgatacatagtaggggcttaatacagagtttggcatatagttgggaatttgaaagtgtttattaaatgaatgaataattaaatggcattacagacatggaaatcatatcagcagatctatagttgcagaaaaatgagtccaggttcaggggtggtggtgagtgggaaagtaagtaaatttctggttaacttctagggctcgagtgggaacatgaggttaataaggcaaattggagaatgatcgtggaggggcttgaatatcttggtaaggaattttaattttgttctggagtcattgatacaaagctttcaactctagagcagcaggtgttttttaaatccataacttgggttctcttaatacacaaattgtatgttgtaatattgctttaggtattttatagaacattcattacctaaacaattgttttgattaatagatactgcaagatgtagctctagaatatcataattatcagtactactattaaagacattgggaaccatggaatgattttgaacaggttggtggcagtttgaaattaatctttttttttttttgagacagagttttgctcttgttgcctaggctggagtgcagtggcacgatcttggttcactgcaacctccgcctcccaggttcaagcgattctcctgtctcagcctcctgagtacctgggattacaggcatgcgccaccacgcccggctaattttgtatttttagtagagatggggtttctccatgttggtcaggctggtctcgaac

SEQ ID NO: 111895 - DNA, 1014 bp, Homo sapiens
attcatcttttgcagagagaacctccctctctaatcttaaagtttaaactctatttttctctttcccatattacttaaatagatttcctaaatgagtaacataaattagagttacataataccagctacaaatactgctaaaagaatagaactaaatttagtatatcccaaccttaatgtctctctatacaaagactttgttggaatctcatatatccattgctttctgatcataatgtttatcatatttaacaaagcaaaactcagaaattacttaacagggtatattcttctataggttcatatttagtacaatcttctgcaatatctacatataattttatgaaacaacataatgtgagttatatacagaatggtagccttgaaacactgtcagaatttgaatcaccaaaatataacctgttaattaatatttattaagcttctatttgttatagactattgtattcagggttctggggaataaaaagaaatgtagaataatctttctaccagggaatggagctaatatttttttgactactgagtaccaaggaatgtgaaaagccactcccctccttccctttaaatgtgtaatctaaattattcttcatgaaaatcctatgagagaggcagtatgattctcattctgaagctggttaagaaagtgagccttgggtcctccactttccagctctacggaaactcatttaacttctctatgcttcagttttctcatctgtaatagggagataatattccttatctcgtagagttttgtgaggattaaatgatgtagtcctgtaaagtatttaggacactacctggcacatctgtagtaaaaaaccaaactaaaaaacaatacacgtacactattactgtttcttattaggaaagaagttaattaacgtgcccaagattacaaccagatctatttgaatttaaaacactcttatactataatgcttacatttataggatgtttaagtctggatctagtaaacaggtgaaggc

SEQ ID NO: 111896 - DNA, 1195 bp, Homo sapiens
ggctcccgagcctcgcaggtgagagctgctcctagggggccggccggggagggctgagtgagtgcggcacacgcgcggcagcggggctgggagagctgctggtcggtgccgcgccgctgatcccggggccgccgttccccggccgcggcaggaagcgcgccggcctgcagcgcggcctaactgcctgggcgcccgcccacctccccggacgcctcccgggacggcgagcccgcgcgagcccacggcgctgcctcgggcctgggcaggtgagggtcggaggcgggactcgccgattgccgtcgccgtggccgcctccgcgtctcctgagaggcgaaggcttattttggcgttccaactgcaagccttcgcccggccggctgtgggacccgagggaggaaagtgaatcagaacagtcagtcttgggaatacgcggtgtcgtgttcccttcttttcatccttcccctaaggctgtgtggagggactgagtaaatattttggatttttgttgcaaatactttgccgttggtaagatttttttttttttaattagacaaacattttcttggaagggctgaggaagaaagggaaactggctttcctggcctgtgggattggatggattttgtgcatttgaaattgttttatcctgcctcctagggggagaggcgtgtacgcgccgccgagctgaggagctgggtgaggaagaggaagttactggagctgtcatcctgcttaactcggtcggctattgagcttagactgtttaggtggattgtgttcagggagtttagctgagccgtttgtacacattggaagcacagtgttacattttaccgtattgcctctagttatcttgtcaatcaagataggctcaacaaacatgttttcctcagtctccaaaaactagatcaagcaacctctgttgtctactcagtatgtgctgctggaaagctattttgagaatagcctaagcaaaacccagttgtaaagataaacctgctgccaataggtctacagtacatttcagaaccaaatacaaatggcatttggataattatttgctaatgtgcttttctactccaacctcattacatttgtatgtagttagatcatttagctagaaccgtgctgtggataaaagcataatacagtttcgatccttgtaggccgtactctgtgtcatggccagagattg

SEQ ID NO: 111897 - DNA, 1028 bp, Homo sapiens
cttacagtaagtgtggttaaattaaccagcaaattctcttttagatctaatctgagttagatctctccaaaacatctgaactaataagttgtgtttctgtattattattctttcaaagaaggctaatggctgctaaaataagtttggtaatcactgaactaaatgataataaagcattattattggttgaagcatttttaaaaagaggtaccccgtttgtggagatgaattaggatatgtttccctctgggtgcatgcagtctatcaaagcacagtccccactaaccttttgcctagatgtctctatccagcatgcaaactgaacaagcatatgacattatgctataattacctgtatgtgtacacatctgtctttcacatcctagattgcaaattctgtctttatctctagtacatcatagaatttctgatacagaattcacaaggaacaattgcttaattaattaatgatagcaattctcaaatcatatcatgtagtcttaactttacaagcaattagctgctagtaaaataaatcagaaataacagtaacaaaataaatgttatttttctctcacataaaggaagtctggaagtagtcaatgcagggctgatatggcacatccatggtcagcaaggaccaggctgcttttctccttgggtttgctatctttagagcatggcttcctttcctgcttcatagtccaatatggctgtccaggccaccccatacagttgtgtagtttatttactgtgaagacacctgaccaagaagtgagtgggggctgtgtattctgagggattccttctacccagaggaggaaattttctaactcatctgcaaagatgggggattcttcctattctgttcaaaggcaccaaaaacattaacagagatgccatgactatcatgattccagctatcccactcattttcctggcagaacaaaaattaaccacacccctaaacactttcctggaagactcacccaaaaaatacttgcttagatttcactgaccagaagcaa

SEQ ID NO: 111898 - DNA, 1096 bp, Homo sapiens
tgtatttttagtagagacggggtttcaccctgttggccagtctggtctcgaactcctgacctcaggtgatccgcctgccttggcctcccaaagtgctgggattacaggcgttagccaccacacctggcctgacaatgggtttttttcttgcttatgtcagatatctgaatgcgagatatgttgtgtagggactgaagtaaataatatttacgcctgcaaacaggcatgccccttcatctgtcagagcattgagtcaatcttgtcaggagttgagctaggttttggttttgttgttgccatggttaccatcagcttcaaatttctgtagttaccttgttcttagggtgggggctgggttgctggagggtttttctcagcgttcctgttcatgctcaattttctgcattccctgtgcagctgtgtttcagtggcagtgatggggtggggtggggtgggtcactcttttgcacccttccctagcagtagacttctattcctggtgatgggtgttgggagggattttttttttttttttttttaaataaatgcagccctagtcttaagtaggcccagtgcagctggaccttggggttggggttttctcagcatttctgttccttctcttcatggcaccacttatctgttgcatgtcttatggggaagtttcctagcccttccctagctggattggtacaggatactgggctctggactatttcctgccctgctctcagtgggtagaagtgttgtaggtttttatcttctttctcccttccatcgttagacacagtgcgtgtttacctgtgccttttcctgtgtgcctgcaactggctggggggtggggggacggcgcgcttctaatcttctgctttgctccagtctttcctgggagcacctggtgggaggtatgtggaaaatggcctgtgaattgagtgtgaactccccgtatgcctgggtctcccaagaggtttatactgtcacactagccctaaaattgtagctggttgtttcttacctgcttgcctttctctcgtgctctggcgcaagggagactgtggtgggaactggagtgtgggactgactgtccttggatttc

SEQ ID NO: 111899 - DNA, 1061 bp, Homo sapiens
ttgactttgaggtcatttcctctataacttttccctagcctcctaggctggattgaatgtcttttctgtcaggctctgatgatgctcttgtattactacattatattgaaatgacctgttagtatgtctttctgatctactcctctgtaagtttctggagagcagcatcagtgcggtaattcaacttattcatgacttcagacattggaaaagttcacttcatgtttgttgaattagaaaaactgtaaagcagtctatgcttttgaattaaaatataattcatcctttgtttttttttctcttatgtacactggctttttttttaaaaaaaatctcttaggatatatattgatataactcaactttattttcttttaaggtctgcaaagaaaacaaaaaaaggtgctaaagaaaaaacaccagatgagaaaaaagatgaaatagaaaaaataaaagcatatccctatatggaaggcgaacctgaggatgatgtctatttaaaacgcttatacccgagacagatatatgaggtggagaaagctgttcacttacttaagaaatttcaaattcttgactttactagtccaaagcaaagtgtttatcttgatttgacactggatatggcactgggaaagaaggtatgtagagtccattaaaataagtttacctgtgaacagtggctgtatgaattggtgtttctttattttattttattgttattattatttttgagacagggtcttcttgccgtgttgcccaggctggagtgcggtggtatgatctcagctcactgcagactccacctcccgggctcaggtgatcctgccacctcagcttcctgagtagctgggactacaggtgtgttctaccacgcccagctaatttttgtacttttagtacagatgaggtttccccattttgcccaggctggttttgaactctggggctcaagcactctgcgctccttggcctcccaaagtgctgggattacatgcatgagccactgtgcctggcctcttaattttaaaaattattgcctctcataatttttagaaaacttc

SEQ ID NO: 111900 - DNA, 1096 bp, Homo sapiens
atattaattagctctctttgactgtggggagtggtacccctacattgaaatagaagagaataatgggaaatgatgttggaaaggtagattgatgccgtattgagaagaactttgaatgatgggctaatgagcatgaacatctgcattctatattcagcaggactcagaagtttttgagatgggagtgacataatctgttctttagagctttaatctggcaagaggtttttaagataattgaaactagagacagggaaaccagttcaggtacaatggcaagagactaataaatgtaatgtttaagctaaggtcttcataacgagactggagtgaaatgtataaatgtcaaggatattaggacttagcaattaattgggaatggagaggttgagggggagaaaaggaagagtcaaatgatactgaggttttttaagtctagagaactctcctaataagtgttatcattaatggaaacagggagtacaattgggaggaaaaacaagttcacttgctgacacagtttgttttagatagtgctggatgtctggtatattattatttcaaataaaattttgtagtgtaaacagaacaaatattttaaaattgtgttagtagatttgtcttcaaattttaactctagttgagctaaaaaaattctgctaaaatttttatatatcctagccactaacaacttgtctgaattctagatcatgacctgtaaattaaattcaaatggactttccagttcttttgttgtgttagagttttgtttatttttgatagcatgcattaagtcataaatatttattagattttgaactggtgtctggcactttttattagggatttcccttacagcagtgttcattatggagtccagtttatattctttcttaagtaagacctaaaactgaacatattttaaaaattaaaccagaattgcagttgaatttgatgaaaatatttctcataacttttttgttcttaattaaattcaagctcaaatcagagcaaaacaaacagtactaaatacagtaaaaaccaaaaatgaatactaatatgtttgtattctagatatctagctccttgctttgca

SEQ ID NO: 111901 - DNA, 1004 bp, Homo sapiens
tactgaggattgaaaaataaactgaaaagacattttctgtctttaagaagataaacactgaggagagagagatgagagcaaactgctgcactaaaatgcaataagtttattggtagaaaatgtacaaagtattgtagaggaatgagggactgctttgtagaatgagattatataaagaagactgcagttgagaggttaagcatgaataggcatttgctttccttacatgaatcaggcagaggaaatggccattttacatatacaaaagtatgagagagccagtagtgttcaagaaattataagcagctttctatcatttggtatataaaatgttatcagatactggtggtcaatgggattggacagtgatagacagtgggctaggtcacagcaggctttgtgtgctataccatggagattagattttatcctctttgcaaataggagccattgaaaactttagctcagaagaatgatgtaagatttgcttatcagaatgagtattgtgagaactgtataagtggtagggtagccatatgaggatggtgaaactttaagaacagagaccagcgaggaggcgattacagtaatccaggtaaaagatgaagaaggaaagagtctggtagtggcagtgaagacagatgaggaaagatgttgttggatattaagaattagaattaacaggagttattgattaaatgtagggggtaagggagggggaaggatctagaatgatttcctaattttggtcttgagtagcctagtaaatactattttaactataaatgcacaggaagtaaagcagatttgggtatgacaataatatcacaaggtgaaggggtcaaggaggtagataagctggcgcaactttattttgtattaacatgaagcattaacagtattaatatgaagtaggttgtggttagtatgcacattgtgctccctagagcaagtaaaacatactcacacaaataaatatagcttaaaactataaatagaggaat

SEQ ID NO: 111902 - DNA, 1377 bp, Homo sapiens
gcagctcacagcattgcagcttgtttcttcaaagccagtaaggaagatagtcttcttcaagacaggcattatagctttatgtaatgtaattatgtacacatgattattctgtctcttggtttgaagcaagttgcaagtttcattcacactcaatgaatgtgaacaccaggaaacagagctctttggaactaaagtttatctgccacaatttatttgctatatctttacatgagatatgtgtttcttttattcagtaatttttactacttatttggagtgataattgtggattttactttttctaactagattccattggccgtgacatccccaaaatgcttgaattatttaaaaatggacatgaaattaaggtagatgaagaaagggagaactttctccagaccaaaatagcaacagtaagttacaatgaaaattatcaaataatcctctttttttgttgttcaagtattcttcagtaatttataatattataaaatgccagtcatttgaacttgtttttggcactagcattaagaatggcattaaacatacgcatagatactttttttattctataaattaaactcataaattttaatggtacttgagaatttcttccagagttatgtgctactctcacatttacttgtactttgccttatttatctgttgtatgtatacacttttgtatttatgtattatattttaagcttattgagaatagggtttagattttgtatgtccccctaatcaagattgcataatgctgagcacatagtaggtgttcaatactactttagtggaattgagtaatttgctttattttaatgaattatgtccaattttctctgctagtgtttttaaaattgtttgcctgcttttagaagatgctggaaatcagtttccaaagccatttttaggatactaatgtagatatgccacatttctaggactgtgttttaaaatatattgtcattacaaacattaaagttatttatactaaagaatctctaaagtgcctatccaacatatgtaatttttttcttgttcatttactataggaataacagtaattgataaattgatagcaaaatttaaacaggacctaccaagtgtcagttgctattctaaacaatttttgtatattctgtcttttaattgttagccatatgagaggtaaaatgatcacccctgtcttatagatgaaggcatgcaagcccagagaagttaagtaacttttccaaggtctcacagctactatgaggcagaataagcatttgaactttggcagtttcctcaagtccaggctctttatccctataccatcttgcctcatgactggaattatttgaatagctattattctttctctttgcc

SEQ ID NO: 111903 - DNA, 1610 bp, Homo sapiens
aagtaaagaaaaagctgggtgctatgttgcccaggctggcctcaaactcctatgctgaaataatcctcccttagccttctgggtagatgggactacagatgtatgccaccatgctaggcttctcagctagttttatggtcaaaaaacaaaaaaacttgctttagaaatggagcaaagcaggtttaatctagttggggaaaccccagcttgccatcattatcatcaaagctcagctccaatttatttggcactgagctctgctccagtctaatgttggaatttccttgttccccaaaaggcctttgacagtacttcttgtttcttagggttgacaacattgtaattgaaaaaccaaacaaatgaaacataaaatacaaattttaagagtctattctgaagttgtagagacttgagtttgaatacctaccttttcagctacttcagagatggcagattttaaggaagtttcttaatgttgttgtgtctcaaatttcctcatctataaaatgtgtataatagtacttctttcactatgtggttttgaagattacataaaattttaaaatggtaacatctattgttattgttttggttggccttttgggactgtggaatatccttataaggctctttttagctggattaaatctgtcttaagtaatgttttcagtatatttagtagttaatagtttatgtagatcctgactcagaatataagaaaccatgacatcgcattcatttctttcaacaaataccatagtgattaagacataggtcttaatcactaagtagtagatcactaagtagtagatcagaggagatataatttcttaatgaaaaagaaattatgtgtttaaagagtttttttttgaacacttagtattgcagtatagaaggatgttgagagtgggttttagattcctgttgtcttgattcaaacccttgttccagctagaaagagctgtacccccttgctctctgagcctcaatttttccccatttcccatttctcctgtatataaaatcatggtaataatatgtaccttctaagctaggaaggaatagatgagataataacataataaccatttagcagagtacttctggataagggggagtaacagggacctaatttatcctcctacctaaaacagtcagcattatttgataccaaaaccagacaaagaaaaccacaatgcagtatcattcgtgaacatagatgtaacaattgcaaactaaattttagcaaatagaatccagcaatatataaaaagggtaacatatcatgctcaagtagggtttattctaggaatgcaaggttagtttaacattcaacaattaatcattacagttcaccatattaagaaagtaaaaaacaaaagccatatgagcattgcagtggatgcagagaaagcatctgacagaatccaacatctgtttctgattaaaaagtctcagcaaactaggaatagaagtccatgtccttaacctgaaaagagtgtctaagaaaagtcaaagctgacatcatatttagtggtgaaacactgaatgttgcatttctcctaagatcaggaacaagacaaggacatccgtctcaccactgcttcttt

SEQ ID NO: 111904 - DNA, 1048 bp, Homo sapiens
tctaactaaaaaatctttggggattaataaagttaggtaaaagttggaaataaaaacagatttgcataggtaatgcacactggaactttaaagaagtgcaatgtactatgaaagtgacttagttttttatctttttaagaataattttggtgtctttataagtgctttgctatcattgtagcaacttggtagaatttgccacattttgtaaaacatgtttggtcttcaaaagtatgtttagttaaagattgctatattttcaatcaacttctgctttttttcatttcaaagtaattcctttcaagtgtacctgtatatacaaatgaagccttttaaaatgacttactctaatattttttgacaaatcataaaataaggaattttgatattttatcttagaacattggagactccttgggttcatagcgtttttcaaaagaaaatctaaagagaaattaatccatattcatacatttcaggtaagaaagtaaggaaatgaaacatcacacattgtcttgagatctgttgcttcatacagccgtagctctagtaagctctttcccaaaaaagggaaaactgctgagcagagagactataggaacctgcatgtgggatcacctgaggtttgcttcttgagtggcaaaagttgaaatacaaacacaggaagtctggcttctgctaattagcacatacttttatgtcccgaacaaattctcttcttcttctaaaggaagaagggtgattttgcttttattccctctatagtacccttctcccttccattcatcctttttttttgagacagtgtcttatttactctgtcccccacaatggagtgcaagtggcacgaacttgactcactgcaaccttcacctctttgtttcaactgattcttgtgtctcagcctcctgagtaggtggggattacaggcgcctggcaccacatccagctaattttttgtatttttagtagagatggggtttcaccaggttggccatgctagtctcctggcttcaagtgatctgcccacggtcgcctcccaaagtgt

SEQ ID NO: 111905 - DNA, 1014 bp, Homo sapiens
ctagtaaaagttaaaaaacttttcagtggttctacatgtgctggcatctcctttaataactctctgtccctttattactattttctatgacaaagtacacatgtacacacattctgaatgcctgccgagtggcaaaaactgttcctaactatggggatatattgttgtccagaagttcttgccctcaactagatcactttctagttagggtatagataatatacaaataaatatatatgtacttatgatggtggagtgtgtgtatgtgtggctattatagaaaggttggtcagggaaggcctgcctctctaaattggaggtaacatttgaatagagactgaatgaaataagagaacaagttatgaagatatctgagagaaaagtattcttgagacaggaggcagcaagtacaaaggctctgagaaaaaaaggggattgagcttttataggaacaagaggtatttcttctgggtgttagaaaaggctaaaatatctttgaagaaaaacatgctcaaaaagttctgagaaaagtattaaatacacaaaggaaactactttgatacaggaggacatagaattacatattttactgacaatacattcctgaatatctttacataatagcaatcttaacttgcttttatttgaatagaaaagcctttcgtgcagagtttttttttttttttaacatcaggaaacccttatgaggctaacaatagacttcaagattctgtgaacttcctgaaattttatgcagagtactgtgtgtacgtgcatgtgtacatttttcttgggtgagtggttgtgttttccatcaggaattcatgactcattcgttgagcaaatagttattgggtacctactatatgccaggcgttactctagataatggggttatatacatcaacaaagtagacaacaatccttgccttcatgggatagacgtgtagatggtataaaggtagatatctgttgatagaagatgaatggtagaaaataagtaaaaaaaagaaa

SEQ ID NO: 111906 - DNA, 1070 bp, Homo sapiens
acacttgaaaataacatgtgttctgagaattctaggtaaagatagtggtttgaacaccacagtggtaacttattagaaaattccaactcttaaatcagcaatggcaaaagccaaacacaatctaaaccttagtatctttaaaagacttaaaatggggctctagatacctctggaactgcatgttagtggtgagcttggggatgggacaggaggaatctgaaaaagggaatttttttatccttactttatcatgctgggtaactgccctttccttgccagcacatgactggagagattaaaatatagggtctctacactgggggagatcaggagttgaaactgaaaataaggagattaagtgaatatatcaatattgaatgctgagaaactccccttaccctccaccaccatttctcttccttgatttagctcccagaactctggcagccaggcctcaccctctaggcaggagataagaagaggtttagttcaaggatctaatgatagtaaggcttttgacccagctttacaattttttccttcccattttgaacattcatggtggctttcctctctctttccatttctggataaagagatacttggtcatttctggtactttgtgagaactatttgacatgatttaagaatcattcttatagtttttttcttttttacttttttttttttttgagacagagtctcactctgttgctcaagctggagtgcagtggtgcgatcttggctcaccgcaacctctgcctcctgggttcaggtgattctcttgcctcagtctcctgtttagctgggaccacaggcgcatgccaccgtgcccagctaatttttgtatttttagtagagacggggcttcgtcatgttggccagtctggtcttgaactcctggcctcaagtgatccacctgccttggcctcctaaagtgctgggatttcgggcgtgagctgcctcatctggcctataacttgtttttgatgcttgttttcaggtttctcttctgtcttcctctctcccatgttctctttaccttttttttcttttaatagctctttgaa

SEQ ID NO: 111907 - DNA, 1051 bp, Homo sapiens
attactatagtattttaataatatttaattcaaatataaaatcttgattatttggaatgaggaaaaatgataaaaatttcactaagtacaattgaaatgatgaaaaacctctttaaagtacaatatataaatgcatttatatgatagcctaggagattaggcattaagttaaaacattaaagaaaaaaactatagccatattacaatcatgtaaatatccagatcttgagaacatgtaaataataatgctattggcaaatccaatctaagcttgttttctagagagaagaaaagagtaagacaactcagagttatatttataccaaatcatgtcaaggcctgatttaacaagtatttcttgtctggatttcaaatatatttggagctttgacatacttaatataaaagcaaagcctttgatatgttctttgtttttcttctttttaaagtgtagacatggtccaattataggtgagtatcattttgtgtgcttgtgtaacagtgaatggttttgtggcaagcgtattgtcaacctggcagctgataaaagctgaagcatattgtaacaaaaataaacaagttcaggacaagggactataaacaatagtaaaatcttatgttgaaattagagagcctttggttttagtgaacatgttagaacaggaaaagtgaatgttctggagttcagccaaacagcaagatgtggatagtataagacatggaaattaaatgcttattttgaagcaactgggtccataggttgaaatagtagctagccaggaatattgcttacatctacaaacaataactggataaaaggaagcagcccattggttcatggctcactgccacttcccttcctccttttcccttattccttctagttaataattaacttttcttttgttgcattatttttggtgtactatagtgtactgtgtcataaataagggaattataaagagaggaaaataaactttagaatgtaaagtagaggaagtaggctggcaatagatcttagatctccaaggatatggagctaagaaagagg

SEQ ID NO: 111908 - DNA, 1034 bp, Homo sapiens
tctatgatttcttttacaccagaacagcagaaatggaagaattgtgacagaggccatttggcctgcaaagcctaaaatatttactgccttaccatttacaaagaaagtatgccaactcctgtttcatactcttctagaattctttctaaaacatagatcagatataccatttatctgcttagaaacatcaaatggcttttcactgctgacggggtattttctaagacctttacctttaaatccctttgcaacctagtttcagatcactccctctggttcaaattcagtatttcctgctgttttcagttgtgcaactggaagaccagacttacaaatggcagcttgcaggctgaatttggccactggtcttacttttttgggcccaaatagtggtggtggtttgttttgtcttattgaatcaggatttaaatactggacagtatcccataaaaatccagatttttagctgttcttgacaaatcaggagttctgaggacattggccccacagccctcagtctgttaacccttagttgtagcaactctgctgtctccacccctagtggttgctctccacctcagcacaacctgtatcacacacatggtataagcatatgcacctaaacccagtcctcctcacttgtacatgtttcccactttggccactgtaggcatttgagttcgtaaccctggacctagatacaatgagctacctcatggtcccctgatccaccttttatttttttatttcaatcagtttttggggaacaggtggtgtttggttacaggagtaagttctttagtggtgatttctgagattttggtacactcatcacccgagcagtgtacactgtacccaaagtgtagtcttttatccctcactcccctcccaccctttcccttgattccccaaagtccactatatcattcttatgcctttgcatcctatagcttagctccctcttatgagtgagaacatacgatgtttggttttccattcctgagttacttcacttagaaaaatggtccccaatt

SEQ ID NO: 111909 - DNA, 1014 bp, Homo sapiens
aaaggattcattaggcagagagaaaaattcttatttttccatcttaaatgtatattcttttagtgtttcacttagtttccctttttctccccttagtatacaacacgctcacttgtgtttctcagacaactgatacttcattttccttatataaagatcacgaacttgtaatagctgtgtccagagtcataagctagtaaggtggtggaagtggggtttgtctgccttaagtgctcagacacgtagctacttggccactccttaccatgtgtgtgctcatgaataagttacagagttttctgagtctcagtttataagtgtaaataaaggataataatagcacctacctcataaggttcttgggagaaatgaataagaatatctatgtgaacactcagagtttggcccaaagtaagtacccaataaacagagctgcaccatcaattattattattattattattattattattattattattattactactactactactttatgttatgtaggagacatacagataacctttcttttcttggtttagactgttaggagtcatggaaattaagagttttggctcatcttcaaaagctgtctgccaggccacactttatatagtcttagaatattacatttggaagagattttggaggacaactggtctaacaagtgcttatccaaagcagcagtcctctcttcagttttcagtcaaaggtgattagtcatctagagactatcagaacagttatagttaatagaagctgccactttagaaggaacatgtgattgtttaaaaatcatgtatgtgtactttgctttttttttttaagttctgtcttctgtaagattgtaaaaatcctttattcacattgtaatcctttatcgggggaacctgcccccaatatttcatcgtaagttctttctattttccataagtgtcggccggctgagaaataaagagtataaagagaggaattttacagctgggtctctgggggtgatatcacata

SEQ ID NO: 111910 - DNA, 1011 bp, Homo sapiens
gctactatattggacagtgcaacattagagttttaaaattcttaacgtactctagtacttaaaatacagcctcatgaatggttctcaccctgggtggaagcttactggagtacttttagcagttgtgagaaaagtaatacaaagtttgttatagtacctaagtttgctgtttttgtttgtttatataatttgaacagttttgaagtcaacacagttacaacactactctctccatattgctaaatatgttttcttttttgttgtcgtggttttttttttaaaccaagcaattgttatggatcaatgctttcttgaataaaagaaaaggagtaaaattacagttaattgtacatattccattaaaaattttataaattttttaactcatgggagtgttatccatcatttatattagagcagaaaaagatttgagaacttctggtctaatctgtagaccttgtatattagggctaaggaggtttaagggagaccattagagctcttcaatgttagagtctttttaaaaattggtgtgctatagtgttactttttaaaacttgaaacagttaacacacaagagatagccctgtagaaatgaaaatgtctcagaactgctttgtccttgtattcatcaacgtgctcaagagattttgtggagaagagaaatgaaaatttggaagctttccctattcagtgtttgaaatcaccacaaacaattagtgaatggtggctagtggctgctgttgaaacatcttgaacttctccagcagtggggagaatacttggtgtcctgaggatgcactcagcggggaagcaatacaatcagccattccttaatttccctaaaggtattgggtaatttcttaatacccttgtattgaatattgtaggatatcaccattttaagttatagtttagcaaaaattcatcattttttatgcctctggtctttattttaaaatacggagtaatatgcttttaaatgggggatgccactctttattaaaatgt

SEQ ID NO: 111911 - DNA, 1101 bp, Homo sapiens
atgtgtttgcttctttatgattatagaggaattatgtagtccagtgggaggaatgactattgtgttaaaaatgcctgtgctaagtcttcataataaaagcagcgtgggcagaagccaaaactgctccacattgttgaaacctcaatttgtgccacttggagaagaagatgatatgttagtgttaggagggtgtgtgtctctccgagtgattttacagggctgtaatctatggctgtgcaaagaacactggagcatttgagcatcgtgccaggtagcccagtggtgttaagtgactggtagcatacaatcaagtgggaagaaaaaagaagtcagttattaatgaattattcaggcatgtatcctacaagactgggaaaatctgaaattatttttgccagcattaactagagttctaaatcaagatctgggtaatagcgtctgcatggatttaagtagttgctgataagtaggtacctgggaccatctccatggggatagtttgtttcattaaatgaactcactaaacaagctgttaaaacccttctttatttcagtatggtcccagtcttagcctgtaaatgttaaaattcctttgttttctcttactgtgtgtggttgaggtctgtaaggctggtgtcctgtcagtgctgatttgtgttttttggtgttttatttttattttttgccaggaacctggttcttgtataaaccagggcccccctgcagaggatttagaagtcaggaagggcagccagtactattgacttttacttcaggtttggctaaaaaaataaccacattcctatttcaattgagaattagcttagtgtttatacaaggaatcaggtcattgtttggtggtccataatatgccctttcttaaaagaaaaagcaaaaacaaaaccaaaaaactatctctagcaatctaagcaatagcaccacatattcagagctttcagtccagcaatgcagtgctcatcataagcccatagtgaatagttacaaaatgaatgcatgaatgacatctcaatttaaatattacagaattgtaagcaccttttttgactaagtcaaggagacacacaactggaggaaaaggag

SEQ ID NO: 111912 - DNA, 1047 bp, Homo sapiens
agaggtgtaaagagtcaacccattaaatttgcctatttctgatgattaatgagtttgagtatatcttcaactcctgttggtcttgaagtttcctattctatagatttctttttaaatgtgcttttcccattgctctattggccttgcctccttttatggagttcattttatggagtttccttgtatgttatagatagtagccttttttcagttttaaatatgcaaattttctcactctgttgtcttttaactttgaatataatgcctttgttaaacaataatctttgattcattattttttgctttaaggttttgcttttgaatttttaataagacctttgctaaggttcaaaaataaattaatctctcttctattaatttgatgttttatcttaacttaggttgtcgagccatctgaagtccatatatatatatatatatatgggtttaagtagggtcccatttgatttttttccatttcacgatccagttttcccaacattgtttagtaattcagcctagccttccttatttctctttattgtatattaaatttccatatacacatagttctgtctgagctataagatatagaaatttctaaatttccatagtctaaatttctgttcttgtaccactatcaaactttttttcattaatttctatggctttgtagtatgtctcaatatctgattgggaaaattccctttctttccttttcaaagttgacttagctattcataagctttagagcacatttactgaattcttaagaaaactcaactgggtctggatgtggtggctcacacctataatcccagcactttgaaaaggccaaggcaagaggatctcttgagctcaggagttcgagaccaggctgggcaatatagtgagacctcatctctactaaaaataaaaaaaaaaaattagccaggtgtggtgatgtgtgcctgtagtcctagttcctctggaagctgaggcaggagaatcacttgagcctgagagattgaagcagcagtgagccatgatcgtgctgctgcactccag

SEQ ID NO: 111913 - DNA, 1083 bp, Homo sapiens
gctcaaaatgccagtgcttccaacactctgacccatggcctttccactctaattcatttaggcagtgtgaggtttaggtccagacagacctagggctaaatcccagccctgctatgaataaagcatgtcaccgtgggtaaatttttgaacttccaagacctcagtctcctcatctataaaatgtagttaataatgcctacctcataatgttgttaggaaaattaaaagtgacaatgtgtagaaagtgcttagtacaaacactaaataaagggtagctaataagcaatatgtagagcatggctaaatggtgggtaaacggccatgtgggcagttctggcagtgtaaccacctcctaacacattttccccttggtttggtgtgacatccacaggggactaagagtcccaggcccgtgaagcccagccaggaagtgggcactttattcacccatgtcccatggcgttctccctctcactctcttcctcagtttgtcataactcatgtgccagctgctctgggcccacaccctctcactgtacagcctgcagcccccccaaggctctgcgtcaaggccactgtctgccccgctgtggagagggtttctactctgaccatggagtctgcaaaggtatcgttggtgtcaccatcattcttgagaggctatcccacaagaacatagatttacttttttccaataatataactttccagtgtaacttttcttctagtgtatcttttatggctatccatacattatatgcatttttcattacagtagttttgcaaagggttaatctgaaaaaattttatttgaaaatttgtgaagacactcaaagtgttatgatttttttttctggctgtttttagggggaatattaaattaaacaaactagaactcttatttcctcctttctctgctctcttacctttgctaatgtttttcttagacttcattttgtttttccctaaagaatttctttttggtaatgacactgctgagcaaactgagagtcactagcgatgcctctgggctgagtgaaatggaaaaatcttaaatagctgtttaccataaaggctttgggc

SEQ ID NO: 111914 - DNA, 1035 bp, Homo sapiens
ttccttgagcccaggagttcaagaccagcccacgcacatagtaatattccttgtagtctcaactactcagaaggctgaggtgggaggattgcttgaactggggaggttgaggctgcagtgagacatcattgtgccattgcactctagctgggtgacagagttagaccctgtctcaaaaaaaaagtagatgatctgctcagatttccacagcaggtagacagtagaagcaggattttaatacaagtttctgacttagagcatgagcatggaatagctagtttagtctgacatgtatgtgtgttggttatgaaaagtgagtgtcatggtagtatgccattttggtttccaagcctcaactcttacctgaaagcttgagtaggtgaagggttaacaattaacttgtctaggactttaagttaaatgatcttgaacctattatacagtcccatgggcctagaccttgggctgaccttaaattatcttgcttctgccagatgttccttttttattgattttaaagaagaaaaacccttggtatctagtagaaagccatgtcgttttggagagttttgtgagagagaattttaaattggacagttaatgaataaggcaggaaaaagcccaagagctgacattaatttgtagaatgaaggagaaccacccattttggtgaatcagctaagatgagaaggaaggctgatgttcctgggacctgactgactttaggacaaatgcagaagctctggagagcagttctgagcaaggaacacacttaaggcaagtggtgctcacaggggcatttagcccaaaaaggcatttgactgtttctcaaagaaattagagacattccttaaagagagggataaatatgcagttgctgacattttgattggaagtttatatgattgcttgcaaaaccctgcacccaagtgatagctagttatgtaatatgcaccagaaaatagcttttttccacttacttacagagtcaagaatatgccttgttcacactaaacagctgtatgatgtgaccaa

SEQ ID NO: 111915 - DNA, 1051 bp, Homo sapiens
ttgaaacttaatcctcaatgtggcagtattgagaggtggggcttttacaaggtaattgaaacctgaaggctctgccctcatgaatggtttaatcattaatggattagtggattaatggttaatcatgggaggggagctggtggctttctaaaaagagaacaagagacttaaaatcacaagctcagccccctcgccacgtgactgcctacactgcctcatgactcttcacagagtccccaacaccaggaggctctcaccaaatgtaccccctcaaccttggacttcccagccttcatatgtgaaagaaataaattcctcttctcataaattacccagctttaggttttctgttataagcaacaaaaaatggactaagacattcccactcagaaataaaactaatgtaaaatataaagtaaaataaaattgcattttgcaactagttcttatcttagattacagagacatcagagcatcctgaatccactaaaacttatgaaaaagtttgtatgcttgtcaccaaatccccaataattaagaaccatctgtgcctatttttgaagatccagagaggagatcaaatgtaaagaagcaatgacaataattttgacacttgtctgaatgaccagagccataaaaccttcattctcacatggataatgtcgtcttaccttcaatagggctgtttctgaacatctccaagacatggagtgtaccttataaaatttaaccatatctttcagatctgtctcaagggaaagacaaatctaaaacttgaatagaatcattactacacgtcgctgagcaatgcttgactttgcttaagcaagattcttgctggcttgttagtaagtccagaagaaagtgaggaaggaaactagtttctcataaccaacacatagacaagcttatcacacatttaaaataattaacagtgcagttttcttaaagaccactacagataaacacattgatgagctgatgatgcaaatatccctccaaaactggcttttggggaaaagatagggtgttaagttatggaaaagtggaa

SEQ ID NO: 111916 - DNA, 1415 bp, Homo sapiens
ttagcactgtaaacaatattgacggttcctttgtgggcagagcaatacaatgcattctgatcattgaatacccagacatcagttcaagtgccagttctgtgactcatcagctgagtgaccttgggccgtacacttaatctttctttgcctcagcttccttgtcttttatatttttatttattttatgttttgtttccttgtcttttttaattctcttatttatttttatttatttttaagagaggaggtttcactgtgttgcccaggctgaactggcaactcttgggctcaagcaatcctccccgctcagcctccctagtaagtgagactatggacctgtagtcccatacctggctcttgtctttaaaatattatcattttctactacataaagaatttctctaatgattaataaaatagtatggaaaccccctagtgcagtacccagttcatggtagggattccacagaagttaattcactttcctccctgctctatgtacataccataatgccaaaagctcaggaatttttctggttttgttgagcaactgaaaattcataaaactaagtcatttcttttttttttttttttttttttttgagacggagtctcgctctgtcgcccaggcgggactgcggactgcagtggcgcaatctcggctcactgcaagctccgcttcccgggttcacgccattctcctgcctcagcctcccgagtagctgggactacaggcgcccgccaccgcgcccggctaattttttttgtatttttagtagagacggggtttcaccttgttagccaggatggtctcgatctcctgacctcatgatccacccgcctcggcctcccaaagtgctgggattacaggcgtgagccaccgggcccggccaaactaagtcatttctaagtggttctgatattcctcccatttttccatttttacataaaaccttggaaaagccatttggactgtccccattcccagagtcagagtgaccttcccctttgtaatttatagatcttcctacagttagccaagagttgttcagggtgaaattgcttgaccatctccagcaggctagagaaaaacaccaggctcagattgtggggttagcatacaaaatagagctctaaaggaaaaaaaattagtttgagcaactgcttttacttatagtgatttattttcttccttgacattaagataagcactagctttcagatatggtgaacctttcttgctacacacctataaatatataatataagagaataaacaggacttttattctggatgagaatgcctataggacacagtcaccctcacagtatccgcaggagaactggatctatcattctctagctgtgggcttttgaatgttgatgtggaaggaaggcagccatcctggcaggca

SEQ ID NO: 111917 - DNA, 1050 bp, Homo sapiens
gcgggcccctgtgaatattaactatggcaatgaataaaagggtgtttcatgcagggcagattttcaataagtgttggttcctgttttccagaggaagaaatattttgatatcaagtatgggagagagataaaaggcaataagacagtaaccaaacctcataaaggtaaaaaagtcaagttcaaaagtagtaggttgttttgtctgatgtacagaaaggagtatttagacaatgattgtttccttccccccaaaactatccaaataaagttaactttttttttccaaaactcaggcaaacaaaataaataaataaataaataaataaataaataaataaaattccaaccagataagatgctagaaattaaaatgccttactctctgcatttgtctcaggccattgatcattttgcttttgttcaagacaaatgttgagcataaatattgagtaaaataacttttgtttcatttaggaactgatgagaaaatgctcatcagcattctgactgagaggtcaaatgcacagcggcagctgattgttaaggaatatcaagcagcatatggaaaggtaaggtcacattaacatgacaggcagtaaagagatcattaatgtaccatggtcgctcccacatggttatgcccacagtcttctgtttcaggctgagtgtaacagaagatgccctgtgcatccagtcaggagcctggaatctgagtcgtggttttgccttgaactagctgactggctttgggcatgttacttggtctttctgggcctcagtttcttcacctgtaggataaggtttgccttagcccagtgggttctaaaccagaagtgattttgctccccaggggacatttgggatgaatggagacattctgatgatcacaaacaggatggtggggagtacttctagcatgtagtaggcataggtcagggatgctacaagcatctgagaatgcgcaaggcagccctccacaacaaagaattactaaggaaactatctgactaattctgtcttaggtaaccttttatttctcttttaatttta

SEQ ID NO: 111918 - DNA, 1050 bp, Homo sapiens
acattctcaccagagacaaatgaccagccactgtcctcccttccccttcctcttggagctctttgggagttactgagaggcaagacaccgaggaagagagcacctcccactgaagctgggcgtgaatttataagggttcctcttcctcttcccttaccccaatctaagcattgaaagcatggcggatctaggaaatgcatttgaatacagttcctaactgtggcactcatggaatcctcccatttggctctccttcaaaaaacctctacaaaacagaacaatttgggagtaattagaaaatgcagattaatattcatagaaatattttcaacacttctgtttattccctgtggatggacatgttttgtctgattttgatacatatgttcatctttcactaggtgactttagagaaagagaaaaaaagtatttcacatttttccccttggttttttgattttaggagctgaaagatgacttgaagggtgatctctctggccactttgagcatctcatggtggccctagtgactccaccagcagtctttgatgcaaagcagctaaagaaatccatgaaggtatgagccccccacaagccatttctgcccagggtttgaccaagtcatcaaaaatagtgactttcttgcagtgcacacttgtgatgggtggacttggatgcccttttggtctggactctcccagtggtagaatgactctgaaataggcaacagctatagaaccttaagcccaaatgttcctgggctggaagaattttgtcatatcctttgtttgacatgaagagtcaagttctctaatttgtcatcgttgaaagtaaatagcactatgattaaccccaacactcaagctaaaaacctagcattatccttgagcccttgttttctcttacccttccaagctcccaaatctatcagcaagttccttagttttacttcaaaatccattataaatatgtgcacttctctcaaaatccattgctactgttctagtctgaccaccatcatctcttgactggtccatatcaataggcttc

SEQ ID NO: 111919 - DNA, 1047 bp, Homo sapiens
ctgcagctcagtcatctgttgaaaaacaatgtatttgtgtgcatgtgtgcgtgttggaggtgatcctttgctctaaattcagttagtaggttgcactgaggagcaggtaaacttggagcccatttatctttgttatttagaatcttctctgttggacaaggtgctattcatgccctcccagtatgtctctttgatagtagtttaaaaggtgatataaaagcaggttaactttcacttaacgaggttttgtggtcggtccttcatgatctggaacaggttatgacggcaggtagaagtctacttacaaaaaaagtttactccattttaaaagaagaacttagaatttagttttgtatttctggcataattgccttgtagaaaatacttgccctgtgtgctgcatgcttcattggcctttgagtttttagttgcaaaatgatactacaaaataaacactttaaaagaaatactttttgttgataaatggcccttttaagttctatggttaagataaaaaaaatcgaagagtggattcagttctccgagcgttagacgttgatgtggtttgaaaacagtagactgagattccgcttgtattttttgaaatgctatacacaacagtaaattagcacaagggaaaaaacctgaagatttttgtataaaatatttgaaagagaaagaaatcgtgaattattcaagtgtacatatcattgtttcgtgaaccattgctcagaataatgatcttagccgaaacttggagaggtgggagaaggaggatccttagtttttcagaagaatgaatatgtggtgagtggtctttataaaagatttactatactataaagttttctagctctttattacacatgaatttcaattattggtttagattgtgttgtaggttttaaaagcacatggctcttcactcaaatgccatattctgtctttgaattgttttagtaactaattgaaatgtagcttgagtagtgttacactcactcattccactaaatcccagatgggtcttttatttaatagaaaaaaaat

SEQ ID NO: 111920 - DNA, 1126 bp, Homo sapiens
gaaggcctttttgatcttttagcagaaacctgaaggatgaagaaagttaggtaaaaacagaggtgtgaggttggggtgatttgaagtatgtcatgaagactgaagtctctgtgtgagggaaggaagtttcagaaactgaaatatgctcagagctgtggactacaatgaatgaatcacatgtaagagagatccaagatgatgttggcaaggtgaccagggtccggggcttagtataccatgctgaggagtttaggttttatctgaaatgcaacaggaagctattgaagggtttgaattggggcagtgacatgctctgatttgtatttttacaagatcatgctgattgctgtatagagaggtatacaaattataaggttaaaatgatgacagtggggatgaagatgataatgcttaaatgggaagaccttgtggtggtcataggaagtgttaggaattacttgcttatgtatctctcaggtgaaagtaccgtttgggaacataaggaaggaacagatttttttttttttttttgaggtgtttggaggacagccagtagttcagacatgtttagagatgtgtttggatgagatatctgagaggaaatatcaaatgggaagctgggtatgtcgtctggaactcagcaaaggtgtttgggcttagagatggtacttctgattgattagtgagccctggctgttatttaaagccctgggagaggatggatgtagggagagtgtagaatgagaaggtgctcattgaaggactcctatagtgcattggtctcagacattagtgttcattgtaaacattcagaggatttggtaaaacagaagtgctgagcctggtccccaacttttgattatgtctgagtgaggcccactctttcagtgatacagatgctgccggttcaggaaccacgtcttgagtaccgagtaccactgatttcgagcgggcgaagaagactaagaagaaggtgctagagaggtatgaggaataccaggacactctgatacctggaaacttgagagtatttcaagaaggggagggagtgagcagttgtgttgctgcaaagtcatcttacttgatcacattttttcgcctggcattcacagttattcatgctcac

SEQ ID NO: 111921 - DNA, 1046 bp, Homo sapiens
cttaattcttatccttggtgtttgttgctttttccaaaatgtaaaatagttattgatttacgagtgtaatataatctttctttttactcaagatttacccaattataaatggatacagtggtgttcttctgcttattttccaaggtttctgtggcacatgaatatgaaattgacatttgtgtaacatgtagtgatatttgcagattagatctggcaaatacatgtgaataatttataggtatctgatgtgaaagtaatagtgtctcatagtacttttaaagttcaatgatatatccatagcttacaaaaactttctgcaattaaaataaaaaactaaaatgagacgttttattttttttcttccaagaattcttctattccttcagctcttcctgaaccgatgactgctagtgaagcagctgctaggaaaagccaaataaaagccaggtaggcaaaactatgctgaaattgaaaaggcattaaaaaaaatgataggtcttgtttttaatcctagcaagtgtaattgattaaatatcatcttcatccacaaagaatgttgtgttgcttattgtatgtggtataattgagatagcaaatacaaaataagcttttaaaaatattagataaggagtctggcatcatctcactggaactgttcactctatgacaagtgattatttaactgatgatgtgacagcgggtcttttttttggacaggatttgtcattttcatcacatagcaactctagtttaggaaatactatgttttgagtttatagatgtttatttttttaatttaaggaaagaaaaaaatagctcctacaggtaactagaatatatagaatatgtatgtactttgtagaatttgtaatgagtgattataatactttttaaggctggtatatgttttcaatcttatttttcagagtatttattatattaataataagtttgaactatattatgtaagttaagactgaatctgttaatgattgatttttccccccctcacacttttttgaatttaaaagttaataagcaggatt

SEQ ID NO: 111922 - DNA, 1021 bp, Homo sapiens
aaagaggccattgcaaatttcacaaatcagaagaacatcagcaatccacctgatatgtcagggtggaatccttttggagaggataatttctctaagttaacagaagaggaactattggacagagaatttgaccttctaagatcaagtaagggacacttgaaggcttattttgcttcacagtaaaataacagctctattattattcagcaaggccaaagacttttgagaatgtgtatggaaaattctttttgtgcatttgagggcaaaattcaggccatcttcttatacatatactatcaaattatgttgtgtgcattagaaatcagttgcttgatagtagctattaaacccaatattgctgatagtatgctaatatcctaaaacttaaatattgcatatctatgaatgttaaattcagaatatctctaaaacatggaaaattgatgtttcaataaaaagggagacattttattattttgccttactaatgattttgcagctctgtttttctgcacactcaatagaaaatattgtgggtctgagatgccctttgaaaatgcctgaaagaaaacatgggctactacattatgttaatgttttgtaatgtccttttaatgagtggtgacataaaagggctgctttgttgtcctgatatggcaaaaattaaataaattctttttcactttaaatcagatatctcaatgtttttacttggaatcattgcttttctttgaactacctaatatatgtcaagcttcgccacacatattttagaaatgtcctttttgaaagaatgatgtgagtgttttgagtaggttgccaaataggagcaaaaagctcacttctagagtatgtagataattttcaggtttctgaggctttgtgtgtgtgtgtgtgtgtgcacgcgcatgtgtgtgcaggtgtgcacacaaaacaagtgtgttttccccttttgcatgtgaaaagaaggtcttaataatccctagtttatagttcctagttcctatttcatttaggtaat

SEQ ID NO: 111923 - DNA, 1110 bp, Homo sapiens
aaaatttccccagttgcccgtactatttgcagatgtaacctgaaagcacaaaggtggtatagatgattgtgtcttttcttgctctttttgaaagtgtgtttccatttcttatactgtgttctcaaatatagctgtctaaaaatcaaaaatagaatttccaggatctaaaatgtacccttatgctgtgtggatatacatttgttggtctacttacttctggtcagttctgaagtggatctcagctcctcttgaattagccatagacttgcttctccctacacttctccctcatttatattcacctgcaaccactgggcccagaaaagttactagaagcttattgggtatgatggataaaataattgaatttggccattcccaggacatgatgatggtagagtgcttattatgtgttcaggcaccgttctaagtcctttcttcacaatagctctatgatataaaatgtgttatcccattttgtgtataaagaaagtggaatagtggtgaccttgtcaggattattattgggttagctttagtagctgtgttaattacccatgaggagggaatcatagtatataaataaagtgaaattgatactaaaaaaggagggtttcctttttactccttgaaggaaaaagtgcatgaatcatggttgtatctaaaatgccgaaaaactagaaacaacctaaatattctattgctaaatagtgaacagttatatatggaatattttatcatatttctatcagaataaataatagactgttgatacctgaaaagatgcattaaaaatagtaagttaaaaacccacagatttatacccacactgacaattataaatgtgtatttctattaatacaactttgataaatggacaaagggccaacagaatgagaagtataaagtgacagatgtcttctgaaaagtaatggtagccagttgaataatgaaaacagtaaattttaagaagactagggagtacaatgtaataattttaaaaagaaggcgaatttaaattcacttccaagtgacactctccaagatgaattatctgtcctacgttaaatgttccagaagaccttcaggaacacaactagaaatggaaaa

SEQ ID NO: 111924 - DNA, 1026 bp, Homo sapiens
cagcatttaatgaccacctactgtgtgcacagcactactggtaaaattttgaagacattgttaacattaaaaaatattttaaagttgtctacaaatctgagccttgtaatgatgtatatttaagttatttttgtttttatagattaaagtaagattaaaatatactatccagttttattactaaaaaagactggttttaattttaccaatgtgtgaactataaaagctttttgcctacagattttacattttaaaattatctatggctgttttaaattgtctagcaatttatatggttgtggttaactcatttaagaaacaattatctttctatattaagccattttcaaatagcaagacagtgcttgtctttttttgttattacactaactgcaattcagtaagctgcatgacaaaatatgtattatgtaaataaactgggtttactaaatatttttaactgctgcttgtcattctttgtaatacataacagctttaaaatcatattttagaatcaggaacgaagattcagggaatgtctgtcacatcttatggcatcccacctggacagaatatccgatttgaagattgtgattgacttccgtaaaactgtacaactctccatttggcaggtacctactagataatactttgccctgtattaaatgtcaaggggcaaagcctattcctgtgaattcctgctggttgctttgctgcattaggtccctgtccactgtaaatcatcattcctgggaattctacttctgcccaagtgtgtaaagaatcagctcacctattagagaaggggtagaaataccttctgtgtgcattatcacaataactgtgtttacactaaagaggtgtaaatacagtcctctgaaattttgtaccagaattcccaagtagtgtaatgagataatgatccagaactgaaactacccttaagaaaacatttttggaagggagaggtaaatagcagtagggggtttcttgtgaaaaattaacctccatccttaagagggctga

SEQ ID NO: 111925 - DNA, 1053 bp, Homo sapiens
aattagttactgattggttgcttagtaaccaaaaagctatagactattaaggattttagacaattgatgaagcaatgaagttgtggcaaagtacattgttattgaatactgatattgagtctatagtaactagatttgtttaatgaccagaatataaaatattaatagctagatgaccatgttactgccttagcaatagcttacaaaatgtttatcatttgtaactactttatactgtttatttgtcccattgcctccaccccactgtcactgtctcagtgtttgctctccagggctatttctgtaacctcctgtttcagcccttctagtccacacctctgttggggggcacttaaaatcttcaggagtatcttatcatacccataatattgaagttaaaacccattaatgtataggaaatgtcataatcatattataaagaatatgatgcttttccttaatccctgcccccagccataaatatgtgcacacctttttttatgtccttggtgaatgccagcccaacttttaaaatctgcctcaggtgaacagcccttctctgatacttttcttcccaccagtcccaccctccaaatgcacatgtacctccacagagtcaatatcctcccaccttttccaattatgctgtgcactgaagtacagtaggatttgttactgtactgtttgttcagtgattctgtatcacctccaatgtatgacatacagcaggtacttaatagctgaaaggcattctgccatagaaccttatcaattatcagaacagctgattgaatcagattagctttactctcagtttggcaaccatataaagttagcaagtcatcactgttttttaaattattattattattttttgagacaggatctcactctgtcacctaggctggagtatagtggggcagtcacagctctgtcacccaggctggggtatagtggggcagtcacggctcactgcagcctcgatctcccaagctcaagtaatcctcctgccttagcctcccaagtagctgggaccacaggtgcatgccgcca

SEQ ID NO: 111926 - DNA, 1220 bp, Homo sapiens
agacgcccgggagcccgggccgccgccagcgcacgctcgagcacacccgggcgcgccccagcaccctgcccctcccagctagggctgaggggcggggccgccgcggcgcgctgacgtcagaggaggctgcgacgctgccgggtccgccgcggcgctggcggcagtggccggtgtgagcgcagagccgggccctgggcagcagcggcagcgcggtaggacctcgcgcagcgtccgcgggctccggggcgggggcgccagcggcgaagccccctccccggggaggcgggacctgggggagctcccgagccggggagcggcggcggccgggaacgatgcatcagaagctgctgaagagcgcgcattacatcgagctgggcagctaccagtactggccggtcctggtgccccgtggcatccgcctgtacacctacgagcagatccccgggtccctcaaggacaacccgtacatcaccgacggctaccgggcctacctgccgtccaggctgtgtatcaaaaggtacggtctggctgcctccgcctggagtgcccccttctctcacctacaccctttttgtctggtcccccttctgctttccccgcctttctgcttgcccatcatttcctcgccgccccatccttttcatccctttttgccgcctctcctcccccgttatctccccttacctggccggggtacttggtccacggaataatcatgatagtaacagtgatcataattacagctctcctatgacgctttgctctttacaaagggcttttacatcctttattcggtttgttcggctcattgagatatatattgaaatggggctgagccatatttgcccggtgtatacctttctttttagagcaacactgtgggaattcagtagctttgggccagataagtgcctgtataataggaaacaagttaacatatacacccgagatttattcatttggcaaatacttatggagcccatgcagaaaaaaaagcaaacatggcccttgttttcatgaagctactaaggtgtagcctgggtaacagacattaaatagataattacacaattacataataaccattgtggaaaaaatgctgtgtaggaaaagtactgtggtaaagagagctcataacgggcacccagtctccactagagcaccacagaagcatctctaagaaagaaatttctttatcattttaaacctttaaaaccaca

SEQ ID NO: 111927 - DNA, 1034 bp, Homo sapiens
gatggggtttcaccatgttggccaggctggtctcaagttcctaacctcaggtgatctacccgctttggcctcccaaagtgctgggattacaggcatgagccactgcgcccggccaagatccccaactcttaaataaataaataaaacattagtaaaccatgatagtacattagggcaagcatctggttggtttttcattaccagaactctaacgagagtgttaagtctggcttttattcctgaaagctggtacacaaattaaaagtttgactgtttgttaaataataaatgttataaagaattttgaaaaatcacgtactctcttgtataaggaggtctttaataaacaaatatttctaattgctcctttggcaatcaagacgtttttgcatcctgggacagtgtcgcttagtaagattcccagtgggtgagaggtacatctcttttgtaaagtggcagatagattaatgtgaaagaaaggtgagaaagaggcagccccatagaactgctcttaggcagatcattttagaaaggcatacatatggaacttgagaatgcagaatttgagttccttaaaaattactcatgtctgtgtagcccttgaaaggcaataatctaatatatatttttcaacatttaatacatgttctttaattttattatcttctttataattgttggggatggggtagattaagcttgtatccagtaggtatttaagctgaaacgtcacagcttttgtgtgtctaattagcatcattgcctcaactgcattgagttaataggtagtagtatcacagaggttaaactcattcactctagattatacctagagttataccctaaggtacctgctttggaaatgttgaaatatgtaattgcatataccttgctttataaagatagcaaccctatcaaaactaaatccttggcaggctaataggagcgccatgaaataacctgaaattgtcatttgtcagcagatgatagaaatctgaattcagagttagaaagctggtttaggagtgacaatg

SEQ ID NO: 111928 - DNA, 1060 bp, Homo sapiens
cttctaggcaagtgaatggtgtatgaggtttttaaaagtttcacttctaattctcactcaatttatcgtgttcattggttgatgaattagctcagacactgaaattgttttccatgctgacaacatttgacaggatttgaaaaagactactgagtctttttttttttttttttttttttaattttaaggagcagcagacctatgtatgggttcaggtggtctaatagagattttccatccggggataagaatttctagcctattgtttctcaaagtatagttcatatgcttagtgcatcggaatcacctgggtgctatgttaaaaatgcagtttctttgtctctggctcagacttaaaaaatcagtcccgtatttttaacaaccctccaggtgattgttttgcacactgtcatctgaaaatcactgatcagtacaaggcgttgaattcttcataaagataatatgaagggagcttttttccatgttaatactctccagacaaattaattcatcaaaagaagcaaataattcagaggagatataacaaaattttgtttattataaaacatatgggaaagggtgagatggtatatgggaactctgctcaactttctgtaaaaactgttctaaaaataatttgtaaattaaaaatattttaaaagtacgtgtgaacattcgacacacattcttccatatgtgttttacataaatgtgagatcatgtatgttattttttagggcttttttggtcattactttcttcctcatcctttcttttcaagcaaacaatagctacaacttggcaatggcagtatacagcacaagcctgaaggatgagaacattcacaaatcacaccatgaaatttgtcccaatttgtttccagagcaaaaatctcaaattctgcagtgtcttgttaggaaccagacacctagcatgtctggaaccacgtccttccatccatgtcattagctcctcatatcccatcaccatctgggcatcttgagttagaacttttaagaacacagtacccagccaaaatccagtgaaacagactaagtga

SEQ ID NO: 111929 - DNA, 1314 bp, Homo sapiens
gttatttaaaacaaaggcgaccacaatgaactcctctctccccaccccctaacccctgcgcacgcacacgcacaatgaagcgaaacctcattggctgggatcagtgacgcacttctgaaagccgcagtttggcaccatcttttccatctcctgctccttccgccttcccgccatccgccctccacacgattcagcccggtggtgttagccccctggactcgattcctgaggcaaacagtgccccttaaggtcggcgacagcctcttctgggttcactgcagtccaaccggttccctaccctctgccattatgaacatccgcaacgctcagccagacgacctgatgaatatgcaacactgcaacctcctttgccttcctgagaactaccagatgaaatactatttatatcatggcctttcctggccccagctttcttacatcgctgaggatgaggacgggaagattgtgggctatgttctggccaaaatggaggaggaaccagatgatgtcccgcatggccatatcacctcactggccgtgaagcgttcacaccggcgcctcggcctggcccagaagctgatggaccaggcctccagggccatgatagagaactttaacgccaaatacgtgtctctgcacgtcaggaagagtaaccggccagccttgcacctttattctaacaccctcaactttcagattagtgaggtggaacctaaatactatgcagatggggaagatgcttatgctatgaagcgggatctctcgcagatggcagatgagctgagacgacaaatggacctgaagaagggcgggtatgtggtcctgggctccagggagaaccaggagacccagggcagcacactttctgattctgaagaggcctgtcagcaaaagaacccggctaccgaagaaagtggcagtgacagcaaagaacctaaggagtctgtggagagcaccaacgtccaggacagctcagaaagctcggattccacctcctagagcatgcttaaggtattctgtcttccctgacccagtacccccttctcctaaatccctgcatcctgccttggcctgcccaattccatcctgtcttaccccattctggccctgcgagattttacggtaaaaaccacctggtgaccttagggagaagttagagtgagttgagggagactcattacacgctattggaagttaaataggataccagctcatgctgaaagtagattaatttcaatgaagaaacaagcatttatcctgctttttgggcatgagttgtatttcagggtaaccacgtagttgatgaaaggcatt

SEQ ID NO: 111930 - DNA, 1023 bp, Homo sapiens
tggcacatgtatacatatgtaactaacctgcacaatgtgcacatgtaccctaaaacttaaagtataataaaaaaaaatttgcaatggtaccaaggctattgaaaccaatatgcatcctttaaaattagaataacccctctgttttgtaactttgaagttaatatgcataatgcttcatatactgagtagaatttacttacaatcttagagcaacaagggatttttggaagagacgggtttacaattttcagaagtgcctcacgcatatatgttattagaatcatttgacaacagagatccatggacagcttcctcaggggtgatatgatttgctagaggagccagcacagtttcattcatattcagatattgaactattgaacctcttaaaagctagaaattgaccttcactctatggaggaaagcaaagaatttgaacatttgactaattactgtgtctgtgaaactatgacgtttacctggttagctgtaccagttttatatcaggaaaaagaaacatgtcaaagtcagaaacatcccttctatgatgttttatattaaatttttagccaaaattcttataacattatcctgtcaggtgagcaaatgttacccttttggtgatgcttaagtaaaattacaattagataatgatttatgtattatttgtttaaaatctctctccccttatagactaataatttcatgaaggcaggtactgtgtgtattctacctatcattgtaaaccaggcatgttgcatggtgaatacttattattgaatgcatcttcttcacctatcccaattcttaaaattgagaaaattgatattgctttacttggaaatcaaattcaaaatagagtacctttttgctagttatagtaaaaaattctgtcaattatggagaagtattgtgcttgaggaaatttatgatacaatcactcttgatataattttcattgacttcatttaaaatttgtttctcataatatatatacaatgggaaatgtggcctttgtaatca

SEQ ID NO: 111931 - DNA, 1207 bp, Homo sapiens
cccttcatatacttgatgctccagagaaaccttgcgagtcactgttcccctcctatgcacaagtatatcttttggatttacctcgttttgtactcacatttccctgatactgtgttctaggtgtcaaatgctatctcctctttctcttgccttctattctcactgaacaattcaggtcaaaagccattaggtgggccaagcactgggtgctagggtggtgcagagctacagtaaagtagtcccagcaatgtgccgaaagccaagcagggcgaggagagtgtccccatggtgcagggaaggacagcctggcatggagcattggagactgagaagggtgaagaaagtgtctacgtgggaaggtggcccagcatgaggaatagagaaataagccagtgagcagattacctggtggtgggaaggaggtgacgtttctgaccctaattaagatcaggaggacaacacttctttgagctgagtcgaagtggacgctttgagcgtagccgccccacagccgccgatccctgcgtcgcttcctgtagaaccctgggcctgctttgcagctttcctccctttgtctcacaaccatgtctaccaacgagaatgctaatataccagttgcccgacttaacagattcaagaacaagtgaaaagacagtacagaaatgaggtgtcgcagaatagaagtcaatgtgaagctgaggaaagctaagaggaatgaccagatgctgaagaggagaaatgcaagctcatttcctgatgttgctgcttctccgctggagaaaaaccgcaaaaaccagggcactgtaaattggtctgttgatgacattgtcaaaggcacaaatagcaacaatatggaaagtcagctccaagctactcaagctgccatgaaactactttctagagaaaaacagccccccataggcaacataatctgggctggtttgattccaaaatttgtgtccttcttgggcagaactgattgtagtcccattcagtttgaatctgcttgggcactcgctaacattgcttctgggacatcagaataaaccaaggctgtggtagatggaggtgccatcccagcattcatttctctgttagcatctccccatgctcacatcagtgaacaagctgtatgggctctaggaaacattgcaggtgatggtttagttttccgagacttggttattaagtatggtgcagttgaccc

SEQ ID NO: 111932 - DNA, 1022 bp, Homo sapiens
taccaaatatagtacacaacaaatacatacctcagctacatgatctaaaagttaaacgttccaggagtcccattctgaacttggaaggtacagccttcagagttagtttctggcacagcattttgatcttcctcttcctctaccaagaaattcttctcaattaagcttaacaaagccttatacacagactcattttcatggttttgtagagcctcaattttgtctaagcctccacattcttcaatcattatactaagtttctcagtttcacctagtttctcagcagcctgaaagatgttcgaaatggcatccaggataaccagaataaccttggtatcttttgaagttaagagattcatcaatggttttattaggccacaatgaatgaggtatacagcctgttcaactgttccaccactggtatagttggtcatggccccatacagcttccttttgtgtctttaaaatctgccttagagagaacattgtgaggaacgggactaatccatgattcacaacttgctgtatctcatcctgagggtcagctgtgatgtttgacattgtccatgtaccttccttctgaaagttagttttggagttgatgagcaggttgggaaagacagcaagagctcctgcatcgatcacaacctgagtctcttcatctgtaccagtgacaatattccctatgggtcttagtgcaggagtcacagttggcaattcagaagctcctagaagcttcacaagttggggcaaaactcctattttcaagaacatgtcagttcgtttatttggaccatcagtaaggtaggaaatagcccaacagctatctgctaatacttctggatcatcatgatgcaggagccaaactaaggtagaaagaatttgctcaacagcatctaactggggtgcaggattcttgtagcagcagaggattgaaagtgtccaggtaagatgacataagtaaccacatactaaagatgacatatcgggaactgcaagaagagccaagagtgggtcaactg

SEQ ID NO: 111933 - DNA, 1040 bp, Homo sapiens
tacgccttcaagtttaatgtcaatacagtgcttctgttgacttaccttgggccattgaagaataggcaatcaagtagttgtcagtttagggaagaaaagtttaaggctttgtcaaagcgtttacataaaatatgaaaattccaagcacatattttggttaatagaatcgtcgatgttactgctttttaaaaaaatctaaattcactaccaattttggggtcatgtggagtcattagacagtcccccaagcctagataaatcagaatctatatctactatgcagaaaaatcaagtggaaaatttctgttgctaatttaatcagtgaagactgctaaactgaatatttcaagattcagatttcataacttggcacagcatatctgttactttgtggatgcaagtagagaaacttcagttttaaaatatttttgtctggggattttcagatgcgttgttgaaagcttctgaatacatggaatatctgtgcttttctatattttattcattaacaaaagagagaaaaaggaaaaatgtgtatagttgtatcaaccactatcagtagagccctattatattaagaaatctgcagaggactaagtcaaaaatctagaaatatgtttttttttacggaagtaagcttacatcataatgcataagtggaatagactgtgtgtataagctgagagacaccaagacattcttgccttcttcagcctaggtgtcaatgctgaaattccacaaagagaataattccttctgttaagcattctcctcttcttttgaccctcttaaatgggaacaccttaagaaaaataacacactgtctgtagcactttaatgtgaatttatttacactgagccacccgtccaccccgtgccttctcaagcaggagaaggccacagtagcaggagagtactaagacacctgtccatacttgtgtatgcatggggtgtcctgacaagagaaaagagaggtagtgagaggatcaaagaaggcagtcaaatttagcaaacagtcattgactatataccatctacaa

SEQ ID NO: 111934 - DNA, 1049 bp, Homo sapiens
ttagagtagaggaatttatttaatgtaaataagtattattttccagactttcaaatagttatactagtcttgagcacagatttgtgctttaatgttcaaagtagtgtattatctttgatgaagaaacaatggaggagaattattttgaaaaacattttttaaatgtctttttaatttctttaaaacctgagaaaacttcatgctcattgtttactaaaagcaacttatttgtccaaataattactgatgaagtagaatcaaatttttgaatcttgaaattattttaaatgaacacttgaatcctagccttctttgtttttaacatagtgaatgtcatgaacaataaggatgttaaatactaagttcttttttaaaatcacaataataaagaatggaaagaatctatgtagaaatttaattcttcacaatgatataaataagagcctgtgttttattttgggatttctgtcatcctaggtgttttggaaatatttgctgtgtctcaggggattgtaggaatacgaggagttttcagcaacaaatttttagcgatgtcaaaaaaaggaaaactccatgcaagtgtaagtagaaccactttatatttgttaaaggtgctataaagattttacatttgtaaaacagaataattttccaaattcataggtaagaaaatttgcccaaagaacttaacttttaaaaagtatttttacatttaaccaagataattttgtgcgcttccagaagtaataatttaaatatttaatttacttaaaagatattacagagtctacaaaaagtttaagcataaatgtatttgaaaacagcattctcaaaggggcagccatccacttatttcttagaagtggcccacgtaagaaggaatatggcaataatatatttcatcacattttaaacttacaagtttatagtgactgtatttgtgctaagtagatgaggttcttatttaagtttacaggctactcataataccaaattgggtctcagtaatgtaaaatattttcatattaacaagcagggagggaaaaaac

SEQ ID NO: 111935 - DNA, 1078 bp, Homo sapiens
aggcaactgtgacccttaaattattcaggccagccccaactcctatttatcactgaccttttcttcctcacgtccaaactttgtgtgcttataggtgtcccttatctactaagttttcctttcaccaaggaacctaatttcaaagcaaaatttccaagctcaacctcttaaagaggcatggatttcctatggttataatcttgtgacttttttcatagctctgttgtccatcttgatttttccctaaatatataaatcttggaaaaggtggttatcatgtattcttcagtcttttcataaagtatgcagaaagctcattgctaattagggaaaaacatgttaccttattttaaagatccagagagaagcatgtggtggaattatttttgtttctcagggttttaggggatcatgtttgaaaggaaagctaattgcagactttatgaaacaggcatggaatgtgtgcttgatcagtcctaagcaaggaatagatcatcctcctttcctggtttcagagggtgccagctggcttgcctgggatgagactccagaatggacttcctgcgctgcaggcagagtgaagaggagtcagcagcccctaaagctgaacatatttactgaaaggggaaatggaggcttgagtaatacttatcatcctcatcaaaaaataacttactaagcactccactctgccagtcaagaccatgcatgagctagatcaaggcatttgaaaagaatatttttttgccctctaagagctttcaatatacagtaaaatggaatgtctagctattcaggcacaaaaatgggtttaaactctgccttcgcagtaaatgccagtttcccctcagttttgcactgtggaggtctagttaaaagacctattttattgaggaaatctggatgtgattgccttgtagattcagaaatccattttagcagaaagtgagacatggtaatatatttctttgatgatttgaagagtgacacttgtcattcatcaatattttaacaggaaacaacttcagagcaagtaagattgtatgagcaaagactaggcaatagctttggtttgtat

SEQ ID NO: 111936 - DNA, 1070 bp, Homo sapiens
caatagtccagctatatggagttattaagggcctcagaaagaaagtcatgctataccatgttttgcctggtgtggtccttacttcaagggtatcaaaaccacatgggatgctggttaatgatacatcaagtccagggtctcacctcagacttagaaaaacacagtccctggagatagggcttgaggagctgcatttgagcctgctctctgagtaatttgaaggcaaattatgtaagtgaagaaaagagatcctgtagttgatattctttactgcattatctcaggttgggtgatattaaagccaacttgtgtattttgttggttgctcagtatgaagaactgagatatagaaggaacgaatgtccagtaccaagcaggagatatggccgtgcctgggagatagcatggcaaggctacaactgacccatacacagcttatatagtaaagagtaagaagtagccctctgggtgcttgctatcctgtaccagggcacaagtataaaaaacgaactgagtttagggtacctgtcccaggcagctccattggtggagggaagggatgggaaccaagcaggtctaaaaggagggaggggaattagaagtgatgcatgtgacaaggaaacttagtttagagcaaaatttggtctatagttgtttttattacagtctatgataacctttttgttatttaataatattagtctataacaacattttgattatttatatttggctttttttcccttaactttataaggtttttcaggagaaaggggcaaatcaaagaaaacaagctgaaataaatcattaaaattgattaagtacacacaaattccaaggtttatactggtgtctgttcaaattcactcctatttctatatctcatatcctacatatttagttctgtagttgcacgcaagagtcggtatttgcacagctttaattcatactatacaaggtactcaatcatcatagatggtgatatttactaaggaacaaaaccacaagaagggattttagagagatttttttaaacaatatcattttggaaataatttatttggtttaat

SEQ ID NO: 111937 - DNA, 1035 bp, Homo sapiens
ccttcactgtgagaaggggtgaggagagccacagtttacttctagtgaaaaagttctttttttttttgagatagagttttgctcttgttgcccaggctagagtgcaatggtaggatcccagctcactgcaacctccgccccctgggttcaagcgattctcctgcctcagtctcctgagtagttgagattacaggcgcgcacaaccacacctggctgattttgtatttttagtacagacagggtttcaccatgttggtcaggctggtctcgaactcctgacctcaaaagatccacccgccttggcctcccaaagtgctgtgattacagatgtgagccaccgtacccagcagaaagttcttatttctcttaatagtagtgtgtttcctctccttgtaataatctggatattcaagaaaaaatagttcgatttgtttaaagttcttttttttttgtcaattaggagtatatactaaagtacaaaaaacgctgattttaaacatttcattttaattttgcaattatggtttgttgaatgtaacctgttattattcttgccagatcaaggagaaattaaagagattttaatgtaatttaagtcaacaaaaacatgggcaggaccatgttaatactgttttccactgtaaaagtggcacctagcacagtgcctggcatgtgatatctgtggaataaattagtgaaaaatgaatatgaaactttttaaacaaatatttaaacaattgctttcattgtagtggctgatggtggtaaggcaattagatgaaggagtcttgatttcagcaacttatctgaaatttgattcatctctctacttcatactctttaactatagaaaaagtctgttaatttcaggggttttttttctagaaaaataatggagttctatcattttaaaagtgtatattttattagaagacttataatttaaaaaaaagatttaaaaaataaaaatcagcctggaaaatttattgtccaaaattttctaatggtaaatgtatgtattttagtacctctagc

SEQ ID NO: 111938 - DNA, 1042 bp, Homo sapiens
cttgtttcaaaggaataattttgacctcatttctgtgaacaggaatttatattttaccaggcaatcatttcttagtaatatagttccatttattttcttagtgagttaggaggaaaaacagtatgtaaaaagatttgtaactatacatttcaaagtatttaaacaatagtaacagggtttaaatgtatcaagagttctggttacttttatagtcatcgatattatgtcaccaagtaagtagggaacagaaatgtgttacaaagataaatgaagtagaaatatagaaagaaaaatagtaattttaaagcaactttaaaataagcaaacatgtctttataaaaaggaattgagtaggaggaacagagatcaacaaaattattgtttttttttctacaataccttatgttttattacatgctgaaaagatcgccacaacttaaatttcctctttttttctcctccttaggccaagttcacagatgactgcaagttcagggagcgttttcaagaaaatagctataatacctatgcctcagcaatacatagaactgaaaaaacagggcgggagtggtatgtggccctgaataaaagaggaaaagccaaacgagggtgcagcccccgggttaaaccccagcatatctctacccattttctgccaagattcaagcagtcggagcagccagaactttctttcacggttactgttcctgaaaagaaaaagccacctagccctatcaagccaaagattcccctttctgcacctcggaaaaataccaactcagtgaaatacagactcaagtttcgctttggataatattcctcttggccttgtgagaaaccattctttcccctcaggagtttctataggtgtcttcagagttctgaagaaaaattactggacacagcttcagctatacttacactgtattgaagtcacgtcatttgtttcaatgtgactgaaacaaaatgttttttgataggaaggaaactggaattctttgtactaatacagggagcacactccttcagttcagcaagacat

SEQ ID NO: 111939 - DNA, 1063 bp, Homo sapiens
tttgctttatgcttgagggatatttagaactttgtattttcggaaagttaaataacagggactacgtatttttctgacttttacagattaacctgaaagaacatacatgatacatttttatttttggtttccaaagaatattttgatgcagataaaatattttgttaacttttgtttttttttgtttgttttcttaaaagtacctctgcattgagcatattttcttacttttattattttaattaatatgacataagcaatcattttatgctgtttatgaattataaatgtgtttatagctcatttgtaatatggaaatcttttacatttttcctattcactgcacttttttattgtttttatttctagccatacctcagataatatgtttagttttacattttaaaatgtttaaattctctttcacagcaccaaaggctcagcttggatttgtgtgtatgtgtatgtcaattcatgacattatgtggaatcctaaacctttggtggctgggatatgatgggttagaagcaaggagaaaatataaggactttttgatggaattaaatgtgggaggtaaggaaaaggatttagaggtaaaagtacactaagtttgcaacatttattgagatctaagtctgtcttgccttcatttctctttttatctcccccttgccctcattcttgaacagctggaggaatacattttattctgtccatgaagcatacactatgaaattcaagtgcttaaaaatacttctatgactctctgctatcccactgtatagatccacagggagcaaacacttagaaatgatagagaactgaaggagatcaatggtttaacagttatccatgccaagtcccattgtcagaaatattcttattactcagtcaaacactctttgagcttcccttcctaaaggtaaccaatccagtgaatagatgtgcccttttataaggaaacttctgatgtttattaaaaaaactggccttttgatagaggtaacttaatttgggaatttgttgtgttgaaatggcatttaatttcaacctaaatactga

SEQ ID NO: 111940 - DNA, 1113 bp, Homo sapiens
agaagaccaccctgcaagtttctgcctctgtggtcacagcttcatgccgtgggcgtaaaggtgggtgtgcagccagaggcaggatgtgcaggcaagatccaatgtggttaaaatttgggatcactagtctggctttagggaatctggagaccatttcatgttaacactcattctaagagagaaagcatgtccatcagaggattatcattaagcatcagtgtgattcactcaagggttaatagaaagaaacattcataagaggtgaggtttcaggttaagagagaaataggagcctcttgttcttctcaccagagtgtagaatgtcttcttccctttaggaagaagaccctcaaagtttccagaagtttccaaagtttcctaaagagacccaagtgggaaaggatccatgtctccttagctctttaaaacatgtcatgaatcaggcatccaaacaataatgcactcagtgactgagtgaacatctagtgaaccgaatgattcagagattggtcgagatttattaattgcctaaaaaagagactcaaaggccagggaaagtagagccagttttgctttgcttaagaaaataagaggaaaaataaaaatgatgtcgcacgttgcttttggggcctaatatcactttccctccaccctcgcagagggtaggtctaactcttgttagttatcatttggatggtttgcttagttattccctgtctgttttccatagacattgtttgagtacttactatatgccaaatatgccacaagtgatgggtgtagagataaataagacctggtttcttccctcaagaagcttgtagtctagatgagaagacgaaaaattaaaaaaatatgctctatatatcccacgagggcagagctggactactgtaataagtactgccaccttacttttgaacagcgctttttagttttaatgtagcacttaaagcattcagaatatatttagctgccttatctaattagatatagaagtaaaccacctaaaaggaaatgaatggcttctaagaagttagcatttaaacctaagataccttgatgcttggtccaaattcccttttcagtgctcataactcagctgctgaatat

SEQ ID NO: 111941 - DNA, 1097 bp, Homo sapiens
agcttgatgtcatctttaggctaattaacacaaactatttacaacagacttttataaagattgcttatatgttactacaagttcatagaccttcccatcacagaagtaaccacctccccaacatattcatacagagaaaggagatatctgcattgtaactggtctaggtaaggtagatctagtaactgtggttgtaaactttaaccagagccagcctaagatctgggaatctttaatgaatttcattattgtaaaggtttaccagtagatacctgtgggtttagaagtactgtgatttggagcaataacttccaatatttaagatctgattgcctcaactaggttgtttttaaaaattgcagtgttaccagctgctctccatggtgagggaagagagattattcattccccaaattgtctttcatttcaggtctgatagactgttactaaattcttaaaaataaggctccttttcttgctgcctcctaagttgctcttaactcagacactaattttctgtataagactttccatgcaatgtgaactaaatagaagacctatgaaaggataagacatttctggataatttgttctatctttgcattcatattcaatgccaggtactgtactgagtgctttcatcttctctcttcaattctcatgacaatggcatgtgtatgagtaatttcctctcttttaggttgaagagacggaggttgaataattgtataaattcccatggttcacaaggcaaagctcagaatcaattattctcttctgtcttttagttcagtgttagaagaacggttattaatcactaagttttagtttatacagtatgttcatctttgatatgtacattcatagtatattacatggttcaaaacctaaatttttcctcctctattgagacagatatgagggtgctccaggtttagaaaagaagagcaaatggtcagatgtaagtttggttcactgagccaaaacaagaaaagtgtatgaatttatgtgctggtataaatgaatgttgcaccaagcactgaggaattacttgaccaaatgagaggttggttacggaattcagacattgagttgac

SEQ ID NO: 111942 - DNA, 1023 bp, Homo sapiens
gactggcatgagatggtatctcattgtggttttgatttgcctttctctaatgatcagtgacgttgagctttttcttatatgtttgttggccgcatgtatgtcttcttttgaaaagtgtctgttcatgaagcaaaggaccttttggtatgtaatgcaacatattcacagttcttaagattagagaatggatatccttaatcccattaatgtgagaaaggggcattctgcttatcacaggtaatttatataaaatctcaggaatttaccgaacatagttattcactatcaacttctattcttggaaaattgaaatgaggctagttttctgtgtacaatgtaatgtttgaaatgtgtcttatgtaaaacatcagggagagtcttttctttttgtgagaatcagtcaatgtctatcagtcagaagcagaagtggaaatatttttgtgagattttacaaggaattcctgtaaattcacatgcaattttatgagtgatataagctatttcatatcaagacgagttattcatgtttaaagtctaagttctattgacatcacatgtccattttgtgtttgaggatcaaagtaggtatttcctctatgcaatagtctctttaactggtcagagctggaagtcatcaggctacttatgagccagttttgggagactaatccccattcagagctgctagaatttgaaggccctttcatctgcagatcttctctggttgcctttgtaatgggatgggtaccatatgttgccttttgccccatgtggtagtccattcccttccaggttcatttagtgttgttgacagcagggccagcagatggtgtcctagagccaaatatgtcctgtgcctatatttgttggaggatcactttgaaaatatgcatgaacatctgactgccagccagctggcaacttggaaacacttggttccactatcagatcatcttacattaacttctttaatatgcaggtgagcaactccaagtaggtcacaattctttggtctagcaatca

SEQ ID NO: 111943 - DNA, 1085 bp, Homo sapiens
atactttttgctgtctgatatccattcttcccttctcccttaatgaaaggactcttgttttgtagcaggacctgttgctatggagtaaggactacatttcccaagctcctttggaggtgatttgtgcagcttccagacatatcttcaaaaagaggaaatgttacatctttgctgccctttcctcatcctgctgctttaaaaagtgtattttaaatacttttaacagtggtgtttaaaagtgctgatgagtcatattccaccatgtagataagagcaataccttagagatgacaaagttatgtgatatataaaaagcctgcatcgcctgtaagagccctggactaccattttcagaatataatgaacaagcactaaacctctgttttctttatgaactgtgattgagtctctgccaaacctacatcctaagacagaatttgatgccacaatttgggtgcataaagaggtataacctagatatgtgatgtattatatttagcatttggtaggcgggaggaggagacacagatattggagtcagaaaagctgattgatccttaaggatgctgaggcaaagcactggtataattgtcggttgttatatcttagaaggcactccacaagctgagaccaaacattagggaaaatcacaggaaagcagcagaatctcaaagtgttgactgcttttgctcttttagtgaaatctttttaaagagatgaaggtagtctagagttagctagtatgcaagtggaggtggaaaggaatacagttctgttaagaaaggttttttgctgggttagcaacataatttcacagagagtactataatttgaggactttaagggttgaaaaaggcaacttttcctgtacttcaaaccaaaggaattataattggtggcttcaaagccactgccttagtaggagataagctcaatgccctgccagatttgggagccagaccagaggcaaaataaaattaagggtattgctttcccacccaaacaaaatggctcagatagcctgaatgtatcttccatccagagagggggtgagcaagcacacagggtaataaggaaaggcaagc

SEQ ID NO: 111944 - DNA, 1008 bp, Homo sapiens
ggtgtctttcaatccattacatcattctgttacgaccaacaggccttcaggtattcatttcattccctatttgttcatcttgatatccacccaacccataaattataggacatgagaattcaaattagtttttttctggctactgccatttctgagcaagagaagagtattgcttttagaatttcttcagagaatttattgctctcttaggtttgcaaaggccatgggtatcctgtatagaactagctaagttaggttaacatactgctatttgggtaaagacttacaaaatagtctgatggttggtatattttagatgatagaaattcaatgccttttggagctaaagccactattgttaatagagttaacattaaaagggatgtcaaaccaagctgaatgagaacaatgtggtacagtaagttggaaaaataatacaattaaattattatattttacttgattactttgttaagcagtagaaattgtgggggtagattatgggatttgtttgaaggatatgatacatttccccaaatgaaaacatccgtccgcattgatgttttccattagtcatcttcagagatgtgaatttaacttaaaacaattcacactactctgatgatgattacttttaaaatgatgtttgcattagttaagtcagagacatcatgagaaatgggagtaaaaacagatggccatgatgatgcatttgtactttgaatgtttaaagcagcccctggtgtttgcacagggattgagagcagagtagaaactaaaattgtcacaggttattaacgtgcctgacttggagagtcaaccaaaaccttgagtaagtctcatagaaactgcaacattatcacgtttcatatgattgacataatgtgcactctcctattattctgcagggctgtcaagtaagcagtgagaactcaatcccttttttttatatttaaggaaagtttttagaatcataaaacatattggaaaagatcatgcttttgttta

SEQ ID NO: 111945 - DNA, 1050 bp, Homo sapiens
agttgagaattaatatgctggaatgaatgtacagtttaacaagttgctgttgtttgaaggttttctgtggacctaagaaatgaaagtgtctttgaaagaatgctgcataccactttgacatctgcaatccagtatgaaatatttattaagttatcaagctaaggaaattatggacatattttctggtgtgttttctgaggtggtgaagttctccaaaatacttggaaaaatatttgaggaggaggaacgttcagttccaaaatactttctcctttggggagagtggatttgacagtgcgtgcaatacatagcactcttatatctgacccctgatgagggttcccatcatacctattagtctttgtgagactctcttgaatgaaacagaattgaccaaatgaaagatcttattttatataattatctttttggagtccaaagagggaaagagggattggagaaggagggagagaggaaggaagggaaggaggaaagcagagagggacagatacatgtttgacaccaatttcattatgaaccatagcatcttagaaatgaaaggagcagggtttatcttgttcagcctctgtctcattacgggaatcctcctttgagcttttctgacagatggctatgcagtctttgcttaaatagtttaaatattttcattgataggcagctcattcctttgtaggttgttatttgcatttcagcaagttctaataattagactgcaacgggcaaaacctgccttcttttagttattggtcttttggagcaatatagaataatactgctgccccactgtgattttttaagatagctttcacattttcttttaaatatttagggctttttaaggttaaaatttaaaatttctttaatcactctttatttaagctcttggcattctgattttttttttctggatactccctatacagtgtctctttagaaacttctttttaaaattgaggcttagcaaacatataaaagcatgcagctgttaaatgtgcaggtccataaattactgcaaaatgaacaaaccat

SEQ ID NO: 111946 - DNA, 1034 bp, Homo sapiens
catctttatgaacatctagtatcattaaattgaagtcgtattaactttttggttggcagagtaccatttagtgaatgccaaccaaactagaatttgctaacatgtaaaatgtggaataccctttgtctaacctgaaataaacaaaatatgaatagtaaaatgaaattaatattatgtatttcactgagatcattataaatcatctcttattatgctgtctcccagagaaatataatgtaatatgattacttatcaaataattgcagttttcttaaaacaggcactcattctagctttgtaaagtaatcaagctttataagtaatatggttttattaagttatataattcttaaaattataaggtagaaatgaatttagtgcagtttacagaaaattttcatttatgacatttcagatataattccagcttatctggaatttaatacaggtacaactaaacagaagatagcagaaattgcaattgtcatatgcaacttttcccatagaaagtgtctcatgagagagagataccccacagaatactgaatctgtaacaaaaccttcctatcacaaattagatttaaaatctacttttgccttctctcttccttcttgctatagctgtcttataactaacagactctcccacattacttcctttactcctaaccaaaataaacaataaagagaatagacttaaattttaatttttgttcaaatatagcattttattaaaatttaagataacttctccaaaacaaaatgggtcacagttttaatatatgttagtgactgctatgttctctttattctctgtgttttatccttggaattaaaattaataagagaaacataaagataaagtgaatggatttattttattattttacatgatcacttaccttttcacagcagtccttagattcctcccaggtgttacaccaggaatttggtagaaagcagatttttatgacccatgtaagtactgaaagtggtagctggcatttatttttcagttagtattctaaaaatca

SEQ ID NO: 111947 - DNA, 1045 bp, Homo sapiens
ataatgtacagtaaaaggagaagtgatagacatgcaatttttttcctgtgaaatgccctgactttggaaagaaatggttgtcaatgcctgtgcatttccttgacagattatgccagactgcacaatggcagcatttgtctttggtctgtggacctaagacagttgctatcggtggaacctttttctgtacaggtaataacaaggtggtcagtcatgcaacccaaagatcgagtttaaagttaaaattaaagaggaattcccagcactatagcatttcattttatgtaaggctctccaccagccaaactcgtttacttgtcatagctacccaaatgagaatacaaggttgacatgaaagatgcaaacatgtaaggtagtctcattccatagaaaaggacctaacagaaacactagaacaaacctattagatgacttaaaagaataataaaaagagtaattaacaaaagcatataacctctatcatgtccttcaaaaactaacatgtgcaaacagtagttcaacttgaggtcacgttgccttgcttccaactcttcactagagaagcctcatttaaagtcagtacaatctctgtatttcttttgtcacacaaagttgactatcctaaaatatttaatttaaaatatcctggttgatttctagcaataaagaaaatattttttattaactttctacatgtaattagcattttatgtgagagaaaatttggtggctacaggaaatcttcaagtgttcagagttcaaggagatccagctcatcaaatccttttttattgacagatgagaaactgagactcagaaagcctcattgccagagtcacacagagagtaggaacatggctggtagaccagaaacaagtaacttcaacttcctgctgcaggcccttttcacagtgccatcctgatccccctacttggagaacttttattcagttttagtaatggggtgtggaagggagctaatttatgccaacgggctccaatttgagaacattttcttcaacatttgaagattatgatgcacttt

SEQ ID NO: 111948 - DNA, 1055 bp, Homo sapiens
tattaaggcccaggcaaggaaaacctaattgtgaaatctctcccatagtccaccagtctactatacactctcagccatgaagtgaaattcaagaacaaggttattaattgaaggatgtaaaagagaagcctgccccttttggatctaggaggttattgaaatgggttgcagactgcagaaaggaatggagagctcagtgtcaaggatcatgttttcaagtctcctctcttctcctgggccaaccctaaggaggttgtatggtagccttggaagtatctaggggcttagtggaggcaaggcaagggaagaaggcttttagtcttcttttgaagaacattgttctcaggttgtgtctgtaccaattcaactctaaaattttataagaagtgtaatatttgtcaactcagcatgatagtgttttaatctgatccccccactaatccttgtaactgttattgttttgaaaaatagcccctctctctattgaatatgtactatatgtatcccctcctgtgacagaggaaatctcattgtgaattctgcatatgcatatgtctgttaatgttccatccattaggagattgatgatgtggaagtttaacgaaggatgaaagacaagctgtacccaggtgtgcagaaaggaatgagtcaggtacacaagagaaatcactagaagttagtgccagaggcaaaaaaaaaaactgagaaatcaatgaagaaaagaagttggaaagcctgtagaactgcaaagtttgggactaaaatgctgggaacttgggcatgagaggacatttctacttaggcatcagaaccagaattagctacccacttctttagttgcccaggaacctagagatgaagcagcagaaagacagaaatatttctaaagtgttaaaagaaaaaaaggagaagcataaaaacagaatcaaatttgaaaagaatgtaatgtggcataggcttagccaaaagtaatttaacagatggcaaaatgtataagatgcataatgtgatcctgagcagtgactatcaaatattctgtaaagtcttctaagccc

SEQ ID NO: 111949 - DNA, 1049 bp, Homo sapiens
atgcataccacattttttttttttgtaacaaccttactcttacttccatcacatagataagggaacaagtacttaaaaggttaagtctctttccccaaagtcacatttttactgcttaggtaggctagatcttacaccctttattataagaccaaagactgcatttaatgcctattcctcttagatttcacttttcaagtttcattctatcattctcacccattaggcctccttccagtcttgtttctgtcatcccacatattaaaacttcttcctagctcttgagacctgccattcgataatacctccagtgacatcatcctgattatagataaaatgatgaacagattggtaccaagcacggaaccctgaggtctttttccatgaagcttccaatttgctatatcaattcatcattcaacattctgtaagggtcattgattaattgatcatgtattacctctcattaatcccatttttcttcacctggtccacagattttgttaagttctttctgcttttcttctataacacctctatctccaagataagaatgaatttactattccatggactgatgtggtgatggtggtgggaaggggaaagttatgcagaatacaatgtaaatgtgaattctttataaataattattgatttgcaaagctctaaaacatctcagaaggcatccccatacgttctcctctgtacaggtgggttaattaatttattcagttcttaaatctctaaaggttcttatgcttcttgttaacaaaatctagtgccagatatgtgaattttcataatgtcaaaagttctgcataagttccttttggttatttaatctaatattttcttattctgtcatttccaagggatgtttaacaggggagtctgatatttattttataacataaaacttacaagtatacctggaaaatatctatcttctttcactaacctattatggatccattgatgacaaatttaataaaatatctcttgcacatatttattttttagtttaactctttaagttggtgtgttccata

SEQ ID NO: 111950 - DNA, 1096 bp, Homo sapiens
ataggatgtttagcctattctatcaagaaattgtagaatgagatggcaaataggtatgacaatagccagataaaaggagattacttaaaaataatttttaaaaatttaaataaaatgggatagatttaatatctacagactgaatttatacaaagccagaagaggggtaggagaggcataaacaaaaatcacaatgaaaactaataaatactaatgatttactaatagaaaaacatgtttattttgtgccagccactgttctaagcacttacatgcattatctttatagatcctcagaaccaagcaagattggtactagaagagaaagcatgaggtgtaagaggctaagctggagcgggtggccttgaaccaagtactgtctggtacccaagttcatatttttaagcactgtgctattttgccttccatactttgaataaaaaggttaatggataaggatcataaaaacattagtgggggttagaattgagaacacaaatggaaaaatcaagagcataaaatagttgaggatatggtttaagaatcattggattgggttagaaaggaagatattgagtaagaggatatagaaaacagatttctcatagctcttcccttgtggaaataaaaatgacattattggtattaaaaatatctgaattcaaacattcagttatcaaacaccaatcatcaaacaagtttaattacttactttttcaaaaatagctaaatgtgttggttttgttgagaaagtgctaagactcttttggcaaggagtgatatttaaaagtaataatcctttgaaagtgatatttaaaagtaataatcctttttttcttattcagagcctactcagatgtaagtccatttatctacactggttttaggcatgaaatccagtgagatttactggtgtctctattatttttcccacaaaagtttgagtgtggttaatggtgtaattgttagcagaaactttcttcttacagcagtgttggtgggctttaaaatctcttgcacttatcttttttccttcttgcttttagcactgcagtattttcttgatggaaaaaaatccctattgattcataccagg

SEQ ID NO: 111951 - DNA, 1035 bp, Homo sapiens
tatcaaatactagatagtacagaatgtttaaatgttaatagtaatgaacttacacaaggtaaataaatcaattatttgaaagtaacatgagatgaaatgaggtcaaatgcacaaaaagagagactggcctcggacagaagcatggatatcccagccattataacaggatgaaaggaagaacacagatctaggtgcagatggatcagcacatctgatgggcggaagacacagtggctctgttctgattgtttgtatttccagagagaaaataattgaatgtgagaaagggtgttcgtgaaagtttgatgagagagaagatatgtaaaaaaaattgggagcgtgggcgtttatggtcattaatttttactgagaccagtcatcatagtttctttttctagccaaactcagctgttgctatgaaaaaaaaaaaaaaaaaaaaaaaaaaacagaaaaggaaaattgggttgaaacggtatcagaattttctaaactagatagaaggatgtgtgcaagaaatttgaagtgctaaacaactgaacaattctgatgctacactgtggaatctaaatttaataaagagaaaaaatgagcaaataaagaagacaagcatactaaaatacgatggtttaatggattagtgactccaaagagccgaaaggattattggattgaatatgttagctagaaagacaagtgatggaggtcagaaaacagtggataaagacaagattttggaattgtgcagtcaaagaaagaatagatatttgttttagaaatttagaaaatataaacaaaatcaacttatggaaagcatatatattatatgcatacacatttgtgtacatgggtgtgtttctgaagttagtatttttcattgatctatattcatcactgtaccaatgatatatgatgtaattattgtagctattttgtctaatagtgcaagttctactgtttatttctcctttataaatcatcttattcttttttatcttattttctttttatttatttatttatttttattattatact

SEQ ID NO: 111952 - DNA, 1046 bp, Homo sapiens
ttcaggttttggcttgttaaatcagtgcttggataactactgccatctttaagatgttttcattttgctcatgattcacagataaaaaaattacttttaagaatatgtagatagtgcaaaatacatttgagacttttattattgaaatcctttgactacacagatatgttcacttttagaaatgaaaacacctcattcctttatagatcttttcactgaagaaataggggcacatcaacatggtatgaacataaagggagaagggctgttgctgaatagaaatgctattcatgtttcttaacagtagcagtacagcttcaaaacaaaaacaaaaaatcaacctgccaattttactgtatgtgttaatgaacttactcgacataaagccatgtattcaatactgtaaattcatattgagctctgccttaaggatgtttttagtaagaaagggagggaggaaacataggaaggaaagaaagataaagacacatgtagattttatagaatcaaaatgcttgtactattctaatgttctgtgctatcctttggattgccttcagctgtaaagctcattatttgtcttagattctaatttattttcttccagcgctccatgctgttatcacaatttcttttctcatcatgaaatgacacagaaacacactattcatattgaggaaacaagtgctctgtcaattaaagccattcttccaatatacattcttcctttctctcattatggaaggttcttcatgttatgctttggcatagctgggaaatagaagtgatatatctgttaacaggctccagcttagcttttacttctttacctgaggctcatttaaatgtagctgtcaaattgtcattagatgcacatgcaaattgctgctaaaggattttctcacctcagcatagcaataaagaattttgaatttccttccctgtagggattaatttgtctattccttcttaataggcaacattgtctttgctatatgtaatatagactctgagtgcagagtatagagttgattaataagatatac

SEQ ID NO: 111953 - DNA, 1075 bp, Homo sapiens
ctcataaaagagaaatagtttcatgtattacatttctcataggttataatgaattttaaacaaaacacttgccatccactgcttcaggaaaataacattgtaaaaataataatattaataatagctaacacacagcatttactatgcactagccattgttctaaattccttacctagattaacttatttcattcttgccactgtaaaataataataataattattattatcctcatcgttgatgaggaacttcagacagatagcgtaagtttctcaaggcaacccagctaatagtaagtggcagaggtgatttcagtctacacttttaactggtgtattataatgagaatcataaaatatcttacctgtatactttgtgtgctttatgattgttttattttactaatttatagtatctacacggatttcgattatttgtgtgtgtgttttttaaaattctgcttgatagagggtcgactagaggtgttccaaggggagaaattgctgtcctccatccctatgtggaccacatttggggagcttgccattttatacaattgtacaaggactgcctctgtgaaaggtaataaaagaggaaatgctccatctttgaattgttgtggcatgttaaagataatctagtccagtcacatttgcaccctgatccacagtctgtttcccattttaccctatatgttcttataatagaaatgctatgcctattaagggatttatactgaagcacttacctatataatttaagctaaaaagaacttttctggatacctgtgtataaaatgtaaaatggcttttaactattcacaacggtaaagacatggaatcaatccaaatgaccatcagtgatagactgggtaaagaaaatgtggtatgtatacattatggaatgctacacagccataaaaaggaacaagattatgtcctttgcagggacatagatggagctggaagccattatcctcagcaaactaacacaggaacagaaaagcaaacactgcatgttcttacttataagtgggcgttggacaatgagaacacatggacacagggaggggaa

SEQ ID NO: 111954 - DNA, 1029 bp, Homo sapiens
gaggggagactcctagctctccttcagtcaacaatattagggagatatgaagcacccatagaagccagagaataaaatttgatggcatgatagattctgaatttgaatattcagttcctataattcatgacacagtattctatgattttgctaaggtacctgtgcttagatatatcataagtggtgagtgagcctcttcaattgctaggcaccaccagctcatgccagctttattgtcctgtacccatcaaatatacttttatggtctgaaggtgtaacttaatttgtctaattgtacctccctactttatatggaggagctcataatgaaactctactggcattagggaattctggaaatttgtttctttctaatttcaaggatctgcattttaatttcaggttctagattcagtgctgtccagtagaactttcttcagtgatggaagtattctataatccatgctttacgatatggtagccaatagccaaatatggctattgagcacttgaaatgcagctagtgccactaagaaactggatttttaacttattttcttacaaagaagcttgaatctgatggatttttatttttaattaatttaaacattgaatagtcacatgtctattgcctactctactgaatactgcagttctaatggttttgactgtaactgctattgcctaagatgggaattatgacttagtttgggaaccctttgtagacaaagtgagacctatgttcagttttaggacaacgccacagaaaatgagtctatgcctgtgagattgaggtgggcacaatgtggagtcactcgtcagctgcacccaacctgcagtatatcatagctctttgtagggacctggctttgtgcctactgaccattttagatcatcaaaaccatgcagcatgcagtgggcatgtagcctgtttctataacaggcactcagctttattgaagtattataaatttcatgatgaatcagggtactacaatgtgtcaaatactctgatctctgacttaaatt

SEQ ID NO: 111955 - DNA, 1049 bp, Homo sapiens
tatgggtcaggccaggaggagcccagttatttccacttaactttactgattacaatttggtcatacaaccacaccttagtaagagggaagtgtagtttagacatcatggctaggaggaaaaggagaacccagatattggtatatcctagcagactttaagctagtcagctacatatgcccttagaacattagttgccaggtcatatcgtgcagagcaaatatctgtcaaatgactgacatttgtgagcttgtgagcccactcattggtattatcttcaacatcttcatccagggttgacttaagaccatctgaagttgaagcagtaggcagtacagacgtaggagggtgtttcctgccttcttgatcatgtctctgatagatattttatttctggcatagagtaatgactggctgaaaacattgagtaacttataatcagcagttggtgacagattaatttatttacgattttcctcttacttttctatttcttggaagatttctgagttaatgacagattcacctggccagttaagaaaattcaccctaacaatctgcatgtgtgaccatcaagattgtaagacataaagatagtctgtattactttacttctgactgaagttgaactattagggtatctggggtactaaacactagattatcagacatctactgcagattaaaatgaacttatgacatgtcttctttgcccattaggctttcatggctattagctcctggaggcctgggacttgttttatgcattttgctcctctggcacttaccttgttgtctctgacatggtagatcctcaacatatgttccctgcagtggttctcagagtgtggcctcaggacagccacagtagctagcactacctgtaaacttgttaaacatgtactcttgggcacatcacagacctactgaattaaaaactctgagggtaaagcccagcaacctgtgttttaacaaaccctctagggttctgaaatgtgtggaagtccaagaacccctccttaaaactgaaatggacagatgttaactctgc

SEQ ID NO: 111956 - DNA, 1048 bp, Homo sapiens
tgaataaatgaatgcatgaatgaacaaatgaacaatcacagagatttccttatagtcattacccagtaggaactatgtgtcaagactctaccaatggtttataacttttgtgtttacacaagtggataatgtgtcccctcacactggcaaacacaccagctactcagtcccaagagaaactcagctcttatttatgacagagccctgcctgagagcagaggtgatgtccaaaagtcccaatggtattccacatatgctgctgtctctgcccagcctgcctcccttttcctgccaagtcctatatcttttccaagccggagatggccagactgattttgaatgctctaagtataatgagaaacttgggagattctcacttctgaatttggagatcctcattcatagctgtttttatctgctcttacaagaggcttgtgaatgaattggggtggataattgggatgtagcccctcttaaggctgtcaccccaatgacagcatcactccctcacaaagctaaccatatttagaaacagcttatttatattgccatatctaaaaccctttttgggggctcatttccagatcttgtcttagtaaccttagaagcaaaggagtagtctcaccaagtctacaaacatttagggtgacttatattttggctcagcctgataatcccccaactcctcttaaaggaaagatgaccaagatgccagcagaccaggtgtccccagtaccttgatttccccttgatttatgcaataatgccatgggagcacactgtggaaaataacccctccaaaaatattcatgttctattgatcacttaaaatatgttttcttaggctaaagtggtattttgtttctaattttatagtgtttatattcacaaagcttgctagaatttccagtatggccctttagttaagttcctgtagcaccatattactaataaccaacatggaagcagaatagaaaatgacagggaattttctaataatattcaggagaattttcttttatctttatatcattagccattttgagat

SEQ ID NO: 111957 - DNA, 1043 bp, Homo sapiens
agtgagctttttcctagttactgttattactcatctctcaataggtcctataaagatcagttaagcagatggaatctaaatgaatgagtttagaggtttgtggggaaagttgatcaataggtttaaaaataattccttgtttcctggctctgggtcattttctccttcttttatacgtagctcaacagagcaaaatctctactggtttttgacaggaagaggctgtgtgattttttcagtgtattggtggtttccaagcttggttatgtaagaaaaattatctcaagatgtttgataaaattctcaaagctgaatttgaatgttgaaggtaaacatgtcacatctagcttttgaggaggtggaatggagtctccttcagaaatattaccagaaagggagaccattctgcttgctgtctgcctgccatacttcttaagggtgtgaaggaagcaacttctgttttaaagattcactggaaaaacagctacaattttattataaagtacatataaaatataaatttaatgctactaggaaatatagtatttttcctcttaactgtaattataccctgtattgtacacagaatatcctgtctgacgtgggaatgattaattttatctgtcaattttgctgggcccccatgcccatatatttggtcaaacactactctggatgtttctgtgagggtgcttttgaataagatcaacatttaaattaatggggctttgagtaaagcagatggccttccataatgtgggtgggccttatccaagcagtgaagactggagtagaacaaaagactgacttctcccaaacaggagggaattctagagcagatggcctttgggcttgaactgcaatattagctcctccctgggactccagcaggatggcctcccttgcagattctggacttaccagcctcaataatagattaaccaattaatgaaataaatccctctctctctttctctctctctctctctctatacacacacacacacacacacacacacacacacacacacacacacactcct

SEQ ID NO: 111958 - DNA, 1030 bp, Homo sapiens
attaattaatacatattgatggcctctcatggattatttggaagataaaagacaaatgactccctgtcataaatgcgctcatggtttactttaggggagatgaggctacttggatcaatgaatcacaatagggtaaactctataataaatgtataaataaaatgctttgatagcagagaaaaggttgtgaataaccctccctgggagagccactaacttgttctacctgtttcatttaaactcttactgggacaccatctaaatgcattcctggtttactgaataggttttggctgcttggtggactatttatattctgagtcaggggcttgagggaggtcttcttaaagacttgcctgccccatggaaatgagtggaataagtcaccaagttgctaatgctttaaatattgtcacaaaaggtcttgagctctgtcctgctctgtttggggttgagcctaaatttaatgctcttttaaaaccacagaccatgcagactgcctacatatgttgaaaaaaaaaatagtgctgctggtgtagaactgcaagataagcagagaacccagtaaatgactcagtgggagttttcctcaagggaaggataaagaaacgagtgcactgtttttttggcaaaggaaactggtgcttaacatgattattgtaactctgggcacttagcttttcccactggggagatcaaaagtgataaaggcagagctgctcttccaaagctgaaccttcatgagctcaagtgtccaactgagatgtcaaaatggccaatatctctagcacagagagcccttcaattaattagccctttgggctggcagcttgccacaaaagcacctgaacagagttgcctgtggaaagaactgcagagggcccttgccagcgacctgctgcttccccaaatcctgccacaagcatccacctgtctccatgggaaagacaggtgccatgtccttttgatgaggaatctgtttccacttggtgttctttgcaaagatgttcctggcaaagtattttcttcc

SEQ ID NO: 111959 - DNA, 1048 bp, Homo sapiens
aaaacaagtttcaagaatatgacctttgtagtctctggttcagggatatattggaaacagtaataattagcagtacaacccccccttccccacacatacaccttaaaaaagctattttaagctaccaataaaacacaggtttttctcatagcaattccagacagccaaatagtttaaagggggaacagaaataagagtcttgctaatcttgcaaactgtgcatgcaaagggcatttaataatagtactttttcttgcatttttttttgttgttgttgtgagcaaatgctgcaaactaccaagttcagctgtgtaatcactaacttgatttcactcatttctttgttaagtactaaagatattatggtgtgcttttggctgtaaattgtctttcccttgtgattctagagtttttctgcttggttgctatattattgagcttcaagggcactgtagcaactttttctccttccttttacctattttcctttcagattttccagaatcttacataatcaagactgggcagtagttattaaagtatgtgcacgtatacacatgcatgcatttaattttacataatgtattctggagggtgagctttcatagagatacagtcattcctcagtattggttgcaggacctctgtagatatcaaaattcactgaggttcaagttccacagtccaccctgaggaaaccatggctatgaaaattgatctttagaatccaggggttctacatccctcaaatactgtgttttcaatctactgttgatggaatctgtggatgcagaacccttattttcttagtctacagcaaaatgtgctagatgtgaaaagaagcagaaaaaaacgtaaaagatgagtcagtatgagaaatggagcagagttcgtgtaaattagatctctgtaatggccggcaactctttttcataaaagtggagtaatcagaatacttaatttacctcagttaagagtgatcactctggctattgttgctcaaaatggcaccaaatcactctacaattgagctaattgcaacctctga

SEQ ID NO: 111960 - DNA, 1198 bp, Homo sapiens
aaaacataatcacattcaacccttgctgttttgaactctggagtaactttagagaacacactattttaattaacacttatttataaaagttaaggtcaaaattccagtttgttataattcaattatagaaggaaatcagggatttcttttataaggttttcttctgctgctcctgcctcttttgagtatgtgtgtgtatgtgggagtcaaggttagccttgttagttaggctatttttatttaaatatgttgaagtctacaataaaacattacacagacgttccccaagttgcgggcatgatggcttcaaggttacttcgtggagctggagcactggctgcgaaggccctgagggcctgtggtcccaatggggtggccgtggtgtgctccatggcatctggaggtggtgttcctattgatgatgagcacacgactggattggagatggaggtcatgatggttgcagggaagggactggacctatacagtatatgacccccaaaggcagcttcaggcaccaaggaagaccctaatttagtttcctccatcaccaacaagagtatagtgggctgcatctgtgaagaggacaactgtgctgtcatctggttttggctgcacaaaggcgagacccagcagcaatgccctagctgtggaacccattataagctgctgccccactaggtggcccactgagcccatgcactaagttactcaaaatgtgctgtaaagtttttctttccaactaagactagctgttgtattggctgatataccagatcaggctgtataacttatctgtgaatgcttcttgtatatgtggtgccagttacaacataataactcctcctctaccttccccactgccaagctattctgctctcctttccttcttgccattcattagttccagagagcaatcttggggttcttggacactaatgccagctaaagtctgacttaggcaaatttctgacctacttacctcttctccatgactttccttctttcttttgaggcagttattcatgtagaatagttttcattgccttatctttcctttctttttgaatttttgctcaattttttgagaaaagctagttttttcccttttcattttctccccatttctgcattttccaagctaggggacaggtgaaaataggcaatagtccatctctggtgagagctggcctgggcc

SEQ ID NO: 111961 - DNA, 2003 bp, Homo sapiens
cagtatagttaagagattggctaaggcagtaaataaaacttagaaatgctcaaatttattgtaaattgcttttataatcattgatatataaagcatgctactgctaatcaattagttttatgtattaagacctatcagcatgtcttttttttagtatctggttgacttaaacatgatgttctctgtaccatttaacattttcaagacatattctccccaagcaaattctgttggaaccaagtgtttccagttctagaagtttacttctagagtcttcatatgaaatttacagttgggctttcatagggttttaatttgcactgaatccttccttctgaaagatgacttatgtttaaagtataatgtagcagtgcttttgtcttacaattaaactcttacagcactcatgcattttttgcactgtctgttttttttgacttaagcttttttctcttgaatgaatacctttaacatagaacttattagttgaaaaggtaaggcaactactggaatgttaacacatcacataaaatttttaaatgatgggattgtttggaaagttagcttatgctaaggagcaatttccagctttcttcggaatgtttatgaggcagggtattgagggcaggaagattttttggggatgttcaatctttgtaatctgctgggcttgctatcaaatgtgagaccactacaagtgctggtaggcatttaccattttatgttacaacatttttggaaaatggtaaattgaatttgatggctaagagcaataatgttagcaaaagtactcattataaatgcactattatttcactattccacttttacttttatgtctcaagaactgttaaaggaatgcgggtcacttagtgctggtctgttaagagagaagtcaccattatgttgggtcatgatgtggtgctaagcaggtctgctcctcaacaaacgacctctttgtctgtaaccagcttgtgatttgcctttttgttctaaaaaatcggaggccggccgggcacggtggctcacgcctgtaatcccagcactttgggaggctgaggtgggtggatcacctgaggtcaggagttctagaccagcctggccaacatggtgaaaccccatctcaactgaaaaaaaaaaaaaaaaaaaaaaaaattagctgggcgtggtggcaggtgccggtaatcccagttacttggggggccaaggcaggagaatcacttgaacccgggaggcggaggttgcagtgagccaaaatcgcgccatcgcactccagcctgagggaaaagagtgagacttcgtaaaaataaatacataaataaatcagaggccagaatttaatggtttttgttattctaggttctgccatgattctgtgagattctctgagaggccttgatcctatagtgggataatataaactttcaaaacaacttaaaataatcctttttagacttattaaaatatgtggggcattctatttagcagatttttaaaagtttctagtttaatacattcagtggaatagattatttcaaatgaatgcttttgtggcccagctctgtcatttgcccagtgatattgggtaaattaaccatctccaagcctcagtttttccaagtgtaaaattatattacctttcttaggaatggacattaaatgatagtcatgtaaaagtgcttgaggttagcagttctcggcctcattgtgaggttaaacaaacattttgaggccccatcccaggcttatgcagaatcctcaggggtggagccgaggaacatgtattattaagatcattaggtgactctgatgctgagaattgaaaaccaaagcttcacatttgttgatattaaccatgtttaagagctatggaaatcatgcatctgaaaataccaaatgttaatacttacatgtgctgggcatactgaatacaaagaggagtgtgatgtggccaggctcgggagtagagacagccatcaaccatgatagaaggagtacccttt

SEQ ID NO: 111962 - DNA, 1037 bp, Homo sapiens
agacggggtttcaccatatgaccagcctggtctcaaactcctgagctcaggtgatccgtccacctcagcctcccaaagtgctgggattacaggtgtgagcaattgcacccggcctaatttttgaaattttttgtagagatggggtcttactgtgttgctcaggctggtctccaactcctgtgctcaagtgatctgcctgcctcggcctcctgaagtgctgggattacaggcgtgagccactgtgcccagcctaagatacctacttttgatagggttgagaagggtatatcctttctttaatactagccatattcaaactgttactaggcatagttaggagtcgcctgaaaatttccatgggtaaaatgattctagcaagataaatattcagttgtgcaaatggagtccgcttgtcctgttagttggtaacagttgcttttaatctggtaaattgggtaagggttgattataagctggttggcatttcaaagaggcttgtaggcatctatatcagaatcacttagaattgtttgggagtgttgcctgggattctgtatttcacatacaccatgtgattttttttttttttttttttttttttgagacggagtctcactctgttgcccacactggagtgcagtggcacgatctcagctcactgcaatctctgcctcccgggttcaagtgattctcctgcctcagcctcccaagtagttgggattacaggctcctaccaccatgcctggctaatttttgtatttttagtagagacagggtttcaccatgttggccaggctggtcttgaactcctgacctcaggtgatccgcctgcctcggcctccctgtgtgctgggattacaggcgtgagtcaccgcccctggcctccaagtgatcttaattgcatactaatgtgttaaggactttaatgtgttaactctttaagatagagttaaacacactgtttcctaagggtttgtttttacatcttctgtaaaaacaaaggtatatgttttactaaaccagcattttagttgtgg

SEQ ID NO: 111963 - DNA, 1025 bp, Homo sapiens
tgtgcggggagggggtaaaaacagattgaattaaaaccaggtttagtgtgactaaaaacatgctaccagattaattttgattgttgtgttaaaatgtttacaagctgcacttttggcagttaattagtactaaatgagagacactacttagatttaattttaaggattaattttggagatcaaacccattcttgaaaaaaacttgtaacccgatttttgtactgttttgtttctgtatgtctgactcatttaaattgcaattctcagagccgtttctagcagtacctcttggcctagataattttctgtccagcagacactgattttcaaacggtaacaagaattgaaaaaagattttttatatacattaatttggtaattagtttcatgtttttcttgatggttttctgtgttctaatctgaactgtttgccctttttgaattgttgagtaactgttgagttggggctttgccattgttctgggtttccctttgcctctcaatttatgatctgtttcctagatctatggctttgttggtttggtgtaggatatcttccaataggttagagaccttcctgtctgtaaagttctattttgcattggattactaagtttagctatgtagagaattcaggtttggtgaagaaatttattttatttgtttttgagacagcatctcactctgttgccaggctggagtgcagtggtgcgatctcagctcactgcaacctctgcctcgtgggttcaagcgattctcctgcctcagcctccttagcagctgggactacaggcctgtgccaccatgcccagctagtttttgtatttttagtagagacggagtttcaccatgttggccaggatggtctcaatctcttgatgctgtgatccgtccgcctcggcctcccaaagtgctgggattacaggtgtgagccaccatgcctggccagaaatttatttattttttttatttttgagacggagttttgcttttgttgcccaggctgtagtgcagtggcatatcgg

SEQ ID NO: 111964 - DNA, 9474 bp, Homo sapiens
cttgaggccaggagttcaagaccagcctggccaacgaggggaaaccccgtctctactaaaaatgcaaaaatcaagtcaggcgtggtggtgcagcctgtaatccctcccacggaggctgaggaatgagaatcacttgaacctgggaggcagaggttgcagtgagctgagattgtgccactgcgctccagcttgggcgacagagtgagactgtctcaaaaactaagcaaccaaaaacagaaaaagatggaatggaattaatatgttccatttagtaaagatggaatagaattggtccagtttgtgttcattgtagcatattcacctatttggtcagcaaccatttttttttttttaaagcctaagcataccctgagaacaacaaccttttttgattagaacagaagaaaaagccagagtgttcttgggctgccaaaatattaatacgtttgtctcaaagacgagccacttaggtgcttgcttagagacttctactttacacagaatttgaaaagtttgacagctggctacttactctgcaaaacggaagggagactttttagaacagcaactggtgatctggcaaaaatgaaaagtagaacttgtgaagaaatgagatggacttggtgtattaatagctaattttagaagaccctgtggatattctaaatcagcataatagtgatgtctgagccatagtgttaaattatgattactgtatttgaagtataagaaggcagaaaagtgtgatgctgttagaaaaaaatctcatttcaaatgattgaaggttaaaaacaattggggaaagattagagagggcaggcggtgctttaagggaggtggaataatacttggctccttattctccaaaagtgctggatagctgaagtttttaatattctggataattgatatttgattattagtttaggagggatagcatcttcagtgaacccttgtagctctaaggtaggcatattaaacaactaccatactaaaggtggggagtacgtttggagagcactttgctgggccagctgatgatatgcttaggtgatatttaagaaaatctgcttcttgtctgaaaaacatttggggcttcagaataataccacatacctcattcttggtgttttaatttatttctttgtaattgttttctgtttcttaataattttaaattaagggtattttcccaatataaacattgctttttggttaaataaaatcaaaactagttctgtctccatatctgaatagaccagacagagaattttcttgcctttcaacagcttaaaaaatgtttttgttagaactgttgtgttcaggctgaaatactttcaaagtttgttagttattattgagaaatttctgtaataatcatggaaagggtaatttaatagttaaatctcaacttaattgaagttatttctgttgtggaacttatggtcatcttagcaagaggtcattgctttatagtcagttctctttctcattaaaaatatagtgtactcacctttacagggtgaatgttggtaaataacttctgtctgtgaaggaagtattctggacctgtaagttaaaaataaggtgtttatagcaaattatgtaaataaagattgtatattagaaggtacacactattcaaattaaagaaaatgtatattgagaaaataactcaaatttcttccatgaaattggcaagaagtaaacatttcaaatacacaaaacattatgggtatttttgttcatttgattataaaatgccaaagttgttttataaatgctacttcaagcctggaaactttgaggaagtcctgaacattaagcatataaatggcccagctctagaatacatgtaagttgaaaagctaacctgaagtgggaagcgcagtatatacctaagacttactctgcactgaaagtttgctttgtcactagaagtaaaacaagactgtggtaggatagtaagatcagtaacacctcagttaatcaggtatcttggaggaagtgaagaaagaccctaattcaagggacagttaattggccttttattccaagaatgggccttagtggcagtatcttaaaagcccacaagatggagatgtttcctaatgaaaggcctttaatttctttatagagctgagttagtgtcacatcccagtccccacccatgacccttccccagttaaaaagaagagaaaatgttgagcaagtctgatttgattcccatggtgacatttttagccattatgtaacaaattctgacagtttacccttaaaattaaaaacctccagtcctgtctttttaaagggtagaaagaaggttaggtataggatagctttttatttatttatttatttatttttgtacaaagggagcctatgtaaagctgccagatctgaactttctggtgttttgctgtaatgttagtaagatttcgccttaaaatattttattttgagtatatacgtttggtcttagagtgtcttggtggatttccgcttaccacccatcactttctgcattttaaaggcttaaatactttattgctggttaactgaggttctactgtaaacgaatcatctaagttaattagtggattgtacttcaatggataattttcactaaattgtttatattgcacattacttttgtcttaaggactcttagcacatcaaaaaaattggctcacaacttaattgtgagatgtagaattttccattttatgtgctaagagttttgttaatgagagaactgttaaaatagaaaaggagcttcagcatagacaccaatgctggttgctgagatcagtggggaactgcatagcattttaacaagtttaatgaacatttggaagagaaatttgaagctaagattctggtttttttgctgttaactttttaatctaaggaaaacttttatgtacagtatttttactttgggtatatgtttatcttttagcaagttgaaagacttaatttgctgcttgctcactattttgtaattatttgggagcagcagtaataagccagctttttggaataggatgttcctgatgtgtggttatgtaggaagaatgatgttttaatatactgcccagtaaactggtgcagtttggaaaaggtgtgttattgatgtggataatatttaaggcaattttttttaagcattttaatactgctttttgtctttacaggaaaatgtttataggaggccttagctgggacactacaaagaaagatctgaaggactacttttccaaatttggtgaagttgtagactgcactctgaagttagatcctatcacagggcgatcaaggggttttggctttgtgctatttaaagaatcggagagtgtagataaggtagtgtgttacgtgttctgatcagttaataatataaaatattaacatatggatagtttgatacaatgagtttgcctatttgtggttccccattttgatagtataggaaggaagaatagttcttgccccaatacgttttatgaagatagaggtaggttcaggaattatttcctgaataatttgtgttccaggctctgctaaattttgaaattaactttaaagatactatagacttaaagatgcctagttaaaaggatgtgttttagcaattcacagaagtccatattttgaaattttgttaggcaagcaacttttaactgaatcattattttgatcctgggctaaagggaagtagcagttatgtttgtatatagtgctaaagggaagtagcagtcatgtttgtatatattgaaggtaatggttatctagtaattggttaaatttgtgtatgtcctaccattcttacctttagatttaaacagtatatgttagttgatgttacatcaccaccatgacttgacagtttaatcttgagcaagtcaacatatgcttggcattatctgtatttatagttatttttaagtaagttaatagtctctgaacttcagttaagatatatattttttaaatgaaaacttcaatttccttaggtcatggatcaaaaagaacataaattgaatgggaaggtgattgatcctaaaagggccaaagccatgaaaacaaaagagccggttaaaaaaatttttgttggtggcctttctccagatacacctgaagagaaaataagggagtactttggtggttttggtgaggtatgttataaatgttttgacccagtttatgtcaaaattagtgtgaatgtgattgtcccattatggactcagagtcacttggcttttcaaagctgttagggtagattatgtgatctgttttggaataaggatattgtaaatacttcattagcaggtctttgaaggttggataatgtgtttttctcattgagcacctactctatgcagagtattgctggggtagagtatacaaagatgaaatagacaaacattcttaaatacagacaattaagaggaagaaatctagattagaaggagacttttgttgaaaataggaaaggaattaagaatagggtgtagtgccttatcagttgaaatgcatgtgtaagtgcaaatttaatgagactaatcattatagactcattagtgaggctggacgcgatggctcatgcctgtagtaatcccagcacttgggaggccgaagtgggtggattactggagaccaggagatgaagaccatcctggacaacatagtgggaccccgtctcaattaaaagtaaaacaaacttagactcattagtgaaataggtagataatagaggtttcttttatgaattaatgaaagttgagaaatttgtggccttgggctccagatacgtcccacagacatttattgcttgattgaaacaataagtgcttttttagtgttgaggatttgagatattgcccacaaaactcagtatctagctttttaaaaaatacttgcaagagcacgcaacatgggaactgacgctgccctcctgtacggcagcatctctcaaactgagtagtagcttccatcttggtttgggcatatgctctccagtttttagtagtcctcaccaccctacttcctgttttctctcaaatacatttttattctgtttttcttagatttgactgttttcttcttgttctttgtgggcatttgaatttgtgacccttgagttaggtagtaaatgtcagtgcgtggtaaagcttatttttgtaaatagttgtgaagaccttagatggaatgggtgttctaatttgaagaattccttaaaaggattagaataaatagggagaaacaggagactagaacttcagtgccaaatacatgttttctttgtgtgttttcccccctctaaacttgtgtttcttttaaggtcaataaaatgcatgttagcatattaaaatttgttttttaataccaggtggaatccatagagctccccatggacaacaagaccaataagaggcgtgggttctgctttattacctttaaggaagaagaaccagtgaagaagataatggaaaagaaataccacaatgttggtcttagtaaagtaagttaagcatccatttacttgtagagaaaactagctgttgtaaagagcttaaccatttatctttctctgtaaaggcttaagttctttgcatgctttaaaaacttctcattggttacttaccattgaccaactttttgtggggagcaggatggacacatttgttagtgtttttgtctaggctttcacaaaaatagtttttagaacttgacaagtaaaatgaagtaacatcactagcaagtactcataagtgattactcttaagtactaaatattggtttaattaataaactgactgaggaaagtttcaaattagcctactctatttaaacatgttggctattctggttattagaaacttatttagcaacttttattttcttgagtcagtttaataatgtaatttttctcttttagtgtgaaataaaagtagccatgtcgaaggaacaatatcagcaacagcaacagtggggatctagaggaggatttgcaggaagagctcgtggaagaggtggtggtaagctagagcctaagtttactctatcttaagcttttctgctttttaattatcctgaagtaaagatctttgctgatcttctgactttagtgaacctattaatgtgctgcaggccccagtcaaaactggaaccagggatatagtaactattggaatcaaggctatggcaactatggatataacagccaaggttacggtggttatggaggatatgactacactggttacaacaactactatggatatggtgattatagcagtaagtactatactttttatattaactgctatttgacatttattttgtacaaatttggataggcagaaaggttagtgtagccttgccaagtgcaaatgtcttcaggtttcaaattcctggaaacttgaaactgcagccattttattgcttggttcctcccagcctatatcacacacacattataagggtagggtgtatgtgtggttctatatatgtttgctgggcatttgttttacttggatttaaaaattttaagctcagttcagatcttttaagctcaaggtattctaaatgtcacttcttggaccaaccaataatcttggcatgatgtgtcttaatcctataaaactgaataataccacatgttgccagttaaaactaatagtatcctcgctttaggattattaatgtagaaactcttaaaacagatgttgagcttgatagaaccaaaaaacttgacttttagacatggaaagccctgacttcattgtgcaactaaggtagttgctctccacctgatttgtagcaactgttgagtcgtcaggtaaagggttctactagaagcaatcttacatttttttggaggagagtggttgcattggttgcattgttttaagtggtttttcttttccttccttggttagaccagttcttggagttatatcctttcttaggtgactaggcctgctgcacaataataggttaattaaagtcagaagaaggtcagcaaagatggattgggtgagattggggcccttttcttagaagggcagagatactaagcactgattgtggttgacaatttgttctaaattttaagatattttttgctggtggttgtgaaagggtcagctgtccatcctttgaaacttaaaacttttaaactgtaagggtgaggggattgtctcccattttatacaataagtcaagtaatcagctcattctgaatgcctgccattgtatgcattcactacatatttggtaaattatttgataaatgattgctcagggtgaatttttcacacttgggaattaagctacccttaattttttgagattgtttaaaattaggtactgttctgattattagtatgtaaccactaccgttctggttctaacacttgttttattttagaccagcagagtggttatgggaaggtatccaggcgaggtggtcatcaaaatagctacaaaccatactaaattattccatttgcaacttatccccaacaggtatgttctaaaaatagtttttttttgtcatttacaatagtagtttttataatctatattgttcataaaacaatgcttaatttaagagtttcacagcacccagaagtgcttaccatattataacatagtgactttcaaagatatgtaacacaggtgctcttaagcttttgcctttttgtcctattattaacaagtcagtaaagttaacaggtaaagtactgctaatgggtacaaattaaggaattgcagcaaaaaagtattgcctactaactctgacattataccttgtttgtacccgccagcgggaacttcattgcaggccctgtgtcgcgctgacttcacgattctcacaggcccgctcaatgcggacagggtacgagatgctcacgctctcgaatgctgccgtttggtatggtctcttccaacatcctgtatcagcattataaaataaaatggatacttcaagctttgccttcacttatttctttgctttttaaaaactatttgtaatgtaattttaatgcattttttacaggcccagtaatggttaaatacgtcagcttactgaataattttaactatttattcttctaaggatacagcttgtctctggattttccagtcttaattttatattttattaatctattttaatgcttgcttttcccatttatagacgttgtagcagtaattgcaagaagttcttgagctgaattcctgttgtgacaacttcctataattacagtagataactttttcttttagtcgtatataacttttctataacttgtgatggacaagagatatgcttatccaataaaataagcttaaatattagatgctcttgggtcaaaatgtccttttaccaaattgacctttttatgagttctttgggtaaatactttaaagctttttatattttaaagaatacttgtaaaagcatatcacatcttaaaccagtggtgcacatgtggatttacagctcatggactctactgttcagctttaatttataaaacatatcacacatttaatgttatacagtatttacatatagtggaacatagggataactcagttttatgtaaatttttgttaagtgttgtagcctgcccagagtgacttctattttttcttctttgtctccaggtggtgaagcagtattttccaatttgaagattcatttgaaggtggctcctgccacctgctaatagcagttcaaactaaattttttgtatcaagtccctgaatggaagtatgacgttgggtccctctgaagtttaattctgagttctcattaaaagaaatttgctttcattgttttatttcttaattgctatgcttcagaatcaatttgtgttttatgccctttcccccagtattgtagagcaagtcttgtgttaaaagcccagtgtgacagtgtcatgatgtagtagtgtcttactggttttttaataaatccttttgtataaaaatgtattggctcttttatcatcagaataggaaaaattgtcatggattcaagttattaaaagcataagtttggaagacaggcttgccgaaattgaggacatgattaaaattgcagtgaagtttgaaatgtttttagcaaaatctaatttttgccataatgtgtcctccctgtccaaattgggaatgacttaatgtcaatttgtttgttggttgttttaataatacttccttatgtagccattaagatttatatgaatattttcccaaatgcccagtttttgcttaatatgtattgtgctttttagaacaaatctggataaatgtgcaaaagtacccctttgcacagatagttaatgttttatgcttccattaaataaaaaggacttaaaatctgttaattataatagaaatgcggctagttcagagagatttttagagctgtggtggacttcatagatgaattcaagt

SEQ ID NO: 111965 - DNA, 2007 bp, Homo sapiens
cccagcactttgggaggctgacgcaagcgaatcacctgaggtcaggagttcgagaccaacctggccaacatgttgaaaccctgtctctactaaaaatacagaaattagccgggcatgatggtgggcatctgtagtcccatctacttgggaggctgaggcaggagaagagcttgaacccgggaagcagaggttgcagtgagccaagatcgcgccaccgcactccagcctgggcgacaaagcgagactctgtccccctcccaaaaaaactgtcatgtttcatttattagatgtttattttttcaacttcgctttttagtagtcatttagttaggttcattctaaagtgtgaagtaatgagatttaatacagagaagtctctgaaaatgtttggtccattgtatattagtcttgaataaatggaattctttttcacacttaccttgaaaatgtcatctgtagaaagctgggggagaggaatacctattctttaatgatggggaaataataccaaaatttatatttttattgactaaagtgttttttggggaagatttgttattggctaaccttaatgtctcattagttttaaatagttaaaaaaagtgggctgggtgcggtggctcacgcttgtaatatagcactttgggaggctgaggtgggcagattgaacccaggagttccagaccagcctgggcaacatgatgagatcctgtctctacaaaaaaaaaaaaaaaaaaaaaaaattagctgggcctcgtggtgtgcacccatagtctcagctacccaggagcttgagatgggaagattgcttgaacttgggaggcagaggttgaagtgagccaggatcacaccattgcaccacagcctggcaatagagcgagactctgtctcaaaaaagtggttttcatgaattttataccagatcagatctaaaaaggctggttagtatttgaactcgatgaaagcttgtcaagctctctcccaaggtagttttcatacaacttgtaaaataccctaacgtgtgatattatctagttgcattgtaacctcctcccttccccttaggtaactagtgacttagctttagtttgtcattttaggattttagaagaataattatgatggataaaatactggaaaaattcagtaaggatttaatggtgtgcttgagtaacattactttaaaagatgacagtgattggtcatttatgttttatacctgaaatgtatatcaggttgacattctgttgtattttttaaactgtcagaacttgttataaagccatgtatgtaagatcataagttgttaggaagtgtttaaaagttaaaggattggctgggtgtggtggctcatgcctgtaatcctagcactttgggaggctgatcgctatgtccaggagttctgtgactagcctgggtaacagagcaagatctcgtctctaaaaaagtaaaaataatacgaagttatagaacatagaaaaagaatactattccaaaattgggagtgagtataatggctaactttttaccttgaataaggtgtttgacaataaagacttattaggggaggtatcttggaataaaatagttaatattgactgggaatgttaaaaacctagtgacctaaatagtccagagaataagtttattgatggggaaaagccaggattattaaatcggaacattttccaccagccaggattgctccatgtatatttccttttatgttttaaattattctttactaaaattactggcataaatgtagggtagaccaagtcatcaaggtgattttggaagctacatttaaagggtcttagttgaaataccacctaatttttagtttatatatttttttacatggactatttaaaaatttctgggttatttcaagttggcagcattgaaaatattagaatatgtttatataaaactcattgtggccttttccttttaatgttggaaagtttataaagcctatgcagttttaaaaaattaagccattga

SEQ ID NO: 111966 - DNA, 2842 bp, Homo sapiens
cgtatctgtcccttcctctttctcccattttgagggatattataagggcaacagttttatagtctcaatattgagggtaagactggttaatagagtatccaaattgaatttattaaacacagttctgtgtgcatttccttctgcaaatctgagaataaagtgattacagtttcatcctaaaatactttaaaaatcagttggttttagaaataggtttttttccttttgcatgtaagaatggacagctatttttaggaaggcatgcctgttacacctctagtggatgtttctacagtttactatgggactttagaataagtaattatttccatagtatgccctcctgagttcactttgatttactctttcccacattaacatccgtagtttttacttataagcattggaatttctcattttactttgtggtgtggacccattctgttctctgcagtgctgcagttcatttggggtaggtactttaaaattatttagtgtctggcaaaatatacatgccatgtagcaagctctctgagggcagagtttttaaagtttaaaaatcaatggaaactacaatgttgtgttaactttgagatagttttacaaggtaggtacatagactttcctgcattggattgggtaggaagcaaaaaagtccccccattcacttagccaaagtccagcaatgcttctttaataacaggacagtagatattgtcctgttaatggttagtgtataatgagcccaagtgtgattcttcccatttgggaattctgtgaatcctgctgtaggttgttgcctgtctgattataaaagactaggctcatgtttttgctttaaatgtttgagattatggtcttataccttagtgcttctggggcaatctgaacattgtttgctttgtaaaataatttcttttagagtagtctcatgccaaatttactggcctttgattcagtacagttgggtttactgtatgtagtaaagttgagaccctgcgtagattggtctcagtgttagcattcttgggagcctttgacaaatttcccgagttaaaaattccagaaattgatgtccccagatctttagatgaacatttaagcgaagagtattaaatacttctcactgtaaattttcatctattatgaaagatactaaaaataatctcgttttttaagtttggaattgggagaatgtcattgaagtttttcagtgcttgtttttgagatacacatactttgccttaaatctggggttttttcccttaagccatgtgaccctttctacaaactcagtgtatgtttttaatatttcctgggtactctgctatcgtcctaatacataatattagggtaaggctgccctaatacgagaacattttgagtatactattgagtatacatttgagtatacatattgagtatactatttatgccaacgtgaaggatgtgattagttttagccttcaagtcataatacataccatgcttgaaagcatttaaaaaggaatagagtaattttttttcccattccacttggaagctgtgtacctcaagtgtgtgcacatttacaaatgggtgaaacataacttatgttagtccaagcttgatttgacttcagttctgcttcaacgttttagtagatagggcactgaactggatgctgaaagcgtgggatctctttctgttgcttcacttccaacagtgtggtttcaggtaatacgacatgtttgttacttggtttgctgatctatgtgttggaaacaatgctcaccacaggaggattgactacatagcctgctttcatagcttgtgtgtatttatccagtgccctaatagttgatactgccagtgatttactcctgtggagtaaaggtaagcatgttttagtttctggagtattatattgtacgttggagctaggtatttaagaatatttgggggtggggagggaagactccaatttactggtggtgcttggccagtaatcaaggtgacagtttaagtattgggtcttgcactgtaaactcctgcttatctagacttcagactaccacagagcccacacagccaggaagtctgtctccccatttagtcttatgagcaagatagatgaagccatgagaaaatatactcaaaaagcaaccaacagacaatgtcatggaatgaatctcctacagatttttccttacacttttgaaaagtaacatgattttaaaacgttggaaaattcatcaaggtacaaatcattttctgacttcagcattgatacctaaattgatttccagtacacagttttatagaattgtgaatatgtagtaatctcagttaaccagaaccttaaccttcaggttaaggaaaatacctattccttaacctctaggtaaatgggagtttaccttacaaagctgattgagagcttatttaaaacgtaaacatacaagatgtcattgcttccttgtagtgaagtgaaaaggaggtattggattaagcatttaaagttaattaaagtagtggctcgtgcctgtaatcactggctactcagaagtcttgaggtatgaggatcatttcatgccaggatttctagaccagctaggcaacataatatgacccctgtttctttaaaaaaaaaaaaaaaaaaaaggctagtgtgttggggggtgtgtttgtagttgtagttacatctactcaggaggcagaggcaggagaatgtgttgagcccaggaaggagctcagggctgcaggaagctatgatggagccactgcattttgatagtgagacctggtctcttaaagtgttttatttttaggccaggcgtagtggctcacacctgtaatctca

SEQ ID NO: 111967 - DNA, 2975 bp, Homo sapiens
gatagtcaggcccaactagtccccctccccctctttattcccccgccattaggcctggttcccgctctcagcccgttctccgggcccccatgcagcctccttgcactggtctccctttttctatgttgggttccccggaccttcatttccttcttcctttgcctgcttatcgcccccctcccccatcacacacgtttccacctttagccgtcaccatgctgctcctcggcccgccctcctttcctccctcgccatgggtctcctcccaccgacttagccgccaggattttttcccgcctgtcgtggggtaccttttttctttccatgctgtcccctctttttccctttttctacagtcttgggcataaaaacacagacacaaacagcttctctgtttgtattactaaggtttatttggtgcttctccaccatcctgaaacgatgcgattgtttataagcacatgttttggggaacgcgtaggctgtccacctctgcctctcccttgtcggccttaggccgactgttttcttgggattttgaataagtttcgcctaaggatttactcattttctccaccatacgctatcgcacaatggcatactcatacaggccctacattttgacatgcagaccaaattgggtctggtgaaatgctccgagtttcttgttggtacattggttttgctccgcgggctctggttaagttcttagtcgatcgggcctgcacttgactggagctgttcctatctccggcctagcatctacccttcccccaccccactgagttattctaaccgcgcacccttttcgcgccctcagctattgggttccccaactgttagtacagattgtaccttactttttatgtgcaacctaattttttacaacccccagccccctttttttcccggtgcccaggatcctattttggtgtcttgatatctgtttcccgcccactaagggaggcctgtagtcctcttaagagaaacaaatcctgtattgtgctatgggatactttttttttctttttggtgcaaatttcttagtattaacttgcttcctccaattgaaataacagttgtatatactacctaaatctgcatttagtgtattaaaatgcagcatttgggattgggaacataatacgggagttagcaggagggactaaatcaggtttcttggttgagttttcttagctccgattactgaccgatgatcgtgggttcacgcttccattcctttttgtaatggggaggggtgtgtgtgtgtctgaatttttttttaactgtaaagagaaaggtgttggtggatataacaagatgtcgctttaatctagtattagaaaacacgatttcctttactgagaaagagcccaggatttggagggaaagttgggaggggagaagcactttggaatatagggtttattaagcccagcctaggcagattcttgtcaggctgtttgatgatagtgctggttttgggggagtggtggtgggaagggaagcaaacttttaaaaattaaacagaaccaactcgaattgtatatagcttatttgagaaaggaagatgttagatatttggaaacttaaaacctttaacattttggttttcgtttgctgaattctgttctttggacagaggcaccaaaatgattaattgtataacttcctgtttggggcaggctttctgttagccctgataattcaaatcgcaaagcagctgactttatagttacctactgttgaagtgtaaatgaattaaagtttttaaccctaacagtgtcaaaaactaaaactagaattttgattggttgctgtaccggttgttaattccctagccattcaaactcctccccacgacactctgaagcagcgacggcacagcgggaagaatggtaaaacttttaaattttatttctgtattataaaggtttcagtagtcataatatgtagaggctgtgtattggttagttgcccattgatccccaggaaattctagaccatagtacatacagtaggtttgtacctgggatatataccttttataggcatcatgtgtaatctttgggcaaaattgatgccgttacatggtatttggtctgtggtaatgcatgtagttgcagtttggcaatttaagctaaacaattagtaacgatatttttatatcgagcaagaaaaaatattaccgtaatcttcacatttgatttattttaagatgaaaaatatttttgttggaatttaagtttaatggctaaatatgaagactccttgatataaaatattgtgtttaaaatgtcatgcatgttatactgaaatattctggagatgtctgaagcagttctttaagcagcactgtgtattatggaaaaatgtttgtcttttacctagcatatttgtaaatagacctttaataagaagtgtgtgtgtgtgtgtgtgtgtgtatatatataccattaaaaggtgggctaatgtggctttccactacagctcttaccagattttttattttcagtgtgatttggctggaatattaataacagttggttgacatgtattcacaattgcatgacttctctttggaggctggtaggttgagtattgttctttttatccatcctttcccctcccctaaatgtcagtctttctgcttttaggattatatttgaattttcaggggtttatacaccaccactggagagtagaaggccactaacttgcaggcagttaacttatatctttacaagctacattctattttaagagcctatttagggtaacatttaaagatttgcttatcactgtattctcatccactgaaatcagtccagctttaccttggagaaaaagcagatgggaaacaggcaaggggaaaagcaaaaaagaggaaaaaaaaaagactggggtcacagtttcgatgaatgttattccctgtatttggtgagtggtgggcactagcagctcaatttcactgc

SEQ ID NO: 111968 - DNA, 1164 bp, Homo sapiens
taaatctagtttttgacacagtgcatgaactaagtagttaaatatttacatattcagaaaggaatagtggaaaaggtatcttggttatgacaaagtcattacaaatgtgactaagtcattacaaatgtgactgagtcattacagtggaccctctgggtgcattgaaaagaatccgttttatatccaggtttcagaggacctggaataataaaaagctttggattttgcattcagtgtagttggattttgggaccttggcctcagtgttatttactgggattggcatacgtgttcacaggcagagtagttgatctcacacaacgggtgatctcacaaaactggtaagtttcttatgctcatgagccctccctttttttttttaatttggtgcctgcaactttcttaacaatgattctacttcctgggctatcacattataatgctcttggcctcttttttgctgctgttttgctattcttaaacttaggccaagtaccaatgttggctgttagaagggattctgttcattcaacatgcaactttagggaatggaagtaagttcatttttaagttgtgttgtcagtaggtgcggtgtctagggtagtgaatcctgtaagttcaaatttatgattaggtgacgagttgacattgagattgtccttttccctgatcaaaaaatgaataaagcctttttaaacaaaatccaaacttttaatcaagtcttgatatgtatgactgagaaaaaatacactacatctagagatgattgagatgttttgcaaagaattgaagggggagtgagaattggtttttcttgcaggggctttgaactctagatttgggctttgaactctagatttaattcagatttcagggtctatcagttcaccaactgatgcaaatttgaacagatactctaaggctaagtgtcctaggttggatgaactgaagctactatcaagatctcgttcccaaggattaatttagaacaaagtaattggacaagtttattggggaggggatagaaatgaattctaaagtacctataacaaatactctgtgtatgttttttacatcgtatttgccttttacattgtttagaccaaattctgtgtgatgttatcctcgggaagaggatagaaattaattctaaagtacctataa

SEQ ID NO: 111969 - DNA, 5733 bp, Homo sapiens
ctcccaaggcaagagggactgtggccctgcgtcggctctgctcgggactgctgaccccaggaatttacgccccttcgtttttctcttctgattcttctcttctcccaagcccgcgtcccctcacgcgtggcctctctccttgccgggagggccgcgatggaggtcccgcccaggctttcccatgtgccgccgccattgttcccctccgctcccgctactttagcctcccgcagcctctcccattggcggccgcggccgccgcggcagctagccccgctcctcccttcgctcgctcccagctccgcccggcagggggcgcgccgggcccagcgccacgtcaccgcccagcagccctcccgattggcgggcggggcggctataaagggagggcgcaggcggcgcccggatctcttccgccgccattttaaatccagctccatacaacgctccgccgccgctgctgccgcgacccggactgcgcgccagcacccccctgccgacagctccgtcactatggaggatatgaacgagtacagcaatatagaggaattcgcagagggatccaagatcaacgcgagcaagaatcagcaggatgacgggtaccgcacgcttcttcccccgctccccctcccccagcgcgccgcacgcgcccttcgttcctcgtgagccgcgcgctgcccccattctttctcagagtcgattccccgcgtgccttctgggccccactagattggagggaagaggaaagtaagagatcgagggggtgactggagagacccgggaagagtgggggaagggcggaggggttggaggaggagggcggcggcgtctgtgtcccgagcgcgcaggcgccgcgtgggacccgggggggaggggccggcctcccagcgctgcacgctgcagctgccgccgcctcttcattgtgtctctgttaccactcggcgcggttttcctgggaagagttttagaggactgagttggggcacaagcaggcgactggtacccagattcacaaaacgtgttatgattgatgagttctctgggtggaacgttggcttgacagctgagaacgaagatggacctaagtaagataagatgtgagggattcatctaggaagttgtgccttctacctaaaggaatctgggcagaacctttactgtattttattggtctcttttgagctttgctttatgtagtgcggacagtgagctgtccgctggtttgagtaacttcgttgggatattgggatttttgtgtgacatagattaaatgtaaacatgaattaaattgcctacacttagggggtaaatgtccctgtttttatttcacgatttaattccagaactgaaggatcatttgagttattgttaattttttttaaaaacacttttatttctagtaaaatgtttattggaggcttgagctgggatacaagcaaaaaagatctgacagagtacttgtctcgatttggggaagttgtagactgcacaattaaaacagatccagtcactgggagatcaagaggatttggatttgtgcttttcaaagatgctgctagtgttgataaggtaggaactatgttttgcattgtgctgcttttgtggtgttttgcaaatttttctgggggttatatggtgctgtcagattaaataaatctgtcttgtaggttttggaactgaaagaacacaaactggatggcaaattgatagatcccaaaagggccaaagctttaaaagggaaagaacctcccaaaaaggtttttgtgggtggattgagcccggatacttctgaagaacaaattaaagaatattttggagcctttggagaggtgtgtgattatgtttacacatgttaagcttgatgtgtttataaaatgttcaatccttgtccgatttatgcagggcagattcatgtttcctgtaagagtagaattaaatgactgctcaagtcgcttccagtgactgtaccttgatttcattgctgctctgatggaaacccaactatctaatttagctaaaacatgggcacttaaatgtggtcagtgtttggacttgttaactagtggcatctttgggtacaaaataatattaatttctctcaatgcttcaaatatacaacaaatcactgtaggctgatgttgatcataaagcagtgatgtctgtatagaagtcacccgataagaataacatgtttaagttgaagcctgaaaaggcctttggcattctgacactgtaacgttttacaattatgggatgacgttgagtgtgcatctcgatttcagattgaaaatattgaacttcccatggatacaaaaacaaatgaaagaagaggattttgttttatcacatatactgatgaagagccagtaaaaaaattgttagaaagcagataccatcaaattggttctgggaaggtaaagccatttaagcactttaaatgaaaatttaaataattgaaataatttcttgatgtggagaaaaataaaatgatttaattttagaacttcggtaaaaattatactttcatgttttttgtttatagtgtgaaatcaaagttgcacaacccaaagaggtatataggcagcaacagcaacaacaaaaaggtggaagaggtgctgcagctggtggacgaggtggtacgaggggtcgtggccgaggtgagacttaattcttgaaatatgactccgtggtttatttaagctgtatactgctgaatatgagtagtcctgtaccaaagcaaaactttaaacttaaaaccattccagcggaggggggactgttcagcttagtggaggttgtgtgtggtggttttttgttgtgagctcactggtttcaaaaaactgttaaaagtgtggccactttgacaattagtgtcatcactgataggaaaagtgtaccattacatgatacaccgtggtgtgataggttttcttgggcaggagtccttgttttaaacagaacagtgtacctgtcttcggctttaatggaaaattgaatgattttccattaagtttaggaagtttgatactggcacaattggactttctgcctccttttttataacagctggaaaaatagtttttcaagcagatagcaatatatatgtccattctgccctttaagatttgcagagtgagagacaagaacgcatcattttatgttagaattgggggtcagaagttgtttcctaacaatcattgtgcattgtttcaggtcagggccaaaactggaaccaaggatttaataactattatgatcaaggatatggaaattacaatagtgcctatggtggtgatcaaaactatagtggctatggcggatatgattatactgggtataactatgggaactatggatatggacagggatatgcagactacagtggtaagaatatttaacttaattttataaagcagtggtattaaaattcattgttaacatacaatcctgttctgaaattgtgtgtatgggctttccattaaagtgttcggagttaagtgtttgaggcatgttacaatcataggatgattatactaacatagactggtggttataaatgaactaggatgtatgatttatgagtagcatctaatgggtgctaaaatatcttaatactttttatttagcatgcaaagatttgtagatttaatagtttgtgtttgtaaagaaagttttgtagaaaactatcttaatgagaattctgtgttttcaaaataggccaacagagcacttatggcaaggcatctcgagggggtggcaatcaccaaaacaattaccagccatactaaaggagaacattggagaaaacaggtgtgtataagagtacaggaaaacagtagaaatgtctaatttaatttaaagatcaatagacaaatgaaacgtaaaaacaaaatactatgtagcctgtttttactaaattgttgattttttaattgctttatgagcctgttttgcctaaagtgtctatagatctttaactttaaagtcttatctcactttctttagtattgcagaaaaacttaagagtttttctgtttgcttttgtgtaccaggtggtctagaggaataattaaacattttagaactattaacaggtaaagtactgaaatgggtacaacttaaggaaaacaagaatgttgtcttctaactctgacattataccttgtttgtacccgccagcgggaacttcattgcaggccgtgtgtcaccctgaccacgtctatctctgggggtcgcacgttgcgggcagagcgcaaggcatacaccagaaaacgctgtcctgtggtatggtctcttccaacttcatgtaccagcgtaaagattaaagtggaaaacttcagactttggcttcatttttaatctttttggagattaagtgtctaaacttaacttaaatggttttttacaggagttaaagtacataaatgcctttttacagcttaatcattttggtcttctgtttagtgttgtatttcaattgtggagcctcattttaagtgttcattcttttaagatttaatgcttgctttttctttttatagctaatagtgaaatctacaaaccaaaacaagaacttttaaatctgggatataaattaaagatcatatgcacagatcaatttatgttcttgtaataaacttattagaaattggtgtttgtgatagcattttacttgggttactagagatgcttctagtagaccttaatctagcatagttgaacctctgaatatgggaaggttgtattcccagattctttcctgaatagatttgaatttaatgtcatttgggaactccagggtgagtttattgactacccaaactgtattttaccaataaatatgcatatgatctttaattattgaagaaaataaagtgaggacttaaaacaattcatgaaagtggacctttaaaagcttgtcagagttgcacaaatctaactggtattttgtttttgtttttaggaggagatgttaaagtaacccatcttgcaggacgacattgaagattggtcttctgttgatctaagatgattattttgtaaaagactttctagtgtacaagacaccattgtgtccaactgtatatagctgccaattagttttctttgtttttactttgtcctttgctatctgtgttatgactcaatgtggatttgtttatacacattttatttgtatcatttcatgttaaacctcaaataaatgcttccttatgtgattgcttttctgcgtcaggtactacatagctctgtaaaaaatgtaatttaaaataagcaataattaaggcacagttgattttgtagagtattggtccatacagagaaactgtggtcctttataaatagccagccagcgtcaccctcttctccaatttgtaggtgtattttatgctcttaaggcttcatcttctccctgtaactgagatttctaccacacctttgaacaatgttctttcccttctggttatctgaagactgtcctgaaaggaagacataagtgttgtgattagtagaagctttctagtagaccatatttcttctggattgtaataaaattgttagtagctccttttactttgttcctgtctctggaaagccatttttgaattgctgattactttggctttaatcagtggtcacctagaaaaagctttgtaatcataacacaatgagtaattcttgataaaagttcagatacaaaaggagcactgtaaaactggtaggagctatggt

SEQ ID NO: 111970 - DNA, 1458 bp, Homo sapiens
gatcattagatactaccgttttctgaaggtagatttggggagtaagaaacctcatacaaaatcaattttgcaacaaaacataatacccctcccccacctttttccccaagtgtgtcttctgctagatgacattatgagccacttcttggaatctttgtgtctgtggcagacttattctgaaatccaaaaataaaaatgtcttagttgcctaaataaatttttctgaatttgacgctaggcaatgtgcaatttcaatgcaggctgcaaaagaatgatttagggatcttgtttaaaggataatttcttgtgccctgtcctataataatatctattgttattaatattgttaatctattataatctaatctattattataatttgttagacatgaatttatcaaaaccatttttcctaaaagtatgtttaaaagaaagttaggtctgtgtggatgtttatggtaattatgtaaaaaaggattccattaaatgcacttttgggaaatgctagttagaatgagttcaaatagatttctttattgcaagacttctcagaaccttcggtatcatacatatatatacacacatacacactttgtgagatttcaagagagtgacatttcacaaatctacttgaacaaaaaacttttagtagagtatctcagtgactaatcttttaaacaccttttaaagagatgctgagttacattcttgaatctgagcacggaaaggttgagcatgggagttgaaagataatctgcttggagctttaaagtcagagtaggtgtgtgaacttgtagcccttccttctgtggaatgatggaaggaaacattgagtactgtatacgtgcagtactcaatccttgactcattctaaaagaccatgaggtgtatgtactgtctacactttacttaggatgaaacaaagcctctgaaaagttgaacaagatgcctgggatttgaactcagattgtcttattcataaaaactcttattttttccattactgcactcagccttggaaatgggatgctactgtttgtcctgtctcctttgcttggtggttgtgtatgttaaatgacacagttagtatgagagttctttaatcaatgtgaagtactgtgctataaaagtatatggtaacaagccaggtacggtggctcaggcatgtaatcccagcactttgggacgccgaagcaggtggatctcttgaggtcaggagttcgaggccagcctggccaacatggtgaaagccagtctctactaaaaatacaaaaagtaggccaggcatggtggctcataatcccagcactttgggaggccgagacaggtggatcacctgaggtcaggagtttgagaccagcctggtcaacatggtgaaaccccgtctctactaaaaatacaaaaattagccgggcatggtggtgggcacctgtaatcccagctactcaggaagctgag

SEQ ID NO: 111971 - DNA, 1043 bp, Homo sapiens
atgcatgggggataaagctgtgagcaagacacatttaatccatatcctcaaggacctttggtctggccatctagttctgtagttgggagacttttcctgtaaaggaccagacagtgaatattttaggctttgcaggccctatggtcttggttgcaaatactgaattctgccattgtgatgcaaaagtagccacagacattatttaaataaatgagtgtggctatgttccaataaaacttcatttacagaaataggcagtggacttgatttggcctgcaggttgtagtttgccgactcttggtctagtttatttgtttcttggcctctgtctctctttcttgctcatattcacagcagcaattttcatagagttccattgatttatttgttacagttatgtaggtaagattgtggaagaactggatcttttacaactgataaaagctaactcttgtattttcttttactcttttatccaggacattttatttccttacatcgaagaaaatgttaaagagtatctgcagacacattgggaagaagaggagtgccagcaggatgtcagtcttttgaggaaacaggttgggacatttctgtcttaaattcccaagtgtcttagaaatgagggtacctggagatttaggacatgctctgagcattttgtaaaataagtgccctggtttgataggggatagaagttgcagtgacttagtgagttgcctgcttaggaattcacagtacataattaaaggctggatcatgtcagtttgttgtttctggagttgctctttggttgtttttttttgttttgttttgttttgttttttttgtttttttttgagatggagtctcacttcgttgcccaggctggagtgtggtggtgtgatcttagctcactgcaacctcgcttactgggttcaggcgattctcctgcctcagcctcccgagtagctgggactacaggcacctgccaccatgcccagctaattttttgtatttttagtggagattgggtttcaccgcattggacaggctggtctaga

SEQ ID NO: 111972 - DNA, 2070 bp, Homo sapiens
aaacaaaccattcacgagaagtctatccccgcgatccagtcacctcccactaggcctcacctccagcactgaggattacatttcaatgtgcaatttgggtggggacacacatccaagccatgtcattctccatatgacagtacttcatcattttgcactccctccttccttactgcaagcccctgctgccccctctgcagtgctcctgggtcctcacactcacactccccttccagactcctcaccccagctcactctggcccagccctcatacctcctttggtctcctgtgctttgttctaccctcttctccccaccagtcatcagtctgtcttttccttccacattgtgtgctatggaactcctgctctgttgtttttcttgttaaaattgcttcagtggcaaagatcttacatggtctgcagagctaactcactggcagttattttctagttctatattggatactgtggaatgctctctgtggatgttttactgttaggaattaggattcaaaatgtagttatgtcctttgggcatggaatatttgggattttaattttctggataactcagggttaatctgaaatacagtgagtccttacttaatgttgtctttaggttcttggaaactaagtgaaatgacacttaaatttcaattttcaattttaaaccaaccataacaaaaccaattttttctccacataaatgttataacaaaatgatgttgaaggaaatgacattacttgagaaggtcatgccacttgaagtcacagtttccaagaacctttcaatgatgttaaatgaggacttactttactttcctcccttacctttttttgttgtcaaaaccttgttgaaacatacatacatagtcccccattattgtatataaatatgtacacatgtatctttagaaattggactgctttgtcacaaggtcattgttctaagtggctactaggatttttgcaagatgtgggagattataggagactgaatgtgaaccaacctcattacttcactagcttctttttgctgaattccaggcataaactaatttatgagattttctttgtttctttctccattagttatagtgcagagaaaattatcagattgagttaaagtcctggtttgttgatcccagtagtgaatcaacaaatcaaatcttaattctatcattatgtgctctctcttctcatatacaacatgcgtctcagtttaaatttcagcttttagcaaaaggaaaggtaatgtaaatttattaatccaggttcttttaggaatcatttgtatcagctccaaagtatatgatgtttcaatttgcagccatactagggctaatgatggagaaagttgttctgctgggtttttgggtctcgttttaaatgactgttttttgaataagcaaaaaacaaacatcatgttgtttctgacttaaaggctgaagaggacgcccacctggatggggctgttcctatccctgcagcatctgggaatggagtggatgatctgcaacagatgatccaggccgtggtagataatgtgtgctggcagatgtccctggatcgaaagaccactgcactcaaacagctgcagggccacatgtggagggcggcattcacagctgggcgcatgaaagcagagtatgtgcttgagtcagcctaaacatttcaccagtcccaaatccaaatatgttttttcaccagtcctctctttccagcgtaagtcacaagactggtaaaacagataaaaatccacactctttttagtctaacaagtgagctttgtttcattttttcaaaacttggctaaaatatttcagctgactagattacccggacctgccagtctggtcttgtgggttgattgaaggacttgtcaaagtctccgtttaaaatagcttcctagaaaatggtgacttccttgaactaagtcatatttgattcttagcacatgagtgacagctccgttgggctgcttgcctggactgttaattacctgctttttgctctatgagacataggaaattttgtgccccaccgtgttgaggttactcagaggatg

SEQ ID NO: 111973 - DNA, 1031 bp, Homo sapiens
aaaaaaagctgggggtggtagcacatgcttgtagtcccaactacctgggaggctgaggtgggaggatcactcgagcccaggaggtagaggttgcagtgagctgagatcatgccactgcactccagcctaggcaacagagcaagaccctgtctcaaaaaaaagtaattccattttctagctaatcataagtttatagctttgagccttcaaactttgttttgattattttgggtgcagatctttctaaaagcatttccatgctttcttaaagcacagtggacataatttaaccttttcttgtcatgaagaacatcaaagattatattatatcattgctgttgtttgcttttttgagttcttcgggaatttaaaaaacactttcccatttcatccttttatctgtagtccctttttactgtcactagtggctgtctgttcaaaactatcctcctttccacatagattgttgcttctaatctgctgtgagcctggaacttgggcagtatgtttattagaactgcaggagtttgtagtctcagggagctgcttctcaggttaccatgtgggcacaaagagagaaacatatggcatctgttttgacaggtttttatctggctagatgaggtgttcctgtattttaacttagtggtcttccctctaggttctttgcagatgtagttccagcagtcaggaagtggagagaggccggaatgaaggtgtacatctattcctcagggagtgtggaggcacagaaactgttattcgggcattctacggagggagatattcttgaggtaggttacctagtttactttgttgttttgacgctatcaaagcataaaataatgaatcttaatggaaaactaattggaactaatagaatgcttttttttttttggttgtttaaaattaggtaagaagaaaataatcacttttaattatattgtatttacagtttcttctatataaggttgttatataaagtttattctgtgtcttgaaaaataaaatcagttaggatgcaaaatagg

SEQ ID NO: 111974 - DNA, 1026 bp, Homo sapiens
gagacatagacgagcccttgggtagaatttcaaaacgttttaactagaaaatgagaatttcttgtaagtaaaataatagcttattcatgaggcaggttagagaaattttttcatcgtaagattaaaggacagtgttcagaatctttcatcaggagtaaaattcaatccagtgagtagtttgagtgcaaatcatctttaagggtaggatgtagggcatgtttattttaaactatttcagatgtaaaatgaacggtagtgaaaaccaggtagattatgaaatgatcttatgtatgttgagctggtagttttcttcttccaaatgtctgttgctataaaatctttatttttactttgtatagcctccataaagttccctattaagtagattttcagaaaatactgaacgaatgaagtaattgtgattgtcatgtatttcagagaaaggcatgaggggcatgcaagtgtatttgtattgccagtctttccccttctctttgttcagcttgttgatggtcactttgataccaagattggacacaaagtagagagtgaaagttaccgaaagattgcagacagcattgggtgctcaaccaacaacattttgtttctgacagatgttactcgaggtgagtaatagacttcttatattatatactccaggatatgaactgagcctggcactacaaatacattgcctctttaaagaaactttatatggggatccttgaaaaataaaacagttttacggttttatataaagaaacagtgtctggttcaagttcatgtttgaattaaaaaaaaaaaacacagcagtgaaggcaggcttggtggctcatgcctgtaatcccagcacttctgtgggctcaggcaggaggattgcttgaacccaggagttcgacactagcctgggcaacaatgtaagacctctgtctctacagaaaaattcagaaagttagttgggtatgatggctcactcctgtggtcccagctgcatgggaggctgaggcaggggcatcaggtgagccc

SEQ ID NO: 111975 - DNA, 1458 bp, Homo sapiens
tatcttctttgtgtttttatttttttgatacagggtctcactctgtcacccaggctggagtgcagtagtgcgatctcggcttgctgcagccttgacctcctgggcttaagcaatcctcccacctcagcactcttgagtagctgggactacaggcacacgccaccacgcccggctaatttttgtattgttttgtagagatagagtttcaccatgttgcccaggctggtctcgaactcttggactcaagtctggcgttcaagtgaactcctgggtccaccgtgcccagccccatatcattttaattcgtgttaccaacagcttgtcctttgggaaacagctcagttctcggtatgggctgatgggaggaagtggaggaaaggtgtaggacagaacatggctccatccttctgcattcataagtacttaataaagctcagaagtgtaggatacactgccattctcttctgtcaagtacagttacgtattttttaaaattttatcatggaaaaattaaaacatacataaaagagataataatatagtcaaccccagggtgcccatcttttagcttcaacagtcatcaaatcagggccaaattcatttcttccatccccacatccccctgctgactttgctgcaaatctcagacatcattttttggtgtttctgacacacacacatcctttgatttttcacagaggccagtgctgctgaggaagcagatgtgcacgtagctgtggtggtgagaccaggcaacgcaggattaacagatgatgagaagacttactacagcctcatcacatccttcagtgaactatacctgccttcctcaacctagagaagggttgttaaggcagaccgccctgttccccagagttgtccctgtagtgtctaggtttattctaatggtaaaagtaacttacttaaaaaacatatgtacacatatgtatgcaagtatgtatatatgtgtatgctcagattaacttccataggtacataagtgaaagaagtctcagttcagtgaacacaaaacttatttaaagatgctttatatgtagaaattgtttcaaatcatactctaacccttagtgagggcaaagtgtagttggtagaagaaattgctaaatacctatctaatgtgctatgtttatcaaatcgtgtactaaaatggaaagctagttttgagaaattattcagaagccttgttattttaaaaatgaaatatttcaaagactgaatattttcaaagaaaatgaataattcattgcccttgtgatttagaagattataacagctgtatttcatatttgcctccttatatatatcaaagaccaaggtatttccttctgcttcaaaagaacaaaattgggaaagaaaactcacttgagtcttgatcaaacaagtgtcttttacttaagaagaaacttggtaatcattgtggcacccacagcaagcagt

SEQ ID NO: 111976 - DNA, 1029 bp, Homo sapiens
tttttagcccctttttccagcggcagtgttaaaaagggattgttttcagggctttttttattcccacgagtacaaagttgagtataatatattccaaaagtttgttaacctaccacctgtgcccagatggcaaagtgatattatcctcaacctaatatttaagaataacgtggagtttttactaaaacacttggagtaactgacagaagtaaaatttctaccttacaaattcaacccaaatttattccttaaatatttattaagcatttaccttgcatcccagatctgctatgaggggacaaagttcctctctactcccattgtgcatacatttttcgagaagagaaacaatggtgactaagacaagaaaaaattagatactagtaagcgctctgcagagaacacagggtagaataactttacaggaggggtgatgagaaggtgacatctaatctaaatgacatggaagacatgtaggaaactaggagaactggtgttccatgcagatggaacagcatagcacagatctagggcaaagcttggcctttttcaggaattgagagcccagtggctggataccatcagagaagtgggctgaagccagatgatagtgctttgtactccagtaagaagtttgaattgtattctaagtatggtaaaaagcccctggaggactttgagcagaagataacctgagtggtttacatatttaaggaattctgtatggaatggagaatggtttataagtgggcatgactgcatgcaggaaggtgagttaagtatatcagggttgagtgctgcaggcaaaaatcacaaggagttaggtgtatacaacatcagtggaagaactgggagaagagtcagggcaactaccactggactgtggagttagaggacacctcacagtggttagctcaggaagcctgctaccattgccactgtagctcatgcccacgacgctggccagactctggaatgccaggccccattgctgcaacctctccaaacagaacacttccatctcttctc

SEQ ID NO: 111977 - DNA, 1031 bp, Homo sapiens
aaaactacaggttttatagttttaagagatgacaggattataaaaagcaggtaagaattagtaaatttgggcccttcctttgagatattatgattaagaatctttaatctcctttttgtgcataggagaattttttaaaggtctgaagctctcttaagtggagagagaaattagcatttcagtttggagaggaaatcgggctgcttttctgtaagaaaatacctggcttatacatgtataattcataaataacttatttatgtaaatcattttgttgtggttgtacttgataactgttgcttggttcaagaaactttctagaaatgctaaatggtttatatatttttataatgtttgtttcaaattccacttaaatatctgggtttaatgtttatggaggatctcatgggaagttatcccttaatttaattctttctcttggttcacttttgtttcagctttcaccaacaatcaccagtggtttacacaacattgcaaggagcattgaaactcgaaactactcagaaggattgaccatgcatacccacatagttagcaccagcaacttcagtgagacctctgctttcatgccagttctcaaagttgttctcacccaggccaataagctgggtgtctaaaaggacagcttctcttccactcaatattgccatttttccaaagaaacatgttaaaaaaaaaaattataagacatggactagtcctcattagcatgtttgcatagcaaccagtcaagagcatttacactatttctgctgatatactcaccttagaactgctcagaaccctggtgctttatttttgttttaatcttttgttgccagtgatgattttcctattctgcaaatagtgtatttcctggattacacatagtatggtttcctgaagtattctgataaatgtgttttttaaaacctcaatatactttttagaaaaggagcatctggttatgcataaagcagagctaaaactaaatttctttcatgtcctccctacttcctcagtgtcaatca

SEQ ID NO: 111978 - DNA, 1443 bp, Homo sapiens
cagtggtttgtagtttctccttgaagaggttcttcacatcccttgtaagttgtattcctaggtattttattctcttagtagcaattgtgaatgggagttcactcataaatctgtatattcttacagaaaagaccatatgaggtggttacattatttgctgggcctattctcatttatatgcacagtatgaccccagaaattacagtttctgcagggtacagaccactggggcctcctaaatccagcagtgaaaaatgataccactgtgctaagataggcacgtttatccttatcaaatgcaggttgaagtctgtaggacatgtagaaatcaccccatttctccagttccctgctacttcaagagggtgttggaccagcagcattcgtatcatctgggagatggctgcaaagacagtatctaaggttctatcactatacctaatgaataagaatctgcggtttaacaagatccatagctgatttggattcacagctttgaacaataccaaaatagacacattaggtgaatatgctaggaagtgctgtcccctcagtgatatttctgagcttcattagttaaatagtagaaaaacaatccatgcaaacaattagggaaacattgttattttaaatatgaagggataaaattttctcttaaaaaagaacagtaagaaaaaagtgatgtttaagagttaattggatctaacaacttaaataaattccctctgtcaaaaaaccagttactttcttaattagaagacatttcacatgacttgattaaaaagtgagttttgttctcttattaaattaatttacactttctggggattaatgaagggagaagaaacaattataaaatgagtaaagtttagaatgtcttcagtaaacactgttaagtaatttttacattttgtctacagaaaaccagtctatccaagaccaggcacctatgttggaaggtgaattggttgtaaaatatacctttggaaatctttgaataattgaatacaattaatgaatggacattaacaataatgcatgtgaacttcaaagatgatgatatcccaaatctgatcaggatcattttttttatttggcttcttaattgaatcagattttacaactgattgaatttacgtgattacacaagtagcttggttataaaggctgtctgttttatatagacataaagaaaacaactatgccaagactgtcttgagctacgggtaagactagaaagtgattgcagagatttgaatgattaatctatgtagaaccagaagtttaagaatttgttaatcagaaagcagcatatgagttaatattttgtggttaactcttgactgttttgagccatatctgattttctgtctcctagtaaacttttaagaaatgaattctgtttttatttttttatttttattttttacttttttgagacgg

SEQ ID NO: 111979 - DNA, 1028 bp, Homo sapiens
cagagtaccaaaacttacacacatacacactgtatgcataatccttaactacacaaataagattccagtaatacactacagatacatcaatagtttgatattttagagaggaatgctaattcatttgtagagttccaaaaattaccttttaaaacttgggtgactgaagatagtatcctttctcggtagttgggtaagaatcagaattcttgagtgaaagaggtggcgtgggttggagtaaatccccacttaaaaagtggtgcagggaagtagggaagggaattaacatttattgagctcatattggacatgttctggcacttgttatatgttttcttatttaagtcttacaaccttgagaagtagtaataattatttctttaaaaattacagatgaaaaaactgagtttcttaggagttatgtttcaggattgcacagtgatagtctccaagttgagatataaaccaggtccctatcttcaaagcccatgttcattcttctataccaggtagtttagtcctggtgtaaatgatagaaaactatcatcattgcaatttcaaaaatcatccagcaacactgtttgaggcatttgttactttataatctaaattaaatgtttgcatagatattctttttctccttaagcagaagtgcctgtggccttgagattagtctttgtttatatacaaagtaacagaatgttttaacctggctgagaaacagagtgactaacaggaagaggaagccagacaacacttttcagtgttcagcatgcagtatgcttgtctgctttgttacctcttgcacgttagtagtgtgctatattttaatctactgacaactgtatcttatagtagtctgctgtattttaatctactgacaactttatcttattttctttttggatttcctaaaagtttttgcttaggttatttaaataattataaatgaggctgggcacggtagctcacacttgtaatcctgccactttgggaggccgaggcaggtggatcacctgaggtcagga

SEQ ID NO: 111980 - DNA, 1041 bp, Homo sapiens
cactgcacttcagcctagcgacagagtgagactccactccgtctcggaaaaacaaacaaacaaacaaacaaaaaaacaatggcctctagggcaagcaacatggtgtagtatagaaaacactggcctggaaatcaggtgacttggaatcaccattgagttgtacggtcccttcacttctctgggccttggttttgtcagcaataaagggtggggattagactggaagatctttaatattcagctttaatactctgattgtatgagttttaagcttcatattggactgatatgacttttgtggctgtaatgaaatccagaaaagagagcttataccactgtgtttgtagattagtagtagcttgaatactattaatgcttccaaaaaaaaaatcacttttttactcaattacttttttttttcctggaatgtcttttttccttctctacttacaaagcctcactttacccacttataattgacacttgaatggcattgttcttgtgctttgatttaggttttcatattgatttttctcctgccttcctctccctgtttcattgtgattgtgtggtttttgttgttgttgttttgttttgtttttttgggaattccagctaccttgaaagcagttgcctgactaatgtatgttatcttgccaatcttacctttggctttgcatctggctattaataccttttggggtttttttcttcttttaacgttttcattttttattttctgtgattggtatttctttgttcaattcaggttagaattgcccctactgtcactacctggagtaacaaaactcctactgcccttcccagccatccacctgcagcctctccctctgacacacaggtatatccttcattattcctctttgagcagaattctgctcacctaaatatacagttatatgttctctacttaccttcctcaagctctttcacccccactccccatccatctgcctgctcattgcattttaatgcttttaggatgcaagaagcagtttttagcacaattaatttatttcc

SEQ ID NO: 111981 - DNA, 1694 bp, Homo sapiens
ggggtttcaccgtgttagccaggatggtctcgatctcctgacctcatgatctgcctgcctcggcctcccaaagtgctgggattgcaggcgtgaacctctgcgcctggccttagttatagtttttaaagtagttttgtaatttatgagcattaggtaaccacaagaaaacatcaaaagagtagtaataagtgatattggtcttgcatagtaaccatgaggtaggtataactcagatctctgcctcagttaaattacaagttgcactgtatgtcatggacctttggtgccagtcttgagtagtagaaagcacaatgtcaaatctgtgtgtcagggtctattgtataatacccagcattatgaacaaaaagggatatcttgatgaataatctgattaagaaaattaacatgctgtcatatacctgggtgaactctcaacagtctgctgtttttccaatcctttttagccaaatatcatgcagcttcgtgacagactttgtagagcacaaggagagcctgtagcaggacatgaatcacctaaaattccgtacgagaaacagcagctccccaagggcaggcctggaccagttgctggccaccaccagatgccaagagttcaaactcaacaatattatccccatgtgagtgatatggtccagatgaagtaggaacacttttgtatttctcttcaaattggtggttttcatttgttcagcaggagaccttctctgatatggtaaaactagacaatatattgttataatagatctattttctagaatcttgaagttgtatttgtgatctactttttgaaatcatctctctcatttagtcaaacagattatattttaaatatgaattggttttaagttctctagggagatttgttctatttctctgtcactcaaagttcacttaaacatgtacatctactattaaaatttctatttgattcatctaacaagctgtaaagtagcaggaaaaatcttggtgatttggttgttttataaaatatttttagaagatagtattttttgagtattcttaatcattagtataggtttaggcttagtgtattctgtatttgcacaatatgaagtgtatccagaatacagacttttttttttttttggacaatttagatattagagaaaaatgaatgaccaaaggtttgtgaaattttagattatgtggaatgtgaaaagaactaataattttatttaaattaccaaatgtttggtgtcataaaatgtggcttcttactattttttactgtttcacatggaaacttccatatttccagaccagcagataaccttcatgtacttaaatgaagaatattttttccataggtaataaatggtcttgattgatagcaaagttaacaggtactctgcctattttaaaatagaacaaattgctgataggattgatggagtctttttacattttgttatagcaaaagtaaatataaaatcttgaaaaacaaaaaaaattaatgcccttttgtctgttatgtttttgtttggtactactaaatcaggatagattacatttgaatgtaactgttaactctctagaatactctctattttgacttttttcattcatttgacaaatatttttttaagaccctgccatgagtgcctggcattgctctggctgctgtgggggtatagttatgaacaaaacagagt

SEQ ID NO: 111982 - DNA, 1082 bp, Homo sapiens
ggtcacctcatagtagtactatttttataggatagatggtgtgatgttgtattagtccattttcatactgcaatgaagaaatacccaagactgggtagtttataaagaaaaagaggtttaatgaactcacagttccacatgactggggaggcctcacagtcatggctcaaggtgaaggaggagcaaaggcacgtcttacatggtggcaggcaagagagcatgtgcaggggaactgccctttataaaaccatcagatcactgtcaagagaacagcactggaaaaacctgacccatgattcaattacctcccactgggtttctcccatgacacatggggattatgggagctagaattcaagatgagatttgggtggggacacaaccaaaccatatcagatattttcactcatagttcctcccatacaggctagaacacagtttctacctttagacatctgcctatcattttcactttgagtatttgcctgttttagctcactagacaagtatctggtagcttaaggatatttaggaaaaggtggtaaccttcctatcctaccctatccataagtaagaggccttcttcctccttactactttttcacttacctaaatagtggctgtacttttctaggagggatgataacaggtactatatttttagtgggttttagaaatcttagtaactcttgatcttttcctgcttcctctcatacatggtcttgatatttctgtttgttactcatttttttcatttaggatctgattgagaaagttgtcatcctgcgaaaagctgtgcaactcactcaagccatggacactagtactgtaggagttctcttggctgcgaagatgagtcagtatgccaatttgttggcagctcagggcagtattgctgcagccttggcttttcttcctgacaacaccaaccaggtaattagaattgaccatttttgtaatgtttgagtaaggtgagtccagtagataacacttagcattagatgtaaacatattagtaggtagaatgttttggagcagttgaatttctgtaacctgactgcaggtaaatgttattgacaatt

SEQ ID NO: 111983 - DNA, 1418 bp, Homo sapiens
ccattaatcattttttctgattctctctctcctcccaccctccaataggccccagtgtgtgttgttcccctccatgtgttcacatgttctcatcatttagctcctatttgtaagtgagaacatgcggtatttggttttctgttcctgtgttattttgctaaggataatggcttccagctccatccatgtccctgcaaaggacacgatctcattcttttttgtggttacttggtgttatttctacatcataaaaaaagtaatttttattgaaattagttttcataaaagttgtaccagtattgagtcccattagcctcatctcatctcagtctctcctcggttatcttttagccacagtggctgccttgtagttcctccctcactcattgcatgttcctttctcactggaactttgcatctgtcgttcccttggcctggaaggctttttccttcttgatgaagttaattcctgcttgtccttcagatcacgtgtcaaaagtctacatgcttgggcagtttttcctgatccatctgaccaggtcacacctttctattaaaggttctgatagcaccttatatttttccttctcagcactttatgaaatatgttgtcagttgtttttgttgttgctgttgtttcttgaggaacaataataccattattatgtcatttgattcaaaattatacttcattttgctgctgcatttggcatgaaatacttgacacaattaattagtcagaattaatttttattgctatgttaaagacttttaattcttcctttgttttcgtttctcaagctcatcactgcagtggtgatgaagaactggaaagagattgttgagtcttgtgatcttaaaaattggagagaggctttagctgcagtattgacttatgcaaagccggatgaattttcagccctttgtggtaagagatgtgctttatatttaactgcatttacatacgtggcagggtatattgtaaataaacttaaatgacaaattttattagaaactttttaaaatctacaaatcacaaaaaagaaaaattctcatttcagtgcctttctcagatttattaaatacgtcttcatacctactcttttttttttttttttaaatctactagtgattttggtttcagacagacaagagttggaatcttgcctctgctacttagtagctgtatgatctaggaagaactactttctaagcctcagtttattcatctgtgaaatagaccataagtaactctcacttaataaatattagctatgataaaattaataataacattagaatagaaattaccattataggccatgactaaactggtggccaaggaataaatatttgcaagaaaagcttaaggctactagtataaaaacaaatagccatttgctgccttgaaataatta

SEQ ID NO: 111984 - DNA, 1310 bp, Homo sapiens
atacatatttgaattttgtaaagcaggaaaaacagaattaatgactactcaaatacttaagataaaatttttttttttttttttggccaggaaaaaaaaaatggtaggaaagaatgggaaagtgggccgggtgtgttggctcatgcctgtaatcccagcactttgggaggccgaggcaggtggatcacctgaggtcaggagttcaagaccagcctgaccaacatggtgaaaccctgtctctactaaaaatacaaaaattagctgggcgtggtggcacatgcctgtaatcccagctacttgggcggctaaggcaggagaattgcttgaactgggaggcggaggttgcagtgagccgggatcgtgccactgaactccagcctgggcgacagagtgagactcggtctcaaaaaaaaaaaaaaaaaaaaaaaaaagaatgggaaagtgttagcagtaatagttctttgcttttcctctaatggtatttctcaaataaatttactcactgttgcttcttatgattaaactagctctgaatgttgttggttgggtcttttgtcttcctggttcactaatagccttttaatactacattcttcaccttcccctgtaattgttttgtgtaccaaaggctcttaaagactctgaccaagtagcacagagtgatggggaggagagccctgctgctgaagagcagctcttgggagaggtacttatttttttttcatattatattggacaaatttgtgatatttgtgtatctcacattaaaataaggaaaattttcttgactacttatggcaaaataaagttgaagtaaattgttttctttgagatgtttaggataggaatctatctacctatactgacagaagtatcatctccagactctagttctccaaccttgtttctggattatatggtttaaaactaacagttgatgtgagattaacataatttggtcagatgactctcaggatgtcaaactgaaaagagattttattcaaacatcctcactgcattgcattgcatgtaaagttaatgtttttcttggcctataattttgggccaactatcagtggctaataggcctctgaattagtactgaacatggagttgaagtaaaggatatttcactaaacttattgtcatgattttcaataaatgtgtccttagttgataatttttgtaaataattgagaagagtccttgaacacagagttacatcattaatttttccttttaattttctgggtgtttttttttttttaaccactaatgaacaaatctgtaatttacttttcttgctttct

SEQ ID NO: 111985 - DNA, 1048 bp, Homo sapiens
gtgaaatagtctgttgggcatttgttttcacttttttgctgtcatacactgcactacattgaacatccatgtatttgtaatgatcagatagcatatacgttactaagttgcttctgaaaatattgcatttattttatttttatttctttttttgtttttctttttttattttatgttgagatagagtctcactcactctgttgcccaggctgaagtgcagtggctcaatctcagctcactgcagcctccacctcccaggttcaagtgattctcctacctcagcctcctgagtagttggcattacaggtgtgagccaatgcgcccggcgctgaaactcttgcatttaattgtatttctgttaacaatgtgtgaatctacaaaacctaggcagaaatagttgagatttggttttctcaagattaaaaatttccttgttcctttatgttttttatagggggattttggcaattgcttggagcatggcagatcctgaattgttactgagctgtggaaaagatgctaagattctctgctccaatccaaacacaggagaggtatgggcaggaaatgtgtctcaaccttgtagcccttatagtatgttacttctggctacataagaaattttctgtgtggattctttagtggattactatgtgaagagtatgtggacgtgtgtgtgcagtgtttatttggcagcaattttatcaggaacataatctaaactcagctttttaaccagaaaaatcagtaattcaaatagtatattttaaactagtaaccatcccctcctcatttccaataatgtgtttattacctagactcagaaatactttgatttatttcacatgtggtttatgggaatcagtatcttcgatgtaggattgttcaaggtttgcatcttttgcctgctttaccgttcctgaggatcctctttcacttctggaaatcagtagatacagttttccaatctctcttctgaatgataaagcaagaatataaattatagcttttatatttttaccttttttatgtgaaggtagatgattgc

SEQ ID NO: 111986 - DNA, 1003 bp, Homo sapiens
tttgccctgcctagttttctgtcatagtcaccaacatctactttgtggtccataatctaccttgcagcagttgcaaagtaaagaaacagtacttggtttatagcagaaattcaataaaattcttgttgaatgagatattatgaaacaagataatacacttgaagtggtatgtacctgcattttaagtcatataattttatgtgttgagaatgtagagatgtaggactataaagcaaatttgtggcataaatggatcagatttttaagtaatacacttttcaaaatgaaggatccaattttacagttaaatttgattataatagagaaacaagcagtttttattaactgtttcttccttgtagccgccagaagatatcagctgcattgcatggaacagacaagttcagcatattttagcatcagccagtcccagtggccgggccactgtatgggatcttagaaaaaatgagccaatcatcaaagtcagtgaccatagtaacagagtaagtatgtgattgacttgtgatgaacatgttgtatttctgctgtaggtattcctatattgtttgtcagagttgacaacaaatcaaatttctgtgaagtcaaatcctgtttttttattaatcagtcatgttagaaggaatgttttgttttttttcctctaagggaaaatcataaaattcccaataaatatgttggatattattaatgatgaagagagattggttaatcaaggaacttattccatgatatactggtggttttgctttgctagctgttttaaaacattgcagcaactttttttttttttttcttgagacggagtctcgctttgtcgcccaggctggagtacagtggcgtgatctcggctcactgcaacctctgcctcctgggttcaagcacttctcctgccccagccttccgagtagctgagattacaggcatgcaccatcaagcccggctaatttttgtatttttggtagagatggggtttcaccatgtt

SEQ ID NO: 111987 - DNA, 1998 bp, Homo sapiens
gcctcctgagtagctgggactacaggtgcccgccaccacgcccggctaattttttgtatttttagtagagatggggtctcaccatgttagccaggatggtctcaatctcctgacctcgtgatccgcccgccttggcctcccaaagtgctgggattacaggcatgagccacccggcctcaagtttgtcttctttctaatgaatatatccaacaaatgacacctaaaccgatttgatttatttgcagttgggcattactaatgttgtagtggtttgttcagtatgtttctatttaaaatatctgtgttctgtgttagacattcaagtcattcaaggctgtttctgtataaaatattccctttagcaggatgaagttaaaggaagtagatcgtacagccatgcaggcatggagccctgcccagaatcaccccatttacctagcaacaggtaagttcaaaggagagaagatagtatgagttacctaatttcttctcttctgcacctagcttattcagtttaagctttatcttctctagaaagcctctctctccctggcaagttactgacattctatcagccaagtttagtgttcttcctctgtgttcccatagcattttgatcatgatgtgttacatctaaaatattttccttcacaggaattgtattttatctttattcctccagtattaagcacaatagatggcatgtaaaaaaaacagttaatatcagtttgaatgaatgaagagcaattttgatgttagcatttttatataaaaagaaatagttatatcatatatgtctataagcagatatagtaaatcacgggacttttttttttttgagatggagtcttgctctttcgcccagcctggaatgcagtggcgtgatctctgctcactgcaagctccacctccctggttccttccattctcctgcctcagcctcccaagtagctgggactacaggcgtccaccaccatgcctggctaattttttgtatttttagtagagatgggatttcaccatgttagccaggatggtcttgatctcctgacctcatgatccacccatctcggcctcccaaagtgctgggattacaggcatgagccaccgtgcccagcccccatcacgggaccatttttacagagatttttaaatatatacaggcttaaaaaattatttacactacccactcttataaacatcctctcctagccctgtgccagaatctcattgctatagtaatttaagcatctgctcaatggcatatgtgcagcattcatgagcaagagaatggaaaacatgcttttaacttctgttttgtatggtttctctgatcttttatttttgtgtgtatagttaccataaatatattttctataggaacatctgctcagcaattggatgcaacatttagtacgaatgcttcccttgagatatttgaattagacctctctgatccatccttggatatgaaatcttgtgccacattctcctcttctcacaggtatgaggttcagctttaaattcatgtgattatttaattatatattgttcttgattcctaatttgtctataattatgccattattagaaactacaaggaataccatcaagaacatgaaatattttgtgaaaaagcatgtgagtgaatttttatggaagtaaaagtagtgtttatgtgttctattgacttttttttttcttttttttttttgagacagaatcttacttcatagctcaggctggagtgcagtggcacgatctcggctcactgcaacctccaccttccaggctcaagcaattcttgtgcctcagcctcccgagtagctgggattacaggtgcacaccaccttgcccagctaattttgtgtctttagtagcgacagggttttgccatgttggccaggctggttttgaactcttgacctcaagcaatccacccaccttagcctcccaaagtgctgagattataggcatgaggaatcacgcttggccagt

SEQ ID NO: 111988 - DNA, 1055 bp, Homo sapiens
ataatgaaaatatacatcatcctaattatcagaaaaatggtaattgcacaaaaaagaaaacagacaatgaaagactttttaaaaattattacccaaagatattaaaccaaagtaaaatatggtaaaactaagaccaaccatgtctgtcatgtcaatacattttaaatgtccttagctaacctactgtgaaaagattttcaaattggatcaccagtaaaatctgttggttttttgtttgttattttgtttgtaatgatgacaaagtagttctgaagggcaaaagtatacatgtaaaggcaaacaagaggtggaattcagaccaaaagtcattatttgagacaaagaaggatattcataaagctaaagtgtatatttgacagtgaatttgaacattatggatatgcaccaaataactattaaataacaaagtaattttcataaagcaaaagtttcaggagataccatgagaaattgacataaatatattagcagtaagagacttaattcactgtttcggtccaaggcagatcaagtggacaaaaaagtaaggatataggagatctaaacaaatcaataaagaggacttagttaatatatattgagctctaggccctgaaaacagagagcaccccttctttctaggtcccaagaacaattcacaaaaattcactatataggctctattgaaaggaaaggaggaattataggcataggggattttaggacaagggaactactctgtgtgatactataatgacagatacatgttgttatacatttgtcaaaacccatagaatatacaacacctagagtgagccctcatataaattgtggagtttcagtgataatgatgtgttcatgttagtttatggatcgaaacaaatagacctttatgatgtgcgatgttggtggtgagaaaggttatgtggttgggaaatgtgtagcaattttttgtactttgtggctcaacttttctaggaacgtaaaactctaaaagataaagcatatagctttttttatttttaatcaaaatcctatgaaaggtgaaaagaaat

SEQ ID NO: 111989 - DNA, 1246 bp, Homo sapiens
tgtctcatcgtggtgtttgccttttcttaaggactcaaaagtttgcagatacaggcattcacttgccattttcttaaggtagagttgaaagtactgctgccagttcatcatctgaaatgagggctgttttctttcctgtttaattggattgcaactatttgcctttcctaaagatgaaatagtgtgcttcctacattattctgacaacattcctttaattgttaatttcagatgaatttctgaaaactgcttttatcagaacagatttacttaaatgaaggcaatagccgcaaggggtcactgctctagatatttacttctgcataggaaataagtaatcctttatagatggaatttttttttcttagttgtatttttgtatctttacatttgtttataacttatctatactttttttgttgttgtgattattttactgttgacatggaagttctcaatctgatcatttggttatatcattgcttcttctagtaacttcatatccagtgattaaaccttttcactgctgttcacataatgaaccgttgtgattattgaatacttaaatgaggatatgtaagctgtattaaagatagtgttatttgcaaaggcattgactattgcacaaaaaattttaaaagaaaatatctcttttcaggaattgtactctcagagatgttgagaaaagatacatgggtcttggaagataattactcaaaatatgcagggaaggtagtatatctttctattttaaatgtattaagtattcctggaactatagcagtgagttggaaatggaggattgtccaagtaaaaaacatttattaaggctttaatgaaatctacctattttatggtatataatctcattaattgtccacttggaaagaataataacagatatttatttattggccagttactatgggccacaaattatgctgagctttttttaatttcatttcattttattttattttttgagatggggtctcactctgtcacccaggctggagtgcagtggcgcaatctcagcttattgcaacctctgtcttccaggcccaagcaatcttcccacctcagcttcctaagtagctgggaccacatgcatgtaccactacacctggctaatttttttttgtatatttggtagagacagggttttaccatgttgcccaggctgctaagctttttatatacagtatatagaaagagttggttttcttaaacaatatttatttctcat

SEQ ID NO: 111990 - DNA, 1026 bp, Homo sapiens
acgccgacttttaattcaaggaacccttttctgaaacactttgccacaatgaaggaaataaggtaaggttcttggggctcctcagtagtaataggggcaggggacaaggggcaattaagtggttttggttgggaatgaggcattatgaatagctttcaggagatagagcttagaacaatgtcttagttataagctcttatgtttgaggaagagatttcaatttgcttagagaaggaaacgggccagtgggtttttgtctctgagaaggagatccttagcatacagaaaacagagaagggtttgcaacttttccgtttctttgtatagcacacaaaaataattccaaatatccaggcctaacaagattgcttctttttcccctttgtgtttactttgtccagattacagccgaagatacatattaaggtattacttattcacaccagttttccattataatatgcttgtatcttctctgaatggaattaatagcttttggttatggttccttaaaagtcacatggcctaaggatagatggtcaaggaactttggaaaaattggtccctgggggatgtgcagggcaaatactttttggctgtaaggtgtgtgcagagagtaagaactggatttaaatactgtaagttggttgggctgttagagccttttcctgctcaaccaattaagacccgagtgaggctgaataaaaataacattgtttttagctatctttaaggaaaaaattagttgccttatatttttgtaacagttttactcagatataattctcataccacacaactaattggtttaaagtgtacaattcagtgggttttagtatatgcacagaattgtggaacagtcacaatcaatattagaacattttcatcactccagaaagaaacctcattcttactagcagcacctccaaatattcccccaccccgctcagcaaacactaatttagtttccgtgtgcctctgcctgctctgtacacttcatgtaagtggaattatgaactaatatat

SEQ ID NO: 111991 - DNA, 1027 bp, Homo sapiens
cacccggagacccattggcaggttcctggattcgcctcaattttggtcctgcctctctgcttcgcattttcaggcttggcctcacaagaaggacgatggcgccagattgtgccagaatgggtgaaaacagaaggaaaataaaccggttgcagcaaaacccactattccgcctccaacgcggagggaggagcggtcaaatgcacgtcttcaggctcaggcccttccgattggctgctgggacacaacgtggcctgtcattggctacggcaccggcgcagggccttcggagaggaagtgtggaagtcccgcgcctctaaagcccgcctttcgtgacaaataaaggtcgtagccgcagagtcaacgggcggagctaaagtggtcgtgattcatgctgtcgcgggaaccccgaaggtggggccccacgtaacaagaagatgacccgaagttgctccgcagtgggctgcagcacccgtgacaccgtgctcagccgggagcgcggcctctccttccaccagtgcgtatgggagcagcctcgaagccttcgaactccctgcggggcccggcgggccgtggcgtggcgtggggcggggccgggccgcactgtgggtcgcgccgcgtgtgtgacgcgacgtgacgtgcgcagcgtcggggcgtgggagcggaattggggcactgtgagaattgagattctctctcttcccgcccagtgtttacctctgaatagccggttctcgcaccgcctaccgctttaaggagagttacgcgaaaggagtcctccattaattggatggtcttattatttgaagtgaggaggccgaaagggaaggcagtttaggacaacggttgaagtgtgtgtgtggcgtcttcctgagcacgagtacagatcagttttctcctgtactgcctgacattgcaagttcttaagtgctgttagccgagctgtgcaaggccggtccgattctggctggatttgatcatggcagggaagtttcatttggctcgacagtggggaagaatttcagatcag

SEQ ID NO: 111992 - DNA, 1031 bp, Homo sapiens
tgaagcagattgaacaagttaaaactgtgtccagtaacactgcttagtcttacagtagtaaattcaaagacagtacctgttggctagtttgctcctactgacctactgctttctatattttggaaaactcataaatgctgcaagccataccaaaagtataaggagattttgtgatatgcagaatttgaaattttaataagtcagaattgcaaacttgtccactgtgcagaatgcgcaatttataaaatatggtaaattgaacttcaaaaaatgttgatcaagtattcttaattaaaatgttaatatattttaggtctctcatttgaatggatatccatcgttacttagcaaatgcctgaatttactactggtattagcaaaacttgaacatttataatcctgtacagatgaccagtgtttccttgataaagttttcatatcagttctctctgaatgatgttttaaaggattctgtgcaacatttttagctctgatatttaagaaacagattattatatcctttagcaacttgacaaagtgattgatggcacacacttctccatcaaagagatgcttattcacatctacaaaaagattaatatgcccagaaagctcacataatattttctgttgaagatacaattccctttgtttagaaactagttcaaaaattgccattcttgaatgggttcttacaactcgctcacaaatatttatgacccgacacagactttctgaaggaaaatgcaaaccattcttctttttaacaaataatagtgacccaattttagaggctttgagatccgatgcatacagtgcagtgatgcagtcctcacaagttaaaagagctgataacttgtttgcaacataaccagcataacagatgagatttcgcctatgatctgacaggtctagtaatgcctcacttagtgaacaatgagaccagtcttgacaaataccctcttcgtgaaagacagtctttgtaacgctgacaccatactgacgttgaactgtccaaagcgccaagtctt

SEQ ID NO: 111993 - DNA, 4420 bp, Homo sapiens
ttttctacaaacagtatcagtgactatggtaaagtgctttatttttcattttgccgaagagatagtgctgtcaattcccagtattattcattcattcagcaactattcatgtagcgtctctatgtcatgcactattctaggcactggagcaacagcagtaaataagaattgaacttacagagcgtacattcatgatttaggaggattttagttaaagaaattctagtcttcgtgtagactattatcttttagttaaccacataaccttgcctaggtaataagtaacgtgttttatgttaaatttcctgaacaatattcttacaatatgtgaataaaaccaaatttaactttttaaagccctttttaggatgtgcttgtgctcactgtgtaaattgtgatgctcatcctgctggtgaattgtgaaagtgtcagtagagatttccagatgaaagaatgttatccacttttgttgttatttaacaccaccatcatctttctctttcaaaaatcatttcagattgccatttacatttgtaactaaggaagtagctgaagccacatgtaattgcctccttgcccaggcagagcaggcagacaagaagggaaaatcaaaggcagcagcggaacggatgatacttgaggaattcggacgatgtttgatgagtgtcatcaactctgcaggaaaggcaaaaagtgacccttgtgccatgaattgctaactcttgcacaaaagactgataaatggaactgtacagaaaatttaaggtgcagggacacttgattttctggaagaaaaacaattactgtattttaattcagtccttgttttaaaagacctgaaattataatactgaaggagaagaaattttaaatgaggaaattagtacattttaaatcttagttaaatctgcttatgccccttctaaattgaatttttctttattatatagattttttaatttgcttgggtttcttaagaattagatgttctctttctgatacctttgacaaaaaatgtttataaattcatataatttataatgtatggtgttgtatgactttgttaatagaaaagccaaagcagcagtggttagcacccattctttgggacttgatctagaatatctgcagacagaatgttacataaacaaattcttatgaaacacattcaaatgacattttgtatttagaaaaggactatcttttaaagaaaaagcagccttttagggccgattctggaataatatcctgttgtcactttgggaatgtcagaaggggaaacaatccccaggcacactaaaaattttttaaagttatttaaaaaaacatataaaatattaaaggacagtaaatctcagaggatgggcaatgtgtttctataataaggaaaggctaacagatgctctgggctgtctccattttctttcaaagaggtggtatgtatttgaagtaataaattgtcaaagtgattactgggtactattaaaatgataggtggatataaatggaagtaaacattatgtagtgataatatagaacctcacatagtaatcaagtataaaatttggcatgggtggagaaacaaagaatagggaagctgcaaaagatgaatttagagaagttttcatctatacaatcaattatttttacagacttttttttttttttttttgagacggagtctcgctgtgtagcccaggctggagtgcaatggtgagatctcagctcactgcaacgcctctgcctcccaggttcaagcgattctcctgcctcagcctcccgtgtagctgggactacaggtgcatgccaccatgcccggctcattttttgtatttttagtagagacggggtttcaccgtgttagccaggatggtctcgatctcctgacctcgtgattcgcccgcctcggcctcccaaagtgctgggattacaggcataagccgccgtgccaggccctttttatagacttttgaactaagaggtttcaaaccaaatcgcaactcttacttgatttacagaaatgggcctcctaacaaaattttcaaaattgtggtgggatttctttttataagggaagtttaatatggcattattttcagccagtgatttggaaggtctgttttcctataattactaaaataacctaaatcattttcagtattcaaaaactctatgaatttaagagcctgttgtgacaggactcttgattttatgacaagaaaaaaccatgttggaattcaggcattttgttaggtaccttaatcatcagtaattagtatatgattatttcatttcctacaaggactctatagttgtatgtattaagtgtgtatatatgttcatatgaacatgcaagatataggcaatagaaattaagtaatccaaaagaggattccgttattcactaaagtatcttccttttaaatttggatttataaaatcatagtgcagtaactttaaatgtagatagttcaaacattcttagcacctcaatctagtatgtttaattaaaatttgtataaatgtaaattagtgtaagagggtaaaataataatcaagttatttttcaaaagattgcaataagtttttggtctaaacttaaactttgttcattttgtacatactctgtgttaattctaattgcacctttgtgatgtgtatttatatacagtgtgcagaaaatgttcgtgaaattttgattacaattgtagattatgtatgatggcattgcttacgaatgttttgcttgtaaaaaaatttcaaggtgcaatcaaatgctactagtttttctgattttcaaaaatctatctatctaaaatattaagccttttccttcctgtgtagtacttactaaataactttttgtattcaggcatttgcatcaaattgctgaacaagatgaatagccacattaattcaatgattttaaaagactatttggggagggttgggtatataattttttagctctatttacatcccaaagtagaaagattaaatttatatttactagagctattcaaagaatacacttttctatattgtaaaaacaggacagcaaagtaaatcatacagaaaataaacatttatactattctgtaaaaaaggttttgcattttttctttagtataataacaccactttattaaccatttaatatgcaaaaaaccttttaaattatctgaagtaaatttgacattacttctgaaaacacacaactaaaaaattctatcattttgctcagttattactaacataaattgctttgaaatgagaatatgtcttctctttttttccccactgtttcttttaagagcagaaactcagccgggcatggtggctcacgcctgtaattccagcactttgggaggtcaaggcgggtgaatcacttgagtccaggagttctagaccagcccaggctacatggtgaaaccctgtctctactaaaaatataaaaaaattcactgcgtgtggtggcgcacacctgcagtcctcgctactttgaaggcctgagcctgcagaggttgaggctgtagtgagtcaaaattacaccactgcactccagcctggcaatcagagtgagaccttgtctcaaaaacaaaaatacctagaaaatcaatctactctgtcttttaatgtgaaatgttcttatgatagctatctttcttagtttcctttttttctgaagcactaaacacaacctgtaggtcttatctctggggtctgggaaacagaaccttaatgttacaggtacaaaagcaaacagagtgattagttccccattttctggtagtgaacaactgacattttttcaatcttatgtaaaatgtgaataaaaataattttagaaaagttatctatttttattgttctgtaacacaaatagttaagaaaatgaatacttgttatgtaaatgaagcttcacagcaggacctccggccataactttgatcatgttgtatctcttaagcattttatataggaattctggtgtggctacccaaagcagaagggaaggcaatcaactaaaaatccctttctattggagttattttcatcatgtaaattacttcaggcttttcttgttagggcttcttgaatgcacattttgtcattatctgtataccaaaggtgagcttttttttttaatccatgtgattttatgagttgaaagctataaggttttttttaattaaaaatttccttctaaatggcaaattttgtgacagcatttaagacactcagtttctattcaaaagcaataagaaaacaagtatgtttagggttatgtttattataaggtcactgggactttataaaactgtcatctatcatactggcatatgaaatctggtcatagtattataaaaagaatacatcatgaccaagtagggtttatcctgggaataaaagttgatcc

SEQ ID NO: 111994 - DNA, 1062 bp, Homo sapiens
gaagtccctcccgaactccctcttcagattaaaaatagcataatagaataataaaaatggcatctgtgaaatccctttaatgtgaaattgtatacatatgcataaatgggaggtcatctatatgttaatgatgatttgattgaggtggctggattctggatgacctttatttttgatattttaggatatcattcatgtttatgaaaaacatgtgtaactcatatctgaagaaaatctatattcatagtgggggaaaactgacatggaaggacacagccacaaacgttgtacagccactgtcagacttaagaatacctaacctagctagccacatgtgtagttactgtttgtcagccagagatacttccatctaatcttattatcagttgaccaggtaatgctattagctgttgatttgattgtggcatctacttatagtaatgtattttggttttgatttggaaacttttcttatgtaaatcttttaggcaaaaataatgtgttcctcaatatgcaaatgtattggctgtaagaattttgaagaaagcccggaaaggaagacattgatgcatttggcagatgcagctgaagtaagggtacagcaacaaacagcagccaagacgaagttatcctctcaaatttcagacttgcttactaggccaacaccagctttaaatagtggaggcggaaagtaagtcagtattttaatctttttatagtacttcccaaatacttttggtaaagtttcttttcagggggcaaagttgagtttatatttttggttgttgcaaacctgatttttgtgttttctttccatctttagttacttgtaaaggaatttaaaggtaacagaaaccactgtcagattattgtgcagttcgaaaatgcacagtaatgatttagtccactgtgcttaatttctgtctactaagatgaggtaattatgtaatttgaggaaccccaaagaaaagcagatgttcatatgtctcgctgaacgtgtaattatgtttttgcattttcctaccttctcttgccttttccatttcttggagcacttttccc

SEQ ID NO: 111995 - DNA, 1050 bp, Homo sapiens
aactctttaactgggtagctgagtagatttctgagatgctttaccacatatgtagtatgtgtacaatatatatacaatgtatgcataatcagataattagttttccttaataatgactttttaccttatactgacttttacctttcaggtattgtgattgctttgcaaatggtgaattttgcaacaactgcaattgtactaattgttacaacaatttggaacatgaaaatgaaaggcaaaaagcaataaaggtgattattttttatttcatttaactgacagaaatatccagtttcatcagttttataaaactcaattgtcttgcaaagaaacgttatcaattccttttgcagtgtttaaatttcatctactgtgatttaactctaactgatatttgatctgttttgctaggcatgccttgacagaaatccagaagcctttaagcctaagatagggaaaggaaaggagggagaatctgatcgacgtcatagcaaagggtgtaattgcaaacgatcaggatgtcttaaaaactactgtgaatgctatgaggtgagatgctgggtgcggaaaataatatcttttaaaaacagttttagaaaggacctactacaaaaatttacttgaaaattgggaaatcaccttgctattgcaatttgaaaatatgcacagttggtgcaaaggcccttgttttaggaaggccttcgagcctctgtagcagggcttcggaggaataccttgggtttattattacagcttggggtcttactgggtgatttaccataacttcttggtcattatgctcagaaagtatgcagatcagaacaccaatatattgattttcaataaaaataatatcaaagtggattggaaactctccagcagtgattctcacctgaggtgcagttctacttactgttcttcacaggcttcttagaaatatatggccgggtgcggtggctcacacctgtaatcccagcactttgggaggcagaggcgggcagatcacttgaggtcaggagttcgagacctgcctggtcaacatggtgaaac

SEQ ID NO: 111996 - DNA, 1728 bp, Homo sapiens
tttttgtcataagcatttctaatgtttagaagttggtgtaaaatagaaactcaactattgtgcatgtaacttctcattctctgtaatttgtagtgtgataaatgatcagtatagtacctattttatttgtaagtaggcacattgcatttttctagcccaaacaagttattacagtactttgagagcattcatctagcatttcctatcattccgacatacttaactcttctgtgaaatactttctttatatttgtactatgtagtactgtaaaatgttcacattattttcacctatagtattggtttgagtctttaaaagagctctgtgaagtatgtgtttgtgtgatattctccattgtgtttttcttatcttaatggatgaatttgtatttcttactgatcatcatacctgacagtattgtccatttttggaaatatgatctaaaattaattttctttacatgtagctacagcagtcttcatatgtatcaatagcaagcaactctacctttactggaacatctggtatccagacccaggcacggcttccattcaatgggtgagtattttgaaaataggtacataagttgttagatcagcttaaatgcaacagtaaatatatatattccaaactacatcctcttttatttttttccccttaaagccatgtgagcatgcctctaaaatacttgttgaaatatttcaaacagaaaaattacagaaatagtcaattcccaaatactctattcagattcaccaatttcactacactagttttattattctctttcattctgagtatgtttccaaaatgatgatgctaactattttttatctttatttttcaagacaaggtcttgctctgttgcccaggctggagtgcagtgctgtgatctcagctcactgcaacctcccaggctcaagcaatcctcctgcctcagcctcctgagtagctggaactctatgcacatgccaccatgctctcctaatttttaaatttttttgtagagatgcggtctcactatattgcccaggctaatctccacctcctgggctcaagtgatcctcctggctcagtctcccagagtgctgggattccaggcttaagccactgcacctgcccaactatttttaaaattatgtgaggtcctcattttttgttgatgtttatttgtttatctattaattactggcttttgcaatatcagcttagaagccgtgcttaattacccggaatcagtccacatcccacttccatttcctcctccacacactccttttcctcactgctttttataattgaatcccaagagttttgaggcaatctcaacttttgttttcttagaagggacagtgtttgtggagtgttctttagcagctattgataacttcttttaaaaaaattattccatacttgtctctacctctttcatgttacaacttgcctttgaacctagtgtaaatagaacaacgtagcaaactttttattttagatggacacatttaacattggttaaagctttatttctggagggatttatagattggagacttctctaattttaaattagttttaggtctaattttttaaattttaaattagttgtagcaactaaattaattttagttactattaattgattaaatgtatatctttttttctatctgtacagcataatcccatcagagtcggccagtcggccccgaaagccctgtaattgtacaaaa

SEQ ID NO: 111997 - DNA, 1044 bp, Homo sapiens
ctttcctgaatttcatcccagtatttctccatgtcaagtttcatcctccctttaaaatagctcatccttgagtttttagttctaataactgtcattttcctggtcacttgaaagctctgcagtgacttacattttcttcgcttatacctacagttcctaccattcagtggttggtaagtcatggtcctttcacctacaccaggtctcttgcatctgctctctcttttttattcccactgctgtcactccagatcactccagatcagaccctcatttttttgcactcttctgacttgtctcttgcaactccattctgttttatgcactgctgccaaatacaattaatttttcttttatttcaatataatttctgtatttaaaaatccctagaaacttctcattgcgtactgaattaaaaatacagattaaatacagagtcctaccctaacattcaaggtcctccataaatgtctgcaatctgcctttttgcctgtatttgtctgcgttaatcccaggtattagccagactggtttgttcaccaacatttgtaaatatgctttgcagcttcccaagattaagcttccacttctcatgcttccgtctttgtgtgaaatgcccttctccagtctatgtgccctccatgcggccagcctattgattggggcccatctcaatactgtgtcctccgtgtgctttttctatatttccatcctctgccaacgatatatatatatatatatatatatatcctcttaactcccacagctcttcatgtatcttctttaataatatttatcttatttggacacgtgcctaatctgctgaactagaatataatctccctgacagcagaggtctagtgctttagttttcctgaaacaatggctacaatgccatttatatagtagcagcagttgtaacaacgatgatggcagctaacatttagtgagcatttactatttgtagggcagtgttctgatcaattttcaagaattaacatatacttaacccttatatgccataaggtagatattccccatatt

SEQ ID NO: 111998 - DNA, 1030 bp, Homo sapiens
atcttttctctatattgaatatggggcttaattctgggaattttaaaataattcttttcttataaattttacctgatattaacaaagttgtgtaagtacttgcaaattaagtaataatttcttcatagcaagtcatctgaaatggactaccaaggaagttaactactagagatggaaggtagaactcattaattttggttttatttctgtatttattaccattcttttcatttctctttgaacaggttgttcctttcagcagcttttgatgcaatacaggagcatactttacaacttgagcaatggttataaattaaaaatagtaggaaagttacatcccagattaatgacagccatgttgtattgtttaataggcagtgaaatcaactgtgcagaccatcactgttggaggagtgagcacatcacagtttaagacaattattcctctggcaactgctcccaatgtccagcagattcaagtgcctggaagcaagtttcattatgtccgacttgttactgccacatcagccagtagctcaacccagccagttagtcagaatcccagtacaaacactcagcctcttcagcaaggttagtaaccattttttaaaaacagtaattcatgcttttaacatgattaaagaacatttgtccatttcttgctgaaatcctgatgaagagtggcatttcaactgagtttgagccagtaactggtgcagaaggcagtgaaatagaatgatagttgcgcataactgtagtattctttctgctagatgttggtacacagtgtggtattataccagataatagtaattatttgttaattcgtggttagccattttattgctggttttaaaacctgccatttatgccagtgggatacatttagatggaaccgtattatgtattttatttgctaaactataaagccccttgatagggtttgggtcagttgaaatgacaaataggcaaggtgtaagtaagaaagaacttaatgtcactttcagcttttacttattttgaatctata

SEQ ID NO: 111999 - DNA, 1040 bp, Homo sapiens
tgtttctattgatagaggccaaaaggaaagctgaagcactcacccttccctacccaccagcactcaacagtctcactgctatctgccttgagtctgctgagactcctctcattatttatctttgttgatactgggtagcctcaaccaccccgactgagatcatctttcatctcccgcatctaatctccttaaagctcttgctatcttctgaccccttttccacccatgcctctcttgaagtccttccactgtgccttttctggagttcataatcaaaataataattccctaaattcacaaccttttcattgaatgttccttttatctccttgctgtaatggatacctgggtctccctgaggaccctgcttcacctgcagacctattaagtgatagctctttttctccttcagctcttatgcctccaggcctggaagcctaggtgtttcccatgattattctcattacaatttcagactgttttcactccctcctccagctttgaatctaatgttactaggtttgttgttgggaaatcaagcatggctagtgttttctcaatttactttatattgtaattgtctcttattacaggacagatttattctattatatttattttctaaagtaatcctcggttttcttcaatatttattagatatgcaactaagcattaaactaataaaaatgtgattctgcttgttttactttattcttgattagattttagcaatgctgttatcttttactttaatgtgacttttgtaatcttattcttagactcttagtattattttttacatggcccttttcaatttctctcagaaatacaagaaatacagctttcttcaaaatttttctttaaaaaaaatttattttttcttgaagatggagtattttttcttgaagacggactctcacctctgttgcccatgctggagtgcagtggcgcgatcttggctcactgcaacctctgcctcccgggttcaagtgattctcctgcctcagcttccccagtagctatgccaccatgcccggcta

SEQ ID NO: 112000 - DNA, 1005 bp, Homo sapiens
ttgagactgttagggtatagatagcaggcaacggtggaagatggaggccatcttgaaaaatgaagaaaagaggtgacctttgaagccagaggcagtaacagaggtataattatatgtaataacagatatataaacactttcccatgtttcctgtgcatagtatataagagtagtacataactagcagtctggaacaatataactccttactagctcctgaatctatccaacacagtgccaaaaattacttgtatatattatttgatgacatattttactaccttatttgtaagttttttttcatgtttatcttaagctgctgattctataaacttgttaaagtaatctttgatgctttgttttacttaataattttgttccaggatactttagaattcatagtgcaaaaaaatcatagttccttaatggaaccaaaagttattattttcagcaccactaaagaaacataaccacaagggcaagatgagattgtttatttgaataattaatgtgcttctggttgtactgtttatatttttttcttactgataagtattcatatactcatgattgtgaaaaatcagtttaaaatggggaaatactttaagcccataattgttatagctaaggttatttattgctaatatggctttctaagaatattaatacttctacctctagagattgttaatattatagatacaatagatacaattttgactgactttagggttttaagtctgtaaacatacttgagaaatttgtatttctctaaatttcattagctttctagagtataattatagatttatttgagtatgttatagttttgcaagtcggccgtttttaaatacaataatgggtatgtttttttttaagtgatttgtattttatatacagttggtttttgtcagtaatgtgctctgagtataaaaaagtaatatattgtaggtgtaagatgtgttatttagtttaatttataatttgagcacaaagagctaatat

SEQ ID NO: 112001 - DNA, 1748 bp, Homo sapiens
cagttttcaagtctgtcaatgagaggaaaaaaatctgggtagaaataagatcagatacatcaaagattacaaattttattagagggcgttggaaaggagtttcatgtgattatgtgacttagtgttgcctgagtgcaagatacttgtggattgagacgagagtaagaatgtttgcttctagttttgtgttcccatatgacttatattatagattcttgcaggttgaggatgtgttaacatgatttaacccagataagcttcaggaatattcttcattcaattatatatcaatttaaaaattgtcattttgccatttgcattttttttgaatttttttcttacatcttttgaaacctagtaacttgttcatttttcaacttttattacagtgcctgatcaactttctagcgggagaacgatcatggaggtggtgccagctgaggtgaatagtttgcttccagaggaaataatggacactggtataactttagtggatgatgatagtattgaggctgttattgtttcatccccaattcccatggagacagaactggaagaaattgtcaacataaattctactggtgactctacagccacgcccatttccacggaaccaatcacagtgtacagtaaccacactaaccaagttgcagtgaataccacaattactaaagcagattctaataccacagtgaaaccagcttttccaagtggccttcaaaaacttggtgctcagactcctgtgactatatcagccaatcagattattttaaacaaagtatcacagacatctgatcttaaacttggcaatcagacccttaaaccagatggacagaagttaattttaacaactttgggcaagtctggttcaccaattgttttagcactaccccatagccaactaccccaggctcagaaagttacaactcaggcccagtcaggagatgctaagttaccaccgcagcaaattaaagtagttaccattggagggaggccagaggtgaaacctgtcattggtgtctcagcattgaccccaggaagtcaactgattaatactacaactcagccctctgtgttacagacccaacagttaaaaacagtacaggtaaaagaaaaaagggggcttactaattaaaatgcatgtttaaaaaaatttaactgattcatagttgtgtttatagggttactaaatacatagttgttactgaattcttttgaatgttgttttatgtaattgtgtgtgtgtgtttttaagtttgatatgtctaatgcttatgaaaatttttaccagataacttagaaagcaaacttaattttggttaaattccaaattagtatatttatagccttttactaattttaaaatgcattttattcttagtggtagtttgattacaaggatgttttgctggtataaatatgccagacttgctgctgggctatcaaaaaaatcatgtagacaacatttttttttttcagttcacagatggccaaaggctaggagaactttgttgctctgagaaaccctcagagccagtaatagtgcgtgtcagccagcgtgtgccttttatttggagtttactgttcattgccattattcatgtttgtactatggaaaagacagtgacatgtgatggaagataacatacaggctttagagttgtaccaactgggcttgagttgcctctatcttatcctaccagttatggaaaactttcgtaggttacttatcttctctgagtttttga

SEQ ID NO: 112002 - DNA, 1056 bp, Homo sapiens
caccaccatatttggggattttaacaccctaaaaatttattaaggatatcaaagatctgaataactctatcaaccagcttttgctaactgacataaatagaatactaccctcagcaactattaaaaaaaatgttcttggctgggcaaggtggctcatgcctgtaatcccagcacttcgggaggccaaggagggcggattgcctaaggtcaggagttcgagaccagtctggccaacatggtgaaaccctgtctctactaaaaatacaaaaaaattaactgggcgtggtgccatgcacctgtaatcccagctacttgggaggctgaggcaggggaattgcttgaaccggggaggtggaggttgcagtgagcccagattgcgccactgcactccagcatgggtgacagggcaagactctgtctcaaaaaaaaaaaaattcttttaaaatgcacaaggaggattcaccaagagagaccgtatactgagtcaaaaaataagtctctaatttcaaatgatgagaatgttaaagagtattatgttctctgacaatactataattaaattagtaatcaataataatagcatagctagaaaatctccaagtgcttgggaattaaatggcacacttctttattatccatgtgtcaggtaaaatcacaagcaatattagaaaacatttgaagtgaatgataataaaaacgtattgaaattaatggaatacatctaaagagctttggggaaaagttttcatattaaaggcttactgtaaaaaagaagaaagttttaaaatcaatcaatcatttaaaccaggagttgacagactttttgtgtaaagctccaggtagcaaatattggaggctttgtaagtcatgtaagtctgtcatattcccccttgccccaaccatttaaaaatgtaaatatcaggccaggcgtagtggctcatgcctgtaatcccagcactttgggatgctgaggcaggtggatcagttgagatcagaagttcaagaccagcctgaccaacatggtgcaaccccatctctgctaaaaatacaaaagta

SEQ ID NO: 112003 - DNA, 1033 bp, Homo sapiens
acgcacactgcgcgacccaacaagccacccgtggcggccccaggtttctgggaaccggttttgctgctgtgtcattttgtgccagtccctcctctccctactgcccgccgccgcgttcttcctatgcccctttgtacaggctcttgttcgtgcgtgtccgttttcctcgcgaagcccaccagccaaatgtcataatgttcccgaggtgcacgggggaagggagcgggccgggacttagcttggccagcaacggtaaacaaccaagcagagtgcggatggacggggccgtcagtggggaaatgaagtttaaagatgaagtaattgagaacactttatactctcagcatctggtagtctgcatataaaaacagcaattggggtgggtggtggacagcccttgttgaaggctgaatctaccgacttttatatggagttgccattgaaacaaggtagggaaatgaaatgactttttcaacttcaacttcaaccttactcttcctacactaacttagacagtagagtggccctgttcgcagccttgaaattcagtttgcccagagcttatgttgtggttgaatgatacagaattcagcttttggatggttaactctttctaaaattgacaaaggcagccagtttcctttttttttttttttaatgctgatctcttcagaagccttgcagcttatgttttgttattttttaaatgattaagaattacctctgttctcttttggttacttattcaactgactgatgacaagagctggtaactcttacctacctagtaggtagctctaggatcttgttctgaagcaagctgtttatttttactgtacagaacaaatatatcagcagcagatggtttttttttaatttgatgacttagatcctaaaaaaacatttggcaaataattttagctaagagttatattttcaatattttagaaatcgatcattcatgaatgtttctacaattagttcaatcatttcaaatctagttgcgctttgacgtcttaaaccgatgacagat

SEQ ID NO: 112004 - DNA, 2054 bp, Homo sapiens
agactcactactggagttcatcagccaatccaaagtccaagcgtgagagccagagcctgtaggagagacctgggcaggcctcagacctgaggagtggagctccgcatcactcaaccctgggggcggagctagcccaggctcccacacccgacgctctggcccacacagacgctactctgtagcatctcaggttccctctggctgcactctggaggaccacactcgttttctttttggctgccagaggcccccgcatccaccgctgagctgggagaaagatggcggcagccgtgcgacaggatttggcccagctcatgaattcgagcggctctcataaagatctggctggcaagtgagtatttcccaggaacgcgggagtacagaggtggggaaagaaagccacagccttaatctccttaggttggccacggctcttgggcgtgaagctaggagccggcctgacgtccaagggggcgggcctgaggtcggctggggaggcaaatgttgggagaagcagaaagctggaggggaccttgtgcaggggccttcgaggctatagacttgaaatgattgtcagcttgttcagttcttgatagaatctttctggtcccttaggattttggaacagcggtctgagagacgactgctaccctggccttagtagccttccctggtacctcttcccatcgctggccggcctcacaccgaatctggcctctctttggaccttcctcctctttttttttgattcagagaaatgtatattctggggccttgatgctgcgtttttcggggagatggcttcttggggctggctgaggttgaggcggtatggccgctgtcatgtcgtccagaccattcagactgtcttctgtgggtccttgtgtttcgggtattttctctgccaccaactctgatggcacataggcggaatgtgctcatatcgtgggtcaggatgtctacagtagtgatgtttgcaggaatctgaattttgtcgaaatttatatagaatgcttaggttcactccaagttaaaatgtgtgacgtgcctgttctgcaagcagttgtcaacagtattaagcataggtaggtagacgtatattgttcattttctctttgtagatgtcacagcatttctcttttgtaatgaacatgctttctgtttaaagtatgcctctctaggccgggtgcagtggctcacgcctgtaatcccagcactttgagaggctgagatcacttgaggcctgagagatctgagagggaggatcacttgagggcaggagttctagaccagcctgggcaacatagtgagacccccccccccgccgccacccgtctccgtaaataaataagtaaataaagtatgcctctcaagttgatcttaatgtttacatcctgacagctgaaatcactttgatgtatattaatgggatacacctgttctaacctggtcattgaaattctgactgttttaagtaggctaggctgccttttctctggtggcaaacgtaatctacttttatcagtgggaaattcagccgtatattttgggcttaactactttgtgctgcattttcccactcaggaaaatgaagataataataggacttattcttgtctgacattatctgaggacaagatgagtatgtgtgtgcatatatacttaccacacttatatcacgtagaacagtacctgacatatagaaagtgcggtaagattgttgttgttactattaagctgtcagtaaatatatattcacttattgtatgggttggaaataagttaaatatgtcttcatggctcaatcctttctgcttgtaatttttatatggatgaaagtaaaatcagcttatatttttccccatgcttcctttactttttattttgttaaagaagaataagtgcattagttatcaaaagaaatagagctttgcaagtatttgcagaattctgaaacttaagtatttacttcttcaggtctgaattggagataaacaatagtacttaaagcgtgcttcagttatctgttgctttgtaacaaaccaaaaacttaa

SEQ ID NO: 112005 - DNA, 1057 bp, Homo sapiens
acatacattacgtctgtaagaggaaaagattcaggtcacctcaaataatgtttttgtgtgtctatgtattgcacagttgaaggaaatatagcttatcttttaaggcatttgaaaggaaattgactttgtagtttaaattcaaaaataaaaccttcaagaaaaagtgacaccttagattcagtaacagaattatagattcattctttcttgtgatgagcttgaaaacttaaaaaattctggtatactatactgaaaactagatgaagtggtaccttatataattatagatttaatatctcttgtgatagactagaaacttaaaaaaaaatctgtggtatactataaagaaaaccacaaactatagtactatgaaagaaaccaaggtatgtagaaatgaataaatacacatcaaagtttgcattagaaaatatagtaccctcagaacattattttcatttggtattgttgtaggtatcgtcagatcctggaaaaagccattcagttatctggagcagaacaactagaagctttgaaagcttttgtggaagcaagtaagtgaaatggaaatttcatgcttgccttgtattactgagctaggactttaaagttctctcaagccttgttttgtatcaaattatcaatattaaatatgcattgagattgattgattttagaatttaaactgtttacaacttgattaattttcagtgaattatcttcagaattacaatcctaattaaagttttgtatgtttattgttataatagctgataagggacaatatagcataatagtaaagagaatagtttggattcaaatcctggtatgctattttatgagctgtgtgatcttgggtcaattatttaacctctctgtgcctccttttcctctttaaaatgtactctgtagtacatctaatgtacctaaaatgtactctatagtacattactgtactacagggtagtacagtactgtactttgagaagtgtctgcttatgtcccttgtcaatgttttaatggggttgttttcttaatgttcaacatcactaatcatcag

SEQ ID NO: 112006 - DNA, 1116 bp, Homo sapiens
aaaagcagctaagatataatgtgattaatgataataaaaattcaataaaactttttagtttttgtgtaatgcagtaaaaagtttgattcccggccgggggcagtggctcacgcctgtaatcccagcactttgggaggccgaggcgggtggatcatgaggtcaggagatcgaaaccatcctggctaacacgatgaaaccccgtctctactaaaaaatacaaaaaattagctgggcgtggtggctgccgcctgtagtcccagctacttgggaggctgaggcaggagaatggcgtgaacccgggagggggagtttgcagtgagccaatattgcaccactgcactccagcctgggcgacagagcaagactccatctcaaaaaaaaagtttgattcccttacggtaccagaatatatatcaggaaaaaacaacatatcttctattattcctaaaattttcttgacaaaatgttgagtcattatgtgtttttctgttacatcctagacagtacaatgtagattataaactggagacttacttgaagattgctaggctatatctggaggatgatgatccagtccaggcagaggcttacataaatcgagcatcgttgcttcagaatgaatcaaccaatgaacaattacagatacattataaggtaacagatgagttgatttggaattacttttgtattggagaattgtaacatactaagatgttccaggacatctgatagatgctcttaaatattagaaattgtttctctgttttgttttgttttgtttaactcttgctttttaatttgtcccctaattgaaatattttccctctgttaggtatgctatgcacgtgttcttgattatagaagaaaattcattgaagctgcacaaaggtacaatgagctctcttacaagacaatagtccacgaaagtgaaagactagaggccttaaaacatgctttgcactgtacgatcttagcatcagcaggtaaacacgtaataatttatacttaaatgaacagttatctttgcttaataactttaggttggttactgttggaaaatttagcaaggaactattcttcaaaaggatgtcttcataatacagttatggtaaatgt

SEQ ID NO: 112007 - DNA, 1028 bp, Homo sapiens
acacttccgttctgttaccagtgattttgctgtttaaaatggcacccagccatagtgctgaagcgctgtctggggggtgttcttaagtgccctatggagaaaatatgtgtgttagatagcttcatttaagtatgatttatagtgttggctgtgagttcaatgttaatgaatcaacaatatgtattaaataggatgtctctaaacagaaacacacataaaacaaggttacagattaattcattgacaaaaatgttgtgaccagatgctcacaggaacctagctttgtattcccataggagcagcagtttagtgtttgataattcagcgtcggcagtgactgcagaccataattaccatgaataatgaatactggctgtatatttagtagacaaaaatgaggtcataagataggtttttttttcctgaagaaacattgtgaaaataacattgtgaaatttgatgctcatttatttctcttagggcagcagcgttctcggatgctagctactctttttaaggatgaaaggtgccagcaacttgctgcctatgggatcctagagaaaatgtatctagataggatcatcagaggaaatcaacttcaagaatttgctgccatgctgatgcctcaccaaaaagcaactacagctgatggtaatgatcctgtcttatgtgtatatggtagtcaatgtttaggtacagactagtgaaaatcatgttaaattagaagtatcttttaataataattctacataacacttcctcataaaaaaagaggaattgtttttatttaaaattttttttttaatttataaaattttttttgagacagagtcttgctctgtcacccaggctggagtgcagtggcacaatggcgtgatctcggctcactgcaaactctacctcctggcttcataccattctcctgcctcagcctcccgagtagctgggactacaggcgcccgccaccacgcctggctaattttttgtacttttagtagagatggggtttcaccgtgttagccaggatg

SEQ ID NO: 112008 - DNA, 1078 bp, Homo sapiens
gacatccacagacctgaggattgttggaataaatttatctccaaccgaacactgggactaatagtttttttagggattgtccttgggaatttgtggaaagaaaagaagacagacaaaacaaagaagggtatagagaataaaatagaaaattaatgaatgaaatttatctaggaatttttaaaacattttttacaaaatataattagatttgaatacaaaatctgatacaatatgttaaagaattaagaacctgaagatgaagatttagagcatatttacctggattttacttatttgctagcaaaattcccccttgtcacagaaaccagggactcttcaggatttgagatggccttgagtattttagttgatacattcttctgcccattataattctcacctgaagttatggggattgcacgggttttggcactttagaaaaagcctgatgtgggtcttacataaatgaatgtctgtataagaaaatggactcttttttttagggaaaaataaaagcaactatgggaagttgggccttactgttctttattgtgacctttagtcactgccaaaaactgtaatttaggaaaccaattctgtttttttatgttttaggagaatttaaataaccaaatagaagtatttagctattatagccacatgtaccactgtttaccaaccctgacttttatttgggagatttggtctctgtgtgcagtcacagtgaccagaacagacaagtgggcagtcaccagagactaccttgattttctgtctatatcttttttatcttatcccattatagtttataggatagtgatatttaaatgtttactgttttttcctttacctgccctcaccttcacaatgttctcaacacagtaaccagagtaattctcttaaaacctgagtaaggtcatgtcattcctctccccagaaccctccaggatctccctaggtcactcagtacaaaacgaaagtcctaccacctgccaggccctccatgacttggcttcatgtctgacttctcacactcacacctgtagccccactggcctcactcttccttaaacaggct

SEQ ID NO: 112009 - DNA, 1024 bp, Homo sapiens
tttgtttacagtcctcagagatgatgccattgtggaatagatcagtgttcgtatgtatattcatgtttcagtagctgataggggaggcagagtggtaacagaaagaacatgggtttttgagtcagagagatgtaagttcagatcccagcatcttctgttattggtagtgccgtgcaccatattaggtgggataaatcttctctttaaacctcctatttacttaattaggggatattattctttttattagctctgttactttagttgttaattaacctctctgagcttgttttgttttttgtaaaatggagctaataagtaccaccgagagttgaaagggtttaaggaaggaacccacagaaagcagcacacacagagtctgatacccaggagcactgaacacactccgatgccactccttccctttaggattctaaagtacatacagactttccccctttttgtgttttgctaattgtaggcttgacatttaattggggagcgttacttggatggtctgctatcaagggttcctgtgatccatctgtttgcctgcctctttatttttctggagttatgtggacactaatatatgatactatttatgcccatcaggtaaagaaattatcttttcttaactttggtttagttgttgctgtttttaaagaaccaaattaaggagaaagcatttttttctaaaatttgttgttgttttttaagaactttaagaaccaaattaaggaggaagaattttttttttctaaaaagaaagtcattcacagttccatggctccaacaaaattttttttatgtttatgtgtgtttaccaaaattcaactcatttattttatttacaagcaataaagtagtatttactatgtgccaggcactgttttaagtactttacagacttaatcccccaacagtctttgaggaaagtacttacattatcctcatttaacagaagaggaaatatgtgaagaagtatttgtccatgtcacacagttagtgggtggcagaactg

SEQ ID NO: 112010 - DNA, 1045 bp, Homo sapiens
aatatgtatatatatattatatataaaatatatattatatataatatatattttatatattatataaaaatatatattatatataatatatattctatataaaaatatatatgaatgaggcttctggcatgtatcacttcaagataattcttgaacatgttaatagtagttcttcactttaaaaaatttgtagcttagtataagccttccagaaaatgaaaaatagtcccataaattagtaacagtttatgaagcatgggtctgtttagataactgaacatttgagattaaatatttgaaggcaaactgcaaaattctgaattgctttatcttatttggtagacagactctcctctaaacgtttacatcccacactcttgactagagttaaaactaattacatagattttgacttctgcttccaggaagatggaatagatgtattttccctattctttccactaagtatgtctaaaacacctggagattatacataaaacaaacataagaggactgtggagaaaaggtggcagactggctagggacctcaggacccaaagaatttcctagattttgtttttcttcatatatcccagacttggaactgaagaagccagaaatctggaaatgtcattgggcacagataggaaaaaaataaaaaataattaaaaaaaaaaaagcctacttggcaggggccagtggaaaccaggttgggaacgtgagcttgtaaccccagctggtagcaattaggcagcatctcccacccccttcttttgccagagcagtgtcaaaaaaagtcaactgaaataaaaggtttaaataagattcatagtctcatgacataatacttaaatgtccagatttcagttaagaatcatttgtcataccaaaaactaggaaaatctcaacttgagtgaaaaaaagacaatcagcagatgaacaacactgagatagcagagatgttaggatttcttagaaagatttttaaagcagcaatcataaatatgcttcagtgagcaattacaaacattcttgaaacaaatga

SEQ ID NO: 112011 - DNA, 1031 bp, Homo sapiens
tgacttaaatttgtaccttttttgtctttttatttttgcttaggaacctggcttctgtatttaccatgtacctggagcattggtttggcagctgaaccaggttgttttccagattggtacatgctctccctctttggcactggagctattctgatgcgtggagcaggctgtactattaatgacatgtgggaccaggactatgataaaaaggtaatttcatcctgaaaaggaatagagaggctcttctcaattctgcagaataacatagtggtatcacttttgaatgccatataaagcaacaagatcattcagtgaccacagaaatccagcatggaaaatgccaggatcagttgaatagctggtattgcaaagtgcagagtacaatatttcctttctcaacacaagagtggccccaggggcaaggtgtgtactttattattataaagtgaattgagaatttggaagactgagggtgagggagttaaaggttaggagtgaaagtgaaaaatccatcctgaaccttcaagtgtccaaagatctgtcatcccttcctttaagatgtattttagagccctaactattcttacgtaaatcaagtgaatcaaggcagcacttgttagtgtttcctataattgtttcttttaaaaacataactttacccattttttctccttagaaaaataatacatgcttgttctgaaaaatgtagataatatagaattgcaaccaatgaaaagtgcaagttgtccttatctcctcctcttatctcctagagaaaacttcggttaagaacttgatgcattatttttcactggattttttttttgtacctgttctaatgcatgtgtataattatttccttgttcttcaacagacagttattttctcaaggaaaggggccatcttatttgcctttttatcttagcaactatgccataattagtacaagatcattaaatgcttgagtaaataatcaattgaaatttgattttaaaagaaacccacattgaattataaaaagtgaataatct

SEQ ID NO: 112012 - DNA, 1024 bp, Homo sapiens
agaaaattgtacttacagattgtgtatgtttggaagataccagcctgcatggtttggttctaaataaggtgatcattacaggatttttcagaaaactaaatagtactatgttagaattcgctcaacaaatgtattttgaacccctaccatatgccagaaacaataattgacaggagtagaattccaggtttgataattctttatttaaattcttattttgtgggataattatgtgttcgttgttttactttgttgaagttatatcttgttaccttcattgatcaatagtaggttttcgttgtttttgagaaggcaatacagcttctttcaaatgggctaaactaccttattccagaaagtgtcagcaggtggcactctttccaccaaattggaagtgtaattttttgttttaccacgtttatgggtgattatgttgtcttgaagatcatctgtttttgatctgtccatcacccctcagaacttgctcattttatttcatctcccatagagtttttcccttttctacaaaaacatttctttttgcaatctacttgtctcttgtctttgctacctctgcgtctttcttcacagaaaagtatggggaatgaaagtgtcatatggaagacaaaaaaaaaaaaacattgctaggaatcagtagggacaaaagaacaggtgaaactgaagtgtatggagagatttagggagtacagagtgacagcattggacttaggacacagactgcagccagactgtctgggttggaataccaccttagcctttttttacctgtgtggtcttgggcacaattactccctctctgcgtcagtttctgtatttgtaaaatggttgtaataaaaatagtgcctatcgaataggcttgttgtgagagtcaaaagtgttctgtgaaaccacctggtacagtaagtgccatgtatctgttattacggttgtcataacatcattaatattgtcatctcttaacgactctgtgaggtagctgttctcttccctcatttacagatga

SEQ ID NO: 112013 - DNA, 1070 bp, Homo sapiens
ggaatttgcaagtagcagcctccgagtcggctccgcggagctgtccgcggcggccggccggggcgtgatggaaatgagaacctgaaagcttgggcttggctgccgggtgccgtgcgccctggggcgaatcacctcgggacactttgaaatgagagcctgaaagcttgagcttggctgccggctgccgtgcgccctggggcgagtcacctcaggacacgcagtcgggacagtctcctaaaggacccgccagtttcacgtctgtctgcatcctgagcacctgaagcgggcaagataattctcattccacaaacacttgtttaaatggtgactcaagcggaaggttccgttctcgtggccctccttcatttattagaatgtttgatcctccccgcaatcttgtaaggcccacaaagacaatccttaagacagttaagacgctgaggaaactaaggctcctcgtcagagccagaccagaagaactctgtgttttgatgctgagtcggagctcttttacctgcatcacccataaggcaaagatttaattcatttgaacgcagcagggacagcgcttacggactgcctgtcagcttacaatcgcccccgacagaaagattttcctgaccttcctatcttaattaacacctaccaacctcactttctatcgctttatccgcaatttttcttaatagcactcaccactaactaaccttatgcgcttgttgattgattggcttctccagtagtgttaagtgaattaataagttcctactacgttgtccggccatagagatagaaaaagctatggaaaccctttgctttcaaggaactctggtctagttgaaaaagactatttggtgagctaggaaaatatggatcaaatatgagtgatacaaaagcaagtgctacaggaaaaagagaaattactgtggatcccttgctggaaagtttcgagaagaaattatactccaaaggacaagttgattttgcagaggagggaagagatcttagtgcgggaagtacttttgcaaagacccaagggtggagtgttagaacactaagaatacgagcct

SEQ ID NO: 112014 - DNA, 1391 bp, Homo sapiens
tggtacattaattgtgttagttaagatgcttttaactacaagttacagaaaaacccatcaaggtttaaacaataagaaaaaataattattttatataacaggcatgccagaactaaggcagcttcaggattgattgattcaatagttctgttcaaggttttcttctttttactctgccatcttcattacgttgatttctttcttagtagtcacaagatggctagctaatgctgttccattcatcatgtacattcacagtgatatccaaaggctagaaagggaactttaaaataaaataaactactataatagaatattgcaaatatctatgacaaaatattatattgaattcccatttacccttctagctttaacagttattgactcatggcttccagtatttttattattgtattgttgcattgaacatcatgttacatttgaatatttccatatttaatattcatcttccagataaattccagatgtaggaattgtttttagtcacttgggaaagaaaaactatgcattttcttccaggtattttgattaaaatgaccagaactctttttattgacttatttttcaattttcaatcttttcctcatcctaaaaccagttcctcaaattcctcagggtcctccccatgtttcttcacatctgttttgcttagaatcatctttcatctctggcttaactcaagttccagaacttatgtaaggaacattctctctgagccccctatcacacaaaccaaactttgaaataacttacaaaatttaaattttatatatttctttgtgttctacaggagcttgaggagttttgggtttacagagcccttttggtagaacttaccaagaagctgacttactgtgtaaaggcagaattaatccctctcatggaagttactggagttttagaggtcagtagcttgttggtttcccaattgaaattatgttgaattaatacagaagccaggttttattattttctgaagtcttaatacagaggaagtgatagcaagagccttaattgctcatttgtcatgggaatcttttatttaaaacaaatagctgttatggccttccagaaatccgctgttactagatggcatacctgatgaaaaatctcagttgtgaaaaaaaaaacataacaggaagggtgggagtgactgtctccaagtatgttgtgctaccggttgtccttaacacttcttccttcctccactcctttgaagaattaccttctgtcagtttggactcagtgcttgtttaagataatggtgattcagtggcagaaagggtcatttgtattttttctaagagagtaagaagaaagggttcgcaactggttttccagctttctattttcagccaaccctcaacttc

SEQ ID NO: 112015 - DNA, 1101 bp, Homo sapiens
ctcactctgtctcccaggctgagtgcagtggtgctatctcggctccctgcaacctctgtctcctgggctcaagtgatccctcagcctcccaagtagccaggactacaggtgcgcgccaccacacccggccacgttttttgtttgtttttttgtggagacggagttttgccacgttgtccaggctgatctcaaactcctgggctcttgtgatccatctgccacagcctcccaaagtgctgggattacaggcatgagccactctgcctggccttatctttttattgtagttggaaaaatgataataaattttaattaatctgaagtacatctgttagaaattagttttgtttctatggaattattctatccttgctattctgtaatacaacttcagttttccttttgtccaattttaataacatacatttttagcaggtctagtaaacgaatttatttgattgtgtctttctagaaggtggacaagaacgttgtcaacaggctatatctgtcttttgttctttataccttgctcaaagagaccaacatttggactgtatctgaaaaatttaatatgcctcgaggatatatacaaaatcttctcactggaactgcctcattctcatcttgtgtgttacatttctgtgaggtaatttcattgaatatatgatatgtactttgtgcatcttctggttttaactgttactaaactaataagccagttagtcagtatgtcagcattttctccttgttgacatattctgttattacagagcactaaaaaactatttaaaatgtacgtttgtttttatctgtttatgaaactactattatgtacttatggtaacaatacaaaaattcctgagtcaactaaaacacataatgaaaagtgtctttttgacccaactcttaaagccaccattaatagtttcaggtattcagaattaactgttaaaaacaacctattgatgtagattccatgtgaatgtctttcacctgagtaataaaaatgtcaggtgtttggttagaaagttacctatatccaacagctaccatgtgactatttagtaccatattctctttttaaaaaaatttaattttgac

SEQ ID NO: 112016 - DNA, 1308 bp, Homo sapiens
gagagagacaaaaataggtagagatcaactatttttaggtaacattttaggcaaaatattgtctgacgctgttttagtggaaacttgtattttttttttcagttctttttttaatttattttgttttttgttttttttttattatactttaagttctagggtacatgtgcacaatgtgcaggtttgttacatatgtatacatgtgccatgttggtgtgctgcacccagaaactgttgtattttcctttttttttttttaatgcaacttttagagctaaaggatgtttttacagttgggtggaatgcagtgcagggaagatccctaaaggaggctgagtgagaattagtgaaaattggttggggagtaaatagcacagttctggagatattgtgaaaaattatttaaagatctatccaaaggagttttggaatgaaaaatgagtacatgttttcataaaaagcatgaatataataactatcatccccctaaattttttgttaatttttaattgccattataaatttatatatgcaactgtgtagatttaatactaattttttatttaaatagctttgaggtatggaaatgagttatcttgattaatatgcattcaaggtgatgccttgaattaaggaaaatgctccaatgatatcctgaattgtttcagattgcaacgaatcttgatgacatctatcatttcatgaatggtacattttttggtgttcagcaaaaggttttattgaaagaaaaaagtctctgggaaataactgttgaatcacttagatacctgacagaaaaaggactcctacaaaaagacactatttataagtctgaagaagaggtccaatataattttcatattacaaagttgggacgtgcttcatttaagggtaagagtttacctaaatcttattgatcataggaaacacattggaaaaaatgaaaattaaattatactttctttaagctgggcacagtggctcacgcctgtaatcccaacactctgggaggccaaggggagcggatcacttgaggttgggagtttgagaccagcctggccaatatagtaaaaccctgtctctactaaaatacaaaaaaaattagccaggcatggtgatacatgcctgtagtcccagctactcgggaggctgaggcacaggaattgtttgaacctgggaggcagaggttgcagtgagtcgagatcacaccactgcactccaggctgggcaacagagccgagactccatctcaaaaataaaaaaataaaaaattatactttctttaagttgtatttataattttatatt

SEQ ID NO: 112017 - DNA, 1012 bp, Homo sapiens
ctttcacccaggctggtaggttcatagctcattgcaacctcaaactcccgggttcaagcaatcatcccacctcatcctcccccatagcctggaactgcaggtgcatgcaccaccatgcccggctaatttttgttattttttgtagaggtggtcttgcttcactgcccaagctgatcttgaactcttgggctcaagcaatccttctgcctctacctcccaaagtgctgagattacaggcatgagccatcgcatttcgcctttccttagttttgataagattttcacagggttctgtaatccacaaaaagattgagagactgcctaatagttaatgaagtcagaatcaaaattctaagaacatttaatgtacttaactcaatggaaatagtacattaaagaatgtttacattagcatctactaaaatgaaaatggtagaaattttgtcactaaaagatcaagggctcatatttctaacagatctttttcatagggaatatctgaaacataaggagaaagaaaaatgtgaggtgattaagaacttgaagaatattggcaatggcaacctgtgtcctgttttaaagcgcactatcccatttggagttgcctatcaccacagtggcttaacaagtgatgaaaggaaactcttggaggaggcctactccacaggagtgctctgtctttttacctgcacatctaccctagcggcaggtgtcaacctaccagctcgaaggtaagagataagtaagtgttgaccaggctcagaacttttccatttctagcttgcgaggagttttgttgttttatgctttctcagtagtggatgagaatttatcaaatgttcttttagcatatgctgagttgattggttggtttattttctttaatattttaatgaatatgtaatgaaatatgtaatgaaaaataacgttaatagatttcttgatattagaattccatcctttctgctctttatatctggttttgatgttagggtctattaatctggttttg

SEQ ID NO: 112018 - DNA, 1398 bp, Homo sapiens
aaacagaagaagaagaaatggtaaagcaagaacttttaagttgaagcatgttttatgtatcttagaaaagctaaactcttttatagctgtcctttcttaacctattttacaatatttaaaacactggaaagatgaatttatatgtcgtattaattgcaaatgtccttttaattcaaggttgagttaaaagaatatctgaaaataaatgatacaatatatgaagttgacagcaaagctgagaatggcatgactttttcacgtcttcttaattataaggtaacattgataacatttaaattccaggttaccagactttgtgtctggggcacaacaagagtttccaatggattccgtagaatagtctagatttttcagagaaacagctgatgcttgacatttgttggacaccatgcagactgccagttcaagatagctcgtttccagtttcaacattagatcacaccatattcttttctatgacatcatatctttgtgaagttggggtttttacagttgctgtaagcaagtaccgtgtgaaaatcaatctggaacagaagagaatagctgtgtccagtcttatttcagattttgaaagacagtaccaagttgtgcacacatcccattagtgagctgttgtggttatttaagaatgaaataaaaatattttttcactcaactgatgtgtattatttattctaacagctactaaattgtgaggaagtacgtatttattaagttgtttggacctcactatttaattaacaaaactgtaaagtatttctttgggccctggggctgtgaacaaagaaaatttggaaaactctcctgtaaatgtttattcatacaacaacaacaacaaaagaataatttatggaccatgtagttcagatattggtgtataaaatgttaatgtctactatgtaaattttagtgttttatgacttgtatgaaggatattaaaaaggggaagaagggattatacagtagttttagaattctgtgaagatgtgttattctacagctatgtctttagtaaagttgaagaaatagattttaaataacttcacattttttcttcatgttctttgtgttcctcatgtgactacaaaaattgtcataattcagtagtatgattgaatctgtgtttttgaaaacttaatggttgtaaagggcatgtcttatttacacagtccgttaactattattaggatcaatctgtgtttctctctgtggacttttttgttctgctgtggtggagatgggcatgtagtgaggctattaataacattaactattttcacttctttaattttctttaattcacttgtttaattctaggtttttttttagactaactagacctaagaaaatcataataacctaaaagaaaagtgagat

SEQ ID NO: 112019 - DNA, 1055 bp, Homo sapiens
tttttgtttagtctgccagaatgaatatcctgaggacaaggctctatctaactcatctttttgtttttgtttttgtttttttgtttttttttgagacggagtctcgcgtgttgcccaggctggagtgcagtggcgcatctcagctcactgcaagctccgcctcctgggttcgcgccattttcctgcatcagactccccagtagctgggactacaggcgcccgccaccacgcccggctaattttttttttgtatttttagtagagacaaggtttcaccgtgttagccaggatggtctcgatctcctgaccttgtgatccgcctgcctcagcctcccaaagtgctgggattacaggcgtgagccaccgagcccggcctaactcatctttttcttaactagcactgtgcctggtatactctggtaggttctcaactgctggggattgtcacttaaaaatgcaaccttagcactttgggcctagttcctcatctataaaaagggataatttttttttgcaagttagagtctgtgttaaggacatgccaaattagatgttggtaatgattgtcagtaattacattggtagcttctaagtaagaacttcagtaaataacaactttttaaatctttttacctctaaatctggcttaataacatgaccagattaaagcataaatgcatgtgctactttttattaagctaaagcggtggttctcaagtgtggttcctggactgcagcatcaacatcacctggaaatttgttgaagtgcatgttctcagacacttccctagacctactgcgtcagaacctctaggaatacgacctggcaatctgtgatcgtggctcactacagcgtcaacctcccaggctcaagcaatcctcccacttcagcctcccaagtcgtggggactataggcatgcgccaccatacccagctaatttttttatattttgtagagatagggtctcattttgttgcctaggctggtcctgaactcctgggcttaagcagtcctgctgtctcagcctcccaaagggttggaattacagatatg

SEQ ID NO: 112020 - DNA, 1009 bp, Homo sapiens
tgctggaataaaaaaatttttttcctatcattaccataatattagtgcaagtaaatagaagcaaatgctttcatggtccatactgtttctcattttgaaaacaaaagatcagtgatctctcagccccttccattcctacctgtcctgctaccactgaacctctttccttccctcacagtcacacttatcaaaccagttatcctttctgtctgtttccttacctgacataattcctctaattcctcatctataagaaagggataataagttgttagcaagtcagattctggttcaaagacatgccaaattcaatgttggtaatgattttcaataattatattggtagcttctaagtaagaactttagtaaattaccccactctaattctgggttctgtgctctcattctctcacttaagatctgatgactgagacgtctaaacacagtgttacttttaatgtttaccttacctgacttctcaataacttacctgatgctattgactacacccttcttgaaattcttgtttctggatgtccttacaaccactcctgttttttgaccccgattgtctagtagagatcctcagctttcttagttgtatttccttggctggctctgtcttctctaccaaaacctagctgttgtggtatgtctttgacactcacatgtcttgagtgaaagaagtcagttattagtaatactgttgattaaaccaaacatctttccccccacaccagcagccgcagctacctctccccacgggtgcatccctgccaccacccagatgctctgccttgtgctgcctttcccaaagctagacatctttaaagacagctgcaattaagttttaagtcagggatgtccaatcttttggcttccttgggccactttggaaaaagtattgtcttgagccacaataaaatacagtaacacgatagctgatgagccaagaaaaaaaattgcaaaaaaaaaaatctcataatgttttaagaaagtttacaaattt

SEQ ID NO: 112021 - DNA, 1001 bp, Homo sapiens
tctatttacatataggtctgtgatccatatgtgaccatataattatatacttggtacagccctaggctgaagtgttttttgggggttttgtttgtttgtttgttttggtttttttgagacagagtcccactctgttgcccaggttggagtgcaatggcgcgatctgggcttaccgcaacctgcgcttcccaggttcaagcaattctcctgcctgagcctccgagtagctgggattacaggagcatgccactatgcccggctaatttttgtattttctgtagacacggggtttgaccatgttggccaggctggtgaagcttttattcttaatgaaactggaattgaccataagcgtttttgttctctttgcagcctaatgacagtgaagtggacatgtttggtgactatgatagctttactgaaaactcctttatagctcaagttgacgacctggaacaaaaatatatgcaactccctgaacataagaaacatgctacagactttgccactgaaaatctttgctcggaaagtatcaaaaacaaactcagcattactaccataggcaaccttactgaattacaaactgataagcacacagagaaccagagtggatatgaaggtgtcactattgaacctggagctgatcttttgtatgatgtaccttcctcacaggctatatactttgaaaatttgcagaactcttcaaatgatttgggtgatcattctatgaaagaaagggattggaagtcatcctctcacaacactgtgaatgaggaactgccccataattgcatagagcaaccccagcaaaatgatgagtcctcttccaaagtcagaactagttcagatatgaacaggagaaaaagtattaaagatcatctaaaaaatgccatgactggaaatgcgaaggcccagacaccaatattttctagaagtaaacagctcaaagacactctcctatctgaggaaattaatgttgctaagaaaacagttgagtcatc

SEQ ID NO: 112022 - DNA, 1831 bp, Homo sapiens
tcatctccgggcacgagctcggccgcggtgggagcgccaaaaatacaccccaagcttggacggttccttttggggagagacacccgccggcggatgcgggaaccacattcatccatggcaaggacccagggccctattcagacgtcgttctcagtgacccagacgctaagcccatatggaagggagagtgggacgccggagcccgcttctacatccaccttgggaaaagaccccaagttagctctcagggctcgcggaccggaagcacgcataaacttctaccctgtccaatcataagcctcacgtgacctgccgcgtagggagggcacgaacagaaaggtgctgcgcatgcgtattgaaaaacctcacctactctcgcgggtcctcagcgttctcctgcggaacctttgaacggggtactcgagcccacaggggaagagcagcggaaggggcctttcggaacgatttggaacgaaaggaagtggaagaaacgcggaaccatggccgctgtggttgctgtttgcggtggtctagggaggaagaagttgacacacttggtaacggctgctgtcagccttacacatcccgggactcacacgggtaaagtctccatatcctatgctccattgtagcgctgcaggcattaaccttagtcctaatggttagagtcgtccctgttagcaaaacgactctggtttctaggcgattaagtttctccaagatgggtgggaatctgtaattgcctttgactgttttagtgtcgtctaatccactcctttaaagtatttaaacgtatgaggaagttggagtggttcttaaaaagcagagactttcctaagatctctggataatcttagtgaggaagggacatttccagagtcgcccagcagcaaattccagatgtctaaggtccccaaacagaacaaaattgcataatttttgcaattttatcttctctgtgcttctctataaattctttctgggacgggtctgttactttctttttggtatgacagtgcctttctgttgcttctcctataagaatttgcattaagaattttctctaaccatggaatgaagggaaaataaatgtcagaaagagcaggtatgggcgggaaaatatgttcttttccccctaagccctggaaagcacacccatgttgagtcttactctgtcccaaatataaaagtttttaaccattctgaatataatacaaaacctttctttaatatcgtgtcccttaattcatcctgtctccataaaaacaaaaatctttagctattcagctaagaaaaagaaatggttaattgctgtttctgtttaatcgcagtgctttggagaagaggttgttcacaacaggtatccagcaatgaggacctggtaagaatttttttttctattagtaaggcctttgcaaatatgaccaaaatgtttttctttttaaaacgagatctggtattagactctaacatcttttattttagctacttgaatagagttctgccgtaggacaaaacaatttgataattactctgagttcagaaatgatgatgaattgattgtagtcatgtagtcagctgagttttgaagtaggggaattcctagattagaagcaaagctgctataataccatatttttcttcctagatcttaaatttaaggatatgtgatttgggaattgttttttttttttttacatagccctttgtaagcaaatgatatgggaattttaaaaggtagtttgggtgagcagaattttagataactgaaaagagactgtacaaagcttagctataggttggctatagtattaacatggactttctgaaa

SEQ ID NO: 112023 - DNA, 1123 bp, Homo sapiens
atgggccattatctgtgtataaaaatagtgataaaatacttgatagagacatggggatggataaattagggattgtactcatttaagaatggcatatgttatctattgtgttgtaagtttccttaaatctaaaaattttttcattatctacaatctgagcaaagcattggaacactttcttatcagacatcatttttgttctgccataaaattttattctatgaagattgtactttattccagaatcttcccatgcgttaatccgtaggctaaactaaaacaaaataaagtgcttatacaaaatatgtacacagtaagaaaggtataactaatcctttgaatggatttgaatgtagaatagtaaccttttaaaattcagaattaacacatcctattatcagacttttcgtttttttccctagcccatttcaatggaaaatccttataaagaacctcttaagaaatgtatcttgtgtggaaagcatgtagattataagaatgtacaggtgagatctggttttacttcactatattttagggttttgcttctgatagatctgcttaaagagaatcaagtcagtttatagcaggcttttgtagaggtaactgttttagcaacttcataatttcaaatttggttataattctatgtataagcttatctctgctttattcaagtaaaagcaccttggctttcccccacttactgttatttccactctgtttttttcactaccccaaacatcttaatagctccctgtggcagtaattctcaattggtgagggtcagaactttggaaaaagctcatctggtgaagctgatctctttatctcaccacccatatcactgattcacatattacttatctcttgtctaactctcagcaagttagaagttgcaaatttggggcaagtgaatagcgctagaattctgtatgttggctgggtgtggtggctcacgcctgtaatcccagcactttgggaggccaaggcgggcggatcacctgaggtcaggagtttgagaccagcctggccaatgtggtgaaaccccgtctctattaaaaatacaaaaattagctgagtgtggtggtgcatgcctgtaatcccagctacttgggaggct

SEQ ID NO: 112024 - DNA, 1092 bp, Homo sapiens
cctgcctcagtctcctgagtagctgggactacaggcatgcatcaccacacctggataattttttatatttttagtagagacagggtttcaccatgttgcccaggctggtctcgaactcctgagctcaggtagtctacccacctcagcctcccaaagtgctgggattacaggcgtgagccaccgcagctggcccatgagttaatatttcagtttatttctgtatattttcagcgaactaactggcatgataaaagctgtataaatgagaagttacatgtgaaaaagcattttacaacctataaggcttatttataacctacaagtgcttgttactgacatcctccagaaaataaataaaatttatataaaaggcaaatagttttgggtattatataccaccaatgattttatattatttgtgaatctagactgtattagtacacagcttgaaatattacctatgcccttaaattactttattttgcagagtatatgcaaaaaagtggaagacagtgaacaagcagtagataaactagtaaaggatgtaaacagattaaaacgagaaattgagaaaaggagaggagcacagattcaggcagcaagtaagtaaacaacacatctctactttctgtgctaaaaatttttatttatttatttatttttgagacggagtctcgctctgtcgcctaggttggagtgcaaaggtgtgatctcagcttactgcaacctctgcctcctggggtcaagcgattctcctgcctcagcctcctgaaacgctgggattccaggtgcctgccaccatgcctggctaattttttttgtatttttaatagagacagggtttcaccatgttggccaggctggtcttgaacttctgacctcaagtgatccacccgcctcagcctcccaaagtgctgggattataggtgtgagccactgcgctcggccctttctgtgcttttaaagaacataatactatggtagctatattgctgacatgaaagaacacaactttaattttgtcttagaatactgtggcatataaattagaattcagaattatgtatgttatcctcactttagataatacaa

SEQ ID NO: 112025 - DNA, 1072 bp, Homo sapiens
cactattatactaagcacatttcacagctttacatgtcatctgggcccagtgtggtgactcatacctgtaatcccagcactttgggaggccaaggcaggaggatcactgagcaacattaggagacctcatctctacaaaaaacttaaaaattagtcgggtgtggtgatgggtgcctgtagtcccagctacttgggaggctgaggcaagaggattgcttgagcacgggaggttgaagctgcattattgagccatgatcgcaccactgcactgcagcctgggagactgagtgagaccctgtctcaaaaaaaaaaaaaaacagttgtttcaagtcagtaaattctattttggataagtagtaaagaatgggttttggggggtgtatttttttaaatcttgtaggggacaagtaatctattccagcaggtagatactaatctttcttttcattctaagtttatactctaaagttttattttgtcagactttttcacagggtacctttagtggttgccaatctgggcatgtctgaacaactgggttataaaactgtatcaggttcctgtatgtccactggttttagccgagcagtacaaacacacaggtaagattcaactgctttctcacaaaacttctattcatctttgaaattaattttcttatttctcaaacaacagcagaataaaaattcaagggaaaattaatccattactcaagtaaactaggctgtttttaccttcctcatactcctgttactgcttgtgtacttacaagatacaaaaaaggtagtggttagtccaggcatggtggctcacacctgcaaatcccagcacttcgggaggctgaggcaggaggatcacttgagctgaggagttggagactagcctgggcaacacagcaaaaccccatctctacaaaagaaaatttaaaaaaatagtactgggaggatcttgttgcatatcctgtaaagtttagcatatctattctaggttagaataagtatatagcctaaaaattataattttctaaggcaatggttcggattaaaggcgtgaaattagatatttgtaaaaa

SEQ ID NO: 112026 - DNA, 1026 bp, Homo sapiens
ttgaagccaagtttgtcgggtaggtgatatcattcccataaaaattttaggtaaaagctgtagggttcagcttaacttatttaacaaaccaagtgtccatacaggcgattaatttattttcagggagggattgccttttaagtgaatcaatggcattgatatttttttcatttaaattttgactaaagagtgagattgcaagatagcaaatgccataaaagaaactacagaaagtcaagaatttatttctcccttttaatctatattgatgaaaaccgtaccctttcaaatgaatggaaagtaagtcagtttgtatgttttacaaaagtaaagcatatgattaaatgtattctttgtttatatatgccccaaatctttctaaatattaagaaagccattttaaggttgtttattttatttaattataatagtaagacatatcattgtaactattaagatgtatatcctttttattctgtatttcagaatgtggtaggttggtacaaattccgtcgtcattcagatcagatcatgacgtttagagagaggctgcttcacaaaaacttgcaggagcatttttcaaaccaagaccttgtttttctgctattaacaccaagtataataacagaaagctgctctactcatcgactggaacattccttatataaacctcaaaaagggtaaatgttggccagtcactggctgtattaaactaatagaaaaatatatctaatacttagtactttttgcagcttacaaagtgttctcatatattgtcgcatcagattgtcacgataaccttcagaagtagatcttaccatctgttaatttataggtgggaaaataatggtcagacaaggaaattagaagcccagtgtggaatgatgacttgtattctggcactgaagatttgctcttatttactacttaaggtggaaaaaaactttttttttaattgattgataaagggtataatttagaatttagaatttaagcctagatacttcagcagtttttctataactg

SEQ ID NO: 112027 - DNA, 1065 bp, Homo sapiens
acaccccagctaatttttgtattttttatgtagacagggttttgccacattgcgcaggttggtctcaaacttctgggctcgagccatccacccccctcagcctcccaaaatgctgggattacaagtatgagccaccatgccctggcaaaaattatttataaaggattttgtataacatatttaaccatcatagaaaatattgttgatcttaatgagtggtaaaaagaagaaaatattatttgcagtctctgttattggaagggaaagaaagctggaagtagaatcacttggaattatcttttaattcttcctacattttggatattccaactcctgaacaaactgttctaaaccaaacaaaacctattcccttcccccaccccaaaaaacccagccacctcctaaaatacatagcttttgtaactagcagtgaataatagtctttttgttattgtgcttcattactggttatacattcttttgtatgtatcaatgttataaaaaatataaatgagtaaactgaatgaattgtgaaccggttatgtgaacttacattttaatacctgtatttcatggatagtttactgttttaggttcaaaaaaaacgattcccaaaacttgtctcttaagttactcctttttccttttcattgctttatggactttatgtttctaccactttaagtcagttaatttgagaactttctctactgtttattttaggacttcatctgacaggcaaataggtatatgggctttggtagttgggttaggaataactaaaatttaaaatactaataaaattacttatatttttagcgtatttgaaatacctttaattttggcttttacagcttttataattcttcaggcgaagtaaatgagcaagcactgaagaaaatattatcaaatgtcaaaaaggtattctctaatttatcttccctttttttggtattatttgcattgtttttggttcttaaaaacacacagtactttgacagaatttttaagcagtgtttgacatcatagtatcctgtaaagtaagtaagaaaaggtttgttcttc

SEQ ID NO: 112028 - DNA, 1034 bp, Homo sapiens
tatttctgtaatcacagcactttgggacgcggaggcaggaggatcatttgagcccaggagttcaagaccagcgtgggcaacataaggagacctcatgtctacaaaaaaattttaaaaattagcccggcgtggtggcacgtgcctgtagacccagctacttggaaggctgaggcagcaggattgtttgagcctgggaggtcaaagctgcagtgagtagtgattgcaccgctgcactccagcctgggtgatgacagagctagacctcttctcaaaaaaaaaaaaaaaaaagatataaaatcttcattgtcaagcacattgggtctttaagtgtgcctagagaaattgaattccccaaaactcagataaattaccactggggtggcagaatacaagtagttttaaaagaatcgggctcacagcactccttttagaaagcagactctgaaattgaatttaaatctttcatattgtgcatgagttttaatcagaaaacactaatcttgtcatttcgtaccttagaagctttctgtaactcccagaagcacatgtggttaaatccagagtagtcattcggggtgtcccattattggctcgttcttatttatctttgatttccttctgctccaaggcaaagtgctctgctcattcttcagtgtgtgctcatttctggctttaagtcttatatgcttccaagtgtgcccagtgcttcatgctctgcctacacaaatattgcccatagctttagtctaatctgtagcctccccagggctacagggctaatctgtagcctccccagggctactctgattatttcaggctagactaatctctttcccttcctctcctctttatttctactttttttcttttgaggcagagtctcactctatcgcctgggctggagtgcagtggcgtgatcatagctcactgcagcctcaacctcctgggttcacgtcatcccaagtagctgggactacaggcatgtgccaccatgcctaactaatgtttctcgtattttttgtacagacggagtt

SEQ ID NO: 112029 - DNA, 1025 bp, Homo sapiens
ggggatggtttcaggatgattcaggtacattacatttattgtgcactttatttctattattattacattgtaatatataatgaaataattatacaactcaccataatataaaatccatgggagccctgagcttgttatcctgcaactatacagtcccacctgggggtgatgggagacagtgacagatcatcaggccttagattctcataaggaacatgcagcctagatccctcgcatgtgcagttcacaacagggttcaagctcctgtgaggatctaatgctgctgttgatctgacaggaggcagcgctcggtggtaatgcgagtgatggggtgtggctgtaaatacagaggaagcttcactcgcagaccactcacctgctctgcagccgggttcccaacaggcccagttcctaacaggccggtactggtctgtggcctgggggttggggacccctggcttagaggacatcatcagtagtacttaggaataagggctgagatagaacgtggagtttagcaaaagatctaagtagaagcaagtttaggttgaggaaattgagaggtgaaatgttggtagttattgttataaagtggcagtgaaaggaatacaggatggcaactagagagacaggaggattaatgaagatttttcttttcagaggaggggagatatatatttgtatgaaagtcaaatgagtaaagatgttgaagacaatgggtaggccctaggaaaaagaaagcaaacatggggtagagactatggattattgggatatccaaggaaagaaaagagggatgcatgtcttttccttaagaaaagaaagacggaatgaagagtggatacaggaacattttgaaaagcagaaaggagaagatcaaatgttggatgccttcagttagtaaagtaggaactcagaaccaatgagcttcaagggatcttagaaacaacttggtttaactcaattcatatatatttgtatttgtatatatttatatataatttggtatatatacaattaaattt

SEQ ID NO: 112030 - DNA, 1031 bp, Homo sapiens
gtgaaaagaaaatggcagggaaaagaaaaaaaaaactgatgtgtttcccttgttctagatgtccaagctctgtggcttaccagactgacggcaggtgccctgccattttctgaagggatgttctatctggttgtttattagttaccatctctctctatttaagcagcttcagggccaactgactctcggtgtcacagtgggaatttgacatttctatttctcatttgtaatttagggtacgttgacacatttaatttcgtaattgtgtacttaaaaagtgagtaaactaaagtttattagtgctttatgaaaactgaaaatactcccgaagactaacattatatttggtgagcctcctaatgaggaattagaagacttgattcaatcataatattatcttactgcttatttgaatttactaagtccttggcattatactaaatgcttcattttagggatgaagaaacagttcgaaggggtgatgacatttgccaatgttttggagctaataagggctgagtttggattgagaatcctcaacattctgaattgttgggtgcttttattcctaggattatttcaggcttgatatcctgctcaatgctctatttgtatttgcctccagggaatattctctttcctctatcccagttcaacaccctcactccagtttcctcctctgtaagccattctcccaaggtttctgtgtgttcaccactcataactgaaggttgccagggtaggatggaaagggtagggcctgaggcgggagaggttgtagaagaggaaagaacatggcagtggagacttacagcagaatgaacaactttaaaactgagcattagatgacatttctgttttgaaaattgcattgatcaccctatccctggaaattctgcagtgaccacctttgttgaaaggcctagagctccctgccatctccaacatactcacgcagctcctgtacatgcactcagaagtcggtttgtgttttaaataacttctttaaaaatctcatcaccaaatgctgt

SEQ ID NO: 112031 - DNA, 1032 bp, Homo sapiens
gaaagcaaggaatgtaatcttttttttttttaagagacagtatcttgctctgccacccaggctggagtgcagtggcacaatcatggctcactgcagccttgacctcctgggctcaagtgttcctcccacctcagcccccaacatgccccgcctcctctccccccactccccccgcccctcagtatcggggaccacaggtgagtaccaccacgcgcagctaagttttgcatgttttgtagagctgggtttttaccgtgttgcccaggctggtctcaaactcctgggctgaagcaattctataccttatgaaggcagctaatatttctgttctaagaagggaatgagggctggacatggtggctcacacctgaaatcccagcactttgggaggccaaggcaggaggatcacttgagcccaggagttagagaccagcctgggcaagatagtaagaccctgtctctatttttttttaaaaaaaaggagtgaggacttgtgcttagaatacactgcatatatgttactagactttaagttgaatcaaaatctcttgtaacataatttaaatgctaccagttgaattaataaaaatcagaaaagtcctaaagaaaaacagcgacaattctaaatatagaagtcatcatttgtatataggagcattcagaaattctggatttttcatacagagctgccaacagtttatatgacatggtaacacaaggagtgattatttgtatggcacaatggggatgaagtgtgaggcttgtggcggtggtggggtgcggtcgggcatgccaggcccttacagcgagggttgagggagaccagttctcagcatggcaaggaccagctggtgtaccagcaggaaagctctgctctgaggagcaaagaaaggcccaaggataaagaaatactttgttttttggagacggagtctcgctcagtcgcccaggctggagtgcagtggcgcgatcttggctcactgaaagctccgcctcccgggttcacgccattctcctgcctcagcctcccaa

SEQ ID NO: 112032 - DNA, 1025 bp, Homo sapiens
tgtaatctcagcaccttgggaggccgaggcaggtagatcatttgaggtcagtttgagaccagcctggccaaaatggtgaaacctcgtctcttttaaaaatacaaaaattagccgggtggtagaggcgtgtgcctgtaatctgagctacttgggaggctgaggcaggagaatcgcttgatcctgggaggtggaggttgcagtgagctgagatcacaccacggcactccagtctgggtgacagagtgagatcctgtctcaaaaaaaaaaaaaaaaaaagaatattaaagatctaagtaaagtaggtttgaactgttattggttatttaagtttattacatacacatacatgcatagatatatatatatatattatgtttttatgatatttgtgttaagagaatatggatgattcacacatatagttggtactcaattgatattactttatgtgttttaaaaccttgtttctattcctattcttaactagatcatttatattttgagaaggacatgttgtatctagcttgcagttgccttataatgtcagcactcaaaaatgactaattcaatatagttttattaaaaacttctaggaggtcgggcacagtggctcacgcctgtaatctcagcactttgggagggtaaggcgggcagattgcttgaggtcagaagttcaagaccagcctggccaacatggtgaaaccctgtctctactcaaaatacaaaaaattagctggatgtggtggcgcacacctgtagtcctagctactcaggtggctgaggcaagagaatcacttgaacccaagaggcagaggtttcagtgagccgagatcgcgccactgcactccagcctgggcgacagagtgagactttgtctcaaaaaacaaacaaacaaaacttctaggaaattacaggtactattttaatatggaatgcatacccatgttccttaaaaggccttctatttgtagtttttaaattgtattcacagcttagaatcatactttctaagtgatggagttact

SEQ ID NO: 112033 - DNA, 1013 bp, Homo sapiens
aagctaaatatcacatcaaaaattttgtggccaggtgcggtggcacacacctgtagtctcagctattcgagaggctgaggcaggaggatcacttgagccctgaaattccagtctgagtccagcctggataatatggcacaaccctatctctaaaaaaaccaaacttttaaaaaaaagttttgtgttgttctgtggtctttataatcattagctttactagattgtctgcttgatggaatgtagttcatcatggagttattcacttacagtgaatgaatatctgaattcattcagtgcatcatttaaagttattcaaatcattgtgttatttgtagacattcaggttatgttcttttttttattgtgaataacactatcatgaacatattagaacataaatatgctctaactttatatgtgggagtattttcttagaaaaaatttgcaaagtgaaaatagacacttatttgaataacccataggtactcaatatagttcatactcaaaatgaccagatctgaacttctagtccatacctcggccatccagagtaaatctgttgtcaaagttaaataacaatacacagacaaatctctatgcaaagcattttatttgggaatgtatatatattttttaaaaaaacaaaattgcacttcagagcatatacccagaccagggtggtctttgatatgtctaaagaataaagagaaggttgggagttttattaaagagagaaatgctacatattgttttgaaagaaagcccattagcactagtgcacttttggggagttggcaggctctgactggtgagtgacagtggtggcaggtaaaattagtcttagagtcatggcacattgttgtttcagcagccaccaagtaaaactggtctgacggtatggccagctgtttcagaagctgggctttggataattcgtggagcaggtgctgtgtgccctgagtgctttttccgcttggcccctcaactctgatcttagttgaatatgacagttg

SEQ ID NO: 112034 - DNA, 1049 bp, Homo sapiens
ctaccacttcacctggatagtgaagtggcatcttgcctcctgactgccttgactcttgtcaccgccccagcccactgtttccaccttattctcccaaactctcatgtccagtcatgttgcttcaactcctcggtgcactgcttcctgctgtttcctaggattccaggaccaggctcatctctctctccttcttacccccacctttgtcttccagcaactccaccctcctagtagttcccttaatacgccccattccctctacaggtggtgactctgcagatcctcctcctctggctctgccgttgcccaccccctccccctgccacaggtgtgtctgcctctacacacgtccatttgcctatttcacatgggttgtagtcgtgtttcctccctgagagactgtacctctctgtgaacagatgccctatgttatttctataagtcctcagtaactagtaaagagtagacacttaaatactgacttgtttttaaggttcttgaaacattaattgggccaacagagtcctatgagtgtacattgctaccagtgttgatggtgtggagtattaatttctgtgtaatcctccagtcctggaagatacacatatagttgaaggatttcaacactactatttggaaccttttgttttctgttttcctagaagttccatattaattgtccttgcaagctatagttgatgatcatataaatataatgcgtgttattaaaaatacttttgttctctcctctcagtaaaagaaatacaatttatagtgccagtggatgtaccctagcaaatatgttcatagaaattacatcagtatgatattttaaaagccctttggatctgactaactttgctttaccgttttatcttaatactaaacattgtctccgttctgtatttttgttagaaatgacttgatattatatacaaaggttatttgaagaaggacacttagatttcctcctgtctttataacacatttatgacttttgcctacaagtactgtttatggtttgacgtacttttctttatcatgtggct

SEQ ID NO: 112035 - DNA, 1023 bp, Homo sapiens
tggtttagaacactaagttggtaagtaagcttgaaactatttcagatatgaaaagttaatttctgaagtttgtaaaggaagcgtcttgatcagtcagtatccactcaatttaccctatagattgattctagagaaagataaataaaaataatgtaattgaattttgaaaagatcacctttgtctttcctactccaatacaacttttttcagatctcatattttagtctttgtagagatatctaatatgtgaatatatacaccattcttgtcctttttttaataaaaaactaaacattgtattggaaacatttttgtatcctttacaataataattttagcaaaatatttacatataatcttttccttcattttccttcatttcctctcagttgacatgataacatacaacatattgtatatatacaaatgcacataaagttagtaacaaaatcaccataatgatattaacatttaaaattttatatcttttaaaacttttcatatataaatcattgctctcagaaccttgactaggaaacatgataacattatagttcatatttaacccaagtggccatcctttttaatatagttgataaatatcaaccagggagtcagtgtctttttaaaacagatggggtttagaatagtcaaaaagaagtgtcttgatttcggtgatagctgatttttccttctagcaggtttcttcacgagtggcaaagtatacaggaaatgttagatagataaagtaattggagaataattaaatgtaaaaccatgcagtattgattctaagtattattaagaagagaagataaataaggatgggctccagtgattgtagaaggtgtcaaacaagaggtaaaagataaactggtatttgaaatgaagacaagttttggataaagaagagttttctagttggggatgtagcacccatcagtttctagatgtgggacagatgtacttatactaccgttgatgagacattcctggcccttctgagcagatggtattgatta

SEQ ID NO: 112036 - DNA, 1504 bp, Homo sapiens
gactgcagttcgtgccgcttgctgacttgggcactgacctgtggcccctccatgtggcttggatgggacaggcagcccgggttctgaatggggagcatgccaggagccaggtgtttcaagaggcctaaactagttttttttgctgggcgcagtggctcacacctataatcccagcactttgagaggccgaggcaggcggatcacaaggtcaggaaatcgagaccatcctggctaacacggtggaaccccgtctctactaaaaatacaaaaaaaaattagctgggcgtggtggtgggcgcctatagtcccagctacttgggaggctgaggcgggagaatggcatgaacctgggtggcggaacttgcagtgagccaagatcctgccactgcactccagcctgggagacagagcaagactctgtctcaaaaaaaaaaaaacaaacaaaaaaaaaaaaactagtttttttttttaaatgaaaatatatgcccatgataaaaatttagactagaaaggagtattccatgaaatcctcctccacctcagtgccttacttacgatatctggaggcttactactgttattccagaaattgtctgagtattcaagcttttatgtttatatcccccctccctttttcttatgcaagtaagagtatctcttctgtaccatttttccacttcatatattaatagcttatagatggatttatattggcacatctacatctatcattgtatccatatctgcagttacatctatattgatatacagcaatagctgagaggtagaatgtcagcatataaggtgattactgttttcccctttggttttgctataatttatgcttgagaataacatctcaattgagtgtggaccgatagtgtagttcattttctttgttgtttctttttatatattttgtctttcatagcctcctaaccagcccctttttagtaattctttgttccatatatgactttttggactctacttctataaaatacaatcaatgttgtgtcttttttttttgaaacacagtctcactccattgcccaggctggagtgcagtggcgcgatctcggctcatggcaacctctgcctcctgggttcaggtgattctcatgcctcagcctcccaagtagctgggactacaggcatgcgctactgtgcctggctaatttttgtatttttagtagagatggagtttcactatgttgctcaggctggtgtctaactcctgagatcaagtgatcctcctgccttgatctccaaaagtgctgggattatgggcatgagccaccatgtctggcctggtatttcttcatttttctaaccgtatacttatttctgccatagacatgttttaccatttcttattttacactcttagaatcacagaaacttactgaaagtcatcaaagtcattcttagagcaaacatttcagtgttttccaaaagctagatactgtgaatgatgttgaggatataaagggagatgaagtga

SEQ ID NO: 112037 - DNA, 1459 bp, Homo sapiens
ctactcagttaaatgatgtaacttccagtataaaacaggcatagaatactatatgtctattatcattttaagcgttgcctaaaaatggctcggttagaccaaaagcacccatggtgtacctctcttgtttatttaattcccagagcgcagtgcaggcctggcattgagggtccgactatgtatttgttggataaacgattaagaggctgagaacatgcacatccacacacagtgcttcttaatgatattttcttagtatcagtgttttgtttgctgagtcttgaggccttagtggctactcttgaagtgcttagcaacatttgtgagcttagtctagcaaatggagttagactttgaaacaggactatggaaatagaaagtatgctaacattgagatatttgtacctttctttcaaattatgttgtagaaatctttggaatccaagtctttctgttaaacaatattccaagtgccctgtgaaaattttagttctattacagtggtcaaatgacttcagaaaatgtatgtcttaccagatttaaaaagcagagacagttcaaattacttcattgacattgaattttatttaaataaaatgtaggtatctccaattctgaccccctcatggaggtccatgaaattaaatgacttgtttaatattatacaaaatgtctcactgactaggacctagaagtcatattgacatttagataattttgttgcaaaatgagtttgactgatagcagagaaaatcagggagactaaaaataataaaacaaacgttttctctagagtctagatatatattaaaaagaactcatcaacttggtgatttggaattggggctctttagaaaccagagcagtcatgcaattatatggttagcagtgatgtgtaaacagacttaaggtgtttgacccttaatatcatcaccttacatttctttatccaactatagtgatgtgcatattatatttaataaattattttttgcttgtatttgtgcatgcatagctattttgatttctttaaagttcttatggagataatatgacttgaatataatgctttgagtccaagaaaattgatggacatataaaactaagttatagccaaaattaatgcataattaagatgttttccccaaacatcctgagtatcttttatatcagaggatattaatgaaatctttagaaaagtgtcacaaataattcacaaaggactgtatctccaaaactacttaaaatttctgaattaaagactgctaaacactatacacatgctagtattggttctaaaccttagactaaccattcagattaatagaaaactttttaaaatgttaactaatatgatgattggtttgtatggtaatctccacgatgcatattcatttaaaactttttcagaacaactcagttatagcctggtgtctgaataaaggcacacaatgcagtg

SEQ ID NO: 112038 - DNA, 1004 bp, Homo sapiens
tttattttttatatgttttaaaagttagtactatataattagaattctatttatatataaattaaggttactttgttaaatgttttcattattttaaggttccagtaggcaacaaaacaaacataatttactaacagtgtttttattttatatgactctaacttgtacattttgaccaaaagtcatggtagaaatttgggtttcaaatcgctgttgcttcttcagctgcactgatcagttgtgttcactaatttttgtattgttgggctattaacagttcgcatggactcatgtcactttactgataactgtcactcagtcacaccttgtcatccaaaatctgtttgaaggcatgatatggtaaggcaacagaattatgctgctttataagtatgtcatagcacttttatagttctttaacgttggatagtgtcttacagatttctactaaaatgtactgtttgttgttcttatattccattaaactatcttactgagttttgcttactctttgacaactaaagacaaaatgcttcattaacaactggataccattcttattcaagttccaaatataggaagttcccataaaagacccaaaaaattaattacattttcaggtgttaataaatcctagtgtaacttttcacaaaagacagactttaaatataatatttattaagatattatttacatagaatgcaaaaaaatataaaactttgcctactagtaactactgtgaagaaatgcatgtttttctaggtgaaagttgggtaggttttctactttgctcctgtgtaggagtgggtttccagattgtagaagttaattgctctatggcagtggcttgcatattcagaaagcatttttgttaggtaaaaattataaaacttattacttaaaaattagttggaatggagaaaaagcttaagattaaaaaaaaatctgactgtatttttcccccactcatttaaaactcattaattaaaatcttttacagttga

SEQ ID NO: 112039 - DNA, 1088 bp, Homo sapiens
tgtcaagataaattgtattcccttgacagctttatgtctttttaccaagggtgtggttgtgtctttgtgtgtgtgtgtctctgtgtgtatgtgcgtgtgtaaagtaattggaatcattttaagattgtctttcatgtattgtacagacttttcattgatggggcagttactgaagtaagtaggttctgtacattcagtagggtttactgaaatcataagctaagatagaattaaaattaataattgagaatatgtattaagagcttgatataaatttatcagattatgttctgtctaaagaaatgactcattttcatattaaaaggctggttttcttaagattagctttcagtctgccttttattttttattgtaacatgttcctcataaaactaaaatgaaaacatccataactgtagaaatcaataatttaatattttcctagcatgctagtttatttttagattttgctctgtttaaattggtaagtgggcaaatttggttgatatttatcatttctactgttttggcaagtgttatgttctgggtaggctgcagtgcaatccaaagggttattctgatggttcattatgaatcataacctttccgaatatctgccacttactcaggtgaacttttttctgctgacttttttttttttttttaaaaacaggttccttgttccaatatcaagtgttatctgcaatgacataactgcttacctttttggatttttttttgggagaactccattaattaaggtaatggaaaaattttataagcaagccactatgtaaccttaaagattagccactggagaacatttccaacaactgtgctgttgtgcattttttatttttgaggtgctttgattttccttagctgcatggtgcagaagcagcaaaccatatttctcagtacttccatctgggttcttcatcagctcttctgttggctcctcaggaagggcatgactccatcagtctgcctgcctgcctgcctgcctgcctgcctgcctgcctgcctgcctgcctgccttccttccttccttccttccttccttccttccttccttccttccttccttc

SEQ ID NO: 112040 - DNA, 1053 bp, Homo sapiens
aattgcaatggtgtggccagggaaagaataatttagtcaaagttttctgggttggctaagaacaatggtgtttttaacctgtactattttgtactattttattgtaattttgaattactggttaattattaactgatgaaattaatagaagcttgtgtgcagtatacttcagttctttattctcctgtaccgtataattgtgattatgcagagattacaatcttattgatttcaaaaaaactttttttttctaaaggtcttttaagtcttttactaggataattatgaccatttaactttgaaaatacatagcaaaatattaagacaaagaaattctggcattctatctctggcctttctgatgtataacttaaaagatatatgtttagtcaatgtgttatgaacttttgctttgttttttgttttgttttgttttgtttttaatatcaggctgcctatgtgttatccaaataccagtactttgtctgcccagtggaataccgaagtgatgtaaactccttcgtgacagaatgtgagccctcagaacttttccagcttcagacttactcacttccaccctttctaaaggcagtcttgagacaggtacagtaaaagttcaagataaacatggttagagatcttccactctgaagattaagcttcctttattatttatttatttatttaattaatttattgttgttttgagacagagtttccctctgttgcccaggctggagtgtagtggcgtaatctcaacttactgcaacctttgctcaagtgattcttaggcctcagcctcctgagtagctgggattacaggcgctcgccaccacatctcgctaaattttgtattttaagtagagacgggtgttgctatgttggccaatctggtctcaaactcctggtctcaagtgatccgcctgcttcggcttcccaaggtgctgggattacaagcatgagccattgtgcctggcctgaagattaattaagctttctttaaaagtgggattcagatttgtacaagaaactgatttctgtagaatttttaat

SEQ ID NO: 112041 - DNA, 1006 bp, Homo sapiens
cagccagcacctcctcacatgcacacatgattagacataggtgcactcggtaccaagagtccattttatggtccagcatatactccattgattcatcatcactgcatgtgttcagccagtgtatctcacactatccatacaaatctaaaattgatactggaaatgttattataggaggcagtgatcgcatttaaaatcaggccacctacaagtttaattttcaacatctcatgtttttatttgtcccattacagcctcaaatgttggtcataaaaaaaatttaggctaccaaagtttaaagaataaaatgaaaattttataagaacttacattaaaaactcagtagtttgcatgagtaagaactccttgagatacacagatccccccacatttgtatttaaaataattggtgaggcattgaaatccagaattataagaaagcattactgaatatgtgtgttataaaatcaatattattataaacaaaataggaagctagaaatatttgggatcacagtaatagcttttctcaaatatacttttagaattgaatgtacattatcctatatgtaaaaaagcaaattattaattttaatggagctctcgattgacctttttagcatacttttatagcatgtatattaaaatagaatatattttagcaaaagattgccataaaaccctgacttggctcattttgatatttgcactgtgaagagggcttaaattccaatgtagcaatgtggtggcagacaaatgaaaaactaggaagttctttcacagtaatgcctagttgttccaaatttgctatatttggaggtgctctactggtacttcctgcttgactctctgacctgtgggatgcacattcttcctcagcgctttttccttgttgtggtgacgtacattcactatctgagagtgaaagaccacacacacccctctttttaaaattattgtatctcttccttttcactttggtttgaacaaagatagtgtcaccttg

SEQ ID NO: 112042 - DNA, 1713 bp, Homo sapiens
taactagaaggtggaaaccaaaaccctcatggtagtatttcctctggcagctggtgctgtgggcaactgttttgttcaatcgggtttcttttctttttgcctctaatgcagaaatcaacagaatcactcacacatacaagtacactcacatacataaactaattatttctctggatatctttctgtgttccatgtaaatttatttaccaacatctattgtcaacatgtacatctaccttagtatggtctgcattctttttctgagagtacctcatagggctcctgcctgatctttgtagtttgttcattcatccatccacctgttcatttgttcatccatgtattctaacatttctatgtagtgtgcaactctaatgtcatgcttttgaagaagagaatagctgcccatagcagccatccgtctggataatagcaaaacactctagataagttattttgcactttcttatgtataaagttggtagaaacttatttttgctttgtatcatttaaatacattttgttttggtaaatgaactgtgtataaaatatttatgccgttaaaactgtttttagaaagtatttttaatttcagcaagtttggttacttgttgcatgactcttaacacagctgactttttgtgtcagtgcaatgtatattttttgtcctgttattaacttgtaagccctagtaatggccaattatttgtacagcaacagaagtaaattgaagatactggctaagactggattgattgtggacttttatactatattgcagaaaccaatatctgtttcttggtggttatgtaaaagacctgaagaattactatctagtgtgcagtctgtgatatctgaatgttcattgtatatttgtctctgatgcaaaaaggtagagtaacacaattacaatacatgattaaatgcaatagtccaggtacttaagtaatttttttttcatttcaaataaatacctatttaccaccaaaagaaagaaaaagaaaagttgttaagtcagttattcagggaaggaaaaacagagatctaataactccctaactttatgtagttcttttctagttgtaaatactttcagaagcacctgcataagattgcagaagtattggctgttaaggttccagttccagttctagtttgactcatccttaaaaatcaggctttctgcagtctgagcttctcaattgtgctggattcccagggctaatgagtgtatgtggatggcagtaaggagaagcaagccccttctgggagacgtgaccctcaaatttgactggacctgtggaaaaagacatgtctgcatggttttggctcttttttcctgagctttattctccagccaaaaagtaagcaacagtgtgtgtatatatatatatgtgtgtgtctcttgcacccatactatagtcacataaggaatattccagtgtcctgcccctcacctggaactacagcagccgctgttagcagctggtctttccagttcagccttcagtctgagagtgttagaacttacaatccattgttcttgttatgagcttgtttgggtttaaaatagcctttctgtaaagaagagtttttaagtttatttaggctgttttgatgatttcactttccctctttctaaagatattaaattcattttaagcttgaacagcagagccccaaatttgagtatgttttgcttattacaaattt

SEQ ID NO: 112043 - DNA, 1368 bp, Homo sapiens
aggaaaatcttaactctgtttttttgttttcgtttttttaattcttgtcagtcaaagaaatagcttccctggtttaatactgcttttcttcatagactgaaacaaataatacagctttccttttagtccttgttcagccacacaacacaaaccagtatggcctttggcattttactgcaagctttccattcgattattaatgtttccggtgcccatgatcaagcatggagaagacctataattaattgacttttcctttcctttaggtgcagtcgctttcaatctgaaatcaaacgcttgaaaatctcatccccggtgcgtgtttgtcagaactgttattataacttacagcatgagagaggttcagaagatgggcctcgaaattgttgaagattcaacaagctgagtggagaccatggtctgtagaccccttcccgattctcctgtcccagcttggaaggcattgaaaacagtctccgtttacacatctcttcataccacgtgtttgaagtgttaaaattcaaagggatcattgaataaaacgggtgtagagtacaggaatggggcagacgcgattcaggtgaacagcacaagaagaatatgaggtggttcctaggagcaacactttcgacctccagttctccctgatgacagtagctgtctccaagagaaaaatcctcacttattaactctcttttcttgcatctcatttttatagagctactcatccttatttggaaaaaccaacaacaaaaaaggcttttagaaaatggttgtaaatctgacttctttgcaagtaactatgtatattgtaaatagatataaaaggccttttttctaaataaggacttaactgcctgtaacatgaaacttcaaactaaaccactaactcaatgaactacttatggtttgtctgacatccctcacttaccaattaattataaatatgtttttttaaatccccaaagacattatctgtggtctttttttcctttcaagctcagcctgtgtgcctgatgtcatttctttcaagttgcccacagtatctccacttaaactaggctagtaaccaaaataatgtggaccttctttaggaaacagtgtgggagaataggagtccagccgtaagataaactggaaatatttgggcgtcttgtacctggctacgcaccacctcagtgttgttcctacataaacagggccccttttaaacttgtatgtggactgctgtttggtcaaagaataccttcttagcattgcagaaaggtggtcagatgaccagtgtagtgcaggaaacagccctgtctcaactaatggaaatatatttgcatgtaacccaaaattagcttatcttgcatagaacataat

SEQ ID NO: 112044 - DNA, 1048 bp, Homo sapiens
tcactgttggcgattcttctggagtagtaatatggtcatcagagtgctggtgtggagcaaggagtccgttcctctggggaatgacatgaccttccttgaggaagtctaaggtctggctataacttgggaggtactaaagacataggtttgttgataatctgtgtccctatgacattctggggagcatcccagattactctgtacaaccctagggaggcaaacctgaatggtagtacccaaaccagagagtgcccagaaataggaaagctggaggaaagtcctgcagaggccctgttaggttgaacattccacccagcaggtcttgtaggagattcaaaagcccagctctatttcagagatcattttttctcaacgtaggtatcaggatgcttgatttatatgaatatttgaaattatcatgctctatgagataatgacattagtttttcctgttcctgtcctaataccatgatttcttttttctagaactcaaagaacctgtaggacaaatcgtatgtacagataaaggtattcttgcggtggaacagaataaggttcttatcccaccaacctggaataaaacttttgcttggggctatgcagacctcagttgcagactgggaacctatgagtcagacaaggtttgcattatttcctgcctactcatttaatattgctcttttgtggtctggctatcctatatgactaatagggttggggagaacccagtccaagggcttgtcagctgttcctccaaagcccaaaagaaaagtgagctttcctatttggggaaaggagagcttcactgaatgagagcaggataaaggagctcatagagatgtcatgttccctgcagaacaagcctcttttgcaaagttgtgtaacaggggctagcagtttccttctcactcaaagaattcctccgagagatcctagccagcaaggagctcagcatttctgtcaaccagaatagcctccttttgatgagtcaccatctgccccacttttcattttagtgctccaaacaagctggcagaaaacctgttgc

SEQ ID NO: 112045 - DNA, 1031 bp, Homo sapiens
caatctcggctcactgcaacctccacctcctgggttcaagcgattctcctgcctcaccctcccaagtagctggaactacaggcgtgtaccaccacgcccagctaatttttgtatttttagtagagacgggtttcgccatattgcccaggctggtctcgaactcctgacctcatgatccgcctgcctcagtctcccaaagtgctgggattacaggcatgagccacctcacccagccattaatatttttaatcctgtagaaatacagaatgacgatgtagcacatttttgttttcttttttccctttacaacatagcaaagcacaaagaagatgataatattcacactttcagcaaatcagtagcacctttttaggacaccaaaatgatatttctaaatcacataaaggccacattgaaaccagaaataatccaactagatagagtgtctgcctgccttcaatggcacagaatggtattaggctactgagagttaacttttgaatatcattggaaaataattgtcaatcaactgtagattgactttctttgagaaagttattgtgaattcagcttagcatagaacaagacaatagcccatgctttagtatcatagtcctgtccctgcttattcaggtgtgagttctctggccaccttcatagcgtctttgaatctctttcctcgggtgtaaaatgaggataatatagtacctaatagttcttgtgaaccttaattgaaataagaacacaatgcctggcatataaaagggcttataagtgttatctttcattataaagtgagtcatcttctttcataccagttatttaaaaaacctcatccaccaaagcgagtgagaagtcgactcaatggagacaatgcaggaatctctgtcctaccaggatctacaagtgacaagatcttttttcatcatctagacaacttgaggccttctctaacacctgtaaaaggtaaaataatgagaaataaacttttgattaatgatttaatgggattgttaataatcccagtttaa

SEQ ID NO: 112046 - DNA, 1007 bp, Homo sapiens
ccagaactcatatttcttacagccttgtcctctctttaaaatctactattttttggatgactttttaaaatctttacatttggatttcagtttgattataaaaacaaatgcagagagaaccctctgtaaggattaccccaaagagaattagatgttttatgtttattaaaaatttgtgcgtatttaatgtaggataatgggaaattgaaatgtcaccaactatagttggagttttcaagctcttgaacttgacagaagctgtcaggtgggaacggttctctaatagagaggtgtcttattctgcccacagggtggccactttgacctggctgaccggatgtttcacagtgtgcgcgaggcctggtattcagcgtcaaagcacaatatggcagatgtaaaagaacttatcccagagttcttttatttaccagaattcctgttcaattccaacaactttgatctaggtacgtagagctatggcactgtcttaggaatgttagccaggaaaagtccaatagaaataagtcacttctctgaagattgtctgcagcacacattaacaagaaaaaaatttgatacagtttcttgcagtcatttgctgtaattgggtgtggttacatgtgatttttgtcgttacaaaaattagccagacgtggtggtgggcacctgtaatcccagctacttaggaggctgaggcaggaaaattgcttgaacctgggaggtggaggttgcagtgagctgagatcgtgaactgcacgccagcctgggcaacagagcgagactccgtctctaaataaataaatattgagacagattactcccaacatttagaatttcgttgttttgatgaaaacagaggtgaaaatttattgaaaagtattactattgaaacccattaatagctaagagtggtacatccaaattttccatgtattgttttaatcttgtttattgcctaatacattctcagttcataggctaatgtgttttaaaattagaacttcaga

SEQ ID NO: 112047 - DNA, 1129 bp, Homo sapiens
gagggaggacacaagggagatctgatcctccagttatgtgagtgatgaagttaacgatgaattggagctattgtgtccacagtctcctgctgggtccttgtcaagacttggaagtattttccctcttaatcctcatcccctaaacctggatcctgagtggcttcctctgtgaaacatataatttccaaagcacttgtcttccaactgaatctgttaaccaactcccatgtgcctgtctgtaaagtgtgtataaacagtacatatatagcattattttggagtccagttataccagtttgaccccacagatactagtgcgtttataaatcatcatcatccacaacagccactgtatctacgttagtgaggctagatagtgtatagtaacttggaattgagttacattttgtattttaggaggtggatcttactaatcccaagacgtttagaaacctggctaagccaatgggagcacaaacagatgaacgattagctcagtataagaagcggtataaagactgggaggatcctaatggtaaggaactttttctgtcattggactttgtacccaagtttcaaaagtaagtcattatgtagcggtctgacattcctacatcctccttcaaattgcttatatatcatatctatatgtattatatgtccacacatatatgcagattattatagcagaggaatcaggtttgcatgccaacttatggccatgcttagaaggcattttaaatagcttatcagagtattggtggaaaactaagtattcctgctttgcatagggcagaaatttcccatcataatctgcctctgtctctaatcatgtttagtccaggaaccatactttaatttattgtctctctttaattttattgaggcaattttggaacccttttgcatttaaaaaaaattactatactctaaaaccttatagtttacttgttatttattatgtttaatgtttatggtgtttctccctcaaaaaggcaaaacaaaggagaaagaaagcctaagcttgtagtcctatgtgaactcttttttcccaccccctctctgccaaggagaatatgtagtaaaaatacataaaagtgcttaacattcataaacaatgatttagaga

SEQ ID NO: 112048 - DNA, 1091 bp, Homo sapiens
aggactacaagcttaggctttctttctcctttgttttgcctttttgagggagaaacaccataaacattaaacataataaataacaagtaaactataaggttttagagtatagtaattttttttaaatgcaaaagggttccaaaattgcctcaataaaattaaagagagacaataaattaaagtatggttcctggactaaacatgattagagacagaggcagattatgatgggaaatttctgccctatgcaaagcaggaatacttagttttccaccaatactctgataagctatttaaaatgccttctaagcatggccataagttggcatgcaaacctgattcctctgctataataatctgcatatatgtgtggacatataatacatatagatatgatatataagcaatttgaaggaggatgtaggaatgtcagaccgctacataatgacttacttttgaaacttgggtacaaagtccaatgacagaaaaagttccttaccattaggatcctcccagtctttataccgcttcttatactgagctaatcgttcatctgtttgtgctcccattggcttagccaggtttctaaacgtcttgggattagtaagatccacctcctaaaatacaaaatgtaactcaattccaagttactatacactatctagcctcactaacgtagatacagtggctgttgtggatgatgatgatttataaacgcactagtatctgtggggtcaaactggtataactggactccaaaataatgctatatatgtactgtttatacacactttacagacaggcacatgggagttggttaacagattcagttggaagacaagtgctttggaaattatatgtttcacagaggaagccactcaggatccaggtttaggggatgaggattaagagggaaaatacttccaagtcttgacaaggacccagcaggagactgtggacacaatagctccaattcatcgttaacttcatcactcacataactggaggatcagatctcccttgtgtcctccctccctccacccccgccctgtctccctccaacgttacttctgagcattttcttctcagag

SEQ ID NO: 112049 - DNA, 1071 bp, Homo sapiens
gcagatcatataatgatctcatgcagtatcctgtcttcccctggatccttgcagattatgactcagaggtaaatcttaagtcattttgcttacgtagaacacattttcaaaaataattttaaaatacgacaattgaagtggggtgcagtggctcatccctaaaatcctagcactttgggaggctaagagaggcgaatcacttgagcccaggattttgagaccagccagagaaacagggcgaaaccctgtctccactaaaattacagaaattagccaggtgtggtgccagaccccagatgtcccagctactcaggaggctgaggtgggaggattactttagcccaggaggtggaggctccagtgagccaagattgcaccactgcattccagactgggtgaccaaccaagcaagactctgtctccacaaagaaaaaaaaaaaaaactacggttgcctaaatgttttatttggtttgtagtttaatgttctcaataggcaaaggcacttaattcaaatagatgagaagcatttagcacagacatataaaaagtttggataattgacccacttactgagtactggctattaattcataatatctcttcagtttctttaagtgcggattaatttgcatctattggtggatgtcagaatccatctgtgtagtttgaagtgtttgttaggaaaacacaaagtaactcttctacaaaatgttcctgccatataaaagaaattttttatactattccaagaaggcttggtagaagatttccaacaattcaacatgtacatgacttaagtctcaaaatcaagaacacatagatgcatatgaatattttgattcccctcttcctttgcctcctgtctgatagacatctgattagttcagaaatgaaccataacaggcaaaacaaaagacacttagccctaggtaaacaaacaaaaagattgtttttaaaattcagaaattcagtgaacgttcttattcactagaatcatgactgcttatcctttcagaaattttagacatcaacatattaaggggaaagataaaactatcctcagaaaattt

SEQ ID NO: 112050 - DNA, 1035 bp, Homo sapiens
cagaataagaaatatctatttattgtgtagcttaatctgcagggaattcatgactctaaaagtgttagcaaattaacttcttttttttttttttttttttttctgagacagagtctcgctctgttgcccaggctggagtgcagtggcgcgatcttggctcactgcaagccctgcctcctgggatcatgccattctcctgcctcagcctcccgagtagctgggactacaggtacccgccaccaaggccggctaattttttgtattttttagtagagacggggtttcactgtgttagccaggatggtctcgatctcctgaccttgtgatccacccgccttggcctcccaaagtgctgggattacaggcatgagccaccgcgcccggccgcagattaacttcttgaacattgtagaaatttatagtggaaaagttaatatataattttatttgtgaacttctgttttttcttaatgtttttctctctgatcatttcagcctattgctgtggaagttttctctggagatggacggaattacctccttgcttttcagaaaggaatcagaaacaaagtctatcaaaggtcttgtttattcggaacactttgtatactattatgggaagatatgggagggggaatcttttctcagttttgctggtttttaaaaatctagatcaatgagccaacatctttgaagaaaataatttatattatttttgccaccctcttgaaacaattattcttctgacttttaaaatggtgcaattctattgtgacataccatttttccttctggtaacttatagtagagatcatcaaaaactacttttatcactaagtcctgtgtctctaaatacaaaggatgatgaaactgtagctttaaaaataaaactttagtttctttttttcttcttctttttttttttttttgagacggagtctcgttctgtcgcccaggctagagtacagtggcatgatctcagctcactgcaaactccgcctcccgggttcacgccattctcctgcctcagcctcc

SEQ ID NO: 112051 - DNA, 1096 bp, Homo sapiens
cttccttttcttctaccagtcctgtgatgaaagtggtagtgagtagtggaaaactcaggagacagaccaacctagaagaaagttaagaagcttagggcttagaagatcaacaggctgcttctcttcctttaacattttcctagcacccttgaacacagacattgtttctgtagttcattcctaggagatatttcaaataattactgtcaacaacaatcagggtcacatgaagtctttcgtgggtcctttttccatacaaaaatatttaaaattgtatgttgtggctaatggtataaatataatcttatattaaaatgtgtttttctacctaaaagttgattttttttctgatttttaaaagaaattaagacattttcttgggccccaaaatatgtgagctgaggcactgtgctaaccatgtctggtagataacttggtcctgacagtaataaggggatttttaaaattatattcatcaaagggggttccttgtatctcaggtagctaacaaattcttcttgtaaatatattttttaactgaaaattctgatatatattactcctccatcctgttcatgtgtttaaaattagcacgccctttatggaacagtgaatttatcccttgctgtgtttttatttgctttttctcttggctgcctgtagtatgcatgagcctattattcctagaggagccaggcaaggccctagtcaactcaagagaacatgcagcatttttgcatatgaagatatcaaggaagttcataaaaggagatatctcctgcaggtgagtcaatttagtagtactgttttatcatgtttctttattctgaaaatgtattgttttattttattttattttttattttttatttttattttttgagacagagtctcactctgtcgcccaggctggagtgcagtggcatgatctcagctcactgcaacctccgcctcccgggttcacaccattctcctgccttagcctcccaagtagctgggactataggcgcccgccaccacgccaggctaatttttttgtatttttttagtagagacggggtttccttgtgtcagccaggatggtctcgatctcctg

SEQ ID NO: 112052 - DNA, 1076 bp, Homo sapiens
gcagaactggaaatttaccctgagttagcaggccctgcaattttcactctgtatcatcttgcctcacatagaacacaatcctattctaatctccttacatgtatgcctcaattccctttcctgccaagtttgctgtgtctgtctcccttcatgagagcaggagccttatctaatgttcttgacttttagaagctagcgcatgtttgcctggcctacataaagtacacccggaatattgagagagatgggattggcagatgagtggatgggtatgagtgaattgtttagttttactctagtcagatgtaaatcagactgtaatctaagcttaatcttctcaatatgcttaaactctgatttaatatgcttagctctagggatgccgtagtagtctaacaaaaattgatctttacaaaaagcctatattaatgaatgtttgtgggcttctttatagatccaacacatgtaccgctgtgctcgagtccagggcctagataccagtgaggggctccttctttttggtaaagagcatttttatgtgattgatggatttaccatgacagcaaccagggaaataagagatattgaaaccttacctccaaagtaagtaaatgaatgaagagacataatgtatggctatctttagaagacagaaaatgtatttgcagttttcttttttaatcaaaaaattgtgttctaggtaatgttatctctcggtttgtgtgcattcatcattacatattcacaaagatgatattcagttattttaaggtaataatgaaaatgtttggcttatttatcaagatgaaagctaaataacatttatttctgtgcattctgagttatttatattataatgtatatatttacaaatttattctgaatttataaatggtccttttaaaaaatatagcagatatacaattgtagagaaaatactcttttttttttttttttttttttttttgagacagtgtctcactctgtcaccccggctggagtgcagtgagtggcagtggcgcaatctcggctcactgcaagctccgcctcccgggttcatgccattctcctgcctc

SEQ ID NO: 112053 - DNA, 1030 bp, Homo sapiens
atcagtttctcctgttgttatgacatacctgttctctcatgtgatgactatgacttactaaacattttataattgatccaacattttcatgaaatcactgaaactgttcgtagttgaacagagattaaagccttctaattttgttgacattgcaccagcatagttattgaattgggtccaaagctgttgctggatacaagccaaggtataattcacagagtttgatagattatttgtgtttaggtcattggcttttaacttctctggcctgattttcctaatctctaattgagctaaaagcgcaaatatacagggtattatgctagacatagaaatggaggttttgattcattaagctaaaaataaagcagctgtaagctttccaccccttgtggatgttctctgcaggatttgatctctcttgcttacttattacacttgttcaaatatgaaaacaaggctcttctcaaggcaaagcagaacctctgataagtaatattcaaaggataagactcaggctgacttgtgcttttccaaagtgcttagagcaactgtaacaggcaggtatagtgttactttggatggcacaaagaatattaatttaatcaaaatgtgtgatttggcatgcattttaaggacttctcatactttgggtcctcactggttactgtcaactgattttaaattatcgtactgtgattattaaaaagttgtcaaaatgtaggtagtaaaatgtttccttaatctgcaaattacattatatgtccttgtattataaagaattctgttctttctgacctggtattttgatcaaattaattcatgtatgaaaagccatactgccacttgtgaaatgaggcatgaaatagtcttcaagagccctccaagtaggtgggatatcttgtaatcatgtttattttttactttttttgagacagagtcttgctgtgtcacccaggctggagtgcagtggcgtgatctcagctcactgcaacctgtgcctcccaggttcaagcgattctccacctca

SEQ ID NO: 112054 - DNA, 1032 bp, Homo sapiens
tggaagtgaagttccaggctcctcacagactagacaggctgtttgcagcttgatgctcttcaacagtgatcattctctttaccggatggggaggttttctcatacaccaaagaagacacactgcactaacacagaaacattttttggctagagattatttcaggaagaacaaagctgctaatattgttgttttatgtatgtcttttaaaaaatcaatagaattttaaaatagagaaacttaacccaaaagtgtggatttactgtatatacatacagtctatgaaaagcccctttaaaaaggtaacacaccttgacaccataccttccctcaagaatattacgttttaattcttggtgatagttatcggagtcattttcttttgtcatttcttagaaacctgctcgatatagaagagccgtaagttatgacagtaaagagtactacatgcgactggcctctggcaatcccgccattgtccaagacgccattgtggagagttcagaaggtgaagctgctcagcaagaaccagagcatggggaagacactattgctaaagtcaaaggtcagcctgcctttttgattttgattaaaagtgattttggaacattcttgtatttgaattcatacaaaaatttgagcaactataaatagtagggccaactttaaaaatatccatacacattttaccatctcacccttcttaaagattgatttctttgtcagaactaaaaagacttgctcttgtttattgcctacaaatgaatatcacgtgcccattggcttaatggttttttaattgtatttctcagaattctcagtggcacttgatatttagtttttttaatacacatatgtattttttcatgacacagcatcaggaggtattgagaacatgtgccttggcacttgatattttaagggcttaataactaaataaatatttatgaaattaaaactaaacctgtcattagtgcatattagccaatagtaaggaataatggtctttcttcctatgagttgagagagattat

SEQ ID NO: 112055 - DNA, 1034 bp, Homo sapiens
ggggctgatgatccagtctaccctctgctttcaccctttctgggatggtaaaggtagtgaaggaagtagatccttatgcttttaagggaggattcttaaagagaatgatgtctgtggtatggagtattgtaaatgatagcttaaatcagccgtttgcccctgttacaacacagatttagggataaccccagggaaaggaagatggaagatactagctagcattaggttctattatcctgatttcaggttttttgttttttgtttttttttttaaacaatgtaaagagttgcctgtaaatcatccaagtcaatggcagcctgtgctgaagttttgcctgtgtgatttgtaagagtttgtcctgttcagtagcactgagacgtttgccgtatttaagctttacttaaaactgcttttgatctgtgagacagtaaccacaagatgcttagtgattatttaagctgcttaggctatcatgttaattttgtttgagtaactacatctttcatatttcatacaatcctcaagaaaaattttatttttgtgttcctctttatgtttttttttctgatatgtctatacttaataccctgttttcagtctgagatcccaagtaaacagcctgagacacccgatgatattcctcaaaaggtaaaacacaaattacagtaaaagaatgtaaactacttgtagttttgttttttgttttctggttttttttttaagtgcatggtagactagactaacttaaaagattggctttcaatttgttcttcctataagttccttagagttgaaccgttggtttcattcaggctgagagatgttgttctactgttgctcagctttttctaattatctctttttaggatttatatgccactcactaacagactgagttttcactgctctcactataaaaacatcttttgcttcacacataaactaacaaattatgaggcatgttagtaatgggcagcctggcatcttcaacttttcagtgactcatttaattcttctaaatactaaagtgtat

SEQ ID NO: 112056 - DNA, 1833 bp, Homo sapiens
tccaaataataacttgattttcagtgacttgtagacttgttactgttactcctgcttttgcttgaaaaccgacctggactctttcctgtcagcgtcagcagaatgccctgaagtacgtgacagaagagtggtgtcagatcgagtgcgagctgttgagggagcgggggctgtggggccctcccatcggctcccacctcgacaagtggatgctggagatgacagaagggccctgcaggatgaggaaaaagatggtgcgaaatgatatgttttataaccattacccttacgtgccagaaactgagcaagagacaaatgtggcggtgagtatgcagaattcaatgatcacaatggctctttcaagtttttattttcctctgtaagcgttttttctctatttagtcaattacctcaaatagctaattttaaaaattcaacatacgctattaaattgataacttcagagtggaggtggagtgaaaagatgcaacagtgcaagaaggagacatcataataaagaggtttagattacagactccagagccagactgcccaaatttaagacctgactctgccactttgctattatagctgggttatgggtcattaaacctctctgagttttcattttattatgcctgaattggagcaaataatagttccacctcgtaggactgttaggaggatttagttcattaaaattagttaagtacttagaatagtgtctggtccagaataagcactgtatattagaacacatgaatcttctaagtagctctgatcatataaggtgaggcagcttgaattgttccaatgcctcttgtttttctctgacaaacaccctggctccatttatcttgtactgattggtttaaccccagtcctgatgctaatatagagcttagcatcaacttaagtgtctatcagcagagtaatagataaagaaaatatgctgtgtatacataatggaatagtattcagccttaaaaaaataaggaaagcctgtcatttgtaacaacgtataagaacctggaggacattatgttacatgaaataaacaaggtacgaaggacaaatactacatgatccatctcacttatatggggcatctaaaacaatcaaactcagaaacagagtagaatgaaggtttccagaggccaagaagtgaggggaatagggagatgttggtcaaagggtacagtcagataaacaggaggaaatcattttttgagatctattacattccatagtgactataattgataataatctattgtacatttcaaaattgctaagagtacttttcaaacgttcttggcacaaaaattgttaggtatttgaggcgatgaatatgttaattagcttgatttaatcattcaaaccatatacatatagcattactttgtacaccataaacaattacaatttgtcaattaacagtaacatttttaaaataataatatgcgtaggtcttagctcctgctgatagttattaagattttggaagatagctctctaaagtctacttttctcaaagctattcaattctgccaagaatgccatacttgatgcagctgtgccttaaagcactataatttctaattctggagcactgtgtaaaaaaggtaatccacccatatttttgcagcctgttactagcacttacttttataagagcaaagcaacaatatgatctttcagttcttaatcttttttccctaacaatctattaagaatttaagccattagcaatttgataaaatatttcttattgagtcacttcttaaattgaatccattcaagaatactaaaatataaatatgctctcccaaatat

SEQ ID NO: 112057 - DNA, 1039 bp, Homo sapiens
gaggagtcaggcatacaaacaaggaatccaaagcaagaatgaatttcatagtaaaagtcttttcaaaatatttcttttcttgtgcaaaatattcaagaatactaacttagttttgaactcaccttaaacattcagatttaaaaattacttttaaatgggggataagtttttaatctagaaaaagttagttaattacatatatataatttccaattttataaataaaaatgttcttttgtatgaatataaagtttttttaatgttttctaaataggcaaccacagtttcagttgtctaaataaccttttcactgggctagatacaacatgagctttgttttttttacattaaatactgtagtcgaaattcccacatgtaaacatgaagaaaaataaaaactaactttatactgtgttttgatcatttgcttacttttttgtttgtttgtttgtttgtttactagggcgtcagcttctcataaaagctgtcaacagagtttggactgaactgatacatagtaagaaacaagtcttagaggaacttttcaaagtaactctacctgtgaatgaaaggggccacgtggacatagctacagcaaggccactcattgaagaagctgccctgaagtgctggcagaatcatttgggtaaggcctacagagatcataccaccaggagatttacatgtggctatcatatatgggtatactttaaatatgtgactacagcattcacaaaaggattctataaagtcatccttaaaatcaatataacaaccattctagaatgattatactgagatcttagttctctttgatttttttttttttttttttagcatctgaggtatgttatacatcaggcgtttatgcattcagaatgtaatgcattgctaacagctctagtattgtcactgtcttggctacaggtccacaatcccttaactataattttgaaattcaaaaagctctgttttttcattaatttggtgccaaaactgactttataacagaacctaatttatctttctttgtcctact

SEQ ID NO: 112058 - DNA, 1023 bp, Homo sapiens
ttcacagttttcttgaagctctcttctgtctgtgttacttcactgctattagagctatacactaaaacagagttttgtttcacagttttaccctttattacatacacaaaatcaattaagagctaataaactggcccgttttctctcaaatggagaacagctgtgactgacagtttatgttgaggaactgcttgtttatcacagactctctttaggcaataggagactccacaggtagtttcaatccataacgctttatcctgctgaaattatttatcctgatttctggccattgaatgtcattttcttcaagtagtgcataaaagctagtagtcatattgctacctgttgtagatacacttattttaccttagcctgattttttttttgaggatctggtcctgtgttggtagatatcaattttcttagactttttttcctactggaatttaggggaagatgcatctctgcctattaccagtggaggaagctaccaggtattggtgaacaatgtgttttatttcacacagcgtgtggtggacaagctttggcaaggcatgttcaacaaagaatctaaacttcttatagattttataattcaactaattgcacaggtaatccattgtcactatcagttgtagagtacatgttttcctgttttgcctatggtgtcaaaattgttgaaattaaatataactaataagataatgaatgttaacatttaagaaaaagctaagcttattaaaagtgaatagagacaggctgggcgcagtgactcacacctgtagtatcagcactttgggaggccaaggcaggtggatcacttgaggtcagaagttggagaccagcctgaccgacatggtgagaccctgtctctgctgaaaatacaaaaattagccaggcatgttggtgcgcgcctgtaattccagctacttgggaggtggaggcaggagaatcatttgaacctgggaggtggaggttgcagtgagccaagatcacagtactgcactccagcctgggtga

SEQ ID NO: 112059 - DNA, 1055 bp, Homo sapiens
cggagtctcgctctgtcgcccaggctggagtgcagtggcgggatctcggctcactgcaagctccgcctcccgggttcacgccattctcctgcctcagcctcccaagtagctgggactacaggcgcccgccactacgcccggctaattttttgtatttttagtagagacggggtttcaccgttttagccgggatggcctcgatctcctgacctcgtgatccgcccgcctcggcctcccaaagtgctgggattacaggcgtgagccaccgcgcccggccccttcttactttttttaataaaaggttcttgctgtattgcacaggcttgactcaaaatcatgtgatcctcccaccccagcctccctagtggctgggactgtaggcacttgacgctatgtgtttctttttatagacaataaaaagctttgtaaaccatttttttcttgacatctatgaagctcagagctaaattgtgtgcttagttttttgttacaaatgtatttcccctccctattgacatgccctcttgattactagattcttgggtttttgtattagttttaatggctttataattcatttgttatttattttacctgtatttcattgtaaaccaccatatctcttttggaagtgaggtgtgataatagtcaagtatttattatattattgtagtttatattgttataaactgttataacagtttttatataacaatattatatatagttttatatattatatatactatatattatataatataaactataacaatataataaatataatgtttagaatactatgttttaaataatggattcaaaagaagatgatgtttcacctttgctttaaattttttttaattctgtagtcagaaaatacgtgaaagaccataagcatagcatgtataccatctctcatggcatttaaaacaaatttattagtagaattttttaatctttttaatatattaggtaatgtaaatgtggttgagctcatatttttgttttagttggttctgtttctaattctaaattttcttgattaggcttcc

SEQ ID NO: 112060 - DNA, 1040 bp, Homo sapiens
gtaagaaggggccgggcgcggtggctcacgcctgtaatcccagcactttgggaggccgaggcgggcggatcacgaggtcaggagatcgaggccatcccggctaaaacggtgaaaccccgtctctactaaaaatacaaaaaattagccgggcgtagtggcgggcgcctgtagtcccagctacttgggaggctgaggcaggagaatggcgtgaacccgggaggcggagcttgcagtgagccgagatcccgccactgcactccagcctgggcgacagagcgagactccgtctcaaaaaaaaaaaaaaaaaaaaaaaaaaaagtaagaaggaaagaaaaacacaatagattgtcagcaaagacatatgttttcctaaaattgttctgacaggaatgttctctgtgggtttttgtaaggaggacggtgaacaaccctatataggtggtatctttgttaagttttacaatgtacaaagatgattttgaaaattatcttatgttaaagtgtagagcacaaagttaaactgtagtctactgacaacaattctacttgtaattagggtatgaaaatccaggtgcataactttccagtatctgatccagtgagtagcaaggaactgggaacagagggatgagatgtaggaaagagccttttgtcatcctcaaatgccagtagtttcagccaggtttttgataggagttggatattaaacaattcaataaatgtcataacttcctttcttaaaaagagatctgtatgttttagattcaggcacagtattgaggttttgcaagtgaaatggaagaacctacttattcttgaatagagagatccaggactgtatttatgaccctgttacaaagatgggcttttggaatgctgttctattttcccttctattctgattttcaaggtggtcctattaaatgttttaagaaagtagctagaataaaagttctacattgagaacaagaatactagcttaagttctcaaaagccaacagctaaaccaaaattgtaaggaaaattgctctttcttctgc

SEQ ID NO: 112061 - DNA, 4008 bp, Homo sapiens
ctcctcgagtgggtatgacaggattctcagtgcaaattcggattaggaaaaaaaaattacttaatgatagatagcatccacattgggaaaatagtaagactttacttgacttctaattgaagactgttaaagatgtctgtatatagcttatgtttgtggcactgtaggaatttagcttttagactcaactacacttccatcctaatgccaaatgctattcaaatcaattctagtagttgacaaaatcttttaagtgtaaacacttgagtctgtgcccttagattaaattaagatacagattcatgcctagcacagttgtattggttatgcaatttttcaatatccatggtgccatagtcataaagtttatatataaaactgctattaataagtcttaaattaattttattttatcagatttatctgtaagtaatctaaaattaaaatactgctgagaatgggaaagaagtgagcttaatgtgctttgtttaaaagatcttgcttaaatttatttgttctataattttatctcttggctaattaacatgtattttatttttatattctttaggaaaaaggtagaaagcaatgtttttaacataggtacctaaggcagaatgcagaatgatacacagtattcaattttttatatctataaaaatgagttttaaaatgtaggatggaagggtactagttctttatgtctatatcattggttacttttaaaaacaacaaaaaactagtttcaaagaaattttagcctattagaacttatgagggtctctactgaaaaattagtggtggctaatatttgctccctttcacctctgcagtttgatttggattccatttggacattcatctttggagttcctgcctccagcggaactgtggtctcttctatccataacgtatgcacagaagctgtttttttattattgggaatgctccgcagcatgctgacttcagtaagttcactcaaatgcccaggcctattgagaattcctcctgcctaggatacttttttgtaaatagaggaattttttggtaacataactactttatttactgcatgatctctggaacttcagactcttatgttagacaaaattatatctaacgtaagaacagactgtgtagttgttaagaccgtgcactctggagccctacctgggttaaaatctcacctctggtacttccaatctattatcctcagttatgtgcctcagtttcctggtgtttaaaatgccgacaataatagcatgcatctcttagggtatttgtgaggaattaataagatagtgtatacacataaagcacttataaacatggctgatacataataagtgcttcgtaagtattaacttattaatgtaataaaatatataataatgagtacatatataatgagtacatatttgtagtatatgttattacaataatatgttatttcaacttttaaagtcactttcatttagaggtcagaaatgttaacaatacaagtttcatttgattttgtttttgcttttgttctgctctaattatgtctaacttagagatgaagaattgaaagagtaaaagacagaactgatgttcctgttgatctgacaggaatactgtgaataatgaccagatttgtttatacaatttaggattgtgttgtaacaggaaatattaacttgactccttgaattacatgtacctgacaaatctaatttcagtcaaaactattgttgtatcatctaagaacagaacattaccattaaatgtattaatttagaatgttttaggagtctcgttttggtgcctattcataaacaactataaagacataagaaaagttttttaaaagatactctctgggcaggtatcagaagatatacattgttcaaatatacagtattcatttttttatcatcatcattgttgtattacataatgcttaagagtgaggctcagaaaggtgaagtaacttccctaccttttatcttactcctaacttagcatgatgcacgatggggcaacattaatggtaatacagccactttggtaccaccaacactcatggtaataataatgaataatcaaaaccactgattctagttagcagacctgcgattaatctaatgattagacaatgatcctatcagtttctaaggggattttttgttttagctagtttctaaatttctttgcatgtgtgtatacatgtgtgtttgctcatatgtgtggtttacagagttctggaccatcaatatatccagtttcataagaatactgagtaatggatttttaaaataatttatagcagtgtcaataactgtaacatagtgtttcctctcatgtccccataacagccttggcaatcagaagaagagggatcttggctccgagaatatcctgtgaccctgatgcagttcttcagatatttgtatcacaacgtgccagaccttgcctccatgtggatgagccctgacttcctgtgtgcattagcagccaccgtcttccccttcaatattcgcccttactcagagatggtaggaaagggggaggaaaatgtcagaactggaattagaatgtcagaactggaattagtctgtttcaatggttagcagattttttttgacagtcttttaagtttctgaccaagttacagtttcataactttatacatcacctcttgcattattgtccggtgtccccagctccccacagtttccttctgctttctcctaaaatcacagtgaactctacttccttttctcattcaccatattcttgtaagtcccttgttagtaatttcccttttcaagtagttgattcatttattttacgcgatgccagctgtgtagttgtaaaatgttcttttccattaagataactctagtctgaccaaatttatttattttttattttaggaagtaggtatttgctggatttaacttttgccaataaattatagggttgaaagcaaatgttggtcctttcttccgcctgacttttcttttttcattaaagttttattttgcttattttgtactaacttaaaaactattagattataatcacatatagtatagatactcttttgttctttaaaataagcccaaaaatgctgcctggtttcctgctttgaaaatgtattcacgtggaaattcactgaagcacatttttgcagagggcttgcaggatagtttcataactttagagtctaaatactattcattacagtaactaatagttcagttgacataaatattggtgacttttcaaaacgaatgaactactgtagtttacacaaaaccatatagcaggggcttatcacttacttttgcacgttgatgttgattagctaataaactgtaaacataaaacaggtttaaaaataaatagataaaacacacccaaaagatagttattcctccatagtacttcaaaatttcatgatgtttcttcatatttccaccatatactctaggacctgggataaatgaccttctttatactaatttttctccatgtataaaggtacaatacttattctaaaatggtggggatttttaggagaaaggcaaatgtgacacatgaccttaataccttggcttgtttataattttagaatccttatttttggtttaaaaaaaaaagaccttcaataatatatcaatatcttttccttgtcagcatctttttttttttttttgagacggggtttcgctcttgtcatcccggctggagtgcaatggtggcacgatctcggctcactgcaacctccacgtcccaagttcaagcgattctcctgtgattctactgcctcaccctcctgagtagctgagattacaggcatggaccactacgcctggccaatttttttgtatttttaatagagatggggtttcgccatgttggccaggctagtctcgaactcctgatctcaggtgatctgcctatgtcggcctcccaaagtgctgggattacaggcgtgagccactgtgcctggccatcagc

SEQ ID NO: 112062 - DNA, 1351 bp, Homo sapiens
atttaaggttaactagtttttcatgattttcaggacaatgaaatatattaactacattatagcaagttacaaaaattagctgggggtggtagctcatgtctgtagtcccagctactcaggaggctgaggtgggaggactgctttgaccctaggaggtggagattgcagtgagccaatatcatggcactgcactccagcctgggcaacaaagcaaaactgtgtctcaaaaaaataaaaatatatcataacaaggatatttttaagttatgtttttgtagcattctaaattttggctgtattttggatttcacttttttcttagggaactacaagaacactagagctcttctgaggtctttcatttaataagtagaacttacagcaccttaagaaggattttcaaactcccttgtatcttattgtctcaactgtgtttcaaaacctatatcctaatagacaggtttgctaaagtcaaacaaattgtaaagtaaaacttttaactgaagattaattcaacagttgaatacttaattgcctatagtagtatgaatgttctggatagaaatgttaacacatactgaattacttccttctttgttaatgcagcatgtttatcagttgctgattttgcacttactgttatattcctcttctcttaggattcaacgtgggcagaagtgctggtgggagatcgacggtcagggagattaaccgagatgcttgtcattttcctggttttccagtccttcagtcattccttcctaaacacactaatgtccctgccctctattttctcctcatggccttgtttctgcagcagccagttagtgagctgcctgagaacctgcaggtcagtgtgcctgtcatcagctgccggagtaagcagggttgccaggtaggaattatctagcaaggggtgcgtgaaattacgtattccaaagaatcaccgtaggataatggataatcactgtaaaaccaactgtcaattccatcactttccccacatttaaggtttgatttgggacagaaaaatctgaaaataccacagaaaattttcccaaaaagtcctttgtccctatttacaattttttcctatatgataactctgtatattatagatgcataaagactctggatgatatttaatggtgatctaaagaactcttttgttatatgatttattttattttattttattttattttattttattttattttattttattttatttgtgagacagagtcttactctgtcacccaggctagagtgcagtggcatgatctcagctgattgaaaattccacctcccgggttcaagcgattctcccacctcagtctcctgagtagct

SEQ ID NO: 112063 - DNA, 1669 bp, Homo sapiens
aaatggcctgattggacttgctgtatgtgtggttgccacaaccctttaatttgtaagaaacacagtatctgcaaagtgcattaaaaggtgtgcctctgtgaggtctgtgactcagtaactcatagctctgctggaggagagctgggcctagaactctgggttgttgatgcccagttctgtgtacttgcagtactatctgagaatgtctcagctccatttcttcgtttcttctctaatttctcctttatgcgtttgtgcgcctttgcctttcttctgtgctatttaattctaacttttctttatgtattacgtttactgaataagtctatgcttcctattttcaatttttaaatctggtagaattaactgtatctttcaaaaaagaaactaagaattaaggatttgagaggttaagagtcagtggtgattattatttttattcacatggtcctcatttgatgactttccccctactgggaaggcaaggggaatattaatgtaaaaaatatctcacagccttattatcagtagtttaggaaatgtcaaatgtaaatgaacaattttcggagttctaaagagaaatatttaactgaccctttttcttgtccatgttggtgaaaagcagtcctggagaaaatgttttctaaaagatatatttttcagtaaactttccaagaactatgttgtaaattttcttttagcttatctactagggagatttaatgtatttatttttattttaggaactgaagaggagtttggaggtcttgtatcagctaatcttatacttttgaggaacagacttctggatatcttgctaaaactaatttatacatctaaagaaaagacaagcattaatttgcagtaagtaaatcttttttaaaagtgattataccagttgctactactagttaattcatgttaggcaaaagaaggaattgccattgactttaaatagatttttttaaccctgaaatttatagtatctccagaatgaaactcagtcttctttttcctttttgatttgaaatcctaatttctgaaattaattttgttttttgttttttaaatccatctgtcttgaatagagcttgtgaagaactggtgaagacactgggttttgactggatcatgatgtttatggaggaacacttacattccaccacagttacagcagccatgaggattcttgttgtcctactaagtaatcagtctattctcatcaagtttaaagaaggactcagtggtggaggatggcttgaacagacagattctgtcttaactaataagattggaactgtattaggtatgggacttttctagtcagctgcttgaaaatgagctggtgtgttttgttttattttaaattttatgtaaacttatcctctgcggtttgatcaccattaaggagatattaattttaattaatgatagaaggaagagcttacaagatttcaaattagtccttttaaatggcaaatcaaactgaagacagagataacatactaagatttgaaaactcagggaattcctcaagatctttttgtagtataggccttactgatctgtaagtaaataattagcaaattatcagtagtagaactaaattaataataataataaatatttattttgagtacttactgtgtgccagttcctaaacacttgc

SEQ ID NO: 112064 - DNA, 1001 bp, Homo sapiens
agggagtctccctctgtcacccaggctggagtgcggtggcgcgatctcggctcactgcaacctccaactcctaggttaaagtgagtctcctgcctcagcctcctgtgtagctgagattgtaggcgcgtgcaaccacgcccggctaatttttgtatttttagtagagacggggtttggggtttcaccatgttggtcagactagtctcaaactcctgaccttgtgatccacttgcttcggcctcccaaagtgctgggattacaggtgtgagccaccgtgcccagccagcctgtattgccttgtcccaaattctacctttaatgctttccctagaatttgcattatagacagaagatatttttaaaataaaacactgctaattaaaaaacttttcaagatgatgtatacagttcttgttcacatggggaatttatcttaattatttttcactatcttttaatcaggagtaagaacatttgtccctaagcctgttgccactactttgcagtacgttggtggagctgcagccatcctgggcctggtggccatggcctctgatgtggaagggttatatgcagcagtcaaggccctggtttgtgtggtcaagagtaacccactagccagcaaagaaatggaaagaatcaagggctaccaggtttgtaactgtaaaactttgccttcacttcacctggcacctaaaatactctgcttttttattatcattcatgttgtttgaaactctggaagaattatattgtccaaggaaacttaaagagacagtagttttatgaaaactaatatatgtcaaatgaaagtatgtattgtttctttattttgctttatcctttttctcctatcttatcaaatcttactaaacacttgagttaggcaacattatttcaatatagctttaatacattgaatttattttcagaacaaaggtttgctggtttgaatgttgtttttctctgtggaaatgggaaagaaatgaaatggggtccta

SEQ ID NO: 112065 - DNA, 1080 bp, Homo sapiens
acttatgtttacttggatatggaataaagctaatatgttcactgatctgaaatactgtgaggcagttagtgataacaacctttaaactaccaaagaacttcattcacaaagacccctgaagctgtgtctcaagatcctctcaccatctttatctcagtaaattgtgtttaacttacctcctgtgagtttccacactttggaagtgtttgtacatttccaaaaataaatgctcccaggctggagtgtggagtgccagtggcacaatctccgttgactgcattctcgacctcctaggctcaggtgtttctcccacctctgcctcctgagtaatgcaccacaagacctggctaattttttgcattttagtagagatgggggtctcgccatgtttcccaggctggtctcaaactccgggctcaagcgattcccttgcctctatcttacaaagtgttaggattataggcatgagccaccaggctggacctaaatgctcgtttttcagtattctgataagggaggagagaaaagatatgttaccattcatgtgtttggtttcttttccaatcaaaacattgaaactgttcttatataattacattcttttcctttcctatttttcagttaggcatttcctcacatgagaatgccactcctgtgaagttgatacacaattcagcaggacatcttaatggatctgcacggacaattggggccgctctgattggatacttgggtgagtggacttatctttgttgtttcaaacttctttatttgccatcaagtttgcattcactttcctcacttaaggggcagtatttaagttcatattttaatagcactgacctatagtgtacgtgcagtattcagagattacatgtaacaatctcaaattccagtcaatttaaaataataacctttcataaaatcccactaacttttacatatccaccaaggaatactatacagccataaaaaggaatgagatcatgtcctttgcagggacatagatgaagctagaaatcatcctcagcaaactaacacaagaacagaaaaccaaatgttgcatagtctcactcatag

SEQ ID NO: 112066 - DNA, 1048 bp, Homo sapiens
gtcttccactcccttgttctgattccaccaagaatctcagaagagttaggacaagtatattgtaaatggtcataatcctaagatttagtaatttatcttttcactcattcttaatttagatggtatctaataaaagctaacacttcttgggcacttactgtgtgctaaataagtcaatacacatgaaggatgtagctgttctgagcccttcacatgtatttattcatctcaaaacactgtgagttaggtactgtcattatcattcccatttcacagaagaggaaactgaggcacaaagacatataggtcgcacagcttttaagtgataaagcaagattcaaactcaggccatgtagctttaaaacacatgcctttattaataactcctctgctttgtggtctcaaagaatacaggcaggcatatctgagtgcttttttaggggaggggacatagtgctacatggctgatcagcattttattcatcttcattcctttttcctttgaatctagggggacatgttttacagtttgtcagataacagttaaaacttttcatcctttacgttgtgctatatgttaaacatgttttaagagtggcacttagaatgtagaactctatgactagatttctttttccatcttttaattaaagaaataaatgaagagctgagaagatagtttttaaatttacctctcttattctactttaagactttcaagcctcctcatttaaaaatgatagtaagaataaaaaacttactttaagatgagaactactgatgattttgaaaagaattattcttcttttgaaggtaaagatgcaaaatccgaaggggtggtgccatcccctgtgtcattagtaccagaggagaaagtgtcatttggcctctatgcactctctgtgtcgtctctaacagtggcaagaatccggaaagtgtataacaaattggatagcaaagccattgctaagcaggtaagcagaatgatttcttggtgtactatggctgattctcactgggaacatgtctcagagtctcatatggatac

SEQ ID NO: 112067 - DNA, 1055 bp, Homo sapiens
aagcaacttaagttctttatctcttatactgtacttaattatatatttattataataatttacccctataaaacgcttttcatcagtaattttagttaacagactcacattgaaggtaacatacctaatttcaagactactttaattccatagtggaaagctctctttatatcagcacaaaaatttcagagaagcgtcattaacttgatgtgcaaaccagccattgacagtatccctgtatttgcctgttgccatttctagcattaaagagtttatctgtgttagagagttggataaaagttttagctactatacctggtcctcagttacagatcccagtatcgtgccttgcccttcctgtttctccaccccaaatgtttttgtgcatttgtaaagttgtgtgaccttgggataatgaaaatacatatgctgaagtagttattttcctggggaaagtgttcacatctcacacatttgcttttgtcttccttacagcttcattatgtccacagtactccagggggttcaggttcggcaaatccaccagtggtgagcacggtctatgcctacattggtactccacctgcccaacgccaaattgcctcattggtttggcgcctgggacccacacattttctagaagaagttttaccttcttcaaatgttactaccatttatgaacttggaccaaattatgttggaagctttcaggctgtatgtatgccatgtgagtaacttatttttagttcttgaagttgtatgaaacttaactcctgcaatatagatgcatgtgtgtgtctgaggttatacatattgttaatctaggaaaagcgccttctcctctaatcttcttcagcaggatactcactcctattgaaaatattttcctccactgattatactgcactttctggattctttgtctttatgtctgatcgcttattatccagtttctcttactggctctgagatataggtatatgccctctaggagtctaactgtgacactcttctctttctgtgatttctcctattacatgaagcagtttaaagta

SEQ ID NO: 112068 - DNA, 1029 bp, Homo sapiens
acctcaagtgatctgcccaccttagcctcccaacgtgctaggattataggcgtgagccactgtgcccaggcttagagtgttaattcataatttttatctatactagttgtttgtgggattcttatattgattgaaacctctgtgttttaagaatattatcatgggtcattatcaaacaatagattaaaacatgattgggaatagtcaaaagcaatcagtggtaacaagagagtgacagtaaggggcacatgggagttttccttcagtgatgaaattgttctaatgtcttgattgggtttatacgttagagtatgttgccatatgcattttgtatcttcatttttttttattttaagttaaaaatgttattttgggagattttaaaattatgtcttttgatacccttacataattaaaagaagggaagggctttgcgaggcatccagatttattccatgatcttttctctagtcaccattaaatactggcagttatttcactgtggtaagtgcacagtgttaagagaaggagtcattgatctctaatatgtatgttgtcttttctttaatagatgtctttttttgcccagtttggcccctcataatgctcctacaaataataccgtcacaacaggtcttattgatggggctgtggtcagtggcattggttctggtaagtaatatttgctttctgcttatgagttttttttctagtagattatatataatttagagtttatttgcttttgttggcatcttttaaaaaatataaatattaatcaacacagacttttttttttaatttttactgtaggtgaaagattcttccctcctccctccggcttaagttactctagctggttttgtattgaacattttagttctcctccaaataaccaccctgtcagacttcttactgttgtgcgccgagcaaattcttctgagcaacattacgtgtgccttgcaatagttctatcagcaaaagaccgatctctgattgtttccaccaaagaggaactcctccaaaatt

SEQ ID NO: 112069 - DNA, 1129 bp, Homo sapiens
gccgagatcgcgccactgcactccagcctgggcgacagagcaagactccgtctcaaaaaataaataaataaataaataaataaataaataaataagaattgagttgtgatttcctttgctaagagtagaaacaaaaatagttcctttccctaagagaatatttgaaatatctttgtagttgcctgaatatccagcacatttaggaggaaaacagtttcctatactcatgtagtttatttcgagagagaatattttcttcattacatttgtaatgtgtccctggagagataatgacaatctgtttagaatttgtctttttattcttgaaattgttaccctttttataaatatgggaatctttaaattaaagtacttttacgatcatgcatttagttctaataattgtaaggaaagaattaataatggggaaaaaatgggagaagcaagtttctgccatttatctctaatttgttttataataaagatgacctatttcttttcattttaatggtctaaaattgtttacttttccctcaaagagaattaataaatcatagttttatgaaataaaagtatttcctgatttgtaaactattaactgagatttataattaaattacattgtatcagtggctttgatgacaattatttgagatgtttatttttatttatactctagtttccaacatttctgcagtgtgcatattgctttagtaaaaaaggaaacgcatgctattaagtttaaaagtaaatgtacattaaaactggataatgatcttggcacttaaaaaaaaattattgtctattgaaactgaagtggtatttacaaataaatcagccttgtaaagttattttgaaattccatatgacattttcccaagagatttccttgacttacaggtagtatgatcacatctctggaaggtctgggtactgataatgtttttagcttacatgaagataaccattaccggataagcaagagcctggtaaaatctgcggaaggaagtactgtacccctgaccagggtgaagtgtctggtctccatgacaaccccacatgacatcagacttcatgggtcatcagttactccagcttttgttgaatttgacacatcacttgaagggtt

SEQ ID NO: 112070 - DNA, 1065 bp, Homo sapiens
gcagataagcaggaaatgaaaatattgtttattaagttcgtaatagcagtgttacagagtttatataggggcagagacttttggaagtgtgactcaaagcaggcttcctggaggaaatgacagttaatgaaataaagtatgaggccaggcagtgtggctcatgcctgtaatcccaacactttgggaggccaacgcaggaggattacttgaggtcagcagtttgaaataagcctgaataacatagtgagaccctgtttctacaaaaaaaaaaaaaatatatatatatatgtattaactagcatggtggcgtgtgcctgtagtccttgttatttgggagactgaggccgaaggatctcttgggcccaagagtttgagattgcagtgagctatgatcacaccactgcactccagtctgagtgacagagcaagaggctgtctcacacacacaaaaaaatgatgataaataaaaaactctaaagtatggaagagagttaatcaggtgaaaaagtaagggcaagatttttttccccaacaagaaaaacaaatatggtggtccagggtagagaaggagtacagcattcttaggcagtcagaagttttatgtatgtcttaagtagaatttatgattgcgggaaagatgggagcagtgaagctggagagtacagtagaaatcatctcatgtatggtactgaatgctagctgttttgtgttttcaactacagaaatggacagccatggaagagtcttaagcaatagagtgacactgtgtagatttaagttctgtgagatactgactatagtgaggaatggattgagttggggcaatattggtgtcacaggaggtaattaagactctgttttaggaatagtaaaataatatggtctgggtgatagcagcaagaatgagagaaaagagcagattccatatttttatgagtagaaatagcaggattttctgattttctgaatatggaaagttaaagaaggaacaaaaacacatttcagtgagatgcagaacataagaaatgccctgggtttggatataaggtgatgagtttggtttta

SEQ ID NO: 112071 - DNA, 1075 bp, Homo sapiens
aaatccaaatctcatcaaatctgtcaatttagaaatgattttggaaggcctataactaaaataagacaattagaatctatgcgtatgtgtgtatatgcaatgaaaacatgtttaatgaaattttggaattcagtggttatttctgatacatgctagataaattatgaatcttttttctagatggatcaaaatatttaaaagaataaagggagcaatataggaggaggataactgttggtaatacacattttgaatatttttcttagtaagtttagaaattaaatctttttgaatgaaaaatggcagaatacagggagtgaaaacatgaatgggtaaaggacatgctgccttttaaataaactaggagagcctgtgtgcctttttataagtaaagcggaacattttcctagaatccctgttaaaaagagaacggtattttttttaaaccacggcagtgccaattctttgctactaaatcagtgacgtaaagcatctgtttcccaagctgctcttgtcccagagagctaaaactgcattgctctctgtgacagagctcagcattaggcaaattatgctgagaccaactcattggaacaaagagttcccataggctgaagccacaagcatctgtttcttagtgccaagatgcaaaatgtgcaaaattcatgaattgtagatgagtagtatgaaatagaaagtagagatcattgatgagaagaaatgtgtacattcaggacatggctgggctttctaattcatagaaactttttctgtaaattgctttcaagtttttaaaagttgcaatgaatattttcagtgataatgaggatagatgcagaagatgaaagtagttccaaataagctaaaggaaaactcccacaatgccaaatatatttattcttggatagcttagactctgagacaaccctgactcagctgacccagttagttgttgattgtgttactcatgcactaaggaaaggttaaaacacatataggtaatttcaaaagataaaatctcactgagggaattaatttaatttgatctctcatcacgtattattggaactgtcat

SEQ ID NO: 112072 - DNA, 1020 bp, Homo sapiens
gcagtgagccgagatcaccgcactgcactccagcctagactacagagcgagactccatttccaaaaatacatcagaactttctatttattgaaatggtaatttgacaaagggaaaacagcattctctttttattcttaaagagttacttatggccttaaatcaaaaacatattgtcatcatttacagtgtagctccatgtagagataaccaggtctttgacttaagggaaaactgtcactaaatcagtatagctagttgattgagccctaatccgtgtgaattctccatgagtcttacaagttgacattaccccaaggacagaaagtccctgatactgttcatgctaatactaagatgattgttgacattttcaggttgccattctattcagcttgcatacattttgctcaatggtaagaatcataagctagtaaagaatattatgttttttacttcacaaattcaagtctagtgacttgaaattagaatttaagtcacactgtttctagaacctctcaacaaattacatcagcttatagacatctttttcttgtagcaaaacatactgttttgttggcaaaaggagaaaccaaaatttgactgtgtttttatggcttgtggaacactctcagatgctaaggacgttttgaggttgtgatacttgtctgacatgtagtatccaggagattcttctctaattattttaaggattgggggaaaatgaactagctgactttatatttggaaaactaaaactcaaaacctttttcattgttgattattcagaaggaataatagaacagaattatagctgaacagtgttcaatcagagttagaagaagtgaatacaaaataataatcagaactctacagaatataactgcaatggaacaaaaggtggcaagtacttgttattcttcaaacatgggatccattacttagtgcctctacatacctgatgataagttaagcaaagcagattcagaatttaaatattatgtattcccaaaagaggtaga

SEQ ID NO: 112073 - DNA, 1154 bp, Homo sapiens
tgagagtaaaatgtgttgatgctatgaaactatgaaggacatatataattttgtcatccaactgttttcataactaaactacacatttttgttatagaaaaaacatgtcttttattaaaaataagttagaaatgtggacttaatgtctctaagtagaatacttttccactttttttatttttcattttttttttattttttactttaaacgttgggatcatttgttggtttttactgttattccaaaatgaatttcatagcactgaaaggaactgtgtattttctccatcagattcaaccaattgaagtatgttgctgttatgaaaaatgctcacagctaagctttgaaaaagttagtaaaaaacccaccccaatacttactttgatcagtgctctgtaaatctctaagctgatctagttgatctttttaaaactacctttaaaaaaattctactcagttttttaaaaactacagttgattgatgcaacctgcacataaaatgatcatggtctgcagttggccccaaatacttcattacttttcctgttttcctcataaccaaaaataagtccttaactcttacattaatattctttcattgaggcttttaaaaaatgaatcccaaggttctgctatattgttgttttaatcttattactgttgttcagattttgaaacttgaagatagttggagttagtacatcaaaagtatttgttacggattcagtatttcaacatatttgcatagtaatattaggtatatgaaaagatgtaatttcatttttctcttaaatttacacttatagcttactttgcacaacaaactatggcatggttcagaatagtcttaaatgaatataggattgttcagtatatttgtgcttaaaaactgcaatttctttttttaaaaaagctgttcctaattcaaggaatgataaactagataaatttgagttgatatcgtgtatttttctgttgctaaaatggtcgaggtaaaaaatgtgtgtgtttgaaaatttatgtttgttcatgagcccaaggaattgttgaatattagagaaataatttcaattagtagtttaaattactaaaaatcacaatttaaaaatatggtgattatatcataaatgagtaaagccttaaaatttgctgt

SEQ ID NO: 112074 - DNA, 1512 bp, Homo sapiens
tccaaaagaatatgaaaacagatgactcttctcctatttgtttgaagtgtatcactttatttttgaatattactcttgctctggtattgtttttttttttttttagcatggaagcctgtgtactatttgtaaattcaggttcaattagttctcattgcagttattggaacagtttctatgaagtttcctttaatgatagtgtttactgttgttttttttctttttagcctcaaaaggtgcatctggacttattgatatgtgttatcaatagaacatcattatgattattcttatttccagacacgtactccatcattctccacatatcatactcctcaaaaaatgatatagttcccaaagagaggtgtcagtgtcttgaaccgtcaagttcaagaggccatcagactcaatatttactcattccttcatgaaataagtacttaacaaaaagctgctgcatgccaagtcactgtgctaggcattgaggattcagctctacacagggctgtcttggtccttgctatcttttagctaaaatgtagacacataaataaacaattacatatagtgtgacacattctacagtgggggaatccagggttctcaggcagattgtaggagagccacttcatctagatcacttattttcagtgcttcaactgtgttttcaatgaagatgtcactttgaaaataatacttctaatttatgccccaagtgttattgcttttaacttaccatagttttactacataaaataaatgaactgccctcatcaatagaccatgtaactacattggatagagcttgtaataggttttgtgtccttttctgtggaatatctgctttgaagtatcaactgagatatttcctgcttcttaacaagatttcttagtcctcagtatttacatttaaaaatccaaacagctttgacaacaattgtaaaaaaaaaaatcattaaacttctgcttttccctatcttgaagtaaaatgcatatgtatagttaatttatcgaaaacacaggacagtgtagtgttctaggaatgagctatataaatttgtgtattcagattcaacctcttttcccttgatttctacttatcctagttagaatacatcatttttagtcactgtcaaaaatagggcttagagcaccctgtttaacagatgtgttaaatgttaacatgaatggaataagcatctgccgtgagcatgcttttctgtttcattcagtgcttgtgttgtagtcttgttccttgttcctgctgaatatggaagatgttccttattaaacttttactggcatttcttgtgaaactaaccaactgccaacctggtgttctcttcttctaacctctctaaaccaccctgtctgttttgttgtctgtagtcgtgcagaacagatccctccttgcctgacaagtgagtcttctctcccctctccttggggtacaccagctttgtccaggaaaaggtactgatcatataagagaagtcagtctctatttgtgtg

SEQ ID NO: 112075 - DNA, 1461 bp, Homo sapiens
attatcctttgtttactacctagaggcagtgctttcccaatgcatatgactcttatattgacttttagaatgtgttacatttatctcatagtattttacagatatgttaaaatttaatgtttcattaaacaacagttaacaattaaaaaatttttaagcgattgtcaggaataatgcatatttatttaattatctattcttacagagaaagagtgtttatctacatgtgttcagaatatgcagcaatcagatgacctgtctcccctagaaattgtcgaaatgtttgctgggctttcttgtttcctcaaagattccagcgatgtttcccaaacacttctggatgattttcggatatggcaaggatataattttctttgtgatctcttgcttaggtaagactgctcaatttaagaatgtattttaaatgtctactcagtcttttttatcaaagaaaacaatgtgatttggggttataggaaaagcaaattaaggaaacacttatttaatgtatacctggctttactcccttctttttctggtgcaatcacagcttactgtagcttcgtattcctgggctcaaatggtcctcccacctcagcctcccaagtaactaggactacaggcacgtaccaccacacccagctaatttttaaacattttccatagagacaggatctcgctgtgttgcccaggctggtctcaaactcttggcctcaagcaatcctttggcctcccaaagttctgagattacagtcatgagccaccacacctggcctattcccttctttttattcctgttctgccaacagagtggaaaagtgaatttagagttaaattgccaaatgcagggcacaaacatgatgaagtcagaggttagatatgaagcataaatctgctctttagtagctgagggagaagaatttagataaactaattaatatcttcttaaagtataaactcttcttaattatatttttggttctttattttatagtacttctagtctttttattaatgtacttaataagaataattatgtagatggaataaaaccttacaactgtgtatatgaaacaaattaataatttcaaaatgtgttacttaacccccttttccatttcaaatggttcgtgcacatacttagaaagtggctggttacagattttcttaagaagaagatactcaccatttttcagcagctattcctgggccattaattatttttaaatcatttgatctattataagacaccactgttttgtaaacttacttgtctccctcccttccttcctcccttcctccctccctccctccctccctctggggtctcattatgttcccaggctggagtgcagtggcataatcatagctcgatataatttttaactcaagagatcctcctatctcagtttcctaagtagctacacccagctatattttatttattttttttgtagagcc

SEQ ID NO: 112076 - DNA, 1114 bp, Homo sapiens
tcgtagatgaatagaacaaaaggtttagagtatttgagacaagaaatggtatgttgggtatgtagaaaggggccacatcttgccagggatagtcttgaagctttctcttcatcaccctactattgcattagttccggccccatctctcatgtggtttggggggttagtttcccaattaccctttccttctggctctgtatatttaatttatgatctgtattaccaccagctaattttctgaaatctagctcttttactttttgtttgtaacacttcactgggtcatcactgccaagaaaataaaatgtgagactattttcataagtcattgagcatacacactttgtaggccacttagccagctgtctgacctaaagcagggtatgtaagtgatgaacctcagttgcttcatttgtgaaataaggatcattttacaaatgaagtcatggggttgacttaaggaataggtgagatgatgtatgtaaagtgcttattagccttatgcctcttatatagtaaacagtaattcaaggttagccattattattgtggctcgtcaggagtcagcatttttggaatctgtgtttcttcaaaaatactgtaccatatggcctaacctcctatgtatcttccaggtgatctttccctttttattttaattccttatcctttttaatgccattcctggcagtgttagtcaatcccttttatattagcctgtatatactaccattgttagactgaagtcttaagagattaagtcatagttacttaggactctaataattccagtcgactgtggtcttttgaaggacagagatgcttcgtctttgcatgcccagctcccagcacacagcctgacattccctggacactcaataaatgttttctgagaaagtaaactaactaatcaacagattataccagtctgttgatctctagtgcagttgaacttcttgttccaaactgcaccatggaaaattttgataaatattatatcatacttaacaatgttgaaatatgtactgtaagaaggtctagagtttctcctctggatatctttgaaaataatatagagatgtatttgtgtcagtgatggctttatcactcaagt

SEQ ID NO: 112077 - DNA, 1097 bp, Homo sapiens
ctcttagaattttgtcctcggaatgatctgttttctttttatttgtttgctgtgttttttctctcttttttttttctttctttttttgaggtggactcttgctctgtcacccagcctggagtggagtgcaatggtgcggcctcggctcactgcaacctccgcctcccagattcaagcgattctcttgcctcagcctcccgagtagctgggattacaggcgcgcgccaccacacccagctaatttttgtatttttggtagagacggggtttcaccatgttggccaggctggtcccgaactcctgacctcaggtgatccacctgccttggcctcccaaagtgctgggattacaggcgtgagccactgtgcctggccctctttttttttttttaactcagggaattagtgtaaccaacctgtcctggtgttcctgggattttccaggttttaggataggaaggcctgcatctcaggatactgcacagtctcaggcaaatggagagggttggttattgtaagtaatcttcaaatggtcccagagtagaccattgttttcatgtatctgactctactggatgagtaacaaaatctcagttctgtttgctgttgatggtagctgtaaatgtatgtatgttactataccaaaatttggtttagaatagcatatgtttatttgctattaaaactttatataatttagatatttactattgatatttaatataagtaatattaacttttaatacagttttctacatttattcatattttctataaaaacctaatcacttaaaaaattacaagtttagatgccaagttatactttaaatctatctacaataaatgaaaatgaaacatcataccactttgcttagtggccagctaaacctagtaataatctatctggaaatagatacatttaaaaagcaaattcagtgttatgtttggagctaccttgtttgagtgccattttctgctggtagcagtgttacacagagatgaccaaaacatggtcctgactcaatgtgtagatgtaagagatgaagcagaaaaagatagtaccataatatttaataatggggcatatatagtgctatt

SEQ ID NO: 112078 - DNA, 1024 bp, Homo sapiens
tctgttcttctcagactctcatctgatggtccttcatagaaacaaaaagagcataagataaatatttccctaatcatttatattaattgataagaaatcttaactgatttaccatacgaaataatgcaattacatcttcattgttaattttttaacattgttatttatagcaaattattttaggactaatgatggtccatagtctgacttaattttagatataacacatatttaggaaacaaaagcctccatttttaaaaactttgtaaacattccaacctctcttttattagtcatatttaatatatttttattgaatagcactattcagtaacaagtttatattgagcctttatgaatgccattagataacaccattaatttgctttccctgagtgccaaaaatatttggttgaagaggtgccaggaaatcttctgaaatctatttaggtggatattaaaaatgattattttaaaaataagtcaaaccatgctatttttctctaaagatgaacactatgcacagtttagtgatagggttcatgcacagtttgagaaaaatatagtactgagtgatgaagagcctggcttggaatcagatagatgtagttttaaattctgtctgtattgcctcctgttttaagttaagttgtctaactcttaattttcttaactgtaaaatgaggctactagtagaacctattctgtaggattttatgagacttaaatgacaccaagttcttgaatagtgctacgcagattttaaatgggtattatatggtaattgttatttccagtgaatttgcaagaagtcatttttgttcttcattaccttttttttaatctgttatgaatttcacatatgtattctagaatcagcccttttgagttgaatgtgttgccagttctcttgcccaactttcttcctctgcagaaccagaaattttttgtcgttgtttgtttgagaccaagtctggctctgttgttgctcaggctggagtgccatggtaccatcttggctcac

SEQ ID NO: 112079 - DNA, 1046 bp, Homo sapiens
tgtttgacttagttatcttatgtcctatgttattgtaagtctcattaactattaacaaattctctcaaaagtttttaattggttgattagaaacatatgtgtatgcaatgccttaaaactctaatataatgagtgatttgatatcacaaaggttcagtaaactcttaactaatgaaaagatagaaagttatatctgtaccattgtgactaatttgaaaaatgtattattttaaaaataattcttattaattggatataattaataaactaaaattgttcttagataccatttccattaaatttagaaatatatagccatatctatttaacatttggccgtttgtgcttgaacattgtccactagtgacaaatacctatggtgagtgaatagctcagtatgttgctagagccaaccagttcttaccatgattgctaaaaaggaattgcagtgttgatttttgagactttgcttgattagagctaaatggtgaacaagctgttagacatggacatctagctacagactagtttttaaagtgtgcttaatagtgttatttcagtgcatgatttttgcctttgagagacatgggttgggaaatgacatgtattaagtcttttttctgggccaggtctcatgctgggttcttgaaatgcctcctgttgtcttcattacagtcctacaaggaggctgctgttatcttccctcttactgatttgctcaaactgaaagattatggtgaagtctgaaaatagctgaataatatttattcagcattcttaaaaataattaacatttagtcccaagaacaaaagctgacaaagaaaacatttggtttaaacttactcaaaatgagtagcattttagttgtctaaaaattcataactgccactgttaattactgtagtatttgttatattttgctgtgtattttaaaatgtaatgtttaccaattagatcttttgtaagaaactccccttattttttaacttatttccaatttatatttgagaagcatgtaaatgtaatacagtgtccttttttaatc

SEQ ID NO: 112080 - DNA, 1067 bp, Homo sapiens
cattagtagtggttaaaaaggggtaatgatgctttctgaaagcttactgttactgattctgtgtatactttaactcaatggttagtttgtgtatttttttaactgcagctccagcaagggatacattttgcattatgattcagtacacagtaatacacctttatctgaaataagcttcatgaaacaagttattcttttcttatcttctatttttttctattctatttcacttctttgaaaaatgctcatcattatccactaaatgatttaacatgacttaccaaactatagttttagaaagtagttttcagtcacatgatcattttcactgtccttttatgatttataggataaagtaggatagtattatattcaatttgcatattttaatctataagatacactattcttcatgtactcaaagtatacttgaattttctagcaaaaaaattaagtaattataaattaaataactaaaaatagaaaattttgtgaggttttggggtttttgactgtcttagatgttttgagatttgggtaaagtttgttttttcattatttttacattaaccattaagaaatccattaatagttttgtgatctctttctctttatgtttttattttatttatttatttaaagacagagtctctgtcacccaagctgaaatgcagtggcgtgatcttggctcactgcagccttaacctctcaggctcaagttatcttcccacctcagcctcctgagtacttgggactatacgcgcacactaccatacctgactaatttttgtatttttagtagagacagggttttgtcatattgcccaggctggtctcgagctcctgagctcgagccattcaccggcctcggcctccaaaagtgctgggattgcaggtgtgcaccactattcccggcgcctttatttttgaacttgatatgactaaactaattggaaacatttattacttgtctgattaatgttttacattttatacaaattgtggcaaagtgagtaagaacttccaatgctgagattcataatttgcccttcagggggatttatcaa

SEQ ID NO: 112081 - DNA, 1020 bp, Homo sapiens
aggacatgtctaatgatagtaatcattcttacattttgatatggtggaaggacagatacacatagttttttgctctccttttcgtctacccctccactcttcaactcctttagtgagaatgtattcccccagccatgagaatataaatacacttttatatttcgtttgtagactatttaattcaaaaattataagggaggccaggcacggtggctcatgcctataatcccagcactttgggagtccaaggtgggaggatcgctctagcccagagtttgacaccaacctgggcaacgtagtgagaccccaactctacaaaaactgaaaaaatgagccacatgtgcatacctgtagtcccagctactcaggaggctgaggtgagaggatcacttgagcctaggaggtcgaggcttcagtgagctctgatcatgccatgcataccatcctgggtgacagaatgacactgtgtctcaaaaaaaaaaaaaatataggtgaaacaataatactctgattaacaaagggtataaatccactgacaagtaatttttgtgtccctgatagtcatattagtatcaccttttattttaaagtgtgtttaggaatttcataagtttcctaatctttttcatttatatatccctaaaaaatacataaagagcagattatatatacataatatacatataatttaaaataatttgaatagaggaatttgtggaaaagataagttaggtgtgtcagcaggaagagtctctgcttcattctatccatccatttatccgtctattcgttaagcatcttcagtgtgtcaggtactgtgctagccactaaaagttgaatataaagaaacagattactgacctcacgccagattcatcttcaaggagtggtggtggagctgtgcacttattggagatactctccataaatcctaacatgcttttattatacctgtggtagggcgagaaatagcctcaaatgggaccaaactagaatattggctgttgactgagagccttg

SEQ ID NO: 112082 - DNA, 1079 bp, Homo sapiens
atttttaatttccaaaagttacattgtaatgtatttcatcttattttttaattttttttacccatcactatgtttctaagacgtgtccaacttaaatggatctgaaatgtatacttttaaataactatatatagttgtatatcaactttggtttgcctgttcttttgctcagtgatggaccacttaagtagcttccaaaaaattgcttccaatgagagaatttcttcagagtgtagatgtagaagaggaatgcaagattccaaacgatgcaaaattgccctttagatccagttcattttctcactagtcatgtgtgtagtttctgtccacatgtctaaggacacagcattttccagctttctgattgttgctaatctattaggtgcaacgtggcattttgtttcaatttgtattgctctgaatactaattaaattaaaacacctctaacacctctgtgtttaatggccttccagattccttgttcatatttttcgccttttttccagtgggattgctgtatttttcttgttgcattacttgtaaattctatattctaattcttgtcagttttggatattttaaatatcttctattgtgttctctctttttttgttggcttacagtgttcctttctaagccaaaatatttaattttgaagtaattacattcatcattttatttttatatacggtaagtgattttgaatttatcctgttagagttcttacgtgattcattttacacacacacacacacacacacacacacacacacacatatgtatatgtatgtatgtatatatttgccaggcgtggtggctcactcctgtaatcccagcacttagggaggccaaggcgggtgaatcacttgaggtcaggagttcaagaccagcctggccaacatggtggaatccccatctctacaaaaatacaaaaaaaaattagccaggcatggtggtgcacgcctgtaatcccagctactcaggaggctgagacaggagaattgcttgaacccaggaggcggagggtgcagtgagctgagatcatgcaattgcattccagcctgggtgacagagtgag

SEQ ID NO: 112083 - DNA, 1013 bp, Homo sapiens
gacatttatttgccttttgttattccttagtttgaatataaggatcatggtagaaatttactatagtttctaagtttatattccttatagagtctttaatgtacatttaaagttgattctgtgctaaattacctttttctaattttttttttttttgagacggagtcttgctctgtcgcccaggctggagtgcaatggcgcagcctcggctcattgcaacctctgcctcctgggttcaagaaattctctgcctcagcctcctgagtagctgggattacaggcgctggccaccacatctggctaatttttttcttgtattattagtagagacgaggtttcaccatcttggccaggctggttttgaactcctgaccttatgatctacctgcctcagcctcccaaagttttggaattacaggcgtgagcccccgtgcccagcctattttttaaacaatagttgtaagtctgtagatgttggtagtctagaatttctcagattttcaaataggaaaatctagatattgaaataaaaaatgtagagattgagaaatttaagttctgtaggtgtacctactctaaatttatcatcagtaggtgaggaaaaggattccattcaaaatggctgagtaaaaacatttgtattctattcttctgcctaatgctaactgaacataacaaaaagaataaagaatagggaagaaatcttttaacttaagtgaagtgaggagaaaacagtaatcccaaacctcagattatgagaagagctgccaaacattgtgaaccttgaagcaaattgggaagtatgcaaatatctatagattttaaacacagcacagagtctcccatggtaggtagcaaggggactacaaagtctcaggcagggcgaagctgcagggaaagacacagatgtaccttttttttgcagaaaagagtggcaagaagcagcagaatagaggaggtagtatatagagccatctccttggtctcagttgatggaaagcagctgaagagaa

SEQ ID NO: 112084 - DNA, 1034 bp, Homo sapiens
ttttttgaaatttaatatatgcatggggtttaaaagaccatactgaaaagaatacacagtaaaagtaaatatcccactacagggctccagtttccctccctagcactgtcatcactaatttcttgaatatcttttaaaatatgttaaatatgtgtaagcatataggtgtacatataacatatatcctcctttaaatagcctattagaaacagttctcaagatacattttctatttcctaaatatgatagtacagtaatcaaatttataatggtagctctataaatcaagtcaatataaaaagtcctgtctacacataattaacagtctttgtttatcaataaatccagtgatagtaaagattaaaaacaaaaacccacaatttttcttcccagagactgacctttagggaattccttgggtaacaggttctgaatgtgtgagcacaatagggcccattcgcttgaaggtattttactcaaaacttgaaatctgggctccagctagaaagagggggaaaaaggttatgaattaatctctaattcagaatattttcctcaacacaggtagcccaggtccactaactatctcatacatgaggacttttcaaccttggttggatactggaatcaactaagaagctttttaaaaaatgctctgatgcccggaagccacactctgttcaaattaagtctctggggctagagcctgggcagtgtttttatgggtttcccaactgattctaatgtgcatccggggttgagaaccactgccacagaaatataaaatcatatggtatggaggtcacctataaacttttcagcttgttgctaaataacgtatgagtatggaaaatgcactttttttattttattattttattttattttttgagacacagtttcactcttgtcacccaggctggagtgcaatggcctgatcttggcttactgcaatctccacctcccaaattcaagtgattttcctgcctcagcctcccgagtagctgggattacaggtgtacgccaccatgcct

SEQ ID NO: 112085 - DNA, 1110 bp, Homo sapiens
gatgatgaataaagcaaaggaggtctatttttctggttatgatttactattactttttctcttctgaaaaagcagtgaagccccaggaccataacaacatcagggaggtgggaagaccattttgtgctaatagtagtccagtcatcttcatgcaatggttgaaagactgtatccgtgagtgggaagtgctactgttgatatgatatgcttttttaaaagaggtaactatttggggacgaaacaaacaaaaaaactcttttctactttctgcgggcttgggcactggcacttgaatcactggtgtggcaattgaacatgatctcctttgacaatcaaataaaagtcataggtcatctctctagaatatatgtatgtttacaaatttaatatgaagttttggggcttcatttacccccaagccagcattgtccaatgtaactttctgtgacaattaaaatgttttatattggctctgtctaatacagtagtcactagacacataatagctgttgagcacttcaaaagtgtctgcaactgaggaactagattttttacttcatatatttaaattaatttgtatttaagattaaatagccacatgtaggtagtggctgccagcttaggctctttcatatgccataggttataatccctataaaagaggttttgtgaatgtcattgttaggaatttaatttgtttatttcacttttgatttttgcagtcaagcagtagttaattgtatcttgcttttcagttaaattttaatagttgttatctctaaatatgtaacttctttgtaattcaggaagatttaaaggcgattttcaatatttgatcctgtttctttcataatgaaatatccagaataggtttgtcctgggattttaagcttgttcagaaaatgtgaggtgaatacctattgagtcctgtgttgtgggctctccagcgtcactttgtcctgcgttaggaacactctggttatttagagccacctttgcccaagtatcttaaaagtgcatttcccctttgggagaccgaggcgggcagatcacctgaggtcaggaggagttcaagaccagcctggccaacatagtgaaactctgtctcta

SEQ ID NO: 112086 - DNA, 1081 bp, Homo sapiens
agtactatattagtttatgtttgcctgaaaattttgtggtgatagactttagatcaaattaaattctgtttcaggaataatattcaatcttaaatgcctttttaaaattgtggaatatacactacctaaaaatgaccattttaacaatatttaagtgtacaattcagcagcattatatatgttcaggatgttgggtaaccatcaccactatctatttccggaagtttttcatcatctgaaacagaagctctgtacccattaggtaataattcccattcttctctctcctggctcctagccacctctattctgttttctgtctctatgaatttgcctgttctagatattttatattaagtatgatcatacaatattggtcattttgagtctggcttttttcacttagtataatcttttcaaggttcatgtatgttgttgcgtgtatcagaatttcatttctattatggaagaataatctattgtatgtgtataccacattctatttattttttcatctgtttacacacacctgagtcattaacacctttcactattgtgaaaattgctgataagaacattggcatacaaaattctgtttgagtcactgttttcaactcttttgaaaacagaattgctgggttgtatggtaactctttgtttaactttttgaggaaccactaaacttgctttccacagtggctgcaccattttgcatttttctagcaatacatgagggttccaatttctctacatacttactagcacttgttattttccatttttttggaaagtagccatcataataggtgttaaatggtgtctcattgtggttttgatgtgcattttcctaatgactaaattatattgagcatttttacacatgcttactgacaagatacagttgacccttgagcaactcagggcttagggatgccagtgcccctccagtcgaaaatttatgtataacttttgactctcccaaaatgtaactactaataacctatttttttttgttttgttttgttttgtcttgttttgtttttgagacggagtctcacactgttgcccgggctgaagtgca

SEQ ID NO: 112087 - DNA, 1055 bp, Homo sapiens
gttagaaggcccctaggaattagtccaggctcctcctttttgaattaaagaactttaggaccaaaatgtgtttgactacactatagaacttgttgagagcagagttactagaggcctaagaaactagatctcatgattcatatgctaatgttttcatattgaaatattgactggtaaatgaaaggaaacatttatatatcctgtataaggcaacccaaataacttgagactagagtatgacctttgaatgaggcagcaatttttaaaattttaatttagaacaaatcaattcagctctataccgcatttatcttgagatgcatgaaaaatacacctagagaaatagcatgaattttttctccaagaaaagaggctgtgtggtctgtgatatacaaatgagtactggactggaagtggtaagggttgagttctgaatctggctctaacactaagtagctgtgttgtcattgattctttgcataatttctccaggtcaaagtttccttatcagtaaaatgaagaagtgaaatcagatggtctgtagagaccagctttaaataactttatatttttcatggatctttaatagcaaatttaatctattttaaataaagtgctatatgttccattattaaacaagcaagacaacaagtaaggaggtaaagagaatcagtagaaaatgaatgactcatgatgtatattctgaacataaactgagttttcttttcctttccttcatcaggtataatacttctccacgtctgcttcaggaagaaagtgcctgccattcttatcatttctaagcaggttcatgccagcccagaacagagaatcaggtcagttttaggattttttttttgttgaaaaaggagccaggaacagaattgtgattgtctttgctgcgttattgtgcagcagcaagaccagtgacttgtgattcaggagttgggtttcaaccgtcctttaccactgatgactggtaagcttgggcaagccttctttgcttgttggctcttagttttctgcaccaaaacagggctacattagaataagtt

SEQ ID NO: 112088 - DNA, 2018 bp, Homo sapiens
ataggcctttggatttaacaatattcaggtaattgatgaccttgaatttcagtgatgttgtgtagtaaaagtctaattggagtgtgttaaatttgaatggaagtataattgtagacaaggagtacaagcttgtgatgttttgctaaaaaaggaatcaaagatattggccatcatctagaggcatataaggagtcgagaggttttgttgtttgttttctaatgattggaaatgtatttgccagtgattttgctttattggaaggaggaaattgatgacgtaggagagagaagtgggatttcctagagcaatgacattggtgttctaggcatgtaacatctagtagcaaagtagaggggttagattttgatgtgaatcctgaaattcagtgaaagggtacagattcaggtggggaggtaaatgtcatgagagattctggaagttctcttctgattgcctgtggcttttgaattttttttttcttgtatgatgcatttcatcagattacctggcaggagtcctgggaggccttaggaggactctaaaactgcttgttaaaaattttgaaaatttattttttgttattatttagtttaactggctactttgtataaagtttggaaagagactccacaaaatctttctgggctatttggaaaaaaattttctcattgatcttcaagccaaataattttttttaaaagagacagggtcttgctatgtcacccaggctgaagggcagtggcacgttcatagctcactgtggcctcaatctcctggacttaagtgatcctcctgcctcagactcctaagtacctaggactacaggtgtttgccaccatgcccagctaatttttaaattttttgtagagatggggtctcactatgttgcccagtgtggtatcaaactgctgttctcaagtgatagtcctgcctcagcctcacaaagagctgagattacaggcgtgagccaccactccccacccaaagagtatgataagacccagcacaatttccattttaagtattaatataagaaaaccaactcagaagacatagataggccagggagatatagctaatcatctagctaagtctggaattcaggtttctgtggcatttcaatgtacacagtttaatttcaaaatttagtttttatacatatgtgcatatacatttaaacttaatcctctgacaatgtaactgacttactctaaattggaggcaaggaaagcatgaagtaaaaatatgtaaaatgtcagggtcaaaatgggaactttaaattgtggtcttaattgtgacctgtgtaaaacttgattcctgagaattatactatattacatattgtagttagaatgtactgaaatcattttgtagcatttgttcttggctgagtttatattaaaatgaaagattgtaaatctagattgattttataatattttagatttctgatactttaagatgtctgtagattacatttatattaaaaaatgggttgaggaaatcattggtactctaacttgctgttgccagttttctggccgcctgctatttttgcttctgctcccttatctcaacaattgcctgtttttggtcaagactggtaaaaccaagtaatgggcatccaaatacatataaaatacacatgaaacaatatgaaaatggcaaataagtcaggaggaaaatgggtaaaatatatgaataggcatttcatacgagagaaaatatgagatagccaagaaacatgaagaaatactcagcatcattaattgacaaggaagtgcgaactaagaccacaattagatgccattctatacccagcattaaaaagttggcattactacacgttggagaggctgtagatgtggtagttctgctactaccttttggtagtgaagttataaattgccaaacacactttagggaaagtaaaaattggcatcatcatgaaaagttaaatttaagattactccctaactcttaggcatgtacttaagagaaactcggacacatgtgg

SEQ ID NO: 112089 - DNA, 1068 bp, Homo sapiens
atgtcttaaagcatcaccccacagactgtgtactaattgcaagggataatatagtgattatgcattggtgcgatccaacaacaatatggggcagatggtcaccatgtgactccagataggacaccctgaggggacacatcatctcctctgtagtattctggccaagactgcataacctgaatttaatcacgaggaaacattcgacaagtgcaaaataaggaatgttctactttaaaaagcggggagggaactgtggtccttaaaaaagtcagtgtcataaaagagaaagaaaggctatggaagtgttccaaattaaaggaggcatagaagagagaaccactaacagtacctgaccctagactggatcttatactgaatgggggaaaatataccatgcaggatgttattggatcaattgaaaaattagaatattggaatatagaccatagaatagataaaaatattgtaacaatgttataattactgaagttgatcactgtgctttccttataagagaaagtattgctaaagaaacacacattggaagaagaggaggaaagggcttgatgtatatagtttattctcatttgctccaggaaaaaaagtgtatgtgtgcatgtgtgtgtatgaatgcaagaaagtgtaaaagctcaggagcacaaatgtaaaagtaaagaggtgacattagtaatggctgaatctgagtatgagtgatttttgtatttttactaacttttctgtaagtttggaattattttcaaacaaaatattgaaaacatttaaaaatatctgccctttatttttagactttcctcatttataaagagcttggttctttctctggaaccagtttggaatgaacatttttgtaatattttcctgtgtgctggtgttacggccctgcatgccaaccattgttaaatatgacagcagttagtgggaaagaaatgagtcattctgtggacggccagagtctaaaacctaataataaggggaactatttgttaatttatcaaatttatggaagtatcagttacaatgtctaataaaatattttgaggttatcat

SEQ ID NO: 112090 - DNA, 1299 bp, Homo sapiens
caaagtgctaggattacaggcataagtcactgtgcccggcccctagcaggaatttttataccttcttcctagactcctgctattaaggtgactttgctgtaaagatttagtctctctctgccttgcatcttcaatttatatattccatcaagaaaggattaaattggccgggcacggtggctcacgcctgtaatcccagcactttgggaggccgaggcgggtggatcacaaggtcaggagatcgagaccatcctggctaacacagtgaaactccgtatctactaaaaatacaaaaaaattagccaggcgtggtggcaggtgcctgtagtcctagctactagggaggctgaggcgggagaatggcatgaacctgggaggcagagcttgcagtgagcggagatcacgccactgcactccagcctgggcaacagagcgagactctgtctcaaaaaaaaaaacaaaaaatgaaaggattaaattaacctcgttcagatcaggtgtctgtctgtactagagccagggtatgcagacttatgatgtatagcgcgctaggaatatacctcggtgctgggggtcattcccaaagaaggggaagtcaaaagctgggcagccctcctaggtgtctagaacatctcactctttggtagcttaaccactgcttttcctgtctctttccctttgctttcctccccactagtagagataaccctgctatcccatgtattgatgcagtttttccagtgggagaaaagcaaaaagcaagttgaagtaccatatccagaggcagtgccatagggctactgactctgagtgatatcatgctgcctcctggttccattgtgattctttcttgatattttacaacctaaatttaactcctgccaacttgccatctgcatgcttgagggaaaggaagaggaaataaagagaaaatgtatttaaagggaaagagaagggtacttatcacacaccagtgactattaaggaaataaatggtggccacagtccttagttttacatctgagcacaaagccctaacctgtttcacttcagattacatatttctgttaccttctgctagtgtcctggcttatcagggttctgtttctaggaagctaactcagtccttcattcccaaaagggtctgaggtttggtagttccaactgtatagaattgtgataatctttcactcacattaacactgtgtacggcactgccagagaatatgagattcccccaagttcttttctcatgatcttcctagccccaggtgtgcagtagcaacctgtcttctcctt

SEQ ID NO: 112091 - DNA, 1171 bp, Homo sapiens
ttatagataaatttatagtcagatttctttgattaaagcctggagtctttttgtgtctctttgaccctacagtccaagttctttccccatggcattgcccattaaaacacagtattaggtgatttagatgataaatgccatagttgagtaaataagtatgaaataaaaataaactctatatcagttatttgtagaacaatcattgtgtattgattgcttaataattttatttagcttgatttatttgtgtaatgagtagggactaaattagatcaagtatcagggattaaacttgctacctgagaacctagttcttatttcccaaaataatgatcctatgtaaatagactctcaagtgatgttatgctatataataataattctgtaagctttttttcctaaagatgataacatattttattgtgattgtgctgggtatcacgggtactatgcatggacgctttacacatgggtagttctgccctcaataactttataacatagtggagataagataggtagatacataattgaatggtatttgatgagtctgagaggtgcagaagtgctatggacacttaatgagtagaaagattattttcgattgaactgattaagagaaccctaagatatgatctttgatctgcatatcagggggattgatcaaatttctttggtgggaattgtgaaatttatttatatcaaaattataggacatataaaattgatagatttcactctcagtgaatcagaacaggtttcttggggaaaaatattagcccaaatataatatttaagtaaagaagaaaaggattagggataatgtaagatacttaggaaaaaaaatacttataatatgagaatcttactcttgctcctgaagcattttacaactaggtcatcataaaaattgtactaagtatgacttccctagcatgtattctttttttaaaaaaatacattttattgtgtatatttaagatattcacatgatgttatgagataacataagtagtaaaatgtttacaatggtgaaacaaatgaacatatctatcatctcacataattacccatttttcccctgtgtcaaaagcagctatgacctgctcatttagcaaaaatcctgaatacaatacattgtcagttaatgagatctttagatttgttcatc

SEQ ID NO: 112092 - DNA, 1050 bp, Homo sapiens
gttcttcatgcattggctcttctttccactctgggtccttgaaataatagcgatcattgagttctgacatggattctttcagctttcttcagtttcttaagcctttggtacctgtgttacgagtggagatcatgtgacagggtgatttttgacatgttgtaattggtatgttgtcaacacttgatgaaccagctgctcagccaattaataccaggcccagcttcctcttcctgtatgatgtttcttcctagcatgtttccttctgttctccagccaatatagacttaaaggaggccaacttatttaatattagcctgaggaaagtaggaatttgatacatagctgttatttggtctatgaaaaaattatgccaaaattattttgttatgtgctatttttttttcaaaggacaactgatttgtttatctgcacattaacttgtagttttattgccttgctctgagtaaaacatccacacacataaatttcactttataagttgaataactcaggaggtgattaattatcctgcctaggattcaacactttaaatagaatttccacaagtattttctcaaaatattcgttacttagtacatgttaagtgtttgagtttagaaaaacaatttaatatacctgttttaatttctccaacacttattaaatatgcattaccttattgatttttttaatttttaattttgaaataattataaacttgggaagttgcaaaaatagtatagagctccacgtactcttcacctatctttctttccccattagtaatatcttataactatagtacaataactgatttatattttattactaaaagcatagtgaccttattttgaaaaatgttggaaaatacaagaatgttggtatttttgtcctcttcagaggatgaagatgtttgtgtatacaaattcagatctgtgccttatgtccgtaggcagcaggcccagggtatgtttcttccctgcatttcctgtaagaagagcaacaggtattagacaaatggctgattgtttccacagggtaattcattca

SEQ ID NO: 112093 - DNA, 1588 bp, Homo sapiens
attctacttaactgcagtctcacgtcttctcatagattaccctcacactctttccaaaatgaattgttttttgttttaattttttaaaatgtgaaattgtggtctttccagtatacctttttttttctgcttaaaattcttgaatagatcttaagtcattatcaaagaggcgctaaaacatggggttgcagtctataaaaaactctttgtaacctggctccagcttctccagtcacatctctgacagccattcatttgttcattttttaaaaaaagacttgagtgtctgctgtctgttaggcacagtgctgggtgatagcgctatatcagggagcttaaattctagtggtgaggggagtagataacaagtattactattgtcaattgtactgtcaataattgtcaattattataatacatagtacattatatactatattattataactgtcagtgacatcatacaatcattggggtgctaaagtatgggtgggtttgccatttatagaggtctgaatcagaaggcctctctgtaaaggtccattagaagagatttgaggcagccaagggagtgagaattgtaggactgagagaagagcaagtgctgaggctctgaagcagggtgcttggcacattcacagaacagtaaggggttggctggaaggaggtgaaccatgaggtcaaggtgatggaggtgtcattagtcttgggtaggccagtgttaggactttgacttctgagctcagtgtgtttgagcctagattgcatcctctgcatggcagagatgcattcctgtctcctacttgaagcttttgaagtatgccaagctctcctgcctctgagcctttctttctacctggaatagtacttaggttgtccctcctggatgttcccttagcactcttggttgtactcctattatgaaacttaatagctggtttatttgtctctccaccctaggctgaggtcttggatgggaggaactggaattttttaaaaaaaaacttctgattttttatttcattgaattaatgtttgttgaattatagaactgcttaaacataggattaatcattgaaaactgggtaggagatgccaaccacattgcttagcaactgctagttcatgtggacatggaatctgttttgctgaccactgtgcatttagtgctggtgcaatgagctatacacagtaggtgctcagtaaatacttggtaaatgattgagtgcacattcctgtaccagcctctgccttttccactgcttccctgaaacccatgggttaaatgaacccaaaatcccttaacgtttcctgacagccttatctttccactaatcttatgcgcaagaaatgccaaatacttagagatgcattctttcaccataaataaatgtaataataaagaaatacagtagcaaagaaatgtggaaataatttatctccaagttaaataaataaagttcattgcagaatgttttggctcattcacacttctgtttttctttctttggttggaattttttcaggttaatttattacttggcccccaaatctttaataactgtaacactaatagatctagaatatc

SEQ ID NO: 112094 - DNA, 1034 bp, Homo sapiens
aaatctatatttctatttatgtcgagtcaaaatctgccttcctgatatttacactgataaatccagttcccccttggtgtgtgtggtgtatttatcatccatgaaatgattaagaaataaatggcgaccgggcatggtggctcacacctgtaatcccagcactttgggaggccgaggcagatgaatcacctgaggtcaggagttcaagaccagcctggccaatatggtgaatccccgtgtctactaaaaatacaaaaattagcttggcctggtggtgtgcacctgtagtcccagatgctcgggaggctgaggcaggagaatcgcttgaactggggaggtggaggttgcagtgagctgagatggcgccaccgcactccaacctgggtgacagagtgagactccatctcaaaaaaaaaaaaaaaagaaatggctcctactttaattttttagagtaatgtttattgaagcataatttacatgtagtgaaagtaaaagtttaacaaatgtctataattggatagtctccaccacagtcaagacatagaaaaggacgtttccgttactctaaaaagttcactcatgccctgtcatgagtcagtcctctacctctacactcccagcccctgaaaaccgttaatttaattgatgctcttaaagttttatctcgtctggcatatataaatggaattatacattatgtagcctttcgtgttcccttgcacttagcgtaatgcttgatatttattaagttgttacatgtgtcagtattttgttcagtgatgtgctgggaaatgtcttaacaacatactcttcagaaaaaaaaaaagaatctctgatttatagcattcgctaatcattgtagtgtaaacactgtcactatggcctaaattaagctaccagcttacagaattcctgaaaatttaacaatgggctcccatgagctggtaccagccagctccagcacagttcctttttttgttgagtaacattgttttacaccagggtaacacaatttgttcatccattcataaact

SEQ ID NO: 112095 - DNA, 1075 bp, Homo sapiens
aaaaaatccgactttaaaaaaaataaaactttatcatgagactcttaagtataggaattaggttggtatgtttttatgtttaaaaatatatattgcattagaattgagaactcttcctatgatatttgagcaatagtaaagtatgttaatactttgaaccattctatctcaagctgctagaaagaggtttctactgctagtttctttccatgagttaaaatggattcatctgaaatatatgtatgcttttggtgggtcacagtgggtcatgcctgtcattccagcactttgggaggccaaggctgggggatcacttgaggccaggagttagagaccagcctgggcaacaaagagaaaacaatttttgtaaagaaaaaaaaaaatgtttcaaaaaatttgtatcacctccaaaaaggagggataagttagaaaatacaatgttctactcttgcataatctgtttttgaaaaagtaaatgacagtatatttcaatattagttggattctctgctttgaagagattcttaaattccactgctcaactttgcaattttaaaagtttacatcagttgttcttaatttatttatttatttctttttttagagacagggtcttgccctgttgcccaggctggggtgtagtggcacgatcacggttcactgcagccttgaacttctgggcccgagtgatccttctcccacagcctcccaagaagttaggactacatgtgcatgccaccatgcctgtctaatttttctattttttgtagagatgagggtctccctgtgttgctcaggctgatcttgaactcctggcctcaagtgatcctcctgccttagcctctctaagtgctgggattacagatgtgagccaccatgccctgcttctttcttaatttcatgcatatacttctgagggtccttggcttcccagaaatcatatgcagaatatagcatatatttgcttttttcctagataaagactctgttgggtgatcacattctcaaaaggatatgggtctgtaaaagattatgaacttctagatataaaattaaagaatacatattccatatt

SEQ ID NO: 112096 - DNA, 1184 bp, Homo sapiens
accaccgaggtcaacaaaagacacagcctgatctcttccagtccctcaagattcaattttagttttgctacccaaattgcactccacatctatctcttaatgttcctggctcaaggcatcatattctaaacactgtcttgaattcaacttcccaatcgtaggtagaggcagaggcagagtctgccctctaatacatgaggcttgggataacacaactgaatgtctgctctctgtagttagctggatcacaagggtggatggcagaaagagctgggatacttgtttccagttcctttctgaaactcacctgtcaggtaactcactccatctttgtgcacaagaagctggacgtatttaggataaacccctctttgcggaaagcagaggagtgaagttctagtccctctcaacatgacctgattcgatttttcccctgtggcctcctttgatagactgtcttgaaacaagtgtttctttccagaataaaaaccaaacaaacacaaaggacttatgtgttctaagtaattgaggagctcaccagttgaatggcttgactgatgcgtcatcaattttaattctgctgcagagggtttccccaggtgctttacatatgctagctgtaactgatctcttcaagcactcaatgtaacacttttctggaaatgctgggttaagtcttgctttccaaaagtaagctggaaagatttcaaataacatggatggaaaaaaattgaataaacaggaaaatgattcacagtgtgcattgatacagggagatgtaattacattaaattaaatgaggtaatagttgtgaaagaacttggcaaacttgtaaaataccatatgaaggtaaagttttagcttttacattctgtacaaatggattgcaatttgaagtccacagttcctattataaggattttggtaggaaggttaaaacctagttttactcttccttacattaggagaagccttgaaatggtaaatgatctttctaagccatatggtccatagtcaccaacataaggaatgtctaagtgggaccagaagtcagtatgtttctcttaatgatcagtgtcagaagtttgtgagtgcctagattcatgtgaaatgcaagctaccagggcataagacactgacaaagctgaaaactggaccataaaaaaatcttaacaacatcaact

SEQ ID NO: 112097 - DNA, 1049 bp, Homo sapiens
ctcactgggtagattggtggtgggggagccacctgaattcaagcccccagcccagtgttggaaacatagtacacatctgttaatgtttccccaataagtgggcaagtgaagtcgtcaataaatgaaatactggtgcactccaacttatgaagatagttatatctcagaagtccatttaaaaaatgtctatttggtcttagagttcattttccaaatataacaatgctacaaaacataatccactttccataccaccccacacatgcctatttaatctctataatagatgaaatattgtgcttttgcatatctaaagcaaaagcaaaacaaacaaaaactactgtgaaatcatctttttcttttggacatcacaaaatacacttgagtttaaagaaaatagaaacaattataatagatatacattttccacaactgtgttttatattgtactataaaatctgtaatctgtgaaatccaagtgggaggtcctggatttggctgtgaagactaataatgaagttaaatttggagatcctgcttattgaatgggcaatagtcttaattaatcaaataaaatagaaacactaattttggctatttaataattatctggagtgctggtgcttgagggaaattaattaaaggagaatgtggagctggatggagaagaggaaatttagaggggcagcttctttcatgttatagtttctttattgtattgattttcctttcatctcatttgagcactgaggcaaatccaaagtttcttcctgaaaaaaattctttgtctgcagttatttttgctaatatgtagaaaggggcttacacactgtttagactaaaatacatatgggcttattttattttcagagcaatgttacctttgtcatgtgcatactgccagttagcacgtggataatacgtattttgatcaagaattcatacgtgtggttcagggtatagccagggattgaaagctcaagttcctccttattcagcatctctgaaaagcctggaactactatcactgatatttaagaataatagtc

SEQ ID NO: 112098 - DNA, 1043 bp, Homo sapiens
tcctaatgtaccactcccctttctttcactccttctctttccctctctctccctttctttttctccctctctctacccgtttgccttcttcccttctttttccttctctccctcccctctccccctcactctcccaacccctttccctctcttgccttcctttttatctctttccttctccttcttccctcccctctctcccccttgtcttccccgtcttcccctccctcccctgtccttcccaggttctccaggagcctcctctcccctctccaggctcattttttttccactgctctatgtaccctgcttttcctcttatggtcatttatttccttgtcaccttcatggcaataagtctttaatacattcctcctcctcctcctccccctcctctagcccctccccttcctcctcctcctcctcctccttctctctcgctctctctctcttcctctgagtctctattctcatcgccattactttctttggaaaggagaacccatgcctctgctctggtaaaatgctggctgcatagtaacggtatattatgtaaacttgtcttgtttacccaccctagtattagtctgtttcttctagaggagttcttatagtatggtaattcaaataaagccatctaacggccacccataaaatacaaagaatcctttttgaaaatgaaaattgcttcagaataaatattggttattccagtaattcaaaaggatagaattaagctattttagaaaacattttaaaataattacaaaaattgtgcttaccacaactgaggcagaaaataagaattctgatttttttaaaatctgtcttctggagatctttatgtaacttggaatctaataaaattgaaaaattatatctcttctatgtgtaattaaatgtttctttaacgatctaggaaagactttcaactgatgtgccctccgaaggctttggagttaggcactgtattagttttctagggttgctataacgaagtaccacaaactgggtggttttaaacaaaagaaattcactgtctt

SEQ ID NO: 112099 - DNA, 1168 bp, Homo sapiens
catttccaaagcaaatgttgtcccatctgaatcacatagcccatcctattggccatcaaattcttctcaaccttctttccctcttctgcactctaacaaagagactacggtggagtttatagaagcttctacaacgtggttttgttgtatatagatgtgtatgtatgtctatgaatatgtctcccccctatctagttttagaaaccggtattcctaagttatggctttattttcttcactattgatgttcttggaagagtaaaattgctagttcattctcattagtcactgttttttcatttctctttcaattctctgaagctcttctgaatgtcaaaaacatgagggctccattttagtatccctagttgttgattgcctgtgtctcgtgacgtttattgtgacaggtataccatgacttagtttacatcgctggtgtttaacttccacctgtgttccattcattcaacaaatttgacagcagtatttattgactgcctttaatgtgtcagacactgtttcagttgagtgatataatcagaatccttactccagtacaaaaaaaaaaggacatgctaattactctcagagaacctaggatcaacttacatgactagacactaataaagaaccacacaaatgaatataaaactatatttgtggcaagtgccacaaaagagaagaatgtggtgctatgaacacataaacccttcttctcagggaggtcaaaaaccacttctgtgagaaaggtaatgtttcagccttgtttgcttctcagttatttgataaacttgtgaatcactttatcacctataaatgattttcttttcagatgactattggaatagtgagtaatatatactatttttactgtccttaccacttatctttgactttgttttaaagtcttttccaaaaaagttatacacttttttatcactcattcaaactctaattaatacatctacctaattttaataaatggctgttggagtgatttaactggtaaacaaaaggtatagaggcttttgatcagaatgaaagcagtgttcagacaacaaaaattacagggattttgctaaataataatagcatatatgacaggcagtatttataatagatacattttgtgaacttaattatacatctttcggggagatagagaaaa

SEQ ID NO: 112100 - DNA, 1015 bp, Homo sapiens
ctcccatgacaaagagcgacctagcaaggacactctttgatatagtttggatatttgtcctcacccaaatctcatgttaagttgtaaccccaatgctggaggtggggctgggcaggaagtgtttgagtcatgagggtaggtccctcatagccggtgctgtctttgtgatagtgagttctcctgtgacctggtcattgaaatgtgtgtggtaccaccaccccccacttgctcctcctttgaccatgtcaccatgacatcccttatgacctcatctaaaaacctcctaaagaccccatctctaattaccattactttggggattaggacttcaacatatgaattctggggagacacaaatattcagcccataagtggatatttttggttgcatccttgtcccatctattctttgctttttcccttacaaacatgatcctatgatggatatagagaaagatttgaatcagagactacagcagtatatgtcattttattcttggcacctccttgttaatcttcttcctagatatgcagaaggaaatcaaactgatgagtgtccattaaaaatttcatttttcaaactggacagtggctcacacctgtaatcccaacactgtgggaggctgaggtggaaaaatcacttgagcccaggcgtttgagaccagcctggtcaacatagtgatatcctgtctctacaaaaaataatttttcaaaaaagttagccagatgtggtggtgcctgcctgtagtcccagctagttgggaggctgatgtgggaggatcacttgaacctgggaggttgaggctgcagtgagctatgatcatgccactgcactccagcctgggcaacagagcaagaccctgtctcaattttttttttttaatttacttttcagagagatatccttaccaccctatttaaaactgttaaccaacaccctccccaccccgctataactcctgacttcactttctctactgttttttcttttctgaacagtcattatcatcttcta

SEQ ID NO: 112101 - DNA, 1035 bp, Homo sapiens
aatgatttctatatttctggcttttgcaactgcatagaagagggtgacagtcactgagctggggaatacataatgagagccagatttacttgcattttaatttgactaagttgagtttaagacatctttgagataagtggaaatgtcaaataagcttttgaatgtatctgaagctcagagtgtcctagattagaaatattactccgatattcattggcttacagttggttattgaaatcataggcctggatgagatagcctggagaaagagagtactagagtcagaagagaagaaattattggataaatctttttaaaaactctaatatttaaaggtcaattagagtcagcaaaagacattcagacaacagagaaattagggaaaaacctagagaaaacaaagaaacaaaggaaagaaggtgcttcaaggaaagagtggtcaatagtgatgaacacttctagaaagtcaagtcactgaaaagtgaacattatcaaacacgcagcttgtgagtcatgtaagtggaatgctgggtgcatcaaccaggctgcagtgggtacagtgaagaaatagattcagtatagacagtaggcaaacaaaaaaatagaatagcgggaagtcaaagtactttttttaatgacacagacttttaagtatatctcagcactgaatgaaatgatccactaaagagagaaatttaaagatagagaaaggatagctgggcgtggtggctcatgcctgtaatcccagcattttgggaagccgaggcaggtggatcacctaaggtcaggagttcgagactagcctggccaacatggtgaaaccccatctctactgaaaatacaaaaattggccgggtgtgctggcagatgcctgtaatcccagctactcaggaggctgaggcagtggaattcttgaacccggaaggcagaggttgcagcgagccaagatcatgccattacaatcccacctgggtgacaagagcaaaactccatctcaaaaaacaaacaaaaaaaaaaaagaaaaggaaaagaaag

SEQ ID NO: 112102 - DNA, 1030 bp, Homo sapiens
cttgagtgaacatgattctggcacataatttttgattattgggaatataaaagattctgatgcatcttactgtatactgggttatagctacaccttggatattcactgattataatgatgatatatgatgtttgctctctgatgatgttgatgttttgggtatttgttttcacagggtactatttttctgcctggaaataaagtttctgagcatccctgcaatgaagagaacccagggaagttcctttttgaagtagttccaggtaagatattttcctagtctgattaaattattgtcatcctgtgttggtaaaggtgaagatgggtcagacaggtttcattcttttttgaatcatgactgagaaccttaatttgaggcttggttagtgttgacgcagataatgactgcaggtttatatactagtacaaatgaatgcactcacacacacatactctgaccacataactactggattttcatttgtccatgagactccatagttgaccacaagtcatgatacagtatttgttcaggactattggagatgaatttgattttacagcgctcttgtgatgtgaaatttgacaaggggttataggttgaatgctttgcccagtggaatcactgacatatttcctcacaaaattgtatcttcaaggaggttttgcaaaaaacaaaaaaaaaaacaaaaaacaaacaaacaaaaaaaaacaactcttactacttaatacttgtaatactgaccaagtattacagttctgtacctcagctttgctcccaaccaaccacttccacatgttttgctggtagagctgaggacagctctgccaagacatcaaatccctcagttaaacttttgaaacatcctttcgtttttcctagtcatctgtattcattcctcttagtgaacctgatctccactaaagtctttgactaacccagcaacaattcctccaaggccatgttgtctacctctttgatcaattcttcaacttttccttatccctcaatgtaagaaaaagggaggta

SEQ ID NO: 112103 - DNA, 1015 bp, Homo sapiens
aattgtcaatattccagaccctaaaaggcccatctgacccagtgcctaaaatcaatattaactaaaagtaggaggtgttctttcctcttccttcctccagggaaagaaaagaagaggtgaacacaaaagacaaggggatgaggaatgaaaagtagccatggaaaaaaataagataaattttgaaggataatctaaagtgatttttatctgcctggaaacaaaattaggccttcaaaaaaaaaaaagatgttatttatcctacctttagccacaactatactaattatttccaataccctcagacaattacatgttacttttgtacatttcaaattttaaaaagtttccattctaattattttttccagaaggatttcttaggagataggtgaaaagttagaggacatgggtgcctaaagaatctaataaatgcattgatccttttgccaaaaaaaaaaaaaaaaaaaaaggcaaatacctaccaaaattgcacatacttttgaggacttcagagattccctaaaatgcaatcattgactgtagtttaagaataatagtttatattgggaaccaaagactttattatctctctctctctcacctctctctcactctttatctctattttagctaatctgtctatgttcctatgcatttatctattttatctatgtacatgtgtgcataaactgttatttgtaattatctgttataccaatcagttttagacttttacctctctgattcagttgttctttctcctgtttctatgattgtgtaactccacagacctattttgcacatttacagaagaacttttcctggatggaacatttcatgggtctggaggctgtaaaatttttaatttagtaaaacttcaacctacttagatggttactgcagctgtgttacataataggccagctgagaaataaatagttatgagatagattcatgggtgtctctgggaaagaaaaaagtttggccaatttttgagtttttgggataataatgt

SEQ ID NO: 112104 - DNA, 1083 bp, Homo sapiens
actgtactatattccacactacagttgaaaaaaagtgttctgctacatcgaaggtcaagagattgccttgcttccttaagagcattgttaaaggtctgataatttaagaaaattaagataaaataatgcattatgtgtatgttacaaaaaccagagtaatagtctactatacagaaagacttctgaacttgcttcttcaattgaaaaacaagcaggacccaatttaaaaaataagtattggcactagtaataaaaactgatttttcctttctgcatcctgcaatgaattcattgttaaaaaaaatcaaaactcatttttctaaaaatctctggactctttgtaaaagttaactttcctagtcaatatcctcaagaagttttccgggtgacttgtattcttgtcttccctattctcactatataaaaaccacactttatttcctttctttttctgagaaagctgtaaggtaactaatttactcagactatggaactctagaccatgcagatcttgattgtaattctaacttcaccattgacctttaacagtgtacaggttaattatgcttatctgtaaaataagaataacaggtatctcctaggattattatgagagctaactgagataatatacataaagttcccagctcccagccctgtgtgtctcataagacgggtggccacattttcagttcctttcctgttctccacctgtctccctccctctgttccccgcccctctccacaactcgacctctaaaaaatgcttaagtaattgtagagaaattagcatgaatgcccagatgcatttgttactgaataactcagcagtgaacttggcattccatagctaacctttccccttcattaatccccttctccatccccctcaaacacaggagtacaacaggatgccaggcgaactatgtaaccaaccatgcacgtgagcattttctcccagaattttgactagtcttgttctgcctcaaacactagacggggctcatgctgctcacaattaactgactctggccatgtggtggctgccctcaagatctgccacaaagagaacagcagttcaat

SEQ ID NO: 112105 - DNA, 1054 bp, Homo sapiens
actacagaattcataacacatctcttagcatctcttatacccagttcccttttttaactatataaaatgagtcattacattatatgttttacatgtcattttgtcttcacagctattctctgcaatatatcctgccaataaattgatttattcagcatgaactcagataattagcatcactcagatgatgctaataaagtacctcgacctagtggatatttaagaaactggatttactcttcagggagactagttcatggccattaagatcatttggtacttttgtgctttgcattgtttgacatttaattatttgtaataatatgattaatttatataattaaaaaatcaatatttgacccactattgaaatactaaattgagttattgttaaccttttaacaagacaaaattaatgtctacttatattcattcttaagtgtttagcttttgtgaaaactgaattcaggtagtgttatgacttgtttattcatgttcagacctaaattaggaagcacagtataatagaaagagcaaacacattgaatttgggtagtcctcggtttgagttttagctcttttagtaattagaatgactttggataaatttaatctatttctgatctgtaaaatgcaaataataatatatatctcaaaaggttttgtaagctttattcctgaattatacacatataaaatgattgggcatagcctactgattctgtttacaggaattgtttacctttacttccctcttcaattgtgttactgagagaaatagtaacctaataaatctgattaataatgctgagataaaagcatctctttatcactcagattttagcctctttagtttacattggtttgattaggccactgctattgctttggttatcagattgttttatatgtaagatctttttaggtacagtagctacatataagctactttaagactaaaatggttgacattttaaaggaaacaaaataggtaaatccgccatgtccccttgaatatgtgaaaaatacagaaattgatagaaaaaaataccac

SEQ ID NO: 112106 - DNA, 1037 bp, Homo sapiens
caaatgttttaacattaaaagatagacatcatatctcctactctcttccccaatggaaacagttccagctatttctaagtcataggctcaaaacttaggatttaaagaactttaaggagtattccagcagtaatctgatttacagggtctaagctactttcaatttgaattccctacattgtctgatgcagtgccttgtaaataatgagcactgaataaatatttcttatgtgactgtaagactgagagagggtaaatgagatttgagtttattgtcattcagtaaatatttattgagaatctgttgtgtactagcagttgtcctagacatttagggatacaccagttaacaaaagagacaaaatctctgtcctcattagttttacattttgttgtcaaatacattcaataaagattaattctataatataaagtgttataaatgtcatgaagtgttatgtaattggataatggtatgagagagtgagggagtgggtgatgctggtattttagattgaggtggtcaaggaaggcctcatagagatgttacctcatagagatgaggtaagaattgatcaatgaactgaatgaagtgaggcagctcagacgtggatatttcagacaggagttgatatagtttagatgtttgtccctgcccaaatctcatcctgacatgtaatccccaatgttagaggtggggcctggttgggaggtatttagatcgtggggccatggggggtgggtgggcagatttctcatgaatggcttgggtcatccccttggtgataagtgagctcttgctctgggttcatacgaggtcaggttgtttaaaagtatgtgacacctccccacccactctttctctcccttgctcctgctttcaccatgtgatgtgcctactcccccttctccttctaagcttcctgagatctccccagaagccttccaatgccatgctttctataaagcctacagaaccatgagtcaattaaacctcttttctttatgaattacctagcctcagatatttctttaca

SEQ ID NO: 112107 - DNA, 1048 bp, Homo sapiens
aactaaagaatgaaagaaatgtgttccatcttattcccaacttcccctaccatggctgtaggttctcctctctatttctctctacttttatatctgggatggataggatgaaacctggaacagaaatctgaaaggccttcagttcagtctgactgctttggtttatgatctgtattttggtgcctcctagtaccctggggtctcttcctttttccgtaaagcagtcaccacccccattctccagttctgtctctgaagttgaccgtgttgggctagggcaagtggttgttttgagggtttttccctccaattcctttaccttctgtgagtttaagataacatttagattggtagccatattgagaaattaggtagacagggggcttatagtctgtcatcactgatgtagagcttttactactgcaagtatagttaagttgctgatgcatagaccatctgttacctttgtttcccaggtaatatgcacgtgtcactagctgaggccctggaggttcggggtggaccacttcaggaggaagaaatatgggctgtattaaatcaaagtgctgaaagtctccaagaattattcagaaaaggtaagctgctgctgctgctgctgttgttgttgttgtttcagtattgggtacttaaaaaacagatacagggtcagagattagatttttgtttcattattcctgtgcctttggcagagtatgaaaggaatactttccttatctcttttagggctgaaaaagctcagctattatctacattcatttgaatatcttctatgtgcccaatattacaccaggcagcaaaagtgtaatggtgattgaaaccgaaacagttcttctcagtttagagctcacagttcaatgtggaaaatagctattaacaaaatatttgggccaggtgcggtggcttacacctctgttcccagcactttgggaggctgaggttggggtgtcacttgaggtcaggcggttgagaccagcctggtgaacatgatgaaaccccatctctactaaaaatacaaaatttagccggt

SEQ ID NO: 112108 - DNA, 1083 bp, Homo sapiens
atgattatatgtccattaaaaacaaaatacaacttaataaaaaaggagagatacatatagttcttaacagagtaattatcagtttactgaccttggttgtcctggtaagtgaataaatctctacattttagagtgataaggaattatgaattgctttcaccttcagcagttctgattggtgctaccatgctgaggaggggagagggtcagtctgtatccagggatgaaaaggaagaatgtagcaagccttttctggtctgggtggataccagaatccacagtgacaggacagggacagggcatagcatttaggcttctaggtggcattcaggcctctgtgttagctgtgatccgcaatcatttataaatttgaaatggtaacagttacactcaaaatcataattttgcctccaaaagaaagacaatctggaattagccatgacagttagaatcccagcttcctaacttagattcgggacttaggtactggagaactggacagaaagtctagtaagtagaattaattaaaatagtgggatggagattggcagtagtgagcgaaagaagtgttagagggatgttacagcaccatacatgcatcagtccccaagagaagaggaagaatctggaaaaaaataaaaaaccgagaaggcgcagtctttgtgtttgagtaccctagggctcagtccttggtcttcatttcttttctatcttaattctttttttttttttttttggtgacctcatcaagtcacatggctttaaataccatctagtaggccagcaactcccaaaatatatctgcagttgtgatctttatcccacatttcagatcaaattgcctaattgacatccccattcaaatgtataacagatatcttaaatgtaataggttccaaagttctaattcctgccaccacctcctaacccccacctcagcagcctgcactattttagacaatctctgttgatggcactctgtccttttaattactcagatcaaaactttgatgtcatccagagtcctctttttctgtcactccacatccagtctgtcaggaaattctgttgtcactacctctg

SEQ ID NO: 112109 - DNA, 1083 bp, Homo sapiens
ctttatatttatgggcaatgtccttgagagagaaaccacacctttcaccaatttcttaaaggaatgcataattcaaaaaacattaaagagctactaatccttatccatatctatatgtcacgttgataaaacatttgaaccaagtttaattcttaagaacaatgaaagggctctatttctagtttctaggatctaccatccagattttgaaagattaagccaaatcaaggcattgttgttaataatgctacctgttgtatttgtatgaaacccaatctttttgtagcatgttgatttggtatatgttaactacttattaacatctatacaaataggctgcattatccattgaagtgattgctgtttcctgtgattataattttaagcaattttcttctttttttttattttttattttggtgcaattacaaaccagtaagcctagctgatcctgctgcccttggcttcatcatttctccatggtctctgctgttgctgccatctggtagtgtgtcatttacagatgaaaatatttccaatcaggatcttcgagcattcactgcaccagaggttcttcaaaatcagtcactaacttctctctcagatgttgaaaaggtaactgttaaatttttttgtttgtttttttatttgggtggggataggtcaaataaagacaatgggctaccatgtttcaaccctctgaaaaatctattgagttttaaatgaccgtgtattccaagaagttcagttattttatttaagaatccaaaatagttttataaagatttatggatctgagaaatatatgaaaaaaattaaccattagaagcacatgtttacaaatacttattaaatacctgctttgtataaaacaccgtgcctgaggaagatatagaaataactggaaagttgaccctgattaacatgtacagaacaatctgtaacagcaatcctcatcctttttggcaccagggactggtttcatggaagacagtttttccaaggatggggtggtgggggaatggttttagcaagaaactgttccactcagatcatcaggcattagattctcataagaagcat

SEQ ID NO: 112110 - DNA, 1484 bp, Homo sapiens
tgaaacacttggtaaaactggttctgggaaatctttctggggtaagctacagttacaatagtaaatatagtcatattttaaaatttagtagatatcacaaaattttctttaaggatactatataggtagcattttctcaatgaagactagaaatggaaaattgaatttcttcttctaatataaattgtttatttgaaacaatacttaaaatttagaagctcattgcaataagtctagattttgtgagaattattcccaaaaatatcatagaatgatagcatgtttgagctgaaagtgtctcctcttgttttctttcttagatcttttcccaaggagcttttagcaaatgcttctattgtgaacacctagaaaaaatgtattaacatgaaaatgggttttagaaatatttaaatgtactttctgttgctttatacctgtttcgtgaccactcatttgtctggatcttctaggtatttcccaaaccttctccactttcccttcttctcggaacactgctacctagtgtatccagggaatccatgcttgtatccctgccagatttccccaagacctggactcttctagtttttctcttgttttggatatgaagaatcccaagaataaccaatgctatatattacctgaaagtcccacctctgttctgcatttctaaggctgtattttatcttgtttgccctatctgatctggatctatactttatctgctcttatccttagggttgtagtcctggagtgttggtccctcttccttgcacaggttacaaatttaccactgccacacagtgttcttgttgacttcctcagaattcctcatcggtaggggtttagttcccatcttaaccaggatgtcagatggctgccaggaatgtattcaaattctgcacagtttttcagttgataacaaacaggcccacagatcttctagacaaatggtttgtaaactctccctcaagaaacctttgcggttctatagtgaagggaaatgtaggaagtagaggccgaataaatggagttcttggttgcccattttccctctttaactagagcagctccagttttatttgatctgtttatatttctgcgtgtgatttttttgaacaaaggtaaagctattaaaaaatctttgaaaaccatctgtccagaccaaagtttctcatattgttttcaatatttttgttttaaaaattcctctatgaccaaataagcttgagaagaaactatttaaaggaaattaaatgtattttcactggagaacttcttagaacctttaatatactagactatattactaaccttcaagaagaataggcatgtaaataaagcatttcccaaactttcttggtcttggaggtctttttttcagacattctcataagactaatattctttaaaacttcactttatggataaggaaactgatacccaaacaactatgggatttgagtttcctattagacagtcca

SEQ ID NO: 112111 - DNA, 1057 bp, Homo sapiens
ccccagtatattccttaaagcttttgttgcctccagtagctgacagaatgagttagtctttcactggtgtgaaattcattctgagtgaccatcattcttacttaacattaattagcgtgagtaaaagtcagcaagccagcttacttgtctaggtttttccactgatttaatgttataatatttggaccacaattttacttatctgcaaaataggaataataataatatgtgtcaatcatccatattattaaactgttgtaaaagtagttatttccacattaatgagctgctttgtggtccttagaagtttctttgctatttctccctttatttataatatgaggataatattgtctaccatatgaggttgtttgaggattaaatagcacaaagtgtgtgcctagcatatagtaactgttcaataaacaacagttattaatagtaactaacttcaatgcaggaattttcaaagatgtgggatgttagtaatactgtcttttcagtcactgacagtacagtgtaatctggactaacatcatttatgcaacttaactgataacatgatttcagaaatacttccatttacaagtcttcttataggtagaaaacataatgcttgagccttgaatataccaccttagatgggtttttaatccatacttcagcaaaattcactaatggagcaatattaaaacatttctgtggtatgtgcgagtttgtgtgtgtgtaaacaaatatgtatgcatgcttttggtgctagatttaagtaatttctcttcaccattctctcttcttccatttatattgacatttctcctctatttggccacctgaataaaacagtggtctgtccagttttttatcccttatagtgtggagtttgacctaatttgacatactttatttcaagcagataccctttgctaaagctattaaactttaagattacattttgttttaaagggaacttaaaagagcattgatttaaatttgttatccctcagagcgtccatttaaagacttagcatttctcggccaggcatagtggatcacgcct

SEQ ID NO: 112112 - DNA, 1098 bp, Homo sapiens
aaagttatgcaaacatagtatctctttcctcttccactatgaccatcatcaccatcccatttcacctctgatcttccatttggagcatttaggaaattgccaccactttcattgtcaatagtggattacatttccatttattttctaaaaattgtgtgcatacatgatagattcttatcattccaggaagaagctctacttctgatgtactagacatacaaaagcctccactctctcatcagacctttcttaacaaagggcttagtaaatctatgggatttctgtccatcaaagatacacaagatgagaattatttcaaggacattttatcagataattctggacgtgaagattctgaaaatacattctccccttaccagttcaaaactagtggcccagaaaaaaaacccatccctggcattgatgtgctttctaagaagaagatctgggcttcatccatggacttgctttgtacagctgacagagacttctcttcaggagagactgccacatatcgtcgttgtcaccctgaggcagtaacagtgcggacttcaactactcctagaaaaaaggaggcaagatactcagatggaagtatagccttggatatctttggccctcagaaaatggatccaatatatcacactcgagaattgcccacctcctcagcaatatcaagtgctttggaccgaatccgagagagacaaaagaaacttcaggttctgagggaagccatgaatgtagaaggttagtaattctgtgcatgtttgagaaagaattgaagtattttaaatatttttttgaaataaagaagggttattaaattattccacaagtcttattttcactgccaaatttttgtaccctggttagtctcttacttctctgtcaatttctgttctcccttccatcaaaaccctaattgaaatactctgcttccacaaagtcatccctaataaaaatgcccagtcacgttatagtctctcgatatttgggatagtatatttttagattgtaagcttctcaaaggcaggaggcatattttctacttctttttgcttaaattctccaccataccgtctaccatgcactatctca

SEQ ID NO: 112113 - DNA, 1086 bp, Homo sapiens
tttgccaaaggagatacataattcataattcataacagagccatattttgaatcccagtctctagagcccaattataagattcttccactctgctgtcctgatttaaagaagagaccagatacatgtcagatacatggttgaaaagatgttgttactgcctgggacattggacattcaactaactgccttccaagtcccttaagtctctccttaaaaaaattatataatttttaatacagtgaaacaagatagtattaggaaaggctaaaatgaggcacttttggttttttctgtattaaaccataaggtgcaggggttaaggtggaactccattatgttatctattgtggtagatagtattttggtggggttctactatggtcgaatctttaaggcagctaatcctatgactgaccagataggccataaattatcaaaaagcagtgattggcattgagtggtctgatttctttgggaacaaaatgagataggaacaaaaaagatctcaagaaagaaattgtagttgaaattgaaaaattataaatagaagattattactgcgattattaagttaacttttcagatagttctctacatacgtaaagcagtagggaaggggcaggaagaaacataacttaggtttctcttgtagaaactagttttaaaatttgatgttgcccttttttgcttcattcttttaattctacttttttttcacctcagcacaggactatctaattctcctcttttttctcagtattttattttctacctcttcaactccatcccaagatctgagtagttgtctgttttctaataggagtatctgacaaatgtctctttctgtctttcttgtaatgtgattaccatacacgccctatccattgctctgtgggttggcagtagattcctgattatgagagattgacttggaaccagtactgtgagtacagagtgagcagtactcccacaccctgggtggggatcattaatagcatttggcttccaacagttgcaactcctctgcattctgcacaatactagaaaggaaagtatgaagaacagatacaactaatttctacaaa

SEQ ID NO: 112114 - DNA, 1138 bp, Homo sapiens
ctaccctacatcttcatggctacatgaaagctttcatgtactttttgctgacttttatcaacattgttcatgtcagaatttctttaatcttctcaagccttagccaaacaggctcccaagaggtgattgactttttatttccaggcaacattatgatatgaatatcttgggattgcctctgtattttcaccttttcccttgtctgttagttacctcttttaagaaggtacgatttttcctccttgccagtctactcgtcccacatgtgttcttttttccatctcctgtttccttcaaaacattttttttaatcagtttttcccactaccatttgcaacttcagtctctcccactcaacgggcttattatccaccacctgaaatcaagcacagacattcttctgtgggggggaaaatctatttttttaacctctttttgcttcccaaatcctcaaaattcttgaaagaatactggatactcattctctcaaattcttaccatctagtccttctttaaccctctctgatttggcctctgacctgttcatgcaatgaaaatagttgtcttaaaggtcaccaatgacctttatataccacttatatacatttattcactcagaaaatattcattttgtgcttgctatgtaccaggtacttgctagactaggtactagaagtacatctaaaaaagacaacattctttttctcagagaacttataatttagttgaggaaacaaacaagtagagaactacaaagtagtgtaagagttgcaattaagcatgaggcaacgtgaaagtaagaggagcaatgtctaactcagcctttatgtggtcatagaagcttttagatagaggcttcctttaaaggttaaggaaaaaaaagatattcaggtaaagaagaaggggaagagcggtgtttctaacagaaggtatccttcagaaaggaagctaaaagttaatatgcttttgattatctgcaaatttagtaacacaggtacagaattcgtttagggaagtggatggagataaggcttttacctgaattgagtttttaaatttatatttaaattgttgtgtttgtgtgtatgtgtgtgtgtatatacgtgtgtgtgtatatatgtgtatatataggagatgg

SEQ ID NO: 112115 - DNA, 1033 bp, Homo sapiens
atagagactatacacaggagttattagtcaaatataaattaaaaggatctcctgccttccacatgatgggctggcagcctggcagagcttactgtgtggagaactcacagtatacttaaagcctgatgtttctaaataaaattgatctaagaggaagcaaggggctagaagctgtgctgctggagcagcatccttcacaacgttcatcctaaactagagtgatatgaggcccttgaatgtcacacttctcaagcttgctgatcagttcagtcattttatctcactgaatagaaaagaaagactgatgcatttcttctaaaactcattcctcagagagagaggtagaaatagaagtacttcatctcttagccaaagcaagaactttaagatagaaggaaaagggtttactccaataaaaggcaaacaattgcttatgaaaacattcttttatctaggttcatggtgtgtcttactttagaatggagcactatttgcccgccagagtgatggagaaacttgatttatcctatatcaaagaagagttacccaaattgcataatacctatgtgggagcttctgaaaaagagacagagttagaatttttaaaggtaagcatccaagattacaaatgataagctttgtatcttttccaagtaagcaagaagtgttagaggacacatatctaagagttcaagtgccagtaactgatactgtgcataatctcatctcattgctggctaaaattatggtattttaattctcattttgtaaaagagggaaatgaggctcaaagaggaaatgtaatgttcccagagatatggggcagatatgatttgaacccatgtctatctggctgttaatcctatgcttttatcttattccatactcaaaatcaaaatacattatacagaagaaacaaatgaatttggtgaatggcttgatatgagaggcaagttcatactgattctagaattgtttgttttgctttttctcaaaaggcttaaaattcaattacatcctttaaaaatggtct

SEQ ID NO: 112116 - DNA, 1062 bp, Homo sapiens
ttcctgccaaagtttggtccacattttctttaaggatggagaaacctattgggtgtaaaggcatttccttctgaagactttattttgcttctttgattacaggctactcgtaaagtaaatgaaaatagaatagcattatttgctctaataaaaactatattttgaggtaaagatgattatggaaatttttttttttaatgtagtatcgctctgttgctcaggctggagtgcagtggcgcgatctcagctcactgcaagctctacctcccgggttcacgccattctcctgcctcagcctcccaagtagctgggactacaggcgcctgccaccacgcccagctaattttttgtatttttagtagagatggggtttcaccgtgttagccaggatgatctcgatctcctgacctcatgatccgcccacctcagcctcccaaagtgctgggattacaggcgtgagccactgcgcccagcctgattatgggaatttttaacaaaggtgtatttttaaaagtctttgttttttaaggtcttgttataacttggtgcccacttccacttcagagagagatcattgaattttcctagtgacaatgaggcatgtttctttaaacttcattctgatgcatgaatattaaaaacctttaatgttttcctacctctttatgcctgagagaaaatatcaattattaatcttcctaggaagtagaagataaatgaaacaatccaagaatctaagtcagtaatcatttgatattttctttcttccttctcccctccctccctcctcctctgtctcctcttcctcctcctcctcctttttcttcatcttcatcatcatcatcatcatcatcatcatcacctggcacccttgagggagacattttctttataaaaggaagttttcccagttgttgtatgtagcagtcaaacttagttctgtgtagaatgcaacaacatagaattgctgctttccagagggcatcaaagggagtgccttgtgatgtgggtcactaactgcatgaaaaactaaatcatttgaaatcctttgctcctattctt

SEQ ID NO: 112117 - DNA, 1046 bp, Homo sapiens
agatgaagcaggaaatgttgagtaggctgcaactaagagaaagctaaagagatgaaaatatgttatgaaaaccagatcttcaaccctcctttttaaaaccctgattgccacactttgaaagctacctacttatgctggcaatcaaaatgattaaaaactgcatgctgcttatttattaacataattattctcataaaagtactgtggcgttaccatcatgtaaagcaatcctatttccttgtagagagagcttcgtttaggagcctgaatctccaagcagagtctgttagaggatttaatatgggacgagcaatcagcactggcagtctggccagcagcaccctcaacaaacttgctgttcgacctttatcagttcaagctgagattctgaagaggctatcctgctcagagctgtcgctttaccagccattgcaaaacagttcaaaagagaagaatgacaaagcttcatgggaggaaaagcctagagagatgagtaaatcataccatgatctcagtcaggcctctctctatccacatcggaaaaatgtcattgttaacatggaacccccaccacaaaccgttgcagagttggtgggaaaaccttctcaccagatgtcaagatctgatgcagaatctttggcaggagtgacaaaacttaataagtaagaacatattaactaacccaattacatatttgtaaattctacatttcatacgtttctttttgttatgacattttattattttcaccatatttttttacattaacacttccctcctaccttccttttccctcttcagttcaaagtctgttgcgagtttaaatagaagtcctgaaaggaggaaacatgaatcagactcctcatccattgaagaccctgggcaagcatatgttctaggtcagcaaaaacaagcttaccttctttgtcccatacctcatgctcagagggaagtgaacaagatcatcttaattatcaaattattttgggttccatgtcctaattgccaaaactgaatataaattttaggctacttaaaatgcacca

SEQ ID NO: 112118 - DNA, 1024 bp, Homo sapiens
tattgttctattgatttttatgagcttatcagaagaaatcacttcgatatctagcatctgaccatcttatgaaatgtctaatatttaatttatgccacaggaatgactatgcatagttctggaaactcttcatcccaagtacccttaaaagaaaatggtaggtttacaaaatgtttttcccctcatttccatcatttcttgtaccttactgagatagtcttggacctaacaatgaagagtcttgagttccatgcctaggatttgatcttacattgaagttaaaggagagttgtatttttcagcatcataatgatgtaatgggacctctgatttaggctaatgttgatgaaatgacaaattagagataaggacactaattgggaagctaagataatagttcaggtgggagataatttctattaaaaagagttttaactgaggcagttattttaaagggatgctggagctgaattttagagggaaaggaggattcattcagacggaacaataaagataagcattccagatcaagggcatagcatggtcagagacatggaatcatgagaaaagaaatttagggaactgcaggagtctcagtatggtggcatgtgggggccagggtaaagtttgagaactaagtagggaccagtttttaatcttatgctaaatattatgaggatattttgaagactttaaatgctgagattatagtttagaaggaatctaagaaacaaaatcgtaggcagaagaccagaaatgtccagtgacttgaacatcactggctttaaaatttttagaatttagattgcaaagtattttcatatacattatcttatttgatctttctaacaactttcatgagtagaaaataatgttttattactatccatacactactttcctccaaaaatgtttcagtcttggactcttaaagttgaaataattaaaagcctgatgagaaagaagccattatgttaattaaaattattaatacagctaaacttgatgaagttgtaaatttagt

SEQ ID NO: 112119 - DNA, 1004 bp, Homo sapiens
ccagtttcctcttgctattttactcaagaacttactaagaatattttaccagttataaattaaaatgccaaccattaattagaaggaattttttaatatattaagcactgtcaaattcagggagttgattatggtgtaacaaacagaaaacctaaattgaaaagttcggctctttcctgtactagctgactaaacttgtgcaaatcatttaacctattgaggtttatttaatcatttgtaactgaaatatacttatttcaaaagaatagcttatgaagaataaatgtaatacgtagtcattttataaattataaatcactataaaaatataaaatgttaacagtatcagtaaacttaaaatatatgtttaagtgactgagcaattaacacactttgttaacatttaaattgttaaaacaagctgacagtcttaatgcctgagcatgttatatttatttttaaattataaattcccaatagatgtgctacacaaaagatggagcatagtatcttcaccagaaagggagatcaccttagtgaacctgaaaaaagatgcaaagtatggcttgggtaagtcaccgtgagattcttgaaggtctatgattgttggggattcagaggaaaagtctatagcatagcattggcattgcagtgccagctcacttctggtctcaagatactgactggctgcccacctacaagcccatcaacctacccgcccagtcaccaaatgcctaataagaaatgcctacaagaaatacttccacaaaatttaatatgtgttacctactaatcatttgatatcaatagtccccacatttctgtgtttcaggcaggctaatcattagtctttgaaagcagcaatatgaaaatctttttaaaatgtgttattttacaggatttcaaattattggtggggagaagatgggaagactggacctaggcatatttatcagttcagttgcccctggaggaccagctgacttggatggatgcttgaagcc

SEQ ID NO: 112120 - DNA, 1050 bp, Homo sapiens
tggatctcactgtattgcccaggctggtctcaaactcctgggttcaagcaaccctcctacttcggcctcccaaagtactggggtttataggcatgagccactgtgcctgaccatagtgtcttttaaaacacacaagtttgatgcataattccattttcagaatcctactttcagaactctccttcctaatcaaacagcttagttcatgcagttagttgataagatttcttaatgatggaaatagactgtaagatacagcttcagtataccattggagtgcagtaagtacatacagagctataaatacgggaaaatgggcttttaaaatgtgtctagaagtatatatgtttgtatgttcctatgtaaacacagcatgttaataatatctaaattttttttatatctttttctccagaaaatacatttgaggtaaaattatttaaaaatagctcaggtctaggattcagtttttctcgagaagataatcttataccggagcaaattaatgccagcatagtaagggttaaaaagctctttcctggacagccagcagcagaaagtggaaaaattgatgtaggagatgttatcttgaaagtgaatggagcctctttgaaaggactatctcagcaggtgagcccctagcatgtggagtatagcatttttaatgatgagatggattggcctttcagaatggtttcataatgctggtttaactgtaccttcatttgtcattcatggtacccccaggaagtcatatctgctctcaggggaactgctccagaagtattcttgcttctctgcagacctccacctggtgtgctaccggaaattgatactgcgcttttggtgagacttatgaaaagtaatttacagttttatagaatatcaacttagcaactaactaattcagctgtggtggtttcatcatgaattgttctcctgggtttcatacctagctacttgttttaggtaggcatgttatcttgtatgtgacaacttctttgaatgtattccatatttatataataatacaaagtaatttattcaatt

SEQ ID NO: 112121 - DNA, 1050 bp, Homo sapiens
aatatataatactactgtagttctaacttaaggtataaattgtacaatattaactgttattttatatattattttctctattgaacataaattacttttatcatcagaaaattcaatgcatactttagtagaaagttgttcaatggtttattttcaaataaatgcttctaaaattcatagaatggtcacaaatctctttaaatgtgtccattacagaccccacttcagtctccagcacaagtacttccaaacagcagtaaagactcttctcagccatcatgtgtggagcaaagcaccagctcagatgaaaatgaaatgtcagacaaaagcaaaaaacagtgcaagtccccatccagaagagacagttacagtgacagcagtgggagtggagaagatgacttagtgacagctccagcaaacatatcaaattcgacctggagttcagctttgcatcagactctaagcaacatggtatcacaggcacagagtcatcatgaagcacccaagagtcaagaagataccatttgtaccatgttttactatcctcagaaaattcccaataaaccagagtttgaggacaggtatcatcaatataatgtgaaccgctcaaagcaactggttgttgttagtagcagtagcagcaacatgcatttctcttaagaatgaaatgtatgtatctgtgaccttcacagtggttaggcagaggatgactctattggatgtctagctattgtgactgatagttttagttagcaaaccaataagctctctagtcagtcagcctgagtctttcttccctcttgagcatatttactagtaactgagaaagttatttgtatttcactgttaatcatactacttaaacagaaacagaatagacttatttaggcagtaacacagtgggagactagggaccagaaatatagaggggagataagggcagagagtttgcaaaaggtaagacaaagaagatggggaaaagaagaaatgattgaaaacatagaagcatacaaagagaaggactacatcaatacattgcataattattca

SEQ ID NO: 112122 - DNA, 1033 bp, Homo sapiens
tattttcttggcaatttagcttctcttttctaaaaattgtgatcttcacatgcccctttcttgtttttgtaggttaatgatacagatgttactaatatgactcatacagatgcagttaatctgctccgggctgcatccaaaacagtcagattagttattggacgagttctagaattacccagaataccaatgttgcctcatttgctaccggacataacactaacgtgcaacaaagaggagttgggtaatgaaaagtcaaactttgtacaatatgattttcttggttagcttaagagtaagtacttttatgactgagaaaacaaatattttctattatttcaaggtttttccttatgtggaggtcatgacagcctttatcaagtggtatatattagtgatattaatccaaggtccgtcgcagccattgagggtaatctccagctattagatgtcatccattatgtgaacggagtcagcacacaaggaatgaccttggaggaagttaacagagcattagacatgtcacttccttcattggtattgaaagcaacaaggtactctgcaattatttatgagttttgattgtgcgtgtgtgtgcatttcaggtcattgattatacttcattctctgaaaatatattactgaattagtaattcatagactaaattggcaggacttaataaatttaaaacagacttcttgataggcgattttgagaacactaagtgaataatagaatggttaccacatttatcagttaggatgttttcacttgcaagtaatagaaaataaaactcaacttttgtttaacaagaaagggaatttattgggagtttttttgttttgttttgttttcttttcttttttagacagtttcactcttgttgcccaggctggagtgcggtggtgcaatcttggctcactgcaacctccgcctcccagattcaagcagatctcctgcctcagcctcccaggtagctgggattacaggcacccgccaccacgccaggctaatttttgtatttttaataga

SEQ ID NO: 112123 - DNA, 1461 bp, Homo sapiens
aaaaatattagaggtttggaatcaaatattattccatttatttggtttttaatcattttgtaatatgaattatttttgtgtactaataaaaataacaacatcccagaaatgtgagttttctttaattattttgatgtccctcttgtggtttggattggctcatccccttacttcctatattgtcctttcaggttcctacagtgtggggtcttgcagccagcctgccctcactcctaatgattcattctccacggtaagaaaaagcccaccctctttcatgtcatacctccttatctgaggaactgcatgtttgtgttttgaaccaaactgatttcatatttaaatatttgtcttctttagatattcatattaatagtaaggctatattttactgaactaataggccttgctaagtaaatcatacaacatagagcctcacataggtaaccgtacatcatttagcacacactcagcttttaaatacactaaccagttaaatagataactttagtgcggagatttttcttattaatgtgtaaaattcttttgattgtctcttagaccatgggaagagaagaataatataattaagagtggaattgttcctttgggctatttttggcgagtagtaaccttcaagttcaaatctgtgcaatcagtgaggaaaaaacagaagtagcaaaaaaataaataaataaaaagtaggtttacttgcttttgaaagacttagaaaatgctttaccaaatgattaaatgagagagctttaatcatttaagattagcacagagaaatctaggggtgactaaacaaaactaatacatagttaaattccatttcatgctctttttaagtctacttttatgcccatttggctaacatccctttttgtggttttcttcctggtatgtaatatacatttctacagtgatcagagctagatcttcatttcatggaattgttttattccacatgcatcccatacaatatgttctgaacttcaatatggaatggctttccatgtaaaatacagcgctgagggattgctcttttattaatccgaaagtcttattatgtcaacatgagctggctttagtgtgggaggagaaaaataatttcatgaccagaattccaaaattctacacctttcatttcattatgttgtctcacacttgtgatttggtctagcaagccatgaaaagataattacagcagaacattttaaggtagtaatgattgagacacaaaagcaaaaattttttgttatttgtatgtgttgaaattgagctacagcaacactcactattctctgtttattcagaatgtcttcaatttcacatagccaaagcaactgaattttcatgtatttctagtaatattcacactgtatagtgctcttctttttaagtaatcagtatgttgttgaaagaaagaagagttgagtttttgtgaaattaacataa

SEQ ID NO: 112124 - DNA, 1067 bp, Homo sapiens
ttgaagatattcaggtaagtgaatgaaatctttccctgttggaaggtgtatctcctagttgtaatccaagcctggactctttccgtgattgcaccaatgttatttctagataaaagacagtgacttcctagttcccatgcaatggaactaatgctagctattttttctttatgtaatataagtttaaatgtgactgtcttcatgaattctgccagtttcctccagtatgtcctctactaaaatggaaatgaaaatgcaggacttttaatgtgattatcatccttggtgatagcacaaaatggctcagaagttgcatgttggaaacttgtgtttttatggtcagacctctaagtagactcattgaaactacttttaaaatctttaagtagaaaatattccctcataaaggcaacttaacatatttaggaatacatggataattttagcataaacagttgttattcagatcattcatactgcagttacctaaccactggatcaatctagcttgaattagataagtggcaatacctgaagtaaagctgctactgtttcctcactctgtgttctccctcaccttactacacgcctgtgcacagtatcctagctagatgtgagtaatgtttcccatagaaatttagctatcttaaggaaacagtgattttacttttatagaaacaaagcatatcaattcagttctattggtgtcatgtaaatgtagcctgagaatttctctcataatttttgattcatgattttttattgatttacactagcttacctattacttaggctagcacagttgttcaatattcttccagtgatttatccacttaatccacacatttttatagaactcaacccctttatagagatttggcagtcaacaacacagacaaaaaatatttctaacctcatggagcttacattctgaagaggaaataccagtattgatagtgctgtggaaaaaaatagagaaggacaattggctgggggagaatgagaagtatgtcgtaattttcaacaaggagtcagggaaggtatgagaaaatggcatttgaggaaaa

SEQ ID NO: 112125 - DNA, 1027 bp, Homo sapiens
cacgaggtcaggagatcgagaccatcccggctaaaacggtgaaaccccgtctctactaaaaatacaaaaaattagccgggcgtagtggcgggcgcctgtagtcccagctacttgggaggctgaggcaggagaatggcgtgaacccgggaggcggagcttgcagtgagccgagatcccgccactgcactccagcctgggcgacagagcgagactccgtctcaaaaaaaaaaaaaaaaaaaaaaaaggaactcttctaggtgcctggagcacatcagtgaataaaacaaagatccttgctagaataacaaagatattcttgcaggatactgataaggatggaagaccatagacatgttaaacatgtaaattatataggatccctgaaagtggtaagtgctttagagaaaagaaaaatgaaataggtaaagggaatcagtcatggcagattgggggtacgattttaaacagggcggcaccattggcgaagtaacacttaagcaaagatttgaaggcaaaggagagggtcatgtagatctctggggacaagagcctttcaggcagagggaccacctgtgtggaagtccaagggtcttgagtgttcaggtatggtcacagccaatgtggcgggcagggcacgagagaaggaagagtgaaggaggaggtgaggttagaggggaggtgacagggtccaggactttggcttttctctgagtgaaatgggagcctggagtggcagtgatctgactcacattttaaaggactactaacctgctgtgttaaaatgacaccaagtctggggaggaaggtgtagtgttataagcaaagagatcaattaggtgacaagcaggggtggctacagctggagtggtaagtgtggacagagtgaaagaaacaggacgtgatgtgaagtagatttgctaatgggttgtatgtggtgtcagagaaagagtcaaggatgaatgtgtggaaaagttaaaatacagataagcaaaaaagaaacttaaaaggccacttgtattcctactgt

SEQ ID NO: 112126 - DNA, 1010 bp, Homo sapiens
cttgaccctgagcttaatctcgccgtaaagtgaaagggttcttgcgcccccacagcagcccggggcagggtcaccctcgcgaccggggcggtcattgccgtattccgtcctgagctgccgctcccccacgatcctcccaccaatcccgggagggccgcgacgtcccttgccgcttgggtggcgccagctagagggcgcgggccggggcggaacccggtaccgcagctcgggaggtgggggtgggggcggggcctcgcgcggagggcgtggcctcggggcgtcccgggcagccggcgtgctgagcttgccagccagctagcgagcgacgggcgcgcgcggcccctgcgcactcggccgccgcctgcgcgcgttgcggccgcagctgcacctttgcctccgcggttccgcagccgagccccgggaggaggcgctcccctgcgtcgtccgcacttgcgccctttcccaccgcaacaggtcaggggagggcggaggtgacgagggcgcccgacccgggactagaggacggaagggtctggaaggtgagcgcagccctgcgccacccagggctgggggtcgatccgcccggcccccgacgccgccgccgcggacttctcggaagccgaggctctccccgcctctctgccggcttcccagcacgctgactcaagtcgctggcgttcccacttttccggtgggagccctcggggagaacgggctagggctcagagctctcaccgccctacttgcgatcccgcggcaggtagcgcgtagaaaaacaggggacggggacatgggaagagacccatgctcctccctcacgcgcagcccccaagtcagacgtttgcctgtgcaccccgcgttttgcggagagctgtcccgttgttgggacctgctacttgagttgcgtaatgagtcccagaagtttctcggggggagggggcggggaaaagtggggttcttctctcctgcaccccgggacccttccctgtgcctgtcgtggagagagatga

SEQ ID NO: 112127 - DNA, 1026 bp, Homo sapiens
tagcacatgcctgtaatcctagctactcgggaggctgaggcaggagaattgctttgggggtggaggttgcagtgagccaagattgtgccattgcactccagcgtgggcaatagagcaagactctgtctcataaataaataaataaataaataaataaaataaaaaatagccaggcatggtgttgcatgcctgtggtcccagctacccaggagactgaggtgggaagattgcttgagccttgacctaggctgtggtgagctgagatcctgccactgtactctagcctgggcaacagagcaagaccctgtctcgaaaaagataatctgaaacaaaaagacaattgatgcctctgcttgtaaaaatatgcacaaataccacagacccatggagaaattgtctccgaacacctttccaatcctccgttttttttttttccttataaattggagtgagcaatatagcaatatcttctttattgagtagttgaacagagtaaaggtactaagatttggcaagttcttggagcagagcatagtaagtgctacataaatgtttgctattattactcctgaaggaagagattgtgttctcagtctttttttcttttttatggtaaatattgtctcataagatgaagtaattggtttactttgaataaatggcaaactttgagtttgttccaagaaacttttgtaagggtccaaattctgaaatgaggacaatgccttgtacgatattttaccagcccacagggaatgaggtagagacattttctaccaatatccatgtgcttttctgtgtttcctagcttctttatggttacacagaatcaggtgactcatctgtccagataagcagtgagtcacagataagcaataaacatttatttatttagcataagttaactccagatagtaagtagtaagtactatgaaaaaatagaagtgtggccagcactgctattttcctactcagtagccattcctgtttgttcttgttgtcactaaaagaactttaattgctaag

SEQ ID NO: 112128 - DNA, 1045 bp, Homo sapiens
ggccttgctgtgttacccaggctggagggcagtggtgcaatttcagctcactgcaacctacatcacccccaccccccacccacccccacctgcatccctactcaagcagtcctcccacctcagcctcttaagtagagtagctgggaacacaggcatgcacctccacacctggctatttatttttatatttagcagagacgggtcttgtcatgttgcccaggctggtcttgaactcctgagctcaagcattcagccaaccctggcctcccaaagtgctgggattacaggtgcacacccggcccactctctttattcttagtacctggcttacagcagatgctcaggatacatttgttggttctgtcagtcagtcaacaaacaagtgaactcaggacccctctcagattgatagccacccaacagcccaacctgtctccttttctcctgttatcactctccaccaaagagccctaggggtgggtgctattgggttgcaagcaggttgagcatcttcactgggagggtaatgtggggaactgccatcagggactcttcagatgcctctacagaagtgttatgaagaataatgccaacaggaatacaatagtgttttattgatcacttactgtgtgccagccctgcaagtcaagagagagaaagtgtgagcagcaaaggcaggggtagagctagcgatgcagagaaagagaaaaaggagaaagtgagcgatagtaagtggtgagggaagggaagggagactagtggggattgagttggagaattgagaaaacttgcctagggggccactattgctggtcagaagagtgacacatgtttgaccctgaaaagtagatctctgctagtgtgagtttaactagaatattttaacatccatgctgcaatcttttgagagaggagaaagagtggcaaattatgtctgctagtatggaaacatgtagttagcaagtcagcaatttaaatttcatggagagggagataaaagaccttatcgggagtaagaatagagctgtgaaggactatattcagt

SEQ ID NO: 112129 - DNA, 1067 bp, Homo sapiens
ggcaggctggccccgaattcctaacctcaggtgatccacctgccttggcctcccaaagtgctgggattacaggcgtgagccgctgtgcccagccataatttctatttataatagaattcttttcccacttcttgctactgcatttcactagtctaaaaaataaaaacattataagaaatgtagactcagacttatttataatgcaacagaatagatgatggtgcctgcaattgtggaccatcccaaatgttctcctacttctccccctttctggttcatttaggaaattattcaattcctggtcatcattgtgggctgctaaacttggtttactctctcccctcaccaaagggaagacagttagttgaccctggctgctgcagttcacattctgctagagcctgggggaaagctgttgtcatttgtctttaggtttattcataatgttgggtttacacatacgttttacatttttatgtagttaaatgtcttgtcctttatgggttctggcttgattgtgcttagaaaggtctttcctcctccaagattgtgaaaataatgtcatgtgttctttgctggcacttgtacgatttcatttttgcatttaaatcagaacttgtaagctggtggactgtgggacagatctggtcaacatatgggttttggttagcctgtcacggaattctgaaagaaattatctgccagtgttttttacataacaatcttctatcttctcatgaaaaatgtaagatttagcaaccctgggcttgcattgtcatatagcaatgctcagaaagaattgaatagcttcggctcttttaagcggaacacaggctttctaattcagaacttcccaattggtgtgccatcaaatgcttttcaggtgtgccacgatgttgattccccgccccccagcctaaaggtcagccagagctcctatctaatttcctcctgcagacatcatctgctttgtccgtttgccccagagacttgatgtcacaaaaaaaaaaaattgagaaagcactgacgcttttcaattcgttacagttctctgcacagccagattc

SEQ ID NO: 112130 - DNA, 1033 bp, Homo sapiens
taatagcctattttattttatgattatttgtgcccttgcaagctttgtctttaaaatgacaataaaagtggaaaaaccaataagcattatttacattgttttgattgagaaggaaaatcgtgtctaggattttatttctcctccagcgtcaactcaaataccacttgaacagaatgttcatattgattaggactaatgaactatcattaactgaataaattgttcaaacgccaaattttaaattgcttcatctttgaatagtgcttttgctttgcttggactttctaatttctttttccttattgaaagagagaatgtgcctttttgccatttcactaacatgttccccttcttactcttttgtatcaactgcttgaaatgtctcattttctccttggaatcttgaaactaaaattaatttttacaaagtgtgtgctaaattacattcttctgaaattgggcccaggtaactgaagccagagagtaaagttgggatatattctgggaaattttttacttgaggacagggggaaaacatgttaaaataaaccataagaatgaagtaaatgtcatttcaggctataccaccaaatgggtgggacatgattttatcgtcttctgccattcagagtgggtactgaagtgttttaggagatttgctgagatgcttttcagtttttgggaagatttgagggattggattttgttaaccttgcatcatataggatggaatactgtagcccctggaagctctccttttcgagtttgaattgatgtttaactctcctaattgagaagaattctcaattattgaggaagctacaaggtgttcaacagattaacacctattatatggacagatcttctttgtgcaagtaaatcaagggccaaacttctagatgcttactagagagtttaatggctgtaggccatgttttcctgaaatagtgattggcctgggcattgtaaatagtgcacacctggaattgtgaaatgaggaaataaggtttcctgcattttcaagtgaactagt

SEQ ID NO: 112131 - DNA, 2488 bp, Homo sapiens
taacttgtttcgatatagcagtagttctcaacggaggacaattttgtctccctctcttccaggggacatttgacaatgtctagagagatttttagtcatcacaatctagtgagtagaggccagggatgttattaaacatctacaatgcacagaacagcccccaccacaaataatttcctggtttctaatgtcaatagtgctgagattgagaaactgtcagcctatcccatgtatttcctgaagaatggaagttagcactaaaagcttggttagagtcaagataactctttttgcttaaaatagttaaattgcccaggagtgccggtattctgttttgatctgggtgttggttacaagagtatatcattttgtgaaaatttatatgtgagctctacactttaaaaaatgtgtgttatttttaattttaaaagtttacattaaaaaaagaaacctctttattgtgttgggtcccttcctctttttgtctgctacttcacacttcttaaatagttgaataaatctttaaagcctcactcccttttaaagttccttaatactcttttttttttttttttcccaatgtgagagactggtagagatgggggaaaaaatgggtgccttttgaactcattgttgggatggttgagtgtctgttagggaagtcagagtgctggtactttccttgctctgcagaaaattgcagagttgccctaagggagggacacctaaacgataagtaacgttaggccacttgggttttgtgtaaagctgaaaggagaaagtcattccagatgggatggtttgaaagcagaggttggctttcatgagctgtggaatttgggaaaggggcattctgggctgaaagaaccagggaaggtaaggaatgcattaggggtgtgctgggaaccttttcttgagcgatgtcttaaagccagcttctcttctctgtctctgataaataattggaaggaaaggcaatgaatttttttctgacagttggttctaactgggggccagggcctcgtttgcaaatgaaaggactgctgttggagtagttgaaatcacaatgggccctgactcttttcacatcaaagtgtaaaagaatctccaggggtgataaatgggggctgctggactcattacttgtaaacaaagctgagggatgacctctacatttttttttaattaaaggaaaacagggtttcctagtggtgagcatggggctgctcttcgtttgaattttgactgttcacactggaaaagatctttctttaaggttacaagggagctgccgctgttacccaggatttaccctgaatctcaaacactactggaaaaatgctgtgcctaggacggcccagcaggtatcctgcatgtgttgagaattgaagtgcagtgggttccgctgcgttgttacagtaaagtggaacagggcagaatttctgagtgctgctcctctcaggagactgagggctcctttactccttttcccacccgacatcaggaggaaaactcctttattcctgtgcagtgtagaaaaaggtccgtttttaagtaaattcttagctctttgtaaaagaagtccaaaggcagtggttttagagtttaaagatagtatttctttatatttgtgtagttacaaggctttgagtatgatcaaaacgtttaaccaaaactaaagtatgtgcatactttatggtgttgaaagcaatgctactaaaaatagtacaacattttatgggattaagattgcaaattgctgcctaaattcagcttgcagttaaggcctaccttcagtaaactctcgttgtgtagtcagctccccaccaagcttatctcttgctgtttttccacttggctcctctgttgcagtcagtccaagccctaccagattttaaacaactggaggtcagagactgccctttgtaacctgagtggaactggtaaggcactgggcacccaagaattctaatgtgtttactgactttccacatgtttagtaatcaccttctgagcctatcttccaagcaagttgtaagacttgagaaaggagcagaggtcacagctggcaaggagcacagcatccctggatggttgacagagacaagctatcctccagatgaaatatttccaactacagatgagagtattgaaggccttccattcccctttgatatcagaatggtgagaatgtgggagacaccaccagttaaccctgccttcatgagtacagatacccatgaaaatatttaataagcgcagtgaccagacgagacctgtgctaagtatttgataggcatgctttcaatctcgtaactccctatgaggttatgttttacagatgaaaaagggaaaaggaagatactcatcagtggctagcttccttccatcaccgaaccctcaagtccctgttccctttttgtctttgtagaagctggtggcagggatatactttctgagctctggtttaaaactctgagttttgggc

SEQ ID NO: 112132 - DNA, 1924 bp, Homo sapiens
gtggggagaagaggttcagaacatcaaatgctgttaaactgtggattcagtcacctcttccgtgaaacctcctctcttaccctcaggcagtaatggtctcccatttctcaaagatacaaccttttattatggcatttaaattgtttttgtttttatcttccttacaagattctgtcattggacagctgattatgagctagcagacacagtagaaattcaatcaattaatacattaaataatttatagaagaatgattattggcctctgccaccaagaaatggttatgtcttcttagtgatttgcctgctttttgtctccctggatttaggatgtagttttgaaaataacattgacgttccttcatagacgttcgtacagttttcagtattcacaatggcagaagtatgatatttcgactgtgccctatttttatgctgggcaaggacctcaagaacaaaactcctgtgaccttacataggggtcttacactgaaggagtatgggaaatagcaactcttgtaaaaataagctggtcagtgggtggtaggtaagctgagggaaaagatttatgagcaacatcctgttctgggatcactgctggggacggaagagggggagaaactgctatataaatcacgaaggcagctcaggaaataaagtctgccattggagggtctcagggggacccttcttggatatcttttgcataacacatgggtgaaggagaatcaacaggtgtcacttttctcagcccatgtggggggttggtgctgggttgggataattcatctttcataagggaaaaaaggagcagaagatgacagagtgagatggcacagtgggccccagagtcatctctagttttgtaattgcttgctggattgtgaagaaaaaaggagagagaaggggccattttgtaggagcagaagattgtgttcattggtcttaggtctcacgtggtagcctctccacggagcgcctccttgttccttcaggaatctgcatcagcttctgctcagttcaggatgtgtaggtgacatcctgtcttgaccagagggtgcatttggcttgagactttttttcttttcaaatgaaagacagttgagtccaggcgtggtggctcacgcctgtaatcccagcactttgggaggctgaggcaggcggatcatgaggtcaggagatcaagacccatcctggctaacatggtgaaaccttgtctctactaaaaacacaaaaaattagcttggcgtggtggcacgtgcctgtagtcccagctactcaggaggctgaggcaggagaattgcttgaacccaggaggcagaggttgcagtgagctgagattgtgccactgcactccagcctgggcaacagagcgagcttccatctcaaaaacagaacaaaacaaaaaacagttgaatcggtttatcaataggggattagattctatgttatgatgtacctacaaaatagaaatgaaatagttgttaaaaaaaaaaagggtaagataggcccggcgtggtggctcacgcctgtaatcccagcacttagggaggccgaggcaggcggatcacgaggtcgggagatcgagaccatcctggctaacacggtgaaaccccgtctctactaacaatacaaaaaatgagctgggcgccggggcgggtgcctatagtcccagctactcgggaggctgaggcggaagaatggcgtgaacccgggaggcggagcttgcagtgagccgagatagcaccactgcactctggcctgggcggaagagcgagactccgtctcaaaaaaaaaaaaaaaaaaggtaagatagtttatatgtgcatcaagattgcatgatatagtatacaaattacagaacagaatcaaagatatcttatttttgtgggtaggaagctagagctatatctacctagataaa

SEQ ID NO: 112133 - DNA, 1016 bp, Homo sapiens
tcacttggggcctgttgatcccaggctgtgctgtagggaggttcctttggcagccaactgtggagtggattagcattggcagagctggaggtggagagaccagtttggttggatcccatgcccgttaacacctgggtgctgcagccttttgtataagggggcaggatgagggtgaggtttcggtgtggtgtactatagacataatctgcagaattgcttggtagtttatgctgaattttacattgggcttctcaattctgcctcagttggtctcttaatttttttcccccttaaattactacaccccttacggtagagaaaaaaggaagtatgtaggttatggtatggccaaaattttttaatgtattgaatttggactggtgtagcaacttgtctttttccttatttatttctggaagcagattgatttggtaaagagaaaggaagtatccaaataacaggtctgctgatttcttacctagactcagcaaatgtttattatgaggacctgccttttccagagttaacgttttctttcttttcttttcttttttcctttctcttttctcttttcctttcttttttttcttttcttcctttcttcctttcctttttcctttcccttttcctttcccttttccttcatgccacagatacttattgaagatctgctgtcagatgatgccttaaaatctgatagatcaaagatgacctatgggagagaatacgagaatagaaaaatgggagtccctgttctgtttaacctggcagataagcacacagccagattgtgaaacaatgtgataaacgctctagcagaagagcaaataaagtgttaaaggatcatagaaaacagcaaagtgtcacggatgaaatctttctaatgagaaccctggtaattctttttcttttggggccctttgggtcatgccatcttacttggagcagtgctatggcagaattcaacttatttatttatttatttttgagatggtgctttcgcttctgttgcccag

SEQ ID NO: 112134 - DNA, 1362 bp, Homo sapiens
ctactgagtgacttacaggtgagtagtatctgtagtgtagatatactggacaaagggatgattcacgtcccaggtgggacggagaggacagcgagaaatttcatcacactacttagaattgtgtgcaatttaaaacttatgaattgcttatttgtggaattttccatttaatatttttagaccttggatgactgtgggtaactgaaaccatggaaagtgaaactgcagataaggggggcttctgtattgttttagagggagtgtgagcatgtgtgttaggagggggctggaattgcatttctgtggattctccaacctcacctttttccctcaccccctgcataattacctgttccttcacctgtgttcccatggtgtcttatctctgctgtggcgttttcctattgtattttatagtctgtgtttctcatactagactgggtcccctcagggtgttaaggactatgtgttactcatctttacatcccattgccaagaatagtacctaacactggcacatactgggcactcaataaatgtttgttgaattgctttgaaaggtttaccagggagttgccctaacataattctggagaaaggtcctcccatagaagagtctgggcacgttgctatgggagagtgttttctttgtttcacacaccaagtatttatcgagtgcctactgcacactgtgctgtgaggggatacatagatgagtcagacgtgtactctgccctgggttgtgttgacttaatcgtgggtggaaggaagatggtaaatggttgctgataggtttaatgagaaataagctatgatgtggtttagttgtatttgggcttttgtttagaagcataattatttcaatcaaagaatgttagaatttttttaaaatgatgtctcattgatggtagcttacttctcttacttctcattacattcacttttttttttttttttttttttttgagatggagtctcgctctgtcagctaggctggagtgcagtggcacaacctcggctcactgcaacctccacctcctgggttcaagcgattctcctgcctcagcctcccgaagagctgggactacagacgcgtgccaccatgcccagctgatttttgtatttttagtagagacggggtttcaccatattggtcaggctggtcttgaactcctgacttcatgatccacccacctcggcctcccaaagtgctgggattataggtgtgagccaccatgcccggcctacattcacttttatattatgatagaatctgtctagtaaatttcatagtgtagtttctttttaaatttttattcttttggagacagggtcttgctctgttgcccaagctggagtgca

SEQ ID NO: 112135 - DNA, 1067 bp, Homo sapiens
cttccttgtcattaagtattttttgtaaaacaagagggtgaaagcttattcagtggagggggtggtagtggtgatgggaggaattagagatcagtgttataaattcagaaataaagagaagtatctaaagtgagctcttcccactcccatccctctactttcagtatctcaagaaatctctgggattttggtagcaatatgtgtggagaacaagccaggaaaaggatctctagtttggatgattggtgattggctcataaattaggggccaggaggaatggagtgggttggaattggggccattcagatgaattctggcctggtctggccttgggaccatttctcaggctgtctctttctcttccctgtttccctttccttttgaaaggcatcactactccttcgcactcactggtgtttgctattcaacaaattattaatgtggctgatcttattttaaggggtttattgctgatcttcacagttaaaaaacacacggtaaaatatggaatgttttagttttgtgttagccaagtccctcctgatctgcttataggaagctctctttgaattctgccttctgcttttattcccaaggaaggaactaactaaacacacttttcccctagtcttttttaattcctttttttgtgaaggagatactatcttcttcctgtatggagaaaccaccccttacagaccctagaggcagctaagtctcattgatagatatctctcagcatctgttgtaactgcatccagatggggaggatcttattgtgtagacacaatgagaaaatgttctattttggacaacctcccaagtgccttttcatgcccaggaaagtgttttggggcatctagaacaaatagtcttggagttacagagagaagtttaggttggagttacacatttagagagttactgatgatattgtacaagacagcatttagattgagaagagacaagtaaggtttgttagaactctatcctggatcctggatgtgtgagcagaaagaattgtaaaataagattgagttgcttgaagtctgcagagagcctttca

SEQ ID NO: 112136 - DNA, 1047 bp, Homo sapiens
atgagctttttaaaaaaactaaacctttgatacattaaaatcagttggtctgttttgcactttttttcagtggatctttcatccatgcatgattttggtttttgtttgagagagagtcttactctgtcacccaggctggggtgcagtggcacaatctcagctcactgcaacttccacctcccaagtatctgggatcagagatgcgtgccactatgctcagctaattttttgtgtttttggtagaaatggggtctcaccatgttgtccaggctctggtatcaaactcctgagcttaagcgatctgcctgccttagcctcccaaagtgctgggattacaggcgtgagccactgcacctggcctacccatgtatgattctgttataccattggtcatttcaaaactaaggcagatcttctcatataactttcatcactgtcactctgatctcatcaggaaagtctttaagtattggcgaagctggcaagattatgtggcagatgcaaaaagtcttccaaaatgcttgaaagctcaaatttcatcattggcaataagtactgtcaattgttttcctcaaagaaacaggctcaactttgttcatttttaatgtctgccagatacccaagtcagaataactacagtttgtgaattgttctttcaagtaaaaatggtagtccatgaaaaaaaagctagctcagcttgcaactcaattacacaagtgcttttcttctagacagccattgtacttaagtgtgcagtggactgcttcctgggtacttcccattttatcacaaagaacatcaaaaagacccatgctcaagggtcaagatttaatgaacgtaataattctgactgcttgcttcattaacgacaatcataaaggaaacgcttaaaaaaaaataacgtgtggtagtgaagaatgcagtgactactagtttcatttgctgtcactgctttggttagtgcgaaggcgccagcagtttccccataattgcttttgcaccatcagtgcaaatgtcagcacagtgaaaagacaatgtctttgtgtt

SEQ ID NO: 112137 - DNA, 2489 bp, Homo sapiens
tgcagatcgccgcagaggccccagtgcccggatgtccatcaggattagcgcgagccaatacgggccgagcccggggctgcgccgaggacgcccggggctcgagagcaggtagtcccgtaacatcggggcgccgcgccgggacgcgtccccgcccggctccgccaaatggtgagcgcggcgctggcagcagggcccgcggggtgaaggcgctcatggacggaagacccctggctctataagctgaattatggcagcccagtcaaggtaagccgtgcaccggagaaacttttcaaacgcgttcgtggcgaggggagctgaaggttgcgggggagggcagggtgcggggaaggagacggacaggaagcagctttgtcattgccttctcatcattcccgaggctgtggcttgactaaatgtcagataaaaagcagtttggagaacatgctggacaatttctgcacagcggagagagggatggagttaaagtgaagattaaagttagatagcccccttcttcccccagaactgttattttccgggacattaagttgatttcacttgtccgcccttgcccaaatttccatttagattctttgtgcgcctacccctcggttttctggatttcttgctgttgtctcgaggggaagtttagaaatacgattaatgtaaaacatagttcaccttggagagggtgggtgagaatttgcctggtgagtgaaaattttactgctagaatgtacgattccacataaaacggccccgcttacgtgaatctgctgagtaggcaaagaccgggaacgcgccggggtggtgaaggggagagaggataatgaactgcagttgctgtcagaggagcgctattgtaagaacctgaagccccgtctttccatggtttgttactgtttttgtaatgagcgttgaagaagagtgatgacaaggcattagtgattattatgagatccaaactgttctgtgcgattttattttagttttgacagcagttggtgctaagggagacttaggagttatatatacattctctttcaactgtgttttgctagaaagcagtttggtctcacatatttaaagtagtagggttcttcaagctgatatttgatgtagaacagtgattttgggaggtctcagaagacttaacacgtctgaagactcagatcatggagagaaatggatgttaaatgttcatgtttgggctggatgagacaatgtttttttcctacgaaatagaactttctaggaaggaaagagcttctctgtataaagtacctcctatgtgctacctgctttttatatttcttcttctcaacacagtggtttatcctctgcttccattttattgagttttaagaaagtggttcttaatctggggccaagtagtagaacttggatgagaaacacaagttgtgtctctatttttgttaacctctagctgaaatttagtgttttttttttttttaagtaggactagagataaaactatagtaccagtccttgtgatgttatcacaatagaaactatatgtcttttcataatcttaatacaattgttgcagatgtcttcaaacaccttttgtgctctccactcaggaaattaaggaactgctttatcttgcttaattcagtagtaaagaaaaacactactgtaccattgatttcttttaaatattttaataggtgcttgtctatataatctggtacctttgtattcttatgtattttatttaatgtatttaaaaacatttttctgatagtgctgttattgtcagactgctacagaggtccatggcagaaaattaagattaagataccttgatctaagaagttagtaaatgctgtgtgacagatctcagtaatatagcgcagggatttgtacccaggtgtgagagattcaatgccagcgctcttaaactaatgataaaaataaaatgagacacaagctaaattggacactgctgtgtgccaggcacagcattaagcagctttaattggattagctctgactcttctcaggcacctaaatgggtaagtacttttattatccacatttgttagttgaggaaactgaggtccagcctggctgtttcttgcctgaggtcacaaaggtggagcaacgcctgactccagatctgctttgcacacttcctcccttatgcttcctctttaatgctgaggtgagatgttaaagggagctgccaagcctcagtataacagtacaaagaatgattcctgctaaaattggttgtttgtaatatgtaataatcctgagttatcagtgtggtggttcaacttgccagcaattaaaataggagaattgtgcttatttctgatcctctaccccaccttccgacatgccctggaactaggaacaaagccacaagactgttatgtctgttgttttcttagtctgtgtgttgggagtatatctcacattttgtaaatgtgcattttctttggttacacctggaatgtggt

SEQ ID NO: 112138 - DNA, 2037 bp, Homo sapiens
aagctagaagtactttgaattgagagattacctaagtatttcttggcttgtggacttttataaattaaggctgtgttaaaacctaagagtaggaaatttgttttgtggctgatttcttctcttaaagctggaagacatttcttgactaaaatgcaattaaatgcttttaaaatttagatttttgggggtcatattttgaaaacaataagtatttggtttattgtattcctagagttgagaaaggtggtcactgagaaatgtcttgtcaaagcggattgtatgctgtgtctgggctctcagataagtgtgtgctttctttggaacctataaacataacagacacattgaatatatacttccttgtggaaattgcaacaaacttgctttctttgatgtgaaatagttacagaacatggctttagttactggactctgatggaaagtgcatccagactattttatagaagtataaaaactagcaactagtaaacctaacagtttatagacatatttttttcctgcaagaattaacagtgctttatactgaggagtggtgttgatggatacagtaaaaaggaggactttgcctgattcccacctccgctaaccctctcattgaagcagatccctgaattctagaaaggaaaatatacataccttcaaatactatcagggattagccagtttaaaaaaatcacctgggccgggtgtggtggctcacgcctgtaatcccagcacttttgggaggccgaggcaggcggatcacgaggttaggagatccagaccactgtgaaaccccatctctactaaaaatacaaaaaaaaatcagccgggtgcggtggcgggcgcctgtagtcccagctacgcgggaggcggaggcaggagaatggcgtgaacctgggaggtggagcttgcagtgagctgagatcgcaccactgcactccagcctgggtgacagagtgagactccgtctcaaaaaaaaaaaaaaaaaaagaaaaaaaaaatcacctgatgccacctgagaacccctggcccttctccaccctggggcaggggtgtatgcatgggagtaggggagttgaacttgcttctttgggagagttgaatctggtggctgagcacggagcttctcaaaagaaaggatttatagacaaactgcagtaggaaagtatgttcagtcaactctcccacagtttttaacttttgaatttgtctaaaattaatgaagctttgaaaaatcaataaagaagcaaagtcagattgtgcccaagatttatatgaagctggtttttggtggatctctttgactctagggagggaaagttttccattgcaaaaagcaatgctcttaaactggtatagatccagttttgccctgccctatgccccgtctctgatttttgagctagtgattaccttggaagaaaattcatgaatgcaaagcagctttgattaaaaatgagccattatcaaagagaatactgtggttttggaaagtacagttcaaagaagagattttgggatggaaataatttatgtagtattttgatccattgaatattctcactttttccttcttgtgacaccattgtaaacagtgtccttgacagaagagaaacacaaacaggtctcttaagtgatttctttctagttcatcctgagagcccagttgagcttcctgactcacagtctagagctgcttccatgataaagactgaaggagcggtgagtcattttttaaagtcagctgatttatggggatgttgttgttttggcaaaactaactcaagtgatctctcgagattttgctggattttataccataccgtgaaaagatattccatagctggatttacactcttgaaaatggggtttttgtgcgtgctgcatctaaaaattttaaatttcaattacattcaggaataaaatattatggatgagagagaaatctactttttcatcttggttctgtcatttatttcttgtgagcctccaaatctattttttacataatacctgtaagagagaggagttata

SEQ ID NO: 112139 - DNA, 1977 bp, Homo sapiens
cctcccaaagtgctgggattacaggcgtgagccaccctgtccggctgaactgctatcaagttcttaaggctattgctgggagcagtaatttggtgacagatttaatatattaagagaaaatcccaggggtaaacatcttatctaaaggaactcaagcagacaaagggtaaaatatttttattgacacctagattgtctttatttcggtatgttttcaaagggcactcactgtttgactgcattctaaaaagtaccaagaattgtttttcctccgtggtggctcatatgggtgagggcttggagacctgcaggccacatgatcctttattttggtgggctggggaagagttaaggctgtgatgaagatcttaccttttttttttttttttttaagtattgcttactgctggattggcaactaaacaaataaaaagtaaaaggctattttaggggcaatatggtcatatgaggttcagggttctcaaacttgattagacacaaaaatcaccgtgggtgcttgttagtatgcagattctgctccccctcccccagagattctgaatggacaggttctgggtggagctctgctgtctgtaaggccaggggcgcaggtaccatgctttgtgagatggtgcatgtgtgagtgagagagatcatataaaccatgttgtatgatgctattaaattttgatatcatatatgcttataaatacacatttttcccctcctattgaaacagactggaggttggtagagaaggtggatatctacgtccataaaatttatccttatattacaaactgttggttgaaatatccaaatgcgtctgtgttaaaaaaaaaattaaaagataccaagaagcaattcccagtgtttgatcatacagcaccttcccaagaattgtttcttctcaaggagcagggtatttaatttacttttttccatgcgttgtgggctccctccccagttagagttaactgctaagtatctctctctctaccacacacagcccagtttaccaggtggcagttgtttttgttcccagggaaaagttaaaatggtgtgaattggtcagttttgtccaaactttgtgaaaccgaaatgaaagttttgttttttaagaaaagctttgcctaggggtactgctgaacaaataatgttcaacaagacattttaaatggaactcctactgggaagtaaatgttaaaattatagcagatgtcacttcctgtaacaaaattcaggaaacagtctttggtatgtgggtgttgtaacttttcaatttttggaactttccttcaggaaactgtcctgtcagaagcaaagcagtcaataaaatatgaagcacaacttaaactatgttatacagtgtaattaaattttgatttggtgcatatgtttttgtggtcaagacagacccaagattatcacgtgactttcatcctggataatgtaagtctggataacttgttaaattgcttctcccccacttctcccattctggttactttaaaaatacaggtgtatctgatttactctggacttgaatttatggaaagtggtataaaattaattagttctcattgttttgtacaaaactatgaaacctgtttcctccctagctttgcagaaattttgtctcaattgacaaactgtctaccttagacatttctaagatggcctatttagtaagttggtagctttgagctttgataaaagtttgagtccatgatattatggtttaagaaaatttttccttaaaggaaaacagaacgtgttattgagttaatattgctgggttttagttgttgtttatttgctgaaaggatagtcattggtataaagtaagctaaagctctgtccttttatattttttcaggtaattttgacctagcaattacagctataggaatgttttcctgttactcatttacagtctgtgtctccctctcccctccagcctccttttagagttaa

SEQ ID NO: 112140 - DNA, 1286 bp, Homo sapiens
tgggtaacagtaaaatgcatgtgacagaatataactattactaaatcattccctgccactctaggagtgcatttattagagaaatgctaggactattggattgtgttcttccagtgttatgcttttgaagttgtgggaaggcaggcggattgtccccaaaggaggtgcccttagttgatgtctgtcatcctacacaggtggggtcttttatttcatggccagggctctcaaaggcttccttttggccacaatgagagaaatctgggggtgagtgagtgtcctcccaggtaaattaatggtgggtctgtaaataaccaggggccccagactgaaatcgggcaggttgtaatttgtcagatacctggatgcctgttacctgtttctttttattctgttatcctctagcatttggtaaactttgatataaatattgtggccgtttctgagctactttattgtaagagaatagttgggaatctgtgattaggctagagttataaggggaaacaaggtctccctgagtgcaggtggggcatagaggttttaaatgggaaggaataggtgataagaatatgtaagaggttcactctacctccatttgaagacagaggtttaacgttatgaagactgtcaacctgtttcctccttacactgtcagcctgacagatgtctttttatgtacgtaaaggtattcagatccagcagtgcattctcccaccagacttttgaagaatcaggacatttgaggaacattaagttctgacctttaatagcagccactggcttaattcttcatattttccaaaaaccacacccgcctgctggaatagatagcacagggaagttggatggactccctgtgccttgggagttcttactcccagagtgtctcctagtgtttccttttgctgtgctgtgtcccgtatatcctgtcatttccatttattttatcctcaaattataaagaattgtagtgttaagtccgttattcactttaagatgcagccagaacagtgactggagtggtttcatacctcatgggtttcccacacttccatcaacacacacttcacaacaccttggaggcattgtgaaaaggtcaagctttggagatggggaagagtcctgaagatgttgggtgacattgtacagtgaatggaggctgcctgcttggcacactttccatcacacatcacattttgctaatcttttggaataagggggaaagacatttaaatgagataattagagataagaatggagattttaatcttttccctgaagtc

SEQ ID NO: 112141 - DNA, 1356 bp, Homo sapiens
tcatttcccgaaaactgacagttttccacgtgcacagtaatttgagatcgttgtttcaggctgaggaaagcccacaggccgttgtctggggtgggggtaggagggtattgcaggctctgaaagataattgaggcactccagaccagtggagtgggtggctgcaagacgttatcgtccccacagagtatcaggcatgctttcggacccatcctgtgagaaatctgagtggagtaagacggatgcaaacaccctatggtgaatgatcactcccctacaaacttaagtgctgtcttggggcggaggcctctttctctcttggaaacttctgctcatcattcaagattcagctcagatgtccctgttcttaattaattaaatcaccccaggctcctccatttagagttcctgtttttctccttagtcctttagcacttgtaatcaacctctactatcactcttagcatatgtttttttttttttcttttgttcctcctccttcatttgtgtatctcgctaaattgtggaatccctcacctttttatccctaggtctagcacataagaggaagtcaatgtttactggaaatcaggggcttttctgttctcattctgtgaggcttacaaccttgaagtacagaaagccatagataaatgcattcctgttctcaactttgacgtaaataatattcaaaatacaattctgttttgaagaaattattttataaacaggtcttataaaatataaattgtcacagtgtatctggtggtaatgttgaatgtttccttattgtttacttgcagtggatatattagtgtctgcttttcagagagtagaaatggaaactttacagccttatcaagaacttaacattattaaggactctaaaaattctcaagtgtatgtctttcttaattacttgaactctcagattctaatttttagcgttggctgaaggttagagggatgctttaagattgataaataccttttgttttatgcaagtgaactgcctattggtagtgatggtgaaaagatgatatattctgcatataaatgttgatagctgagccaaaatccagcccaaagaatcctgacaagctttgtaaggctcacaacacggcttagcagaggtcaaatgaagggagacttctgcagaaaaacaatgacttactgtttagctttaaggagatgccaattatagcgggtagtaggaggtgagctggggttatgatgaaaatgagaatatttagaaacatgtaactgttgcttgttaccatataaaataccaatagatgtttccagctttcttctcctataataatctccctgttcttcctacttgaaatgtctgtggaa

SEQ ID NO: 112142 - DNA, 1197 bp, Homo sapiens
ttgtgcttgaagggtagaaagtgaggcagaacgcaggaagggtgctcttacctgggagggctgaggctggcagaagtactgcttgaaatactcacccaggaggcctggcatggtggctcacatctgtaatcccagcactttgggaggccgaggagggcagatcacgaggtcaggagatcgagaccatcctggctaacatggtgaaaccccatctctactaaaaataaaaaaaattagctgggtgtggtggcgggcgcctgtagtcccagctactcaggaggttgaggcaggagaatgatgtgaacccgggaggcggagcttgcagtgagcggagatcgcgccactgcactccagcctcggcgacagagcaagactccgtcccaaggaaaaaaaaaaaatactcaggagctttagtcctgtaggcaccagggctcccagaaaggttttaggtaggtgaataacaagatcaggtttatgatttttagaaaaatcagtgacgcagctttgtggagatggacaacccagaaagaggagcctctcggggccacattccaaatgagaagtgaagtccattttatttgaatgttggatgcttcatagatttaatacccaaaacattttttaaaagttggggaatgaattaaaggaagaaagcattaagaaaaagactttaagcttgcttgtctacattcttagtttgtaactgtaggatttttaatttttgtggctgtcatgagagactttcaccagcctcattattttgcaggtatgagatgtggtccttcagggtcagttgatagtgtgacatgagtggcctggtaatgaggccagcactctggttgatcctagtacagaccagaagagcaggagaagagccaacacgtatccacatttctgattggtgccaaatgagcagtgccaatgaggcactgtgcagctgtgctcaccaggggcctttacaactaaaggggagacataaataactagtcaggtgacagactttatctcaggttaaaaaaattggtttatctctgttgccattgtggagggtaatttctgtatatccccttgcttgactgctggtaagcacttgacatcagtctcagggactgaattttctgaaatttgtcagtaacatcaatacgctgacattgcatataacataaagacatgttttattaacccctagctgtagat

SEQ ID NO: 112143 - DNA, 1027 bp, Homo sapiens
cttctgtggcaaacagaagtgagtagcagagagtgctaatgcattgagataatcccctgggggctcttccaggaaaacaactgacatcgtgctgttttgtcattgtagttggctgatatttttaatatgaaatcagattgtaagactttgttttaggattaagtctctgattactttctttataaattttaagaatgttattcatgttagttattgagagtgaaaaccctgggacgatttagctgagtgatttttattatgagaaagtctcttacaaattctttcacatggatggagagacgaaaaaaatctcccttctttgaagcaacattttatcctgccttcagacatggagtcactttgatttctcatgtttaaattgtatttggaagtcaaactagtattgtgcttggaggtatgttgatgctttttcataaagccaatgtgtgaaaaatgtttcccgcatgttagatggtaggaataggggaatgtggaaacaaaaggccaaaagatggacttagaaagttgagatgtggcttttaaaatgaaaaagtcacttacatggtgtggaagaaccctagcatcctgtctttttgcctccctgtttgtgacagatctctatctcaccatcctctaagctgggattgccgaacttttgtgtttatttgttgctctatcctttgtacattcaaatcagaatggcatagtgcttctaaacagtaataagacttaatcctttccagagttaatgtacactgttgattttaggattttccctttccttcctgccagatgtctccatccttatgaagataaatatataggagaaatcacactctgtcatccaagagagagttaaaaatttaaactcgaattctagagagttggtgacatgtatcagaggaaggcctatgtgaagtgaccagtcaagggtgataaatgggtagtcagctgtgcacagccagccctgtgggccgtgagttgccatggaagcaccgaatggcattcagcaatcccgcatgactaa

SEQ ID NO: 112144 - DNA, 1596 bp, Homo sapiens
ggaaaacggcctttctaaagtccacatcctgctgactcctgcagatgaaaagcttccacctctaccccatattttgcaagctgaaaataaaaatatcattaatcttgtctcagttccactgctgcctataaaaggctgttcagtttggaaccagtcctgagccatgatggagaccatggcccagagtgaatgcttgggttttgggagccaggaccccaggctggagggtcacagccaagtgactgaggcctcaccctaaggctgggttaaggaacttaggctttctttaaatcacagccgtcatcactgcttcttcccagacctgtcctcacctcccttctcacatgtaagtatgcctgacaaaacttggagactgataaattttattgttttcattcttttgtggcatctgaaacagtttgtacaatgacgacagaaacctgcttcgaattagagagaaggaaagacgcaaccaggaagcccaccaagagaaagaggcatttcctgaaaagattcccctttttggagagccctacaaggtatttactgaacactagacattgaagtcctgatttatcacaatgttgaaccctatgatgaaacaattcagtataattgagttcgaacaagggtcacagctgtgaaaataagataacttattctaacttattctagagatttttgaaaacaaagtatgaaaattctctgaaggttgttagaattaccaaagtttgtggttttcttttgtaatgctagtcttctacagttagtaatatgtatccatggtagtcttctcaacaggggaattgagttaaaatggcacattaaattctacatgtcgtacattaagttcggagttttttccttaatagtattatataacgtggtttgttaaatggtagttttccttagttttttttcattctcaaattctccttttttttcagacagcaaaaggtgatgagctgtctagtcgaatacagaacatgttgggaaactacgaagaagtgaaggagttccttagtactaagtctcacactcatcgcctggatgcttctgaaaataggttgggaaagccgaaatatcctttaattcctgacaaagggagcagcattccatccagctccttccacactagtgtccaccaccagtccattcacactcctgcgtctggaccactttctgttggcaacattagccacaatccaaagatggcgcagccaagaactgaaccaatgccaagtctccatgccaaaagctgcggcccaccggacagccagcacctgacccaggatcgccttggtcaggaggggttcggctctagtcatcacaagaaaggtgaccgaagagctgacggagaccactgtgcttcggtgacagattcggctccagagagggagctttctcccttaatctctttgccttccccagttccccctttgtcacctatacattccaaccagcaaactcttccccggacgcaaggaagcagcaaggttcatggcagcagcaataacagtaaaggctattgcccagccaaatctcccaaggacctagcagtgaaagtccatgataaagagacccctcaagacagtt

SEQ ID NO: 112145 - DNA, 1032 bp, Homo sapiens
aaaaattgagctctaaggaaaaagggaatctataatatagtgtggggttgttaagaatacctcgaagaaatatacataacatagaatgccttcctttcttaattcatgcacttcaattcaaagctccacattcctgtccaatatgagttttcagagttctattatttgtaaattggaataaaaaacctaaggtgatttatctaaaggacagagctagaaataggacctctaattacttaaatactgaggcctctagattaaaacattaaacctcaaaacccttcagccaaagggattaagaagattagaatgggcttgacaaattaccacggggttaggaaaaaaaaaatgcagagagaaagtaggccaaatttaaatagggaatgaaatgaagttcaagagaaaactaatagtttgtgtggaccctagacctctgtgggaaaaaccatcaatagagttatttcaacaattaaagaaaggaacaaaatcaatgtaaaaatagctgcttatagagttcttgggaaatgtgaacatgcaaagttaaccttggaaaataatgtcaaattgctgttggcaactggagagaagaaatacaagaccaaaaaataaattattatgttaacatgaaccaggatcctctcttaggaggaactgtttaaatatctcatgagtgttggtcacccccaccaaaacagccaaaatcaaaccactaactcagtcatcaacaagattccccttggaatatctgggtttctgtccctgaagattatcagttggctcaaaataaaacacagttaatctagagaagagctaaaatgacccgggtggctatgtgagagcctgggagagcacatgcagtctgggaagattcaaaagagttgaatgtctatatcttggcaaaggcacaactggagagactcagggggatccaataaccatccacaaacatctcaagtgtgaaaacaaggaggaacaggaatttctcatcctggtaccaaatgtacttctggcatttccgagaaggaatagaaa

SEQ ID NO: 112146 - DNA, 1024 bp, Homo sapiens
tcttgttccctccacagcaaaagctctggagacagaagtaggtaaacactgttcctgcttcctctcctcccctcccctctacttgcaacccattgcagcctgctctgtgccttcacgccactgcctctgccggcaggagccactagtggactgtattggatgaattcgaggaatgctctttaaggccttatcctacttgacatctctgtagcatttgacacttgaccaccatcaccttaaacactctcctcccctgttgtctgggttttcttctacctttttgtacgtgccttaatctcctttggaggctgctgttcccactcctcctccagggctctgtcctcaaccatcttttctcattctgcagcctttccctggtgacctcatttgcacttaagattcaactgccgttgctcacgaacaccagagtgattttctagcctaaaactcttaaaacgtattttgagatctaggttctgttatccacctgcccactggacttttctagtaggtgttgcacaggcatcttaattgaacctgtctaaaatggatttttttgtgcccccctctccctgtatcacttcacacacagaatgttctccttcctcctggtcatcagttctcaattcctttctgtcatatactccattgttttgaaagcagcttgatcctatggagattactttataaacattcatagcttctccttttctctgtccctcatttagtatggatttttaccgtctttcttgaactgttacaacttctttctaacctctcatcttgctgttttcctgcttctcagtatgccacattatttcacatgagtgatttgattaagtgaaaatcagatcaagtcgtactttttcaagatccttcagtacctctccatcaccttcaggacagaaagccagatgtgtccatttgtcttcttgcctcttacctgtctctgcagccttgagttctggccctgctgctggtactgccttgttccactgcagcccccagacccttatagatgact

SEQ ID NO: 112147 - DNA, 1321 bp, Homo sapiens
ttttaaagtcttagaccattggggattctgattccccttattacgtggtgaatggtaatggttcatagtcaatagttaggaagttggtgaataactgagattagacatttactgtcaaacagtggtaagttttttacatttgtttttcattcaggtactttgttgttaagtgagtttaaacctatcccagcacaccctacttattttaacttttgcactgttagttgacatattgtcataatatgtactgaaaacatttctgcgtataaaacatcaacactgaattgtaccttttatatgtactgtttcatgtgactatacaggaccttgcaaacatcaaaaattatattgtatgtgatctcaggatatataatggtaacaaaatcagtgaatccagcattgttactgcttctctcattatttgcatattcttatcaagtgagtgtttacaattatacatgtggacaacaaccactcattgttttcatttttatttaagccgggtcttaagaactggaatccttggtttcataattaaaagaggccctctttgtagagatcaaaacaaaatttccagaatgttttaagtagctcagttaatgcagattgagcctctacaaattttatatgctttagaaaaatatctttatgatgccaattatgcagattacctcactggtataatcaaaatgaccaactggaaagaaacaataagttttctaattattcatattaatctttaaagaactgctattttaaaatacttcttcccattgggttttataagtttcagtgatgtcttaggatttagtgggtttttttagcttgtttttgctttagttgatgaaagataaggtaatatcatttgcttatgaaagagcaatttacctaaaggtaaatttaaaaaaatcaaatatataaatatgtgtgcatatattcacttatatgtacacatatatacacacgtattcaatatgttatatatatatctcctatctacacgatatattaggctctcatttattaaatgaactggggtgccagcacatctctaacatgatcttccagtgtttatcctggagtattatttcttcatcttctatctcaaggaagcgtacgtacatcctttctttacccaaacatgctgcctgatatacctaccctccccaacctgacgttctgatgttactgtcatatctgaaattttgcattctgagaaatttatgtccccaaactgcatttaggcaactactcttataggtgaaaacatctgattaggtggtagtggttgatggattatagtcacaagataatacttctt

SEQ ID NO: 112148 - DNA, 1050 bp, Homo sapiens
gctaatagaaaatttagctgtacttcgagaacaggcttttgatccctatttatttcaatctaatatttgtgtttttagtaatgaataggtaataggtcagaatttaaaaggttaaaaaaaggatatacattgaaaatcttccccctattccttcccccagcctccattccccagccttcctttctggaagtaattgatgttaggactttcttgtgtatcattcccagtggtattttatgcatagtaagcaactccatatatatgttttcttctcattgatactttcttcatttatagaaatgctggcatataatgcatctttttttaaaaatttattcttctaaacaatgtatcttggagattaccccaaatcaatgcaaaaagagcatccttattctttgttgtagttgcgtagcatttatttctttctaggtggcatgtaccatagttttcatagtcagttacctgtagatacacatttagattgtttccagtatcttgctatttgcaaactaggctgaagtgaataactttgtacatattttttttgtacatgtaggaggcagtgctaaaggttagagaagtgtctgtgtaattagaatttgctgactattgccaaattaatgtccttaaaggttgtagcacttaatcctcctaccaatcatgggatttgagtgcctatttccccatgtctatctcatagatggagtattgttaatcttgtggctgtttgccaatctacgtgtgaaaagtagtttctcagtagttgtaatgtttccagggagaaaacaatgcaaaacaattatctttttgtctcttttatgtttatttacatgtagtttagtttgttaattaaggtgttgctttataattcaggcagcctgcatcttcttaagtgtctaaagccataagagaaacttagtttcaaattctgagttccgggactgaaaacatgccagccattgtttatggggttgcctctgtgtggctggcaccctgtgattcagtgagggttctggccctaacttccatggaacatattatctagag

SEQ ID NO: 112149 - DNA, 1033 bp, Homo sapiens
cctggttagtgataagtaagcctttttgagaatagcattgttataaaaatgccgctctgttgaaacttgagagacttaaaacacaatattgcaagagcctcccagtctcagtggcatgtttcttcagccagctctttttagcttattaaaacaaactgtcatgcttagaagacattcactcacatattttattttggtatcagtgcgtttccttacagttacacaatgtcattccaggaggagtgagaaatcaggccacggccagcattgctgccttttctggtccgaagcactggtagtaggaagaggcagttaaatgtgaataccaaaatgcttctttgtagaagcaaaggaaaaacgtagctcttgaaaaaatgttttaggttatgcataggacaactggaatcacacaccctcctaaaatgctaatatatttgtttcttgcagcagtgttgaggtttttagaaaactggtataacagtattctgagccagctcagctgcttcagagcttttgtgtgtccttgcatagacaacttaatttctctaggattcagtctcctcgttttatttttaaaattattttatttgtaaatacctcatcgtggactccaaaagcatgtctcctcgttttaaaaactggcataatacctaccacaaaggttgatgtgagaattaaatagagctttatacagaattccctcaggcatttttaagtttatgtaatagggatgtatcttacagttgatgggtacatttagtgtagtccccctacctcccaagctaataatggtgcgtcgtacaattgatggtaccaaattgaggtgataataacatagaaagagtttaatgcaacgtgaagtacaaaatgcattcaataagtagctgctatcatttttttaaaaattaaatatggctgcttgttaaggccatatcccaggaggaaagtgtggtctctgctgggaggttggtctacatacaggaagccagatgtgtgagatggctctagataggcagaaggggagagctcgtgc

SEQ ID NO: 112150 - DNA, 1440 bp, Homo sapiens
aaataaataaataaaaaataaagaacagttgttgttcccaaaccccttttaaccatttctcccccactcatctccaaaggcaaaaataaaccagaatagtaacagaagtagtcttggaacgtaattgaattctctaccagattttattaattaaattgaagtctacaaactgcaagacatttggaccagatttttatggcatctctcgttaagtttttctggttgtccataaaggcccaggagagttgctcacttcccagagaggaaacttcctgtattgatgtgtgggaggcaccagtggttaaacagtgcttgatttatacctcttggcgttctgtaggtgatacctaatacctatggcctcatacatacagccttttcttcagtgagacgatgaaattttaaaggaatgaaagaaaaatagtgggaagtagatggtcatctttagacttaccttgaaggattactttttgcttttgtttattgaaactatgccatgaacatttgtgcttccacaaatatgtcattgaatacattacccacttgttcaatttttcttgtacaaggatgacagattccttctagaacttaattccaggggaaaaatgttaactttcctcatgaactggcattctttctttttatcagagaagaattatatataatgtttcccattttgcctttaatttccaggaaacccagagcttaattttaatgctcaggtacagtaattgtaaaaactgagggttttgtgtattttttatccctcttctgtggcctttaatttgcttctaggtcaattttaatgatattcttgtcttttactgtagggtttctgacttttttcttcttttttttttttaattagtagagagatgtatataataaatgtgactgttaatttgaatcactattgctcatattttctcaaaatacatttactcaattttagttttttaacttttcattttaaagtattaagtgatggtggtactaaaaccagtaattaagtatattggttatttcctcacttgtgaaatttttgacagtagtagtatctaaccagttgtttggaaaacagcttgtttttgtttcacagtcttttgtcccattttgtagttagggttttctgagaaagaaagaacctctagagaaacatacctttttttttttttttgagacagagtctctctctgtcgctcaggctgggcgtgaccttggccactgcaatctccacctcctgggttcaagcgattcttgtgcctcagccacccaagtagccgggattacaggtgtgcgccagtacgccctgctaatttttgtatttttagtagagacggtgtttcaccatcttggccaggctggtctcaaatgcctgacctcaagtgatccacccgcctcagcccctcaaagtgttgggattacaggcgtgagccaccg

SEQ ID NO: 112151 - DNA, 1146 bp, Homo sapiens
agggtcaaatccattaaaactctcccaagtggaacaagtgacctgaattacttgtttgcttaagtcaaacaggaaagttcttcttcctttgaactgaaataattccaggaaatgcagtaaagaagctgagggagaaagaatgcatcgaggagagactgcttttccagcccaacctgtcacctacagtcttcacagctccacaagctctggcagtacctgttacgtacagtttatgtgcttgataatattcagggtgttaaattcattcacgttctataccttgattgtcttctacaaactggcgttttttagttttttatgttggagagctttaacttttcaacatagcccactgaaataggagttgttttttttaagtacatgaaataacttttaagattgtacttgccatttatgatcaatccattctacattaagttcaaaatgttaagtagcaatgaatgttctatttataatttactttttcttccctttccaaatatctttccaggaaatgacccattcatggccgcctcctttgacagcaatacatacgcctagtacagctgagccatccaagtttcctttccctacaaaggtaattccttaaaagtatggcaggcattgcatccaccttagtgaaaagcgtaaggcattgctgtgaggcagattgataaagtattacttgttcaaatctttggaaatgaggttaaaattatgattaatttagcttctacagtgcttcagaatgctttcaaacatttattctgcaacttagaacatcctagattttcataaagctttataatttataaaaagcattcaggattttccaatacgttctctcatttgaggatccttactttagagatgggagaacagaggggcagggaaattgagtgtgtgatttctcgttcagaattagatatatgcacatacatcttacatatctcacactccctacattttcttgagtttaatgtgatcagttacactagtgctggtttaataacaagcaaataaactgctgacttgtgtgtttctgttacagtatttatgaacaatgcgttaaaacactgccattctccttttttttaatttatacttttggataaccttcaaaatgtagaaatagcaccttcagat

SEQ ID NO: 112152 - DNA, 1118 bp, Homo sapiens
acgtcatcgtaagtgaaatgctttttgtgtattaaaattttgtagtatgaaattgtaatgtctcatgtcaatgcattgcttagatttttctgcctttatgtaatgacattaataagactgctgcattctaaagggaagaaagggcccacattaattttttttgcttgtttgtttgagatggggtcttaactctgttgcccaggtgggagtgcagtggcatgatctcggctcactgcaatctctgcctcccgggctcaagcgattctcatgcgtcagcctcctgagtagttgggactacaggtgcccaccaccatgcctgactaatttttgtatttttagtgtagagagggtttcaccatattggccaggctagtctcgaactcctgacctcaagtgatccgcctgcctcagcctcccaaagtgttgggattacaggcgtaagccactgcacctggcctaatatttggattaagtccccctgttgaaggtctatgtaccattggagagtttggtaaaaggtcttcttgagggggaaaaagggtttttgagccattatttacattttaactctgggaatagaaggcctttgcttttaagatgtcattctttaatagctttagctgttagaaacaagttttgggggatgtgcacaattgaagattttccgcccttttttggcctaatttactaataaagagctaatcttattgcccagctattctttattaaggccagtaagtccagaaatattttgggttatgggaacgttttagactgcatattaaagatttttaaattggcattttgacccaatttgtcatttcttgatggtattgaactcttactactttactttcatatgacaggagctggtcatagggactaagtgaggaggccttcctccagtatctgatctgtcactaactctgtgttgctagtctcaggatttcaggtggcccaggagtttaagctccaactttcctttagttttaggcacaatatttgttccatgtattttggaaggtggggattgctatggattatttaaaaaactatatattgagctggagaggttattttatctcctcgccatgactaaatgtgggtctgggttaagt

SEQ ID NO: 112153 - DNA, 1061 bp, Homo sapiens
cagaatgaaatgtatccttgggaaaaaggaatgacttttatgaactcacttttaatggagattagaagaaagtggtgtcccaaattaattggcaaattgcagttgtttcagattttgtgtggcaaatctcttagtgctcgcgggttgatttgatctattgtcagcattaggcttctttgacatgcagttaagctatttgagtggcacatagagtgctggggagatattctaatgcattttgaatatcagaaaaaaattattaattgcagggtcatttacactttgatttaaaaaaccaatctaggtcttaatgctttttctttcagagttatgaggacttgggaatccttagacaagtggaataggacatataagagtataaaagagaggcccagtagtaaaggataagcttgcgagtggtctgtattaactcagatatggttagggggtagcaacgtggtagaaggatgtagttgtgaaattaaatgtaatggttcagcatgtagtttgagatgtagttatttctcaaataattccttctgtaaagttctgtaggtaactgattagctaggatgttagtgcaatttgcccctaagtttaagagagagtgtatttgtttaagggctcttggttttggaatcctcttcctttccaaggcttagatctgtgaagtgctgaggacaaagtataaagtatttcctttttctgtacagtaactgtgaccttcatataattgtggacaattctttttctgtgcagccagatttagtttactggtgtcagtgcatttgtcagcctctgaaagaggacaaaaatgttaatattttagaaactaaaaaagcaatttatttgtatattctagctaacttgtttcttcccctaccccaaaattgccaagtccttacaaaaaggtgccctccattatttttcttgtttttggcctctgaaatcaacacttacttaaaataagagacagaaattagtcattatagcaatttgaaatatttattacttatgtggaaggtttcttttgaagtgagggagatatctggatgtgaagg

SEQ ID NO: 112154 - DNA, 1401 bp, Homo sapiens
ataacttagttatgacttgtaacttaaaaaaagtagatgttgtacatgttttttaatcaaaaactttagaaaaaaatttttttcttgctgccattttctcctccaataatagcatgctagtttacgttgagatacccacctctggtgatacagtaaatcaggctttctggaatagtttgtggttactcttggctgtgccagcagacactagtaatacacatatctgctgattctcatgtgagatatgtttattctttatcaaataaattatactcacaaatttttattaagtaaaatactttatgtataaatcccaatacatcccaaatgagggaggagaggttttgtttgaccatactggtttatcatttctgagtgtttctttggagacagcttttgcaatcttccttcagagatcacagtccgtactctttaggtttggaataggttttgtatctgtaggcttattttgttactatctatgtaattctctgcagggaaaatttttagaatctgggacagcattttcatggtgcctgtttatcctgaagaggaagtggagccaaaagtcagaactttctctaactttctgacttactttaggagagtatattcttggaagttagatgtttggtagctagaagagaaagttacagaatttttaatcctgtgctcaaaacaggaaatgtggttggattacatgatcattgatgttacaggaattaaggcaaatcagttttattcaaaacaaacctagtaactaagaaagaggtcagttttttgttttgttgtggttggtgactaatgctgaatacactttgccagatttttttctggttgtattatactttacatttatttcaaagatacatcttttatcttttgtttgtgtataactcagcccagccaccatttagcaataaacctgttgagtgactttttttgtataccattacgttgctaactgacaagtcctatgactgaaggctatattttctagccttgaaaaaatatgaatttagctgtgcagggtggctcacgcctgtaaccccagcagtttaggaggctgaggtgggcagaccacttgaacccggagctctagaccagcctaggcagcatagtaagacctcatctctacaaaaacacaaaaattagccgggcatggtggcctgtgcctgtagtcccaactattcgggaggctgaggcaagaggattgcctgagcccaggaggcagaggttgcagtaagccaagatcacacctgggtaacagagtgagaccctgtctcaaaaagaaataaaaatatgaatttagcttctgttagataaatattgagcaagatctacatttacaagttgctaacagttttcattttatttagaaacttatcccagtatgttttt

SEQ ID NO: 112155 - DNA, 1095 bp, Homo sapiens
atggctaactactttagttcagttagagcttatggaagaaagtaattgagtatattatgtatccctccccatttgttttgtttgcatggaccctgacttcactgattaggagtgaaggactttagtctcagggctcgcaacgaatccttgtcttgtggtagttctgcttcagtgttgtagcatgtgaaagagtctgttttgagatggtaagaggcttgcacttaactggtttctgtgttataattgtataattataattgtattcgtacattgtaattgtataattgtaaaacttaacattttcaggaagtcacagcctttaataaataaagaaaacttacacatatcctctctctttgtttaattaggcatattttctatttacatgctagaaaagttgttagaaatcatttcacattcattcttctctgtgtccctgcccattccagcatgctcgaagacgaccttcagctcagtgacagtgaggacagtgacagtgaacaagtaagtgttgcacagcctgtaataccaggagtccttttaaatacatctaacagatctgagctgcttgttctaacctgttttttgttcttttcctggtctttcttccccttattgtgaatgcctagaccccagagaagcctccctcctcatctgcacctccaaggtaccgtgtgggtttctccccatctgtacagaatgtttgcaattttttaccaaatgggaaaaataaagccttatttagtactttcacattttttgtcatgggaaggagctgaaggatcacagtaaaaggaaagtacctgtttaatattttggaagcttaaatcagccatagggaggttgttaaccctatagaagcgagagccccacactcatctacatcatcagtatagatgttaaagatttttaagagtttacaggctgggcgtgctagctcacgcctgtaatcccagcactttgggaggctgaggtgggcagatcacttgaggtcaggagttcgagaccagcctggccaacatggtgaaaccctgtctctactaaaaatacaaaaattagccaggcatggtggcgcatgcctgtagtcccagctac

SEQ ID NO: 112156 - DNA, 1948 bp, Homo sapiens
gggcgacagattgagaccctgtcacacacaaaaaagagaaatgatctcatcttgaataaaagtcatctttagttgaaaaatatgtcaaaaaaaggataaaatgtgagcccactaaaaatttattcattagctgccttctgcaaatacttgatgaaatgattttttactcatttcctcctattattccttaatagagtagttcacaaaacaaaatgtgtcaattctgtttaaattatactataattaccattagaatatattataaagatttctcagcagttggcaattgcctgttgattaatatttgctattaccaaatttctaaatcccacaaaaaagtgaaggttgctttaagagttaattgttatagaacttataacttgaggaggatgaccggaacctaaattctgggtttggaagtatttgctcctctgcaggacagtgttgtataattgggtgactaacacaaaagaataatttgtcatcaatggtcagttaacacttttctttctttccttatttttagcctgagcctccaacaacaaacaaatggcagctggacaactggctgaccaaagtcagccagccagctgcgccaccagagggccccaggagcacagagcccccacggcggcacccagagagtaagggcagcagcgacagtgccacgagtcaggagcattctgaatccaaagatcctccccctaaaagctccagcaaagccccccgggccccacccgaagccccccaccccggaaagaggagctgtcagaagtctccggcacagcaggagcccccacaaaggcaaaccgttggaaccaaacaacccaaaaaacctgtcaaggcctctgcccgggcaggttcacggaccagcctgcagggggaaagggagccagggcttcttccctatggctcccgagaccagacttccaaagacaagcccaaggtgaagacgaaaggacggccccgggccgcagcaagcaacgaacccaagccagcagtgcccccctccagtgagaagaagaagcacaagagctccctccctgccccctctaaggctctctcaggcccagaacccgcgaaggacaatgtggaggacaggacccctgagcactttgctcttgttcccctgactgagagccagggcccaccccacagtggcagcggcagcaggactagtggctgccgccaagccgtggtggtccaggaggacagccgcaaagacagactcccattgcctttgagagacaccaagctgctctcaccgctcagggacactcctcccccacaaagcttgatggtgaagatcaccctagacctgctctctcggataccccagcctcccgggaaggggagccgccagaggaaagcagaagataaacagccgcccgcagggaagaagcacagctctgagaagaggagctcagacagctcaagcaagttggccaaaaagagaaaggtgagtgtggggagactgccctgactccagcgtggaccatccttgctgttggcctggcggtatctttgatcggcctttgatttaggcccagttgagttgtctcacaagtctttgctttgattcgctgtagcctttgcatcttcttccagcattacctgtctggactttgcttctcattctgcagatgggcattaacacgtgttatgtccttccatcggtcttgctagtttgaaaaaaggtgaggcagtcattaaaaacaatagcttcttttaggataatgtagcatctagggccgcccccaacccacctcttttttttttttttttccaaagacaggcccttgctctgttgccaggctggagtgcagtggtgcgatcttggctcactgcagcccctacctctggggtgaaacgatcctcctacctcagcctcctgagtagctgggaccacaggtgtgtgccaccacacccggctaatttttgtattttt

SEQ ID NO: 112157 - DNA, 1073 bp, Homo sapiens
atagtgatcccttcatcttaatcgagtgcatgatttctttaaagcgctgtcaagctgctgagagatctggcctggggaacagtctgcctccgtggtactgtcaggattgatgtctgacccactggttccaaaccccggctacacattacattcacctggtagcctttagcactgatgacgggaatccccaacccccattggtattttaaaaattcctctggtaatcctagtgcctatcagggctggaaaccactgaagcagagccgtactgcagggcccaagagcatacaaagctagttatttggatccaaagttggtcaagtgtgcagtgtttagacatcatgatctaggcaaacagaattcctggcctgaaatatgtcactagttagaaacattagaagctttcaggtaaataaatataaaaaaccagtcaaccgtattcttatttcttcgtcagagaatcatgtgtcgtttggtttaacttcctgctggattctggatgggagttgttgaacatattaatctcattattttctgtagaggacaggttgtccccccttcctcattagcgccctgactgcttgttagggctctctgcctctggccctgtgaccagcacggttgctccagcaggcagcagtgtgtgggcctgctctccatggcagagacagggctgtgaagcttgggtactgctcacatttggataatgaagatatttttcattgtgttcattttaaatgtgaacattagaaaaaactctgagcatatagtcagaggaatagaagaacttgcttgatccttcacattagtggtatttagtgtttttatttaaaggcctcttagagtctgtccctctcttggcacaaaatttagccaaatattttctttcagaagatttacagatccttgaatccacttcagacttaaaagtgtatgaagatgatcataaagagttaatgatggctaacagctgtgatgaagccattagacatggcacctatagaaatgcacacgtttttttactactctacaacagtgggtaaggaacaatgcatgaggaaaagtagagaaaa

SEQ ID NO: 112158 - DNA, 1040 bp, Homo sapiens
agaagtagccttgttaatgcttagttttgccttgggggccttaatgtgtcattaactgcctggaaatacctttcatttaaaaaagtatactttagtacctaatgttcaatttagtatcgatctggatattttagcaaattttgacttttcaaagacaaagtttctgtcttgtaatgtttcttgggccggctatactgcctttcatctaaaactcactacagttcactgggccgtttggtaacagggtaacctgggcataattaggtgcttgattgacaagagagttaccagtaccagaagtcaggttctattttaaccccatcatttccaattgattgtttttctctccaccattattcactgtctctcaagtgttagcactctgagttgttgaacggaggtttgtatgctgcgcagagccctgtcgcaatgccccagcaagcttcttgttggcatgtggccactctaaattgtgctccaggatctgctatgggtccatgcttgcaggagaaacagctgtgtagaatttcctattgcatttcatttgtgggtttagaactcggttgcttatttcatattgtctcccttttcagtccttcaaggtacatttttccaacttctctaatgaattattacatttctgagtagctgatatgtttttatcttatctaagcagtatatttataattccttctttgcattggctaatctgattagtagttcagaacccaattttcagattgtctatagcaaactgtgaagaactgtgctgtcaagtagaaatagaatataagccacatatgtaatttaaacttttctaataccacattaaaaactataaaaggggaggaaatggaaaattagtaaaaaaaaaaaaaaaaaaaaaaaaattctttttgagacagtctcattctgatgcccaggctggagtgcagtggcgcaatctcagctcactgcaccctccacctcctgggttctagtgattcttggcctcagcttcctgagtagctgggactacaggcacgcaccaccacactcga

SEQ ID NO: 112159 - DNA, 2309 bp, Homo sapiens
ttctattgttgttatatatctttgtagtcctttctgtaaaatacacgggattttgtagacggtttcctttcaacattgtacttatttttcagtagaaaataaagtaagctttaagtagtccattttgaattttatacaaacaataaactagtgggtttaagtggatggttctttcgaaagaagttggaggaaacctcataaaaaatcatctctgtattatttgatgtaaatatgcatgttttgtggattcttttctatttagaaaaacatcagtggtctattgaagtctacttactggcattgtctgttactttaggcatcttcgttttcttgcatgggaggaattgtttttcttcgtgcaaaaaaatctgtctcaatagaaattatatcaaatctacattgtcccctgcccactccccatcacactcacacacagacacacatggtaagtactaagaaggttgctgtgcgtacagagatgtctccaaaggttcctttaccctctttgccttttctatattttcttttctgttttgtctgtacaattatgttggtaataatttgctttgctgattatactgtaatagggtgaagcagaaagagactgtgataacaagaaaatcagactggagaaggaaatcaaatcacagtcatcttcatcttcatcctcccacaaagaatcttctaaaacaaagtgagtatagagattagcaaccacctaatctacggtgatcaacacttcttgggtcttgacatagcaaagaaatttttcttctgcactagaatcagtggattaataaactcaagctcatttggacaatgtaataagtttgtttttctttcttgcatccatgaggaccttacaggaattaacaattcatgtggcagcaaatttagatttatcagaaacattttcactatggacaatttctttagacatctggattttttttttccctgagggaaagtaagaaaggtacccttatttctactttgcagaattggaaacaaacacacagagaaaatgacttgtccaaagtcagagaattcttactgtgtgttggagccagcatttggactccgggagcctgtgttcagtgctccttcttttagagatgactgagaatctgtcagaccactcagtgtctgttgttgggaagaggggtggcaggtgagaagtggtagtgccaggaagacgtaaatataacaagcagctattatttactgtgatttactcaagaaattgcttcaaaaaatgtattggcaaaaacaagtgcatagtgtcaccgtgtgggaaccgacagagatggggaaggctcagatgtggagggtgtgtgtccactcgtcttcttgtcagggaaaggcaccggttgggaagcagctgaagcaggcgttcggaatggttggggaaagtcaggaccactggcagactctgcaagcttagaaactatacagcttcatttatcactaatgggtagggctagatttttgaaatgcctcaaaaagtccctgaaatttggcctgtttacacagtttcatgctttgtgataccctactcttttgtgccagcagccagtttgtaactaaacaacgaagccgcttgatgtgtactttgcctcctcttagttttacgtgatgtttcactccaggccctccaggccctcctcacagtcctcaaagaaggaaatgctccccccgccacccgtgtcctcgtcctcccagaagccagccaagcctgcacttaagaggtcaaggcgggaagcagacacctgtggccaggaccctcccaaaagtgccagcagtaccaagagcaaccacaaagactcttccattcccaagcagagaagagtagaggggaagggctccagaagctcctcggagcacaaggtgagcaggggcggcggtcactctgtaagatgggatgcattgctgtacctttacgttcccaaagaagacaagttgctagtgatggcacttcagaactgtccattgcttttaatgaggcaactgtttgtgtttaaaatgctactttttggagggagagtaaaaggtattaataatacacaaagatttaggtgtcgatttattcttcttacagtgatttcagaggtgaaaaatcaaaatagatttttgtgctagtttttgttagggtgttttacagtaagaaatagttaccctgtgtagtcctgctttgaatgtttgatctcagatactttcattcttggttatagtggggaaaaaatgatccactttctcaaataaaagttcttctcttcctgttaatctgggtggagtggagtggtgtgttt

SEQ ID NO: 112160 - DNA, 1021 bp, Homo sapiens
cttatctaaaggaaatggatattgacaaattgctacacagtattgtagtttagtttatttctagcctaaagccaatattaactttggaaatcccatgaaagagatggtgttgaataagtatatttggagaattcagttccatcagtgaagcaaaccggtcatgccaaatactgctgattaattggggaatactcatttgatttttgttctgtcactaatctgagcctcggttctctagagaaagtattttttgattaagttaccttttaaaataaaaaatgttagaataattgaatattctgaaatatacatgtatactacatgtgtatatgtatagcagcctagttcattctgctactggtaaaacatgagaacagtatgcactaaagtcattctgttgtcagctcactgggagaagcgttgtttctgccctgtgtagagtgcagcagcatgcctaagtagcatgacagcccataccgctctcattgctgacgtgtctccagctccttgtattccacttacatctttactattttctttctttctttttttctttttcttttttttttttgagccagagtcttgctctgccacccaggctggagtgcaatggcatgatctcggctcaccgtaacctctgcctcccatattcaagcgactctcctgcctcagcctcccaagtagctgggattacaggcctgctaccacacctggctaatttttatattttcagtagagatgggattttgccgtgttggccaggctggtctcaaaatcctgacctcaagtgatccactcacctcagcctcccaaagtgctgggattacaggcgtgagccaccatgcccggcccctattttcattctttccttttgaacatatcaaatacaaagcagaaattacaaatgctaatcagttgctctcaaggtcttcatgggcagtacatacgccacatgtagagagaaagacagttgcatcacactgtcatcagctgcacttgccatatgccacttagaagcgtg

SEQ ID NO: 112161 - DNA, 1062 bp, Homo sapiens
gttttctttttaataaacttcagcacgcacaaagaaatatgcgtctgcattactccagacatgtggaataatctgtttctcaaggaagttatagaatgagtaatttgacactaataacaaggagactatgtacttactgccttagtttgcgtatgtgctttcataaggctttgagagcatggtcttaatacgggatcattttctttttcctaatgaatttttgctaaaatagttttcagcaggtcatagctgacaggctttggttatcatttttagttcattcatcctcacacttctccctggccataattaaactaagacagtggaggaaagtcacactaaagaatgtgggtgagaaactaaatcaaggtttgtcttcagcctaacaatgaccatgttcttctcctgcagacggacagggttggaaaggcttttaagtacctggaagccgtcttgtccttcattgagtgcggaattgccacagagtctgaaagccagtcatccaagtcagcttactctgtctactcagaaactgtagatctcattaagtaagtgccgagtcattgtgctttcctcttaagtccttttctttcctcacctttattgttttaatccatttgaaccttagtgtgaagatggctcaataaaggggagccttaaaaaagttattggtctaagaactagtgtttgtcctgaagttgcgttctagatgaagtgctagcacagaataactgggtccaactgcatcattttgctaagtgcgccaagaagtgccaaagctttgagggagattggtttttccagtttagcttttttatgaagtgtcctctcctctcagtttaagcctttgtttacttacctacatttcaacaggggactcagtaaggacacaacttcacttggtttcaagaggtagacaagccacacaagagacgtgtactcacctagttttctcaatggcctggattgttgctctaaagccttgggtttttaaatttttttcctgtgatgctctcatctcttcttcaggaaaagtcaatataaaatggaaacaagcatagt

SEQ ID NO: 112162 - DNA, 2509 bp, Homo sapiens
tgcatacattacatacatagagtattgtcttactaggagattccaggcagaggaagtagactatgcgaatggcatgggaaagcatatttggaatacagattagcccagcagggtgtctcgttgaccttgtaggagtgactttagcagtggttatcattttggcaggtgtatagtgaaactttgtgtcttggactgtagttccagacacgtaaatctgtgatccaggggtctactggtgactgactgatcagttatctcttctcttccacctcccagaagcacaggcacaccatcccctctttccccaatgccttctcctgccagctccgtagggtcccagtcaagtgctggcagtgtggggagcagtggggtggctgccactatcagcaccccagtcaccatccagaatatgacatcttcctatgtcaccatcacatcccatgttcttaccgcctttgacctttgggaacaggccgaggccctcacgaggaagaataaaggtaaataaatggctttgtggtggtaattactggggtgtttggattgggaggaataaacattggtttatattttataagttcagtttcttggagaaaagggaatgtgtagctgttttactttaattatattttctctattctgcctcaaaacctagttgcggttgttccttgagcactgtggcatggagctgagtttctgtggctagatcttagcaaaaccaaaatacaagtggctttagcgccttgccccttctgaagctctgctgtcattacttcagcctgagctgaaatgctagctgaaaggcagggcaaatgaagaagaggagccactggctgttcctaggcccagcacattggagatacaaagtagcataacccaaataccgagattatttgtttttagtatatgttaagaaagatagtagctatggtacgagagatacagcgtagtaaacattattgagacttgtttggggaagaagacccttggagaaatgcaaggttcaggagagttggagccagctggctgtaactacttactttcgacatagagcctcttagggccttatctgtcttatcaaactgataatgcttttaacttttttttttcattaatgcatcctttgaggcaaaggtataaatttggtgttttccaagtgccagccattgtgctaagcattatggattcagctctaaagcaaacctggttggtagtctagtggagaattagcaagcaattacagtagattgtgatttttttgatgtgattaagtgcagaatattgtggggacctaccttctggaaccttgaatttttgtttccattttaatttttgtgtgtgcttgtgtatttacttgtttttgttttgttttgttttttttgcagaattctttgctcggctcagcacaaatgtgtgcaccttggccctcaacagcagtttggtggacctggtgcactatacacgacagggttttcagcagctacaagaattaaccaaaacaccttaatggagccccaggttgattcaatgccttgggaactatttttgcacattggaagcctcaaaaacagtccagacatttgtttcatcaggacaccaaactctaaaaaagaagcaccacgagatggccaggacatttgtccacttaaactctcaacaacagtgtgatcattggttggacactgtggttatgcagaagcagagatgaggaggctggccccagagatgatcttgcccttcctaactaaaggacagaagtgcaatttagcttaaatgggtgtatgaatggtctagaaacatttctattttttttttaaaccagcaggatacaagttgcaaatgaaatgaggagaaacagtttcaactctgaaagtgaatttcacgtcatctcagtagccacgctagtccattcccagaaggaaatttttttttttaacaatgacttttggtaaagggttttgtggatgattttttttcttttgagttttgggagaaatatttgtttagtaacttctaatggccatctgtaaaccataagtaatgaaggactccactgtgccccactttctgccaatgaacagtggcttgataataccaagtattgttgtaatttataaaattgaaggcaacccccgctcctgccgcccccaatctccccattgcctagagcgctgcacattgaccccagctctgacttctcattactgtgctgaaagtcagcccacgtcggagcggtgaggaggagccacagcacatggggtgccacctcgaggtctgcacaggaggacttggcgctgccatttcctacccctgccatttcccacccctgcttcagcgaaagggactctctaacagggcagtcactgttgactctattctgaatttcctcccttggggaagaagggaaccaacatttatacctgaccagatggctaaagtgcttttaaagttttgtttaagtagagctggaatttgaggtgctgatctgtggtctacagttatgtggtaa

SEQ ID NO: 112163 - DNA, 1028 bp, Homo sapiens
cgtgaaattcactttcagagttgaaactgtttctcctcatttcatttgcaacttgtatcctgctggtttaaaaaaaaaatagaaatgtttctagaccattcatacacccatttaagctaaattgcacttctgtcctttagttaggaagggcaagatcatctctggggccagcctcctcatctctgcttctgcataaccacagtgtccaaccaatgatcacactgttgttgagagtttaagtggacaaatgtcctggccatctcgtggtgcttcttttttagagtttggtgtcctgatgaaacaaatgtctggactgtttttgaggcttccaatgtgcaaaaatagttcccaaggcattgaatcaacctggggctccattaaggtgttttggttaattcttgtagctgctgaaaaccctgtcgtgtatagtgcaccaggtccaccaaactgctgttgagggccaaggtgcacacatttgtgctgagccgagcaaagaattctgcaaaaaaaacaaaacaaaacaaaaacaagtaaatacacaagcacacacaaaaattaaaatggaaacaaaaattcaaggttccagaaggtaggtccccacaatattctgcacttaatcacatcaaaaaaatcacaatctactgtaattgcttgctaattctccactagactaccaaccaggtttgctttagagctgaatccataatgcttagcacaatggctggcacttggaaaacaccaaatttatacctttgcctcaaaggatgcattaatgaaaaaaaaaagttaaaagcattatcagtttgataagacagataaggccctaagaggctctatgtcgaaagtaagtagttacagccagctggctccaactctcctgaaccttgcatttctccaagggtcttcttccccaaacaagtctcaataatgtttactacgctgtatctctcgtaccatagctactatctttcttaacatatactaaaaacaaataatctcggtatttgggttatgctactttgtatctc

SEQ ID NO: 112164 - DNA, 1878 bp, Homo sapiens
ggctttatttcgatattgaagatgttatttaacatctttcttttttccttactcccttagccatcccctccccttttgtcctatcattccctagaacaagccacctgtcaattgtgaagggttgtgttctttatggcaggttctatgcagattgtgccagagcatgtgcgtgttctgttggcaagccacagtgctcccttgactgaagacatttccaggtagatttctcagccagctctaaaacagattgctttttcagtggccttactctttgtgggtttttttttttttctctgaacttgatataaagattttatttgtcccttgaaaaagtaacaaatgtgcatagatcaatttgtactactttggtcattggatatttctgatccttattgcattgtacctaaaggagagtaactaatggtaacctttttaatagagtatgtgaaaggtagtggctgatgaatccttaacgttcatagggtctttttgctgttacggttgtatatagaggtctgaaggatttttaaaatgatttgcactttttcactgcatgcttacaattcccaaaggcaaaatctgtactgaggtagatcatttgaaagggctagattataaaattaagccttagagtatggaaagttcttataacaataatagtacacacttcagagtaagacaaatgcaaagcatcttaaggagtgaaaatagagtgtaaatcttgcctttggcactacaaggtgtgtgtgtgtgtgtgtgtgtgtgtgtgtgtctttagtaggaaatggaagaacactgttttattttttaaagtgtttaatgtttctgtcctttctgtgaattattgaatttaagagccctgctaaataatgaaaaaacactttactaaaatttatcaaattatactgggttcggattgtgaaaacattggccacctagtagcagtggtgaggagtgggagggcccagcaagcatttatcagaaatagaatcacaataggaggagaatttgactgtctgatattatgatttgattacaatactgaatgggaaaagtatctaatattttgtaacaaaaagaccttcatattatctgttttgaccaaaatatgtagctatttcccttacacagattggaccgcacttatctcccttgtcctgtatcctttaatttcaggtctcaggatgtttagaaagctaaaaccccctacccctttctggctgaaaacttgccttatttggtatcttacacattaatgttactagcatcaggagcttactgttttattatgattcatcttcagtaatttttagaagcaagaagaaagccattgtgtcctctacaattaacaaaacttatctctgatatacaaagggatataaatatatacacttaaatagagaaaaagaggttgattgaattgtgcctttgagtgaacccagtttttaaataccgctgtgtttgtttcgccatggcttcagggatgctacatggctcttgcaccttttactcctctgctttatgaagtttgagttgtatttgtgcatcttaaagtaggttgaggcttgaggctgggctttcgggtttttttgttttttgttttgttttgttttgttttgttttcttgtacttaaacctgcttgcttcctaccacagattctttattttcccaaacactacaaaaaaacttttaaaactttgccatttcatctgtttacactctttgccactgattagcagtatttaaatcttgcaagaatattttgtgctttctttagaaacacaagagtatagatttttctcactgaaaagtgagagttacgcattgcagccatgaagggatgctaggatcaattatggcagtaccttttttcccct

SEQ ID NO: 112165 - DNA, 1455 bp, Homo sapiens
tccttgtgagcctatatattagtatatcggcctggagaggacaagggaataagaccactcatagtgaggctggccaagctgcactggtcggaccaggcagtggctgacctaaggaagacaacttgctttgcttaaaagtagattttttaagcaatgcttaacacaggcagcattcacctttgttcaggccatcgacatgtattgttaaaattactgcatatccccctcagatatcaagtatacactgttcatgttggggttgtgtgtgtgtatgtgtgtatgtacgcacgcatgtgtcccaaatcttgttttaattttttttttctgaatgtgatcatgttttggatgatacctgagcagggttgccttttttttatttattaccattatatattatattatattatattatatattttttgctttcttataactttggaggaaagtcaaatcttggtattattaaaattgttttaaaaaggagtaaattttccagttgataaatgaaaatcactggcctatgtttaataagtttttctttaattactgtggaataacgtgccagctatcatcaacacaatgattttgtacatagggtagggaagcagtgatgctctcaatgggaagatgtgcaacacaaattaaggggaactccatgtattttacctacttcagcaatggaactgcaacttggggctttgtgaataaaatttagctgccttgtatagtcgtttgaaagaatatgtgatctgtgagagaattatagtttttttttagaagaaaaatctgcaaaagatctttccaaagacaatgtgccacagatcttttgttctctgtaatgaggattaattgctgtttaaacaaaaatgtaattgttcatctttaaattctttccttttcataagaggatcaagctgtaaaaaaacaaaaaaattaataaaaatttcgagaaatcattggggttgaatccatgctttctctttacctgaatacagttaattcctaataccattatgtgaaattgccatctatagccaaggagtttcatgtgagcaatgtgtccttattcgcaatatttattgctggagtggagaaagaactgggttcagaaggcagcttatccttctgttcagtggatctcgctaagatcataatcggacacaaattggcctaacatcaccagtgtggcttcttatcctaacatcaactggagggtgtagtagtgaccaaatttgcctatttccaaatttgctgggtagacaggtttgtagaatgttggtattgaaaggaatctaaaggttatctggccttttcaccctttgccaccgttaaagaaaaaatactctttgtgatttcatgaaatgggaaaggacctaggtgctgaaatctgacttccttgtgtttgaatctgattttctggtttgctaattatgtgacccttggtcaaattaacct

SEQ ID NO: 112166 - DNA, 1037 bp, Homo sapiens
gctgggttttattgtaacatgattttaactttttaagaaactgcaaactgttatccaagtggcagtaccatatgtttccatcagcaacatatgagatttccagttgctccttgtcccctccaacacttgatattgccttttcctttgattatatccattctcctgggtgtgagacatggtgtcattgtggttaaatgaatgtacagtgctttcaaacagcatctttttcctaaagaaaatgattgccctctagtggctcattctgcacattacacttgggaaaggggcactaatgagaagtctaaagctcagaacaggcttgttaaaatttacattcatttcacagcatccctggtttagcacactgaacacaatttgagtccagtttcaaaatgttttacttcattactactattaataatacccaggagctgagctggttggctgtggcttttacataatcccaagaggtacattatagtcaaaactaaatttgtgtgctttagatcttatccactttatgcactaagatcttttgctataacaagggtttagacctgtagagtggctaacgcctacaaagaaggggaaaaaaggccagagatggttattgtttactcaaacctattacatcctttcaaatcagagccagaggaataaatcatttttactagtggaatgaatataaattctttttaatgaattggacacaaatgtgtctggtggcttgttggtattttcaggtaacaccttgtaaatatgcctatggagagttgtaaaaatttaggagactaggtctcggctgctcctagggctctgctgaaaggacagaacactatgcatgtttaaaaaaaaaaaaaaaaagttaaaactttgagctaagtaaggaacctggccagggatttacttatttaaggcatgtgtatttggtaagtaaaaaaagatgtggcttcaggaaattagggtagtagaagcaaacatttaatgatttaacataagaagtttttgctttaaagctatcactcacacaggtgatg

SEQ ID NO: 112167 - DNA, 1053 bp, Homo sapiens
tagaagcgtttgatccagtgctgaataggtaatttacatgttgtctccgtgctttatattatcttctggtataatagtagattacttcagagtgttaaaatgttgctagtcgtagttaatactaagctttgggatatcttatctcccactggaagcttgctgtcctacaaaaccagtctcacatagggaatttttgtctttggttagtattttgagtaaagtaaattatgctttgtaacattttttcttctccgtcttttcaggtgggagcttgttggatctgtgtctcactgcagagctggagcaggagtagctgtgtgttcctgtttaactagccaaattcgagatgtaggtcatggatccaataatgtggttgactgtatgtgatttgagttctggccaccaacaatttagtcatatctgataggtacaaaagaaaaccaagattttgatatgaccacctttcaacactttttactgcaactagagtcttatttaaatgttaactgttgtattgtgactaagtacaacttttggaatgatacctgaagaattattagtaatagagttaaatttgatacttcctgcttttgcaaataatggagtagggaagaagatagtcgaacttaaaatcatacctaccctgaaaaatgcttaaagtagtgccaaaaatcttgaaatctctctctctctctctatttggatgaatcaaaatgtaatttgttgagttttgccttttcttttgcctaaagatgttaacgtcaggcagtgggtttttcctagaggagagattagtacctattcattaacacaaggatacataagagacttgccccttttgaagatcatttctacttggtgctgatgaatttatgcctagctttttttttctaggtggtgatttttcaatttcttttatatttacggaagtagaaaaaatgttctgtctttttgaatgccacttagctgcattttcagaagcttataggctataagaagcctttaatttcagtttgaattgctaggacaccaaaagacctagctgggctaact

SEQ ID NO: 112168 - DNA, 1005 bp, Homo sapiens
gagattggcttctgacctccgctgcagaacttctctgtcaactcattaacctctcagttatgccgctgtgtgtgcactaattgaatattttgaactcttttatactattttgttgggttatattttattgttttgagtttaaagtagcctgtgtaggctatgcactgtacaacttcagggggcagtattcacatagagttgcacagtttggcaattctgtagccatctagtcaaaagctttgatagatctaaaaataatggaaacaaactatactgtttgaaggttaacatgataaatgatttgcattagcacaattttttatatgactttttttcctggaaacaaactcatttgctaaagtatgttttattgtctttgcaggcgaggaattgccttggcttccttaggaggcccaatttatgcaattggagggttagatgacaatacttgcttcaatgatgtggagagatatgacatagaatctgatcagtggagtacagtggcaccaatgaatactccccgtggaggagttggctctgttgctctagtagtaagttatatggcaacttgtcattaaattacattgcattacattcataaccaaaataaggaaaggtccaatatatcatcaccagtatgaagatattatatatcatattatttcctgaaatactgccttgtacattctaatttaccattaaaacaatatataaataaattcgaaatctaatgtgttttgtttgactctcttcatttagaaccatgtttatgcagtaggtggcaatgatggaatggcttctttatctagcgtggagagatatgatccacatctggataagtggatagaagttaaagaaatgggtcagcgaagagcaggcaatggagttagcaagcttcatggttgcttatacgtagttggtgagtaaatgggtatttctctaatatatcagtatatacaatgacaagtgtcatataacagagtaacaaaaattacattgcattta

SEQ ID NO: 112169 - DNA, 1057 bp, Homo sapiens
ttattaggaaaagtgtagattatttcaaggaatatagaaattattgatgtaataaataatagaaatggcttttagctctctaattttcctgttaacttgctgtgctgtttcaggatgaatctaaatttgtcacatttgaattagcaatatcattctctgcttttaacctgaatatttaaaatattcctttgggatactaatgatgaatattttatttatgccaatagaaaatggtttgaagaaatagctctaaattaatatactttataattattgttttataatggtttctaaattttaatgaattattttgctaataaaagtatagttattcctaatgtggatagatttattatgtaaacaaccataggacatcacttctattttcttctctcaccgtagtttgactttttttaaacctcagaaatgtgtctcattgttactgttcttattttttactgtcaataggagttaccaggataagaagattataggcccttgtgatctttttttcttttgtcgtcttcctctcctttctctcccttccctccttcccttcctccattttttcctttcttcatttattcctgagaagtaaaatgacattttgctacttaaaagaagagtgttcttatttacttattttttctaaattaaatgctttgttaaaacttagtgcttgataaaagcactcagtgataattctcgtgatttttaataacaaagtttcctaatagcattatcagaaacttaaacaaatagtaagaagaatgaagaagaatgaaagtgcttataattaccagtgttctcattttagatatttataggcagatgaagtaaacctattcagagtatgatgataagacattttttcaagtgcatatcacaatatttatgcattcatatgagtatcaaagttcagaacacatttacatcttctcagaattattttgaaagtaagtttgtcagcaaagcaaatagaaagtttcattatcttgcagctatatcttatttgtgtatatgtgtttttctttaagatggtaaggcagatttcgtt

SEQ ID NO: 112170 - DNA, 1119 bp, Homo sapiens
gttgttctgctaaaaaaaaaaaaactcccagttaagcctcaaaacttaagatttttagttcatggccacgtatgatggttcaagcatgtaatcccagcactttgagaggcctaggtgggtagattgcatgagcccaggagtttgagaccagcatggggaacatggagaaaccccatctctaaaataaaaattaaaaaatagaaaaattttagttcatggcctttctctttgaagatagcatattacacatctcaaaagtcatgtgctcaagtcagttgttcttgttggattttaaaggagttcctttattgatataaaataattagcaaaagtgaattatgtgttatttagcataaaaacaaagtttttgttcttttataaatatgattgatatagttattttgcatatatagtattaacaaattatagttaacaataatttttttcttttcgtttgtctctacctgttttattgttgatttttcagtcacagcaaactgtacaatggcagttgagtgggttttgaaaaacgtctgaattgtagtgtctacatctaccttctgccttctctctaccctttgaaaaaaaataaatggcatgtttgagaagagagctctattaaaagaggaatattgcaaatggcttcagattctatgagtagtaaacaagctaggaatcacattacaaaggggaaaaggcaacaacagcaccagcaaataaagaacagatcctcaattagtgatggtgatggagaagattcctttatttttgaagcaaatgaagcttggaaagattttcatggttctcttcttcgattttatgaaaatggagaactctgtgatgtcacactcaaggtgagattgccttttttgtacttttctcaggcctcttcagtgtaatatgagaaatgggggtttctgtaaccatacaaggcaaattttgttgctatacatatttgatacagtcagaatgcttttagtctcaatctttttttttagtgtaggagaaaggacatagagggtaaatgaagagaagttagcataagataaaattattgtactaatttaatgttgatattcattatctcttagttaacttctgagagttctgaaaccctag

SEQ ID NO: 112171 - DNA, 1162 bp, Homo sapiens
caaggattgaaatgaatacatgtaagtatttaactcatgatgacaattatatatatatatatatatatatatatatatatatatatatatatctgttatgtgccagtttgttaactcatttaagttttatagcaatcctatgaggttgatactattattttcctcatttttacagatgaggaaactaaagctaatgaaacgttatgtaacttaaccaatatcatacaatgaatatacaactaataagtagatagaagcacccaattaatgcttgctgttgtcattaaaaaaaaaaagatgacttagggtattaccatcttttctatagtgggttcctaataattgcaatctcatgtagagcattataaagcatattttatttctttgctggaaaaaatgttgattgcaggactgtgttcctgaccaaggactcaggatcacataatttataaaagtaataacatctgtttattgaatcttactatgtactagatacagagctaaatactttatataaattacttcacttacccatcacaacaaccttagagctgaggctcagagtaattttaagtaacttgcccgaggctgcacaattaacacagaatcccaaaactgtctagctctaaagtgtctgctgctaaccgccagtttatgtgccttgtgtcgcgtatggctgacagatatctctcaaaagcaaggcaacagcttctataattttaaatagcaaaatgtgctactgtaattttgaaccagaaggaaactgattacctactgcctgtaggctaaaccaagcttgctgcctgtttttgtaaacaaagttttattggaacacagccatgctgtgttcttttaaaaataaagacattgagacacagagagattaggtaacttcccagtaatgtagctagtagtaatctaatgtcagtaactatgttaataagcctctgaaagtctgccaatccctgaatcccatgctaccccctaaactctatgtaagctcagcaatgtgctctattcagagggaccgtgcctggatggcatagctatcccttcagtaagtagtaaattcagctttgtgcttttcgtttggtttcaaacatccagtgtgaaatattccatactttgatacttggcaacaaattattgataaattaatttt

SEQ ID NO: 112172 - DNA, 1131 bp, Homo sapiens
aatatatagtagtgactcagatttaagatgcttaatcttatttaacatgaacatgactatacatgataacttaaaagtatttctaaagagggtattctacaaatgcacttaatattaattttctaattatttgcatatatctttcttttaggatccttcctgagcgtttcctggcagttttaaaacaaaaaatcagtgttaagtttgatgcagttattggatataaaatgaaagcgcaataagcacctagttttctgaaaactgatttaccaggtttaggttgatgtcatctaatagtgccagaattttaatgtttgaacttctgttttttctaattatccccatttcttcaatatcatttttgaggctttggcagtcttcatttactaccacttgttctttagccaaaagctgattacatatgatataaacagagaaatacctttagaggtgactttaaggaaaatgaagaaaaagaaccaaaatgactttattaaaataatttccaagattatttgtggctcacctgaaggctttgcaaaatttgtaccataaccgtttatttaacatatatttttatttttgattgcacttaaattttgtataatttgtgtttctttttctgttctacataaaatcagaaacttcaagctctctaaataaaatgaaggactatatctagtggtatttcacaatgaatatcatgaactctcaatgggtaggtttcatcctacccattgccactctgtttcctgagagatacctcacattccaatgccaaacatttctgcacagggaagctagaggtggatacacgtgttgcaagtataaaagcatcactgggatttaaggagaattgagagaatgtacccacaaatggcagcaataataaatggatcacacttaaacttttggtgtttccatctttttgtcttaaacagaacatgacaaccttcaaattaaaggaaaataaattgtgcaatctttttttaaaaactggaaatttcttggatgtgaggctcattgagatgggactataagatcagatctataaatttaaaaatttagtaggtttgttaggtttcttctacgaaagaaaaatattttcaagactatatcaaacacggctgg

SEQ ID NO: 112173 - DNA, 1569 bp, Homo sapiens
ctgggccctggagattcactggtgaccaaaacagtcatggagcttataggaaaggtgtgggaaacagatgttttaaaaaatttaatctcagctgggcgtggtggctcacgcctgtaatgccagcactttgggaggccgaggtgggcagatcacgaggtcaggaaatcgagaccatcctggctaacatggtgaaaacccgtctctactaaaaatacaaaaaattagccgagcatggtggcgggcgcctgtagtcccagctactgcggaggctgaggcaggagaatggcgggaacccgggaggcggagcttgcagtgagccgagatcgcaccaccgcactccagcctgggtgacagagcaagactctgtctcaaaaaaaaaaaaaaaaaaaaaaaaaaaaaatttctctaatgaatgttcagttacaaatctgagatagatactatcatagaaaactgaaaattactatataatgagaaaataatttagactgggggttaggaaaggcctctttgaggaagtgaagctgtgacttaaaggaagaataggatttatccaggaaaagttttcagcaaattctatggacatcttaaagtaaataaggaacagcttatagtgacactgaattttgtggaacaacaacaaaaacaaatactctactaattttctttaaaaggctttttaaggaaatgttcttattccgtaagtgatgctaagatgcagtaaatcttctatgtcagggcttcttggaccttaatgtgcctacagatttacctgagaatcttgtaagatgtgggctctgatgcagtagctctgggctggggcctgagactcagggaatgcccacattgctctgcagaggaccatgctgaactgaggaaaacaggcagacatttcagaattcttgaattattttgtaaactctctattttcagttcaagcaagtttgctgctgttggatttcataaaactttgacagatgaactggctgccttacaaataactggagtcaaaacaacatgtctgtgtcctaatttcgtaaacactggcttcatcaaaaatccaagtacaaggtaagttgagaaattgagacaaaaggattggtggttgctatgaataccagccattctgtgggttttcctaaatgttttaatcctgaaaacacctgatagttaaagctcttagttcattttgatttcagtttctgcagattgtgggaaaacaggtggaaagccaaaaagagagaaagcaagggagcgtgactaaaaaagtaaatatgaatgacattggtaaacttgctaactcttccttttttcttctcctgagtaatgattcacaggcttaaatatgcatacatgtcaccaggtgtgcttgggaactatgttggggcttcaccctcagatatgttgacttactgggtttggttggggtagggtagtggcagggaagggagcctggaactctacatttaaaaaaggtgattatcataggtgattctgatagagataacccaagaccacatgtgaaaaacacttcccttggaggtaatctagagattagcctccgaaagg

SEQ ID NO: 112174 - DNA, 1116 bp, Homo sapiens
ctaattaaaaaaaaaaaaaaagagaccgggggtctccctatgttgttcaggctgatctcgaactcctggggtcaagcgatcctcccgccagggcttctcaaagtgccaggatcacaggcgagagccgccgcgcccagcggcaccccctatctagtgataagcaaccttcaactatgaaagaagcatctggcctgtggacactgtcggttatccttggaacttatccaatttaggaaaacaagtgagcaactaaccctccaaggccggctcacgacaccgggagaaagtggtgtaaaagacaatcgcggccacacaccgcgtgggggctgcgcaaagcagaactaggaagctttgctccggtctggacttcgtccctcccagatctctgagctagcaagcactgcagcccgagccaattgcgaaagaccaacaaagcccagcccagcggaaggaacggtttcggagttgtttttctttgatacgggagttcctccttgctctcgcccctactctttctggtgttagatcgagctaccctctaaaagcagtttagagtggtaaaaaaaaaaaaaaacacaccaaacgctcgcagccacaaaagggatgaaatttcttctggacatcctcctgcttctcccgttactgatcgtctgctccctagagtccttcgtgaagctttttattcctaagaggagaaaatcagtcaccggcgaaatcgtgctgattacaggagctgggcatggaattgggagactgactgcctatgaatttgctaaacttaaaagcaagctggttctctgggatataaataaggtaacagtgtttactatgttttactttctggtacctttaatttgtggatgtgtctgcattttgctggcaaccaccctttacctcatctctgcaaagcagggaggaaaaaaaaattagtattgccattttgcagatgggagggcatgaattaatatgttgtatgatcacatgataaacagacctagaggttataatagtcccagttactgccccatttgtaaattgatccccatttttgccctaaggataactcataattttttcctgaacctgatttcattgatccctctattttaaaaatag

SEQ ID NO: 112175 - DNA, 1026 bp, Homo sapiens
aattctcccaaagtgttgggattacaagtgcgagacactgcgcctggcaactaccagtaatttttaaaaggggattcgtaaacttattttttaaaaaactttgataaccttttctttaaattctattctgctacttctttttttgttaatactttaagtagtaaaaattgtttatatcctgaattttcattacagataatgtagtgtcttttatgtaatgtagacatttgtcctggtttgtaacagtgatgaatatagaatatttccagtaaaaatcaatagttttaaataaaactagctgatttgagataaatttatatatactctgctttaaagaaaaagtccttgtaactttatctcaagtttgagatagaaccttagtttttgttgtaaatccgttatgattttatattactattcacagatggaaaagggatagcagtggaaataaaatcatgcatcctgtttctgggaagcatatcttacaatttgttgcaataaaaaggaaagactgtggagaatgggcaatcccaggggtaagcattaaaattaaattagtgtttaagttccttttagttgctttacttactacagggttattgtttgtgaatcttttctattccattttcctctattccttcccacttcatttagtaattcttatgtttttcatccctgcatgaagtgtcattgtcagcaacaagtttaggataatccaagactgttagaatctgcgtgtaattctgacacctttgggaaataacgtgggctttgaagttagatgtaggtctgtgttctggccgttctacttgcagctgggtgattgggagttcaggccctcatctttaaaataaagagatctacttcacaggattattagagatcacatttaataggcattcattatgttgggtcccatttcagaatttaacctccactccaagcccaaggtagtatttttaagcactttttggttgaattctgataacttttgacaatatttaaaaaattagcttttgttattta

SEQ ID NO: 112176 - DNA, 1006 bp, Homo sapiens
atagcaggtacaaaggctctcagcgggcagcatgttaggcaggtcctgggaacattgaggaggtcagtgtggctggaatggaatgaacaatgggggaagaatcaatgtgctgtgttatttctaacctccagtcctttttccttagttcgagtttggcaagtaccaggaaattggtttgattgccataggctaaccttggaccaatcactgtggccaaatacatgaggtatccttattggctccttctactagcaacagatggtttagagaacagtgtatcacagagaaatggggatcactattataggcagattgaataataaatgttcactctactactcaataaatatttgttgaacaaatcaaagctgatcccttttttcaaaatttttaatgtgactcttaggggatggtggatccaggagagaagattagtgccacactgaaaagagaatttggtgaggaagctctcaactccttacagaaaaccagtgctgagaagagagaaatagaggaaaagttgcacaaactcttcagccaagaccacctagtggtaagaaatagtgtttctgggagggatttagttctgtggattgatgaaaatgacttaaaagttgacctggaaatctgtatgtccttctctaaataaagtggaatacttgtatatttaaaatatattcacaaaaacaaattacagatcttcactgtaaataggtttctatttaaagttttatagcccaactttaggctatataggctaaaatgatatatatttagttcatttatatcatttattataataacttttttcttcttagtttttctttcttttttttttgagatggagtctcgctctgtcacccaggctggagtgcagtggcacgatcttggcttactgcaaccttcacctcccaggttcaagcaattctcctgcctcagcctctggagtagctgggattacaggcttccaccaccacgcccggctaatttttgtatttttagtaga

SEQ ID NO: 112177 - DNA, 1336 bp, Homo sapiens
gacctcaggtgatctacccgcctcagctttgtttatttttttacatttaaatctctcatccctcttggactgattttgatgtaaggtttcatattcatgtaatataatctcgtttttaaggataatctttttagagaaaactctttgtgtttatctaaaatttagggacttggttaaaatttggacattttggaatactctagttttttttcttttattcattctgctgaccagggatggaatggtctagtttttaattcacttggccggctagtacaatgatgatataagattattttaaataagaatacttgacgacatagatatgctaaaacagaaatgagtttttcttggtgatggtttttctttggcaaccaggtgagataatggataatcttatgctagaagctggagatgatgctggaaaagtgaaatgggtggacatcaatgataaactgaagctttatgccagtcactctcaattcatcaaacttgtggctgagaaacgagatgcacactggagcgaggactctgaagctgactgccatgcgttgtagctgatggtctccgtgtaagccaaaggcccacagaggagcatatactgaaaagaaggcagtatcacagaatttatactataaaaagggcagggtaggccacttggcctatttactttcaaaacaatttgcatttagagtgtttcgcatcagaataacatgagtaagatgaactggaacacaaaattttcagctctttggtcaaaaggaatataagtaatcatattttgtatgtattcgatttaagcatggcttaaattaaatttaaacaactaatgctctttgaagaatcataatcagaataaagataaattcttgatcagctataacttctgtttcatctagttcttgtttgtcaatgccttccctcccgctccccatcttctgaggcctgaaggatgttcctgccacatcaaactcctttaggcagagtaccgccactggatgtatagtttaatgtttcatctgatttttctttaaattatttccttcacattttgcttcacatgatcttgttgaagctaattttgaaaatggaaactatgttttcttgactttagaagcattagttttaagaggaaatttcagccactagtcaatagagatcaaaatcagtgaacaagagctgatactctcattttcaaaaattctgaattaaaaaaagtccaggaagttagtaatttaaatcagtatgttcatttcactctagtgaaactactatatgttgtaaattagttaaaaatggatgttcagaaaagaattgaaatcaggacaaaaaatta

SEQ ID NO: 112178 - DNA, 1020 bp, Homo sapiens
tctcacagtaactaacctggatggctctggattaggatctctcattaggttgtggtcaaggggtcatgcagtgcggcagttatctgatggcttgactgcagctaagggtctacttctaagcccactcccatggctctttgcaggagccttcagtatcccatcgtgtaggcctctggtctacagggctgcccacagcatggtatctggattcctccagagcgagtgaccaggcagaaagagagaaaaagccaagactgaggccccaatgtcttttataacctaacctcagaagttatatatcatgatttctgcctcattctattggtcacactgaccaatcctgctacagcaggaggaggagaaggagaccacagggggttggatgtcaattgtctttctaacatctatgatacaagcagagtacttataaaaattcaaatatatccttctgtcctgccctgcccaccattatctagaggggaaaactcagctgggataggatgtatttatggatgcctgtttatatgacatgtgattttaaaggactgataaaaaggcaaatttaaacagaggccattttacttaagaaaaccagttgcatctcattcttccttttgcaaagcttctggcagctcttcagtgtgtaagctcacccaggctccgctgggcggttgtctgggaggagcaggaagggcttaaaatccagtcatttacaaagctgctaatgatcttgtttgtgcactgtggtttggccatcattgccttattttgaagaaaggaaaaaattatcacataataaaccaataaagcagatattaaatattcagtcagaacacgtaaacaacttactgctttggaatgtagctaaagaaaaacaaatttatttgtaagtatacccttctttccttcaaggctgagaaatctacaggagaagataaagtttagccaatgttttcctgaattttaactgcctgtgatagacgtgctcatatattcctcacatagctgttattaactagc

SEQ ID NO: 112179 - DNA, 1109 bp, Homo sapiens
aattgctccagcccaggaggtagaggttgcagggacccaaggtcacaccactgcactccagcctgggtgacagaatgagactctgtctcaaaaaaaaaaaaaatctcaagcaatgcttatttttattcttaggaaggtcaccttgacaaaatggatgaaaaaatagataaagatatttaaagcaggtttagtcattattcctgaggtatgacttcattattgcaagttggaatcacatagttttagaaagccacacttacagtttcaagtggtttttaaatacgccctttaaaaagcactggaaaaacaatctagtcagtaatgaaagtgtggagaacatgaccacgagtgaggactaatgcctggggattaaatttgcagcatcagcagatgtttagcaacttgcagaaggattgatgatgtgctctgtattagataattacagcgtggatccagtgaacatacacattggtgttaaagatgcgtatgaagagttttaacaaaattgtttcatgaaatgtgagaaaggaaaaagtcatgttaataagtataaaatatttaaattaaagtaacatattaaatatgtatgtgaaccatagattaaatatcccaagtgtacattacaatatattacccatttgtacatgctgtttggccaaacactttggttgaggatgttctcactagaaagatgaagatggcattgtatttgggggcaccttatgtttggtcctatgcagttttcattattgtgatggtttgattaatgaccattttcataactacatagtaagcaccacaagagctcagcccctctctagttttgctccttgctgcatttctggaattttgcatgggatagaacactgaatacattagttgtttgagatgtaagataaaaatgctaacttattttcataattgcatgacctagaaaacactggaggaactgaaacagaaacgtaataaaaagttaatgaaagataagatgttttaatactttttaccctggtgttaatcaagatgagatgagtctttataaatgtaaaaagtcacaattcttttttttccccctgtagaaatcaaatggttcacatttatgcaatgat

SEQ ID NO: 112180 - DNA, 1022 bp, Homo sapiens
taaaatcaaggtaaatatttacaagcagagaagtccaggaaggtgaggtttgagggagtaccagggctgcacgtaaataacagaaccggagcctgctcgcagactggtacagtgaccttttctttttgagcacaaggtggcaggctaggtcaatttccatcgtctcttataaggcagctacgtgaggctgaagttttttgcccaatttcagaaacagatatctattttttttttaactgagattagcgcagcctgatggctaaaacatggttttggataaggcatgggcctcactcttgactactgactgtccttgtggatctctggtcctttgtgtttggactaattcctccacgtctgcatcaaatagcaatgcattgtggatgccaacacacttctagtttctgttaactggatgaaaaaaatatgaacattgtcagtgttttgaagaaatatccatgaacactgaagcttagagagaggaaacaaaatcggaccagagaattgaaatacgcagtttctccactagatagcagactacgacaggtgacttttggaagggtccatctgtatttacccaaagaaagcatccgtttttctccatcagttcatatttttcttttaccacgacaagtgtttttatgtgatcagaccattcgcatgtaaagctctgatataaacctgaaatataagtagcagtttgatttcaatttattaatctgcaatttaaattctgatagagttttttttttacttcattaattgcctccagttttttttcccccaaattgtcttttattttttaaaaagcaaattactaggaatagtttattctggaattctgatggtaacattgggtgatatgttcagtctttcccttgattctgacctgttatttccagaagatagggaacaaatgagggaaaaaaagattccttgtttttagattctactttgtattctttcaagtttctctctctctctctgtgtgtgtgcactcatgaacacacatatactcacac

SEQ ID NO: 112181 - DNA, 2798 bp, Homo sapiens
cccaaagtaatttatagatttgatgctattcccatcaaactaccactgacattcttcacagaattagaaaagaattactttaaatttcatttggaatcaaagaaggtcatgtatagccaagacaatcctaaccaaaaagaacaaagctggagacatcatgctacctgacttcaaactatactacaataatgcagtaaccaaaacagtgtggtactggcaccaaaacagacaaagaccaatagaatggagcagagacatcagaaataatgccacacatctacaaccatctgatcttcaacaaacctgacaaaaacaagcaacagggaaaagatctcctattcaataaatgatgctgggaaaactggctaggcatatgcagaaaactgaaactggaccccttccttacaccttatacaaaaattaactcaagatggattaaagatgctctcaagtcactccagcacagcgttggtgctgcctgggtatcagaaagcaagctcacattgctctccagtacgtgtaagccttttcttttcaagatgcctgaggaagtgcaccatggagaggaggaggtggagacttttgcctttcaggcagaaattgcccaactcatatccctcatcatcaataccttctattccaacgaggagattttccttcaggagttgatctctaatgcttctgatgccttggacaagattcgctatgagagcctgacagacccttcaaagttggacagtggtaaagagctgaaaattgacatcatccccaaccctcaggaacgtaccctggctttggtagacacaggcattggcatgaccaaagctgatctcataaataatttgagaaccattgccaagtctggtactaaagcatgcatggaggctcttcaggctggtgcagacatctccatgattgggcagtttggtgttggcttttttctgcctacctggtggcagagaaactggttgtgatcacaaagcacaacgatgatgaacagtatgcttgggagtcttctgctggaggttccttcactgtgcatgctgatcatggtgagcccattggcaggggtaccaaagtgatcctccatcttaaagaagatcagacagagtacttagaagagaggcgggtcaaagaagtagtgaagaagcattctcagttcataggctatcccatcaccctttatttggagaaggaacaagacaaggaaattagtgatgatgaggcagaagaagagaaaggtgagaaagaagaggaagataaagatgacgaagaaaagcccaagatcaaagatgtgggttcagatgaggaggatgacagcagtaaggataagaagaagaaaactaagaagatcaaagagaaatacattgactaggaagaactaaacaagaccaagcctatttggaccagaaaccatgatgacatcacccaagaggagtatggagaattctataagagcctcaccagtgactgggaagaccacttggcagtcaagcacttttctgtagaaggtcagttggaattcagggcattgctattcagtcctcgtcgggctccctttgacctttttgagaacaagaagaaaaagaacaacatcaaactgtatgtccgccgtgtgttcatcatggacagctgtgatgagttgataccagagtatctcaattttatccatggtgtggttgactctgaggatctgcccctgaacatctcccgagaaatgctccagcagagcaaaatcttgaaagtcattcgcaaaaacattgttaagaagtgccttgagctcttctctgagctggcagaagacaaggagattataagaaattctatgaggcattttctaaaaatctcaagcttggaatccacgaagactccactaaccgccaccgcctgtctgagctgctgcgctgtcacacctcccagtctggagatgagatgacatctctgtcgtagtatgtttctcacatgaaggagacacagaagtccacctattacatcactggtgagagcaaagagcaggtggccaactctgcttttgtggagcgagtgcggaaacagggcttcgaggtggtatatatgactgagcccattgacgagtactgtgtgcagcagctcaaggagtttgatgggaaaagcctggtctcagttaccaaggagggtctggagctacctgaggatgaggaggagaagaagaagatggaagaaagcaaggaaaagtttgagaacctctgcaagctcatgaaagaaatcttagataagaaggttgagaaggtgacaatctccaatagacttgtgtcttcaccctgctgcattgtgaccagcacctacggctggacagccaatatggagcagatcatgaaagcccaggcacttcgggacaactccaccatgggctatatgatggccaaaaagcacctggagatcaaccccgaccaccccatcatggagacgctgcggcagaaggctgaggccgacaagaatgataaggcagttaaggacctggtggtgctgctgtttgaaaccgccctgctatcttcgggcttttcccttgaggatccccagacccactccaaccacatctaccacatgatcaagctaggtctaggtactgatgaagatgaagtggcagcagaggaacccagtgatgcagttcctgatgagatcccccctcttgagggtgatgaggatgcgtctcgcatggaagaagtcgattaggagttcatagttggaaaacttgtgcccttgtatagtgtccccatggctcccactgcagcctcgagtgcccctgtcccacctggctg

SEQ ID NO: 112182 - DNA, 2884 bp, Homo sapiens
actcgaaatcacaaagctaagcttgagtagtaaaggacagaggcaagttttctgaactccttgcaggcttgaacaatagccttctggctcttcaataagtacaatcatacaggcaagagtggttgcagatattacctttatgttacttaaaccgaaagaaacaaaaatccattctatttaattttacattaatgtttttccctactttctccctttttcatgggatccctaagtgctcttcctggatgctgaatgcccatcccgtaaatgaaaaagctagttaatgatattgtacataagtaatgttttaactgtagattgtgtgtgtgcgtttttgtttttttttgttttaaccacaaaaccagagggggaagtgtgggagcaggtgggctgggcagtggcagaaaacctcatgacacaatctctccgcctccctgtgttggtggaggatgtctgcagcagcatttaaattctgggagggcttggttgtcagcagcagcaggaggaggcagagcacagcatcgtcgggaccagactcgtctcaggccagttgcagccttctcagccaaacgccgaccaaggtacagcttcagtttgctactgggttgtgcattcagctgaatttcatggggaagtccaaattctaaggaaaaatatttttaattgtaatgctgttaaacagacttaaattttctagcctttttaataagcagattagatacattgcaggtctcctggaacaaaggtgtctagatattttgaatgccaatcaaatttaaaacttaaaaatacttccactgggtcctcaaaagaacggaaaccaccgatgctaatcagaaaatagtaaaattaaattcccctttggaataattatacctatataattttcagtgggtgactgtgcaggaatttaaaagaaaagggatcttttatgctaattaaaccaattacaatgctattttttaaatgatgtatctcacttttaaggggaagaaaaccctttctgaatatgccactgctaaatttagctgttaaaatattcaccaagatacctgtatgacactgtgtaggcttattattacaaatagaaaagctgttggctattttcaatgttttcctttgaatttcaaatttttagaacatcttacttaaataacaaatttcagagatagtttgatttcacctaagtagcacctacttgataattaagctaaaagtcacatttaaagtacatgttggaaaaatggataaagcaaatttttttcatttttttctgtgagttttttcttctctaaaaaatattcccatactagcttattaatataattaagttactgttgatctgtttgtaggtttagagagctagatatataaggtagtaatggtataatttctggaactctaaattttaaagttgaataaatacagacttgcaaaatttccctttcccttgcctaatagtgaaagatggataataggtggcaatataaatattaacttgaaagactataatactaaaaagaaaaggcatctctaagaagtagaaaagattctatagaaaatatattttatttgtgatcattttgtaatgtggtagtataaaaaggtatcactgttgtaacctatgaagatgtcagctattccttatgaaatattttgcaggaaaactcactaccatgagaattgcagtgatttgcttttgcctcctaggcatcacctgtgccataccagtgagtacagttgcatcttaaagaaaattcctgaaaataactgaattgtgtgcttccatgtgctaggaggacattcttgtaatctttcttcatcttttctgtttctaaggttaaacaggctgattctggaagttctgaggaaaagcaggtaagcatcttttatgtttttatatagttaaatcatttactcaattatggcgagaggtgcaagaaacgtatttgctgcgatattacttatcttctcagtcaaatccattggtttacaagtattgattgactgcctgctatgaatctaggccagtaccaagcacagtatagtttttaataaatataagtttataaaaccaacccagatattttaaatataataatatctaggcatgtatgatgagttatcgcatgtaagataagttatatgaagttgtgtgactttttttccattagtccacatactgatctaaaagcagaaaattccagcttttgctttgtttagtggattgctaagtttaaaattcacattggatattagtcagaactgtttgtatgaccataatattcacaatattgtctgagatattagctgagaagcccattgtgaaaagaaagtctatgtgtgctgtttgtatctattgtgattgtcagctgatgttagatcacattttctaaccaaacataagaccaaccaaactctttattataattatttgaccagcactaaagatgtacctacccctccacaacagatgaaactgtgccagccaaacaacaaatgggcattgtccccagaagcttggacaaaaaggcacacagagttcaattccagttgaacagaataaaggccaaaatagagctgccttgggggtcactgcaattagactgcttaatgaagacattaaaagaagtattctgtgttcgtttgtgtgtggaggggtgtgtgtgtctgtttttcaactgatttgaaaatacaggtgttgaatcctaataataaaccagaaaaattaacatctccagagaagatagaggtcatactatttgaggcaagaattagcgtctttttaataaacgaaaatatggcaaagatgcattttagaaggcacgtggagctataacaatttaagaaatacgtgaagagctcaaggctcagccttctagaa

SEQ ID NO: 112183 - DNA, 4272 bp, Homo sapiens
tggactggacacaatgaagattaacagtaattaaggtcacttctggtttagatgtgctttatctgagaggaaaattcagccagcaaacatacaaaaagaaagcacagtgtgaagttcggtgttaagagctagtttgcctgcgtttgaaccctgcctggctctgccatttcctaccacttaactgcactgtggctgagttttctgatctgtaaggtgggaataataatgatacctatctcataggggaatgaaaggatcaaatgagttcatatttgtaaagcaatttgaaagagtgcctagcccacagtaagtgctacataagagtttgttaaatgaatctgcaaaaaaaaaaaaattacaaaaaggtacctaagggtccgggtgactatatgcttccatcaagactagtgaagaatggttgttttttccattcatccctacatttctttttttaataatgataaacatgcaacttttttgtagctttacaacaaatacccagatgctgtggccacatggctaaaccctgacccatctcagaagcagaatctcctagccccacaggtatttttaaacttctcataattaaactacagtgatgaaagatagccacactcaggccatttgggctgctcagatgaatcctgcctgcctgctggcaaacatgtgcttaggacattgactgatctgccatgttggcttctctctgtgttaagccatccacagatgaggctgaaaaataaaaactgctttggattaaaaaggttaacttttgaataaaaaagctaggcatgtgtgatgcgcactaacacgtgccattccttcttcagaatgctgtgtcctctgaagaaaccaatgactttaaacaagaggtaagttctcattttcaatcagaggcccatcatgccttgaagagatgaaagaaggcattgcctggattctcttctgatgaaatttcattagcaagttttccagctaattggcagtctaaaacttgctcataaataaaacatgtatttactaaatatcagaaatactaggtttcctcggataagtttagcattacagaagatgtttattaatgcctgttatttgaaacattaatctgcttgcaatttatttaaggtattttgtagatatctaatatctaataagcatctaattaatgcatatcaaagctaagattttgcctttaggaaagttttctttcctaataaaatagtttatttgacaactattctttttattaggatcattcatatatttgctaagcaaagagtaaatttattttccttaagattcaatttgaatatactaagaatattaaagcaagttagataaattacccaatatatttgtcaatttgaaatttgatagacattagttgtttaattcaatgggcagttttgagctgcagtttatacacacatgcataacagagtcacctttcaattatccatgttaataggaaagtggttatagattttagtacacacattaaaatatggatactcttctcttttgataaatctcatttcaaataaaaaaaccagtctcataattatgtatctgtatctattacatcattgaatttagtaaataatgtttaatatgtataaggaaaaacaatgttattgacatgaagattatactcacatatttggcttgaaaatatctataaaaataatttctgttgcaaagtaagaaatgttcttcagaatgttattaatccctgtgttaaaagagaaattggaagatgctcactttagctcctaaaagccatggtatgtactgtgaatgcaaagattctgaaactaaataaaaagaaagatagtaaaagactaatgtgctataaaggctaagggaaaataaaaacccatatattaattttcccggccatcttaattttcagacccttccaagtaagtccaacgaaagccatgaccacatggatgatatggatgatgaagatgatgatgaccatgtggacagccaggactccattgactcgaacgactctgatgatgtagatgacactgatgattctcaccagtctgatgagtctcaccattctgatgaatctgatgaactggtcactgattttcccacggacctgccagcaaccgaagttttcactccagttgtccccacagtagacacatatgatggccgaggtgatagtgtggtttatggactgaggtcaaaatctaagaagtttcgcagacctgacatccaggtaaatcctttaacagacacacctgatggttctgactagcgctcaagtctaggaaaccacagtttgcatattcattcattcattcatccattcattcatccattcagcaagaattcattcatattctactttatgaccattgaatacaaatctttttctgcttggcggtttttgtaagtctacataatttctctctagatttgattctcaaacacaattctactttttgaaatcctggatcacttattttcagattaaaataaatggaaaacaccaattatttaaaaaaaataatggtcatgttttgaagttaaatacctaagaggaattgtagttgcaaattacactgaatccttagtcacagaatctggatttgacatagccttgccgtttactattctctttactttttaactaacaattcacttcctctttatgtaggtttcaatataatgaaacctacctcataggtttcattacatatgtaagtgatgtagttattaaactaaatgagatgacatatgtgaaaggccttggtaaagtactatacaaagtaacatgctagtattatttcagccagatttagacaatttttagtataagatgacctaaaagctagagagtggaaaaggattaccatattcccatccctagccgttcatataattattcttcatttgtgccgtgattcagtaccctgatgctacagacgaggacatcacctcacacatggaaagcgaggagttgaatggtgcatacaaggccatccccgttgcccaggacctgaacgcgccttctgattgggacagccgtgggaaggacagttatgaaacgagtcagctggatgaccagagtgctgaaacccacagccacaagcagtccagattatataagcggaaagccaatgatgagagcaatgagcattccgatgtgattgatagtcaggaactttccaaagtcagccgtgaattccacagccatgaatttcacagccatgaagatatgctggttgtagaccccaaaagtaaggaagaagataaacacctgaaatttcgtatttctcatgaattagatagtgcatcttctgaggtcaattaaaaggagaaaaaatacaatttctcactttgcatttagtcaaaagaaaaaatgctttatagcaaaatgaaagagaacatgaaatgcttctttctcagtttattggttgaatgtgtatctatttgagtctggaaataactaatgtgtttgataattagtttagtttgtggcttcatggaaactccctgtaaactaaaagcttcagggttatgtctatgttcattctatagaagaaatgcaaactatcactgtattttaatatttgttattctctcatgaatagaaatttatgtagaagcaaacaaaatacttttacccacttaaaaagagaatataacattttatgtcactataatcttttgttttttaagttagtgtatattttgttgtgattatctttttgtggtgtgaataaatcttttatcttgaatgtaataagaatttggtggtgtcaattgcttatttgttttcccacggttgtccagcaattaataaaacataaccttttttactgcctatataatgtttttaaaggtttattttggtttcaattgatacataataagtgtacatatttatggggtacggtgtgatgttttgttacatatatacattgtataattatcaaagggtaattatcatatccatcacctgaaacacttgtcatttatttgtgctgagaacattcaatcctcttttctagctattttgaagtatacaatacattattattgactatagccaagctactttgcaatagaatactagaatttattcctcctagctaactgtaactttgtacccattgactaacctcccctcatccaccttcccactctcccagccgctggtaatcactattctactctctacttctatgaggtcaacttttctagattccacatatgagtgagatcatgcagtactcttccttctgtgct

SEQ ID NO: 112184 - DNA, 1049 bp, Homo sapiens
aaccactttcctattaacatggataattgaaaggtgactctgttatgcatgtgtgtataaactgcagctcaaaactgcccattgaattaaacaactaatgtctatcaaatttcaaattgacaaatatattgggtaatttatctaacttgctttaatattcttagtatattcaaattgaatcttaaggaaaataaatttactctttgcttagcaaatatatgaatgatcctaataaaaagaatagttgtcaaataaactattttattaggaaagaaaactttcctaaaggcaaaatcttagctttgatatgcattaattagatgcttattagatattagatatctacaaaataccttaaataaattgcaagcagattaatgtttcaaataacaggcattaataaacatcttctgtaatgctaaacttatccgaggaaacctagtatttctgatatttagtaaatacatgttttatttatgagcaagttttagactgccaattagctggaaaacttgctaatgaaatttcatcagaagagaatccaggcaatgccttctttcatctcttcaaggcatgatgggcctctgattgaaaatgagaacttacctcttgtttaaagtcattggtttcttcagaggacacagcattctgaagaaggaatggcacgtgttagtgcgcatcacacatgcctagcttttttattcaaaagttaacctttttaatccaaagcagtttttatttttcagcctcatctgtggatggcttaacacagagagaagccaacatggcagatcagtcaatgtcctaagcacatgtttgccagcaggcaggcaggattcatctgagcagcccaaatggcctgagtgtggctatctttcatcactgtagtttaattatgagaagtttaaaaatacctgtggggctaggagattctgcttctgagatgggtcagggtttagccatgtggccacagcatctgggtatttgttgtaaagctacaaaaaagttgcatgtttatcattattaaaaaaagaaatgtagggatgaat

SEQ ID NO: 112185 - DNA, 1048 bp, Homo sapiens
aacagagttctttgaaatactgtgtgcagctcttctcttcatcaactctagtttattcactagtactgtttgggtatagttgtattttaaaaaaactttaaatccaattttcactagcccagatttttccaaagcttatcacaattttttttcaaataccttttgatgccaacatgaatgaggcttccagcattcccagatctaccagactttgcagagtacctgttttatgtccccttcgtacaatcttagatatgattaggatgctaaagaagttgtttatgcctgcaagaagcttgtaactagcttgctatacatggataaaacatttaaccaataagagctttatgacattcttctgggaagttttttttgttttgttttattttaaataaagattctggagtctaacttctagggattctgattcattatgtctcagctaggtcctaggaatctgtattttaagagagtagatcaaagagacagagaaagactaggttctcaggacatcatttgaacccctgagttagaactaattgaagctagatccacccctggactccatgagccaaaaaatatccttttaaaaaattaaaaaaattatttcaactttacccttgcccctttccctccctccctcctcttgtattccccactgtctattgttgccatctttatccatgggcacccaaaggttagctcccacttataagtgagaacatgtggtatttggctttcagttactatgttaatttgtttaggttaatggcctccagctgcatccatgttgctgcacaggacatgattttattctttttcatagcttcatagtatttcatagtgtatagtaccatgttttaaaaaatccaatccatcattgatgggcacctagattgactctatgtctttgctattatgaatagtgctgcaatgaatatacaggtacacatgtctttgtaatattatttacagcattcccatcagcaataaataagagttctttttccacatcctcaacagcagtagcattatcagtgttttggat

SEQ ID NO: 112186 - DNA, 1069 bp, Homo sapiens
agttatccaccagccacttctgcctcgattcaccaaagggcagggaaagaaccttttggtgagatggtgtgaattagcgacatccagcctgagctgaagtctccagcgggtcaaagaaatctttccatttgcaaactaccaaggctgacttgctgtgcatttggcgggcctcctgcccctgattctgctggtttggagatgctttctcgctctttggttggcttctgtctccacacattgtggggatcccagggattcgtcataggactctcggatcgctggtgcctccactgtgatctccggtctccctgcggccagcactgacttctagcaacagaatcctgcatgagggcctaggcacagaactttatttccactcttctgaacacatctaatgtgatgctctgcaattgtctgaaatttatcctaccctaagtcattatcttgtccccttctctggaacctgcttcacttcccgtatcccaaggtgaggtttggggcttcgctgtcctcctcacttcccaggccactcttcttcatggaagcctcgcggtttaccctccaccgcctacaccttatcttcttgttacttttgccccacagatatcaccctgatatgatctctgtttctcactcctgctggcttgatcttatgtcttgcattattccgcattagaacaattgatccctgtcaactcccatctctattctccacgtcggtgtcctcactatttccaggttatattgcagaaccaaagctgcttatttgtcacgttgatgcttagacacctctgtgggcttctggcagctgaaaggataaaatttaatttctgtggtttggtttagtaaattctcataatctgctcctgtatttgtttgttagggctgccataacaaagtaccagagactgggtggcttaacagaaatttatttgctcaccttgtctctacaaaaaatacaaaaattagccaggctttgcggtgtgtgcctttggtcccagctattagggacgctgaggtgggaggatcgcttgagcccgggaggcagaggatgtagtgagccaagatc

SEQ ID NO: 112187 - DNA, 2353 bp, Homo sapiens
ccagtgcccagtaagaggacatgaattttctagtaccagaggaaattctctttttacaaattttgtcagaggtatccttgggaaagtatttcatttgcttttaccctccaaattattttaatctatatttttaagagtttccattctcagttgagtttttcttgttcttctccttctgtcagttttgaaagtcttgcacaaaaacaatccaggtgttgttacagcagtgtgattaaaaccaggtcaggcctacactgaaatcccagttccaccactcattagctgtacgaccttgagcaagttacttatcctctctgatacccaatttttggattttttttttttttaaagagatgatcataacgcttaggacttgactctttgggagaattaagtgagttaagacataaaatgtgcagcatgtatttgtcatgttattagcgcttcagaaatataaatgtaaacattttggtacttcgtttatggagattcttatactagttaattttattaaaagcatgatggggaacagaagatccttttcggataacctgtgtgagtaaattaataaaacactaacactttttaagattcaaaactggattaattatgttattttacaccatttaaaatgtgcatttaaaaaatattcactgaagtgagagagaagttccttttaagttaataaataatggtaagttgcatgatccttttaactcagtttaagcatttgataacacccctaaccttgtttgaataaactcaataacagaatatagagaaataaaatatatatttcatatgagtatgtatgtaaatttatttcttttaaaggaaaatttcaggaaacaaaatgaataagctcatagtcataaaacctctagccaaagtgtgtcaatggtctgatttgtaggagagcagactcaggaatcgggaattttttttttttttttaagagtcggggtttcactctgtcactgaggctggagtgcggggaagcaaacgtagctcactgcggcctcaaactcctgggctcaagctgccctcccacctcagcttcccaagtagttgggattacaggtgcaagctgctgctcctagctgaaaagttttaattatataaaatgtttaaataaattgttattcctttcttttatgaagaaatataattgatattcttgtcacttattaaataagcaacattttaaaatgtttagcacctactgtgaagatagcactgtgctagctgctatgaataaactagaatagcatatcactgttttcctatggacaaaaacccagaaatgtaaaataaatagccatgaatgggttgagattccccctgccccctttggatactgatgacagaaatcttatatgcactatgtaagcagtgccctaggatcagaacagaaagtaacttgcaatttttaaaggtgggagaaatgactgaagtttggagtggtcaggagtttccctggaagtctcttgcctttgtgactttgtatagctccctcaaactacctgagcctgagctcctcatttataaaatggaagaattgaacctagcttccaaggtcctttctagcttcaccatgctctggtctgttgtttaatgacatgaatccaagatggacaacaaatggtcgattttgctccttctacagtaaatagatctatcttcttagcagaagtaaaatagtaaagaaagaagacatgtttgaggcctgttgaggcctgtttgctgtatgcattgtatctaatcaaggaattgagaatgtagccctaaatattaggaaggagttgaaagtttctgagcaggaacagaacatgctgaaaggaaattgtgtcagcagcatggtgtacaggagagcttggcagagagaaaggaggcaagaagacctgtgggaggcagccagtaaggaggtgaagagggcctggaccaaaggaagccaaggatgaccgaaagatttaaagatgaagcccagatttaaaagtatcctcaagtatttgtttattcttttcttagcaaattctttttagtacaaagataaaatatggcactctgagtcataaaattttctgaatttcagaagttgaatgtttttctgaatgtatcaacctgttaaagtcagttcctgtttgttattttaggcgtatattcttgggcttttttttttttttcctagagaaactatgaagtactagctgtgcaagtcagggtgggctaagctgctaaaacagatacctccctccccttcaataccctgaagaacaagaagttaattttttgctcgtgtaacattttagagagggtattccaggttgaatacctggaataatgaatgaaataa

SEQ ID NO: 112188 - DNA, 1052 bp, Homo sapiens
gctcgggcggtaatgctcacttgcctgcggctcacctcctgctgtggggcccggttcctaacaggccatggaccagtacccgtctgcagcctggggactggggaccctgctttagatgatgtactctggctttgcattctggcattagctaagcaccctcttaaaggaaattgggtctatactctcagtccgtgttctccctaacacctggaaacattgaataccttcaatgctgggaagttaactcccaccacaactagaacagctatgggaaagacaacagttgattttgaagagtgtcaccaatttgcacatgattccatccttaaccattcttatcctatcagctctgccaaacatggagaatagttggctgcaggacagctatttttcctacttgtagatgcaactatttctcacccaccaggatgtaaaaggtccctgtaccctaagattggtcctacatacacacccaatgggaaaatgagatgaaaaatttaaagcagtaaatatttgaggaagtagatagagtaatttagaaaaagaaaatacacagggccaagcacagtggctcacatctgtaatcccagcactttgagaggccaaggtgagaggattgcttgagctcaggagtttgaggccagcctaggcaatgtagtgagaccccacctctacaaaaaattaaaaacttagttgggcttggtagtatgtacctgtagtttaagaaacttgggaggctgagctgaggcaggaggattgtttgagcccgggtggtcaaggctgcagtgggccatgattgtgccagagtactccagcctgggtgatagagtgagactctgtctcaaacaaaaaaaaaaacagagacagaaaaaaagaaagaaaatatatggatgtatatcatataaaaatataaataagggaggccaagtgcagtggcatgcctgtaatcccagcactttgggaggctgaagcaggaggatcacttgaggccgagaattcgagaccagcctgggcaacgtattgagacctcatctctgcaaaaaatcaaaaaa

SEQ ID NO: 112189 - DNA, 1037 bp, Homo sapiens
tgcctcaagataaataaattcatacatacatacatacatacgtacatacatacatacataagaagacttgtttctttccatttgcaatgtttcattcaaaggctagaattaaattgccgtaggccatcacaagtttagcttgaatattattattttttcaagatggagtctcactctgtcacccaggctggagtgcagtggtgtgattttggctcactgcaacctctgtctcccgggttcaaccgattcttctgcctcagcctcccatgtagctgggattacaggcgcccgccaccacacctggctaagttttgtatttttagtagagacagggtttcaccatgttggccagactggtcttgaactcctgacctcaagtgatctacccgcctcaccctcccaaagtgctgggattataggcttgagccactgcacccagcctagcttgaagaaaatttgataggagtttgtttttttctatttataggccaagcaataccacgtataaatattaagaatcatggctgttccttagtgcctagttgtttataaaccatgggaaagaatgaaatcattgaccaaatgagacagggtaacagtcttccctgggagtaaagagactagcagtctctattgacatatattttaggcctggcctccaaaataaatttacccaaagaagtgatgtatttgtgtccagggctaccgagcctaatctttggctgcctctgtgttattctaagttgtaattttccatgtcatctaaatttgtaataattctttaatatgatagtgtttcagtgaacaaacattctgcttgctgcatttcttctgagtgagtaattccctgacaactaccagatcttggcagaagcaaagttggtcataagttatgctccactctcagtgctggtgaaacgtatgatgcgtaacacagtgtttttgaattcagtgctgattttcctaaaggacatttggaaggaaaaaagaaaaggaaaggaaatacccaaattcaggaatagaacttacatattatt

SEQ ID NO: 112190 - DNA, 1231 bp, Homo sapiens
tcggccaggcacgatggctcacacctgtaatctcagcactttcggaggccgaggtgggcagatcgtttgagcccagcactttggccgatactgtggtttactgtattttgttctagtttattttatggaaaatgggaattcagtggttaagacaaggattaaatagcagaagaaagatgtgtacatatgtacagatgtatgtgtcctttatatgttttttagtactcttgtctcctttctggtcctcatttaaggttatctatttcatgcagtaaatttttcttcacaattcatttcatttagagagtgaatgctaccttccaagtgggctttctccagttttcctttcagggacttaaaggagaagtgatgttaacagttttatatttccattgcattttacagtgtgcagatgtcttcacatatatttccccatttgagctttacaaaagcccttagtattattctcattgtctagattccaaaatcaggcttagaggagttaaatagttgtccaggatctcaagatgcaagacccacaatcatgaacagaggcagatgttcaggatggaggcaagctgaaactcaaaaccaaatcattatgactccaaattcaggagtcttttagctgccacctgcatgggctcttggtgtagctgaccaccagagtttgtagagctgtcattcaggtgtgccatggactttcctgggacctggcacaggagaaggactgagttaatgtttgctgattaaatatctgttacaggctgggcgcggtggctcacgaccgtaatcccagcactttgggaggccgagcagggaggatcacttgagctcacaagtttgagaccagcctgggcagcatggcgaaaccccgtctctacaaaaaatttgaaaattagctggccatggtgatgcatgcctgtagtcccaggtactcaggaagctgaggtgggaggatcacatgagcccatgagattgaagctgcagtgagctgagatggtgccactgcactccagccttggccatagagccagaccttatctcaaaaaaaaaaaaaaaaagttacaataatcttcccttcaaagctggaaggcattatttacctgtctgtccagcagatggtgctacataaccaagggaatctgttgcttgcccttggtgaagctattaaagccaatacagatcttgagaatttcaaaagcaaaaatcaatactggattatgagtgc

SEQ ID NO: 112191 - DNA, 1034 bp, Homo sapiens
aatgtatagaacatgtttccttccccttgaaactttttatcagctaattataggaattatattatacctgcaatcattaaagtccagaatgagacagtacttggtaaagtgctgaaatttataataaatgcattatagcaatccagttaaggaggaagagccaccattattgaacatttgttaagtgtcagccattgtactagataaattttagttattatttttatttaggcaccaaaaaatccatgggatagttggttatccccatcttactgaagaggaaactgaagctcagaaagtttaagcaacttgcacaggtcacatagcaagtaaggagcatggccaggaatcagaccctgatctcctttggtctactaagcttgcaaaggatcttcccgcctccttccaagaccattcaatattatcagtaaatgtccatggcaaggatgtagttcgagttatagggttccattcaagatatgattggtaggtgggaagcagatatgtctgtgtcaatcagtatcctggaagaaggagatgatgaactcaagtggtgattaagggaagtttaatgaagggactatttacagagatgtggtggggttaagagaaccaacaaggggaagtgatgcactcaaaaagttactacctccaggctttaggggattgggggagggagtggcacagtgtgaacccagtgtggttgtgagaaaagggattccctcagcagccatggccaaggttagagtctccactgccaaactgcatccaggtggtgagggaatggagaataggggtggggtaacaaactctgacctcggtatccccaaagggcaaaggattccaggtggtacagttcgtaaagattagcctcagggcacagaacagggcagagaagaatggagaattgatctggaggaaacaaacaatggcttgcccatgttattgcagggagagtaggctggtgtgcacagcaggagggtggggagcccagcatatagctgtgttggggcctgtgcagatcagcctcactg

SEQ ID NO: 112192 - DNA, 1055 bp, Homo sapiens
ttcatagagttgccaaatgcttggttatgcaaacgatgcaggcaggggcaagacagcggctgagcttggaactttttcagagatgtttcctttgcttttagttcacagaaggctccttattggatgggctgtactggaagatgcagcccagcaaccagactgaagctgacaaccgaagtttcatcttctatgagaacctgctgttaggggttccacgaatacggcaactccgagtcagaaatggatcctgctctatcccccaggacttgagagatgaaattaaagagtgctatgatgtctactctgtcagtagtgaagatagggctccctttgggccccgaaatggaaccgcgtaagtgtctgtgactcattgccactcggtgatattcattcatttattctctgaactcccaccattcattcattcattccctgacaccttcaccaaggcaaaaataagttcagtgactcttcagtgcttatatttaaaccttggccaacttgacctttgacttcttaagttttcactacttcttagccttcttttagtttctacatgcatatttttcagaagactaaatcgttgaccatataacccctcaaaaattaattatctgagcgtttgaaaatttcatttaagatgccctgggccctgtttttacaggtgcagtaacatcatccactaagttatttaacacaagttttctggttcaggaactctttttataggtcttgcaaacaggtttttgttcagaatggagttatttaatgtgtaagcttgtgaggcaattttttgttaggtttaaagcccattttgttcaaatgtttgagattttaggtatatatttgtacacgtgcatatttacaggggctttttgtacactttggtactcctacttcaaacatcttgtgtattaagggaggtcacttactattttagaagtattgtagttattataaagaaacaagaagacctccaaggccgtttcagggtgggcctttgcggttgctgtccctgggtacgtcactggtcggagtcatcttctaagctttgc

SEQ ID NO: 112193 - DNA, 1200 bp, Homo sapiens
aaagccttttctaatccatccctccactgccagatccccaaataaggacagctttcctctgatctgccagccttatttcttttctcttttgcttcttattattatccaccttgtattttacttgtttaattataactcttatttccctacttgttataaatttgggagggaaaggacctttatatccccattagtgctgaagaagcatctgttttctaagagatcctctgaatatttgtggatgaaattcccaaatgctgacaatgccacttgatgaacttgtccctcttttggctgtaattttctctggggacctcaagtcgtctagtccctgagcacagttacccagagaaggcagccgtataaactgagcagaggctctagagcagagcagaggctctagggacaaacagccctggcattggttcccgagtctgccctcaaaagctttgggactacattgacctcactaagcctcagggccctcattcctaaagaggctaataacagtatgagaattaaccaagaaaacatgaactgccaggtcaggcacagtacccagcttgataggccttaatacatactttattttacaaggaaccagctgtccttgtaattgcctcaagtgttccactgattgtaactgtttgttttttggttttgtttttaatcagttggatctacacaagtgaaaaagacttgaatggtagtagccactggggaatcattgcaacttatagtggagctggctattatctggatttgtcaagaacaagagaggaaacagctgcacaagttgctagcctcaagaaaaatgtctggctggaccgaggaaccagggcaacttttattgacttctcagtgtacaacgccaacattaacctgttctgtgtggtcaggtgtgtactgaggacatgcatccctcctatttctgtgtggttgtacatacatcctattctggggttagccagaaaaacctttgcctgcagttagctacatgaggatgccaaggacccagacggatagcaagggaggggtaaaaactgaaggcttaccgaaataaaggatatttgaggaagggagttgggatcctagaatattacgagttggaaagaaccataactctggtccaagttcatctcaatgctggaacctttccagaaaaagtattgtgtttttctaacatctgtctttacccat

SEQ ID NO: 112194 - DNA, 1361 bp, Homo sapiens
ccaggcatggtggctccttcctgtaattccagcactctgaaaggcccaggcaggaggatcatttgagcccaggagtttgagaccaacctgggcaaaagggcaagactcagtctctgccaaaaaaaaaaaaattagttgggcatggtgctgcacacttacattcccagctactcaggaggctaaggcaggagaatcccttgagccctggaatttgaggcagcagtgagctatgattgcaacactgcactccagcctgggcaacaaagcgagtccctgtctcttaaaaaaataataacagaagtcctagaaaagtttgtgtgttgatttacttttacattaaaagtatatggcatgttgagcagcgtaaatatagaaaagtgtagggaagactgagcaggaagtactcctttgggactgaaagacctcaggaagtcttattcctttgatggcacaaaattctccaagtatggaattattagctatgataaaaatgttttgccgctagtttggggggactcatggtagcagtttcattaccttgtaatgcatgaacagaacagatggacatccattcctggctgtattcatgtgttgttgttgttattgttttaattgttcttatttacatgcaggttattggttgaattcccagcaacaggtggtgtgattccatcttggcaatttcagcctttaaagctgatccgatatgtcacaacttttgatttcttcctggcagcctgtgagattatcttttgtttctttatcttttactatgtggtggaagagatattggaaattcgcattcacaaactacactatttcaggagtttctggaattgtctggatgttgtgatcgttgtggtaggtttgagaacaacaccaaatttcctattctattctacaagcatgttaactagagtctttgatctcctcagcattgtggatcttgatattcccaaaaaagaatctaaaagtccccctcaattatatcaacttctgttactaattattttctcattttgcatgagtaactttgctgagtatgaagtggagaggtatttacagtatgctctcagccacgctaataacaagagtatctcagtaattcatatttggctttagtatgccgtatgagatgtggaggagaaaacagttttttttctttgtttttttttccactaatgatatttttcttcaactgctggtaaaaatcaatttatattttcctgcacatgtgtgaagttacagcaataaaaaaacttgtcggccaggtgtggtagctcatgcctgtaatcccagcacttggggaggccaaggcaggaggatcacttaagccccagagttcaagcccagccagggta

SEQ ID NO: 112195 - DNA, 1287 bp, Homo sapiens
tctgcagagtacaaatgtaagttatattcatcaaagttttctgtatgaggtataagaaatcaaaggcaggccatgcacagtggctcatacctataatccctgcactttagggaactgaggtgggaggatcacttgagatcaggagtttgataccagcctgggcaacatagtgagaccccatctctaaaaaataaaaataaaaaataaatcaaaggcagagtcataatcaagaccatgacaccatgtaaattctgtgtctgctcttgactctattataacttctaagatttttttcaagatgttttcccttcatccttatcacttaattaagcatccgtcacttccttcctgtggtttcagtgtataaaagaatttttacaagcttttctcccttcagcaataacaggtaacatttcgctaagtccagttgtacatttaagcatataacaacatgcttaattattagatgcttacaagctttgcttggcataggtgtaccatgtattattctatgtctttccttcccactgtcctatgatagccattaccttctgaaatctcagtaaatgatgcactaccctattagcattctctcttctgttagccctccttatgagagttattctttccctcatcccactcctaaaaattcatttggcctttgtggagtatttagatcaagtcattattaaactattccccactagaattattaatagttgataaaatatggaaaatatattattcatatgtgagtgaaagaacacttaaagcataaaaaagaactacatggccatatattgcatggcaataactatattagcagcaataataattgtaatagtaataataataatggctaacactttagaagcttctgtgttaggcatttccgggtgcttttcatggtacagaagctcatttgttcctcatactaaccctcttcactactctgccactgcctctcaagccatggatatgtgcactttagagtttttacttaaagtaaaaattcctgtagaatagatggtgttgaccccatcagaccgtgatgcagttagaagtgcatcccgtcttttacgatggccatacaacatcacacaaatcaaggtaaacccttgatccccaaattctcaatgtattaataatgaacagagttacacaagaattttagcatttaaggaaacaggagagacgataatactggaaataatttttcagaatatttctgttcggattgatggcagagtgcaggccatatacattgacaattattccagaacacaa

SEQ ID NO: 112196 - DNA, 2058 bp, Homo sapiens
acagtgctgtatacatagacatctactatatttttgttaaacagagcaaagaatggctggcaattggagaatgcagagaaaccgaaaaattttaaatttaaaaatcacaaataaaaacagcaggatgaaggcaagaaagcaaaagggtggaaagtgattaaaatgaaggtggcagaaaaaacagaaagcattcctctttgagtttgagtctgttatagtgtgatctcttctgtgtatgcatgtatgtgtgtgtaatgtatatgtgcacacacatgcatgcatgccttcgttgagtttctattccgaactaaggaaatgcaagcaatatactgttttacttattttatggcagggcttaacactttccatttgagtgagtgacttttaagaatgacatcgggtaagtataatggtgagcccttataattaatacattggtgaagaaaaatatactagtcatattaaggtaagtttcatatttctaaaacactgtaataaaatataaatattttgcttttcagctgtcagtggtagctataggaattaacatatacagaacatcaaatgtggaggtgctactacagtttctggaagatcaaaatactttccccaactttgagcatctggcatattggcagatacagttcaacaatatagctgctgtcacagtattttttgtctggattaaggtaatttataaatttcatgttctacattttaaataatattttctttaaaaaaaatgagttccacaaaatcatggaatacttgaatttgaaattcaagtgaccagccaaagctgctcaatatttactttgagacagggtctcactctgtcacccaggctggagtgcagtggtatgattacagctcattgcagcctcgacttcccaggcccaagcgatcctcccaccttatcctccgaagtcactgggactacaggcatgtgccaccatacccggctaatttttaaattttttcgtagagacaaggtctcattatgttgcccaggctggttttgaactcctgggttcaagcaatcctcccacctcagcctcccaaagtgctgggattacaggcatgagccaccgtgccaggcctcatattttacatataaagtaaactattgagactcatgtgatcattcctctcactgtcaatgacatacttctgctatctgaattagtgcaagatcagtccctataggttttgtttaacaaatgcagtaagaggcctttcagtgtgttagctgggcctggggccccaggctgctaacagatgagatgaacaggtgaaggaaaaggaacttagagaaagagagggaaggagcaggtggagggaaggggagagttgctgcacttggaaatgcttgctagaagggatcgcctcttttccaggtagaggctgtaagggaagctttacctagaattaaggttggaacagacactgcttccaaatagttccttgctcactattttccttattgtcccaagatataatgtgcatttccatgtgtgtgaaaggttatgacatttcatatacaacaagcctcaattctggagatgcaggaaatttcaataattctcaggcagcagctgccattcggtcaccagcacaggctctgattgtgctgtccagacagtaagtactagccacatgtgcctatttaaattcaaatttaaattagttaagcttaaatacaattaaaaacgcagttccttggtcctactggccacacattaagtgttcaatggctactgtctaggacagtggaaatgtagaacatttccatcatcacagaacgttctcttgaaaagcactgttctggaaggtacttacccgttatgtacttttctgagttggtattcatacctagaagacctgaggtttatcacaagacatagacttggaccaggcgcagtggctcatgcctgtaattccagcattttgggaggccgagataggtcccctgagcccaggagtctgataccagcctgggcaacatggcaaaacctcatctctactaaaaatacaaaaattagctgggggtggtggcac

SEQ ID NO: 112197 - DNA, 1039 bp, Homo sapiens
agtgccgggattatagatgtgagccactgcactcagcctttttttttttttttttaattgtagatagcataaaacctactgttttaaccatgcttaagtgtacaattcagtggcattaagtacattcacagtgttgtgcagccatcgccattatgctgcattattttcagaactttttcattattctaaactgaaactttgtatccattgaacactaactcccaattcccccagtccctggtaacctccattctactttctgtcactgtgagtttgactattctaagtacctaatttaagtggaatcatacagtatttgtccttttgtgtcaggcttatttcactttgcatgatgttttcaaggttcatccatgttgtaacctgtcagaatttaatttcttttcaggatgaaataatgttttattatatacagtcacaccattttgtttatccattcatctattgatgtcttctctctcttacagctcttcaaattcatcaattttaacaggaccatgagccagctctcgacaaccatgtctcgatgtgccaaagacctgtttggctttgctattatgttcttcattattttcctagcgtatgctcagttggcataccttgtctttggcactcaggtcgatgacttcagtactttccaagagtgtatgtaagtatatatgaaattaagaagaaaaatttaatcagagttgtcactgcttctcaagaataaatcttcatatgaggttgctatatgaccaccaattatttaaaaccagttattttaagtaagaattaattaccttttcccaaaacattgatctacccatgcaaagaagacaatgcatcctgaaatgctgatgcttaagatagcagcccaaagtagtaaaatacagttaacagacataggaaaccaacactgttctgaagactgagtttttctttgcaccaaatgcagatggtagcttctagaaggctgtttgcctatattcttactcctgttgaatattgttgccatatatttagaacttcaagttatttt

SEQ ID NO: 112198 - DNA, 2136 bp, Homo sapiens
tgtagcatgaaagcattttattattattgcagaaggctttaattgctgatacaagtagcaagactttgtaaatgggattgacaattttctgttattcggcagctacctatactgctaaaaggtccaaaaataatgaaatcatctttaagaaatgttgcatcaactagtggacattctttgtttttgtattgtggtgttttgttttatttttatagcttcactcaattccgtatcattttgggcgatatcaactttgcagagattgaggaagctaatcgagttttgggaccaatttatttcactacatttgtgttctttatgttcttcattcttttggtatgtacatttttatttatagtgaggttcaatttaaacttcgtaaatccttgtcttctcttttctctcacactttatgtcctatcaattttaaataaagacccaggaagtagaaaaaagtgtggatgttggaaaacttattttccttttattaattcacagttttgagactcatatcaaatgtcttttctgtggtctttcattgatccatgtatatgtgtctattcaatgcaaaaaaaattagatctcttccatggtctttcatttctctctctatatatgtatctattccatgcaaaaaagaaattagatcaagtacaaatttataaagatacctaaaatagtgctttgcctaaaaagtagaatatgcttacatgctttttaaactcatatgtcagcactttcgtagtcacttgctagcatgacttttctctctttcttcttttctttttaaaaaataagaacggaaaagcaagctagatctaagatgtcgagtaatagttgagtgaatcattgcatgtcaaaattaggatattctgttttaaattatttatatcccattcatctagagactgcctacagagaatattcaaataattaagtttaaaactaaatgtaacaatgaatggaaattgcattaaaattattttcaaaaataatttttttattctcttgatttggtacaaatgaacatttttaatgtttttgccctaagtcaattaagtttttttaaggtgttttgttctttttcttaacatttatatattcaattgtctactgagaaggtgttaagccagcttaatttaggcaatatttttcatctaaacactaacagtcatcttaagaacaattttcttaagaaaataacattttttccatttcagtaaattgtgtaaagatcccttgaggaaggttaagtgatcacattttcagtaattcagtgtaataactctaaagtcagtccaggtattactggttaagtatatggtatttattgattgggtattagatgtactgtattaatttcctgtttaaaaaaaattttttttccggggagacacagcctctggtgtaaaacaaaggtgtgttccctagctgtactttaacaggactgaaaaggtcaggaatatcattcaagttcatatgtatcttgctgtatgcatggtttatggctcatttttaaacttacacctcttaagcttcttcttcctatcatatattaaaacaatggagagaagaataagcctctgttactctaccattgatagtacttcggattctagagtacctgaatctctactaagaaggcaaaaaccaggaattgagagtcctgcacctgacccttcagttgatctcaggccacctagttttctccgtttatcaatctgccaaacaaggatggatagagtcgtggcaactggaaaggctcaaatgtggaattgtttgaatgtggtcctttagtaggcagccatcttaccagatctagagtattcagtcatcttaccagatcagtcaccagaacatgaaaagaagctcttagtttctatctttatactaaaattgtttttttgtacgactgcacaaaaaagaattgctctccttgcacctcccagagatataggtggatagatacatacatacgtacatacatacatacatacatacatacatacatacatagacacatacatagatagaagtctactttcaatacaaacctgtcttttaaggaaatgacaagctgagcatagggttggccacctttctgagccgattgcctggtattagtttattgcccct

SEQ ID NO: 112199 - DNA, 1443 bp, Homo sapiens
tctcaaaaaaagggaaaatcctcatctacatttcactgggttttttgtttgtttgtttgtttgtttatacacacttaaggaaattactgtctagaagatagataatataaaaaataaaaatgcaattcatgattcgggtttcttggtattcctaagaactgttgcacagtactttatgctctgaggcagacagctatagcatatatagtaatttttgtttctatcacataaacttgaatacacatatgagtaaaagacctttagttcttcatgacttactgaaagaccctgactttttccatgtaactgttccacaagtgttttatggaaaactggatacattaattcttcattcatccagcacgtacttgttgaatggccaatgtacaccaggtttgtagtagttactactgtgaatggaaagtaaaacagatgcaaaaggagaatacactaaaccaagtcttttattttttctctctctgatagggctaccataaagctttggtcaaactaaaactgaaaaaaaataccgtggatgacatttcagagagtctgcggcaaggaggaggcaagttaaactttgacgaacttcgacaagatctcaaagggtgagaatcatgcttcctgaggttctgaaaaattcctgcttctaaagataaattcctggtgataagagtatttctagcccaagggctcatacagatactttttttttttttttccagaggcaggtatctttctggaacatgttataagaggaaaacttgcccccatttggtgatttctcctttcctcctgcattttgatgtctctgtgttgagggtgaactgggtacaaggaatgatttttatctgtatcctctctctaatttcaggaagggccatactgatgcagagattgaggcaatattcacaaagtacgaccaagatggagaccaagaactgaccgaacatgaacatcagcagatgagagacgacttggagaaagagagggtgggtctggtttaggagaaccggatttgatttggtacctacaacaccacagatgtatcaaacactatagaagtagtgggttattgagtctcttgcccattccccaccacactctctctctctctcagtcggtttatgtgttagtaccctgtttattccagaaagaatatataacacaattatgtataaaaatgggtggttagcatgatataaaaacgtcaaaatgaaaagcaagcaaaacaaaagtaaaaataatggattattaatgaagcttaaaaatgcattcataaaaacacatatgcttattaagattgggctacaaattgggccctaagcttgctggtaatcagcttgaaaagagaagcctgattagctgcagagtccacaatgtccgtgagagtgaagaaaacaaaaaatgacttaccaagagatgtgaaattattctggttag

SEQ ID NO: 112200 - DNA, 1458 bp, Homo sapiens
cctacccccccatcaattgtttgatgtagccatttttcaatgatccgcgattaagaagcagcactcttttatagccaaaaattacacatatataaaattttcctttagaaaatgttctaaaaatggaatgtctaactaaagggttaggcatacattcttaagacttctgatacgcgctgacttgcaggaaagttgtttcagttaacactcctaccagcggcatccgagagttaatctgtaaagcttgagacaacttagaaagtgtttcaaatgattgtgttgcttaagaaaaaaatcttagcacttccttttgaaaagccagtggggctgaaaagacaatgacaagcactttgtccctctgtactgtgttttccttgcagcctggtgagacgagtggaccggatggagcattccatcggcagcatagtgtccaagattgacgccgtgatcgtgaagctagagattatggagcgagccaaactgaagaggagggaggtgctgggaaggctgttggatggggtggccgaggtcagtagtcatgagctgaaaacaccgctgctgagcatggtgttattaatgaaaatatatgttgctgacagttgtatttgaagtattgaagaagagtaaaaaaaatttacgtttatagaaattcacaatgatgtttccatttactctcattttcagatttttttctctgaaacagaaacactctttctataaaatctcttgctataaaacatcaatgtagtcatattgtctaacccttaggctgagatgtttatctttctccataactacagataaaattataatctggaggtgttactttcttaatactccatatgctaatggtcctgccttcactgcagggtagaattaagtgaaaaattactccagcaactctgagatttgctattatatgctgtaaatctccagccttaccaaactacagattatttggtccctggacttcctaaggcatttccttctactgcccccaacaccagtttctttttccctttttaggatgaaaggctgggtcgtgacagtgaaatccatagggaacagatggaacggctagtacgtgaagagttggaacgctgggaatccgatgatgcagcttcccagatcagtcatggtttaggcacgccagtgggactaaatggtcaacctcgccccagaagctcccgcccatcttcctcccaatctacagaaggcatggaaggtgcaggtggaaatgggagttctaatgtccacgtatgatatgtgtgtttcagtatgtgtgtttctaataagtgaggaagtggctgtcctgaattgctgtaacaagcacactatttatatgccctgaccaccataggatgctagtctttgtgaccgattgctaatcttctgcactttaatttattttatataaactttacccatggttcaaagatttttttttctttttctcat

SEQ ID NO: 112201 - DNA, 1020 bp, Homo sapiens
aaatcagtattgttatttttttccaagagtgtgaaggaaaatggggcattcctttccactctggcatagttcatgagcttaatacatagctttcttttaagaaaggagccttttttttcaactagcttcctggggtaaacttttctaaaagataaaatggaaaggaactccaaactatgatagaatctgtgtgaatggttaagatgaatgttaaatactatgcttttttgtaagttgatcgtatctgatgtctgtgggactaactgtatcacttaatttttaccttattttggctctaatttgaataagctgagtaaaaccaccaaagatcagttataggataaaatggcatctctaaccataacacaggagaattggaaggagccctaagttgtcactcagtttaatttcttttaatggttagtttagcctaaagatttatctgcatattctttttcccatgtggctctactcatttgcaactgaatttaatgttataactcatctagtgagaccaacttactaaatttttagtatgcactgaaagtttttatccaacaattatgttcattttaagcaaaattttaagaaagttttgaaattcataaagcatttggttttaaactattttaagaatatagtactcggtcaggtatgacggctcacgcctgtaatcccagcactttgggaggccgaaacaggcgaatcacttgagcccaggagttcaagaccaacatgggcaatgtggcgaaactccatctctacaaaaaatgcaaaaataaaaaatatagtactcaagtattcttgatcctgtgtttcaaaactagaatttgtaatgcaaatggagctcagtctaataaaaaagaggttttggtattaaaagttcatacattagacagtatcagccaaaatttgagttagcaacactgttttctttacgagagggtctcacccaaatttatggggagaaatctatttctcaaaaaaaaaaatcttcttttacagaaatgttgagtaagg

SEQ ID NO: 112202 - DNA, 1053 bp, Homo sapiens
atgtatgtttttggaattgctgaattcccaagagttgcacaaaaatggtatcaggcagtaactgtggctgtccaaggtctttttagtacaagatgatttcctaacctgtggcaaggagttcatcctactctactctagctgccacttaaggcttaaacctgatagctgagtctgctgggaatgtcttgtacctgagtatctgtgatgctcctcacagtcttggtgcaagagctgacagaacatgactttggcaggaaacccatgcacacctcttttcctggttttggaattcttaacctgtgttgttttttatggctatttgtaagcgtaaagagtactgtaagagctttgatcatcttagtaagggtcacaggtgtcatctgtttaagcagatattttctttatcagggataagggaactattacttgataaatatttctgccctttggagagagcagcattacagatttggaaaccaataaatttgagtaggctaaaaacttggtgattcaaagtatgactctgtaaacctggtcaagttccttaaacgttagtcccctcatcttttaagtgtgtacaatgtctatcacattggattgttttaggaattaactaagttaggtccatgttgtttgttagtgtctagcaaaattgtaaacacacaatgactgttagctatgatatctgaaggggtaattattaaaggcttggttcaattttaggctcctttaaggaacagtggatatactgagtaacatttgacggatgctaggaatgaagttatattctttttctgtttaatttcagatgtactggcgaagaatatttggtaaagcagggcatcgatctctcaccctggggcttgtggaagaatcacgtggccttggcttgtatgattgttattttcctcacaattgcctacctgaaattgttatttcttaaaaaatattcttaaatttccccttaattcagtatgatttatcctcacataaaaaagaagcactttgattgaagtattcaatcaagtttttttgttgttttctgttcccttg

SEQ ID NO: 112203 - DNA, 1050 bp, Homo sapiens
acaaccactgtgaggtcatggcatcccgatcgtcccagtcccttcactcacaaagttacagcacacaatgagtaatgtgaggatgtatgggcaaatgaatgtgctattgatgagtttcctgtgaaaagagaaggcagttgaattttggttagttgtactgcctgtagctcttcatctcaggaactcagaaattgtctgtaattatacataatggcacataagtgttataagagaactttatgcagttacatggacagacacaacattggagaccgagggtggttggagagtggatgactttttttcattctaatattagtttctcaaaatattagtgttaaatttgcacaataagcaatcccaaacatacggtgacctaggcagttgggttaactacttcttctctttctgactaaggattgaagccaaaggcagatgccttcttcgttatgatgtttacccttatgatggtggcttattcagccagttccatggcactggccatagcagcaggtcagagtgtggtttctgtagcaacacttctcatgaccatctgttttgtgtttatgatggtgagtctgaactgtgtttgctctgataaggaattgtttttttccttcatttcttcctgcacattcacttgtcatgtaaaacctgttttgaggattctgtaaatggggctctgctttacttaaggccatctactggaatagattatgttagagaatatactaactttcctctttgcccttatccaaccttttttgctactgttctaatgaagttccaataattttagttaatattgttactaatgagcttttaaaaggcgtttctttgtgacctattatgaaaccttaataaattggaatttcaaaaatcagaagacatttgatcggcagattctcttgagaattacagattatttgcccgactttcatgctggcattagagaactgctagtttattttttttttaacatttttaatttatgttttaaagttcccacatacagcattgaactgctagcttgtttacccaccagcagag

SEQ ID NO: 112204 - DNA, 1025 bp, Homo sapiens
gggattacaggagtgagccactgtgcctggcctgttatacttttctaatgacagagctaataattttttatttctattttttcttttttgagatggagtcttgctctcttgcacaggctggagtgcagtggtgtgatctcagctcactgcaacctccacctccctggttcaagcgattctcttgcctcagcctcctgagtggctgggattacaggcacgcaccaccacgccaggctaattttttttgtattttcagtagagacagggtttcaccatgttggtcaggctggtctcgaactcctgacctcgtaatccacccgcctcagcctcccaaagtgctgagattacagtcatgagccgccgtgcctggcctattttttctttctaaagctttagaatgaaggtgttagggaagcatccaagaaagggttcacagaaaaaatgggctaaatttgttgttatcttgtttgtgtttcctttttatccactgattgcaaagccacagagatcatagagccttccaagcaggataagccactcatagaaaaattagcggagatttatgtcaactcctccttctacaaagagacaaaagctgaattacatcaactttccgggggtgagaagaagaagaagatcacagtcttcaaggagatcagctacaccacctccttctgtcatcaactcagatgggtttccaagcgttcattcaaaaacttgctgggtaatccccaggcctctatagctcaggtaaccagcagattcttttgaaatactcaaatgggaacaatgtggttctgttatcatctgcttcaggatatgtttatcttctacccacccttccaattatttgttatcttcactccacctgggatatagaaccagtcagcagaacaaataaaggacaattaagttttacttttggaaagcttccctttttttgagacagagtctcactctgttgcccaggctggagtgtggtggcatgaactcagctcactgcagccctgacctccctgggctca

SEQ ID NO: 112205 - DNA, 1047 bp, Homo sapiens
tgagggtaataataataatattggaactgcctcatgacaatattgtgaaaattgaaatgaagttatctctaaattatttagcaaagacatagtaagtactcagttatgttaattgcattattagggcagaagagtgaaaaccaatttttaaagagccagaagacctaaatgataagtcagaatgagatatatgaccattgttttaatatgcagtccatagttagttctcaaacttgtaaatacttgcagattacctgggttgcttcttaaaatatggattccctagacctactgccagagattctaattcaatgtctgggaagactgtcctagaatctgcatttttaataactattctagttgattctagattgtcaatacaacacactgaaaattcctattctgttttaataaaagcattgaatttaggtttgctaactatagctaaataatatgagatgaaaagttagtaagacaaagtcaggctgaactagagcaaacaatctaaaggcaagaatagagtattttactgagaaatacaagtttcagatatttaatgacttagtattgtctcacttttaacttaggatgtctaagcagggacgaacaatcatcttctccattcatcagcctcgatattccatcttcaagttgtttgatagcctcaccttattggcctcaggaagacttatgttccacgggcctgctcaggaggccttgggatactttgaatcagctggtatggttgacttttttatgctgtaaaatgcttcattaatagaatcctgaaggagagcaaagggggtctgcaggagtgctgtttggtctttgggtagacataccatgagaatctatcacttcaaaatgtgtttgttccatttggtgctagtatttttcttcatttttgtagcaccagcttgttatttaggtatctttcttgtcttatttcaatgtgcatgcatgtgtgtatttctactgggcctatattctgcttcctagttacagtgaccatttcttaaaagctcagtaattaatatgttggcctta

SEQ ID NO: 112206 - DNA, 2617 bp, Homo sapiens
taggtagcaaatgtgaccacttgaagatacagtactgatcatcaaacagtactcagaacacgccatgtatttcgtttcacactgtgttaagagcagtaagtgtaacggagatgtttcacaagaatctgttagttatttcaaggaacgttaaatgttgaatgtcattttccagaaaatataaatgggttagagaataagtgaaaggaatttagaggaatctatgccatttttcttgtaggacttgaccagtgattaacatccattatatattacacatcaaatcaacaatcttttttttttttctttaagtagagacagtgtctccctatgttgcccaggctggtctcaaactcctggcctcaggcaatcctgctttggtctcccagagtgctgggattacaggcctgagccaccatgcatgacctgttttgtttgtttgttttctttaagagttggtttgtgcttgtgttctatttgtaatttcatcaaccttcattgagtatattcagtgcctaccctaaattaatagaacctgacttaaaatggaatagtaaatcagtctgtttttgtgtttacagtgggatcatgaaacctggtctcaacgccatcctgggacccacaggtggaggcaaatcttcgtgagtataagagagtataagtaagcgttttctgtgcacttttaatgtgcttttaaaagccacttttttttgtgtgcgagcaggtatttattgagcatttgcaacgcatgtcaggtctggttctaggtgctgtggataactgtagttgcgtggttttttcccaaagaccaggtagtcttattaggttagctttactaataggatttgataaggtgattgacatgtagcagttgaccatgttatcagctaatagggaggaaaaagaatgggagaatattaaaagtagggaaaggaagcagaagatgtaagtaaaggcatgagtcttagataaaagagcacattgcctgtgttagtacctccaaggtcagacagctggaagggccatttgggagatctgtacttgatcagccaatggtgtcttgctttatgttttggggctttattgtaatgtacaatgaaaagagaaaggtgagaatttttaaaagcataattttagttaaaccatagaatttcttgaccagttaattttctaactaaagtagaatttggattcaaagtagccatgagatatatagcatgtgttggagggaaaaaaaccccacaacatatatattctcttataggttattagacccacaacatatatgtcctcttataggttattagatgtcttagctgcaaggaaagatccaagtggattatctggagatgttctgataaatggagcaccgcgacctgccaatttcaaatgtaattcaggttacgtggtacaagtaagtattagtgggtttgcattttctgtttcctctgtttctatatgggtaagtgctttggctgatagttcaatgtgcttccagttgattatgtgacatggtcctagaactgacgttctttacagcagcttttcttaatttctcatagacacttatgtgaaaaggcagggagaatctggaatatggcccttgtaaggacagtgataccaattctagtttttgtatcatttctaaaatgatacatactactgttatccttttttgcctttccttcacctttcttttcccctagcttagaaagatattttggcaaatccttgtatgaagcagtttggaaatgtctgctggtagttaacataattacttgcattctatttgggtgtacagatagggggtgaaaaatgattatagcaggctttgcagacatctatggagttaactgtcatttgcagaactgcaggttcatcattagctagaactttaccttagttatgttatctttgtggattatgttatgtatactaaacagtcatggtcttagaaaagactcattatcattatgtctcattaaaatgctatttgccttaaggatgatgttgtgatgggcactctgacggtgagagaaaacttacagttctcagcagctcttcggcttgcaacaactatgacgaatcatgaaaaaaacgaacggattaacagggtcattcaagagttaggtctggataaagtggcagactccaaggtaatgtggaaaaactgaaagcatcatgatcagcataagtaggactttccctgtgtggataaaatgactctgattcagaagtttcctgtaatgtgtatggtcaaaaatggttgctttccataacaatgagaaaagtggcttgttacataatatgaacgtggaaattaacctggaaaaaaaatcttcacattggttgaattctgcacctgaagtgaggcaatgtggtgttgtacgtgaaagtgttcatcacctggcctttccttatgctcctcccccacctcatggtttaagtcacgtctcattccgtgtctgcactaacttttcttcttcctctttttctcttcctccttttagtcactcttcctccaagggactttgttccattgctattgaggtatatttctgggattgataagtgatgagagtccaaggattcttgctctgtatcagcagtccccaacttt

SEQ ID NO: 112207 - DNA, 1065 bp, Homo sapiens
ccgaagcaccggggacgctgacgcacaggttgcccagtcacaagcgctgctcgcacccagagcaagttaaatgggtggtttctggtgaatgggattctgagaaagtggatgcttgcgccccagggcctaaaaaaatcaggcactgaatctaacccaaggaaggaaaggggagaaacttactgaatgaaaatattaccatagtttaaatgttattctttacactcctgtgactgacatacttctgtgcaatattccgatggtgtggaaaggctagaaagtgattgcgcatgttcaggaaacgggccatcaggctttgtgagtgtagccatcccaacatctacctgctgcatctaccctaggaaattagtacctgcatgcagatattttctggtttgcatttacaaacaaaaatcatagtatcatttaagttgtttaaatcaacactaggaataactattaatggttcacccaatgcaggaaagttttagctaggaagcctagataagaaaattgactatacataattttttaaaaagaattttaaatataccataccgcatgctttttaaaagaattttaaggtatatattcatgatgcgcccaaacatttgggtaaaattattcttttgaattaatttctgtcagtttcaagacccttaaaggcccatatagaaatacatgttagtcatacttcattttaagacaaaattaaggccagcacggtggctcatgcctgtaatcccagcactttgggaggctgacgcaggcagatcacttgaggccaggagttcgagaccagcctggccaacatggtgaaaccctgcctctactaaaaatacaaaagttagctgggtgtggtggcgaggctgtaatcccagctactcgcgaggctaaggaacaagaagcgcttgaacacaggaggcagaggttgcaaatgacccgagatcccaccactgcactccagcctgggccacagagtgagactctgtctcaagaaaaaaaaaaaaattaagataaagttttcagacctggccgttaacgactgtttgcaaaaactgaaaaatc

SEQ ID NO: 112208 - DNA, 1007 bp, Homo sapiens
ggtgtggtggcagatgcctgtagtcccagctactcgggaggctgaggcatgagaatcgcttgaatccaggaagtggaggttgcagtgagccaagatcatgccatggcactccagcctgggcaacagagcaagactctgtctcaaaataaaataaaataaaataaaaaattcaaacctttgctatatgaagtaaaatcccatctacattcatggcagccttccaggatattaaggtattcttttcaactaaatttgtttctaatcagcctactagcaaaaatgtagttgagcttgatatcattgtattgcctatgatccaggataattcagatactttttgttttagcaacagaaacctcttaaaaattaattacataaccataatatataaaaataataatatagttattgatgcaagtactttaggtgctaaaattataacatttgcttatcaggaaattatacagtgaaaacagtatttttagcacaaaaaccttgtgagaaaggttcactgatttcagctgtagtaagcctctgaaatttatttctgtatttgttttgatcgtacaatattgagaaaaaatctcactcatgtactagcagtcagaaatgattttaggtttttgtgttgtgttgttttgttcatcttataattttatagttctgattaaacagacatggcaaaggaagatttattctgagataccaataaaaatagcacaagttaacatatatgttcccaatatgttaaacttcagtatatagtacgtgagaaggcatggtaaatatgtttttatacaaattgttaaatgttttaaataaataattatatatttttaatatattttgaaagggcacattgtcacttattggcttttaaaaaaatagctttggctgggcacggtggctcacgcctgtaatcccagcactttgggaggctgaggcgggtggatcacctgaggtcaggagtttgagaccagcctggccaacatggcaaaaccccgtct

SEQ ID NO: 112209 - DNA, 1044 bp, Homo sapiens
ctgcagagcatataatattgatgatatatgtttagggtcccatttggacatggagaataactttgctatagatattcaatataaccaagagcataggcataaaatactcactcacagttgccaataattccaagtgtatgcacaagttttgcacatcttcagtatattttagatcctagatcagttagccttacttggtaatgcaagaaagcttcattttattttatttgttcttttgccttaaaataaagggaaatagttggcagtgttttaaaggaataagaagactggttgcttttggcagaagggaatttgtcattctctccatcagagaaggattaattgtattgttttggaggcagtggggattaggatgggaatatttgaatttcattattagagtaggtgtataaaatatacttgtataaaaatatacttgaaactaaagtcctatgctgtcaaaagatttgccatttaagtgcaaaatatgtttgcaaatcccacaaaacaggaagaccagactgtcttgaacaacttgctcagtgtcttgagagtactgccaattcttactcttggctttgttttctgaaagctgcttcctctttggctaggagctgttcaccttttcctgaagtacgtctaccaacaggggcacactaggaaatgtctaatgaattcctgtagttttatttccttcaaattccactggcagagaacttcacagtgtggtgaaatcactaaagatgttagtacttgggcttttccctacaaaatcattgaaaagtcttccaaacactccagcagattgctcttccaagtctcaggacagtcttaatcttaatcttaaaatgcatagcattaaacctctaagatatgtgttccaattatgttttgaattatgttttgaaagttgttttctctgaaaaagtagggatctaaacttttcttttcacactacctttctatatacacacagactccaactaacttggcattaaaaataaaaactataatataaatgacccatagatgtacactttattc

SEQ ID NO: 112210 - DNA, 1016 bp, Homo sapiens
aaaggggagcagaggagctgagggcatttgcaaggatgtaattataatgatcatggaatttcggcaggtatggtgactaaagaaagcagtgaggggtgaggcacagtgaaatactggtgtaattaatgggttttaggccctggtggagcaaggtcaaaggtttgccggagttgggttattagaggggtttaggtggaaagatagactatgcttacaagttctatggcatgacctgcaagtacataggtaacgcagggtggagaacaagatcactgaaggagagaagttcaaggtagtcagaggccagagtgctggggagatcgttttcggagatactgaattcaccaagaattaagacagaagtagtgtcacagagagtgacagtaccaggggctacaattactgatacaggcgggagatgcttctgaaatctgaagatggcagcaaccatgcaggggtagtcagtgttaaagtgtaatgacatgaaattcaaagctgagatcttctggggaaagttattagatgatccactttgggatgttcatattttttggtagtcgctcatctcagaataagcaatatcagaaagtgaaattttaatcacaagagggcgccagagtccagcaaatgattacttttggttttcacctaaagctagggcaatcatacttttgagagaggaagaggccactactaataattatttgggggcggtatgtgtaaattgggacatagactcacaccttctcctacactatgtaagcatgggcaatttaagaatgaactagctgtgcaccaaaagctctaattcccataaatcactcgaaatgcttttgactgcaatcaggtaagacaaaaatggccaaacttgattttatctggaagagaggcttgagaaagactttcccctctggcccacatctctagttctatttattgcttatcccgtttttccctttagtgcagtaccggtttgactgtatcttcaagttaagagaattgctgtattccccaaa

SEQ ID NO: 112211 - DNA, 1091 bp, Homo sapiens
gggaggctgaggtgggaggattgctggaggccaggagttcgagaccaccctggccaatataacaagaccccgtctctatttaaaatacacacacacacacacacacacacacacacacagagagagagagagagagagagaaatgcctatttagcacagtcttgacttcctattttacttttggtttaggaaagaataacatgaaaagtatagcatgctccaagtatacagcttctcggtcctctttagatttctggtgggcctttgcattgaaacctaactctttgttttggtttaattcgcttccttttcaaattatgtcatagtcctgcttggttgtttttttgtgtgtgctagaaggcagggcctgtgagaggagaccctcagttacatcagggttaaaaaagcacaggaagtttacgcacagagcaaagccatttgctagaattggtttttatccttccatttcgaaaataaagttgctgtttgtgttggagatgctgtcatcagaattccgcggcacaaagagaaagatacaaaaatatctctctgacatgtaactttcccccttcttctagccccttgctaggaatgccagaagaggatcccacgctgactggaaccattaggtcttttgtttgaatcccagtgatcgagaaagaaatgtggttcataatcagctagtagtggagaaaaaaggaacccaaggagataggagagctgttaatttcactcgggacatttcctcgaggctagtttactcggaaagcctcaatgttccctggtagctgcaggatctactttgggggctgccaagtttcctctctcattctttctcctgccccaagagcaggcaggaaggaaagttcctggactgatactcgtctgtttagtaggcgtgggtcctggttgaagtctgtctaggaaaactcctaagtgtagaaatcttcttcgtattaccactgtctctgcactgagatttgggctgctttgcttccagcgtcacacatcataactgaggtgagttgtttgtttttgttttttccaatcttcatacttcgtagaaaatcttgattcttttttgatatgtg

SEQ ID NO: 112212 - DNA, 1005 bp, Homo sapiens
caaaaaaaaaaaaaaaaagaaagaaaagaaattaattcagatgatgtgacattactaaattgtatacatatttataaatgtgtatttcagctgtctcatcagccctcccctccatttattcctatttttctgtagttaagaatactgtaaaaatgtgactattccttaatatcagaaaagaatgcacaggctgagtcttccggtcaaaagttaaatactgatggaatcaagtattttgtatgaagttctcatttgttatctctaacgctattttgtgttttgcatatagtattatagtatgtgtatatcactttttgtatagagtaagcaattgaataatttgttaataaaaataataccacattgactgatactgctatagacatagcttgagttttatgtctcctttttgctcattttctaagacttaggagaaagaataaatctaaaatgaccattaaaacattctccatttcagcttgctgtgtaacttaggaagtataaaactatacttctctttatctgcatgtaagtttgctgttaaaatgtgaatttctaaatgtgtatttggaattatttccgtagtttatttctgcaaactatgtaaatttgttatatgtgtgagtatgtgtacatatgtatattttagagtaatataaaattaaagggaacaatcttgcatagctctttcaccagttttaaattattgatacgttatttttaaggactcttgacaaactaggggcaattttcttatagtggagacccagtgattatcagcagatgaggaaataggttaaaaattgctatatggcaatttgtatataaagtaataggatgtgagaaaaatactgaatcttaagaatgacatggaattctgtggcagaaacaaaagaaaaagttgatgtagtatataccttcaactgtgttttgagttgacttttttttttttctttaagctttgggtaaaaatgtatgaggagggagagggcccaatataaatat

SEQ ID NO: 112213 - DNA, 1028 bp, Homo sapiens
taggttagtaactgcacataagaccagtttggctttctaggggaagcgtatttccaagggaaggaaaggctgatttctctttgtatagactgtgatttccaatgtttttctctttcttcctgccaaaccttgcaggcaatacagtacggtactgaggataacagtactgcagtagtagtgccttttggtgcctggggaaaatataagaactctgaaatcaacttctcattcagcagaagctttgcctccagtggacgatgggcctgattaccagctgggacttagagtttctgtgcaacagtttttcactgagcatgtcaagaaactgataagatcaaaaaggtctcctaactcactagatcagcgcacaagtcagtgtaaaccacttagatagtagttttttcataaatgctcatcatatttatgttccgctgtacatgttcagtataaatatatgtgtagtgaagctactgtgagtctttaaatggaaagagcaaatgagaagtggtttggatacacttgatgagagatgagagtgtcacattaataatttttaagactcttaggcagctatgggtttcttttgatcatttttgttctttattcatttgaacacgtttttgaagttcttcaaaactagtcagtttgaattttgacagctattcaatatgtgatctccaagtttaaaaaaatttttttccagacttccctaatcctaaaatgcgagtttttatttttaataactgtaccaaggaataagtatgaaaacagttctctgttaccatattttgtattctggaccacttactggtgaaagcaaccatgcaaaagaaattaatttggccaggcacagtggctcatgcctgtaatcccagcactttgagaggccaaggtgggtagatcatctgaggtcaggaattcaagaccagcctggccaacatggtgaaaccctgtctctagtaaaaatccaaaaaaaaaaaaaaaaaaaaaaaaaaaattggctgggcgtggtggcagacacctgtaat

SEQ ID NO: 112214 - DNA, 1028 bp, Homo sapiens
ggaggtgcctgcagcccccgccgccggagccacgggaggagccgcagccgcccctccgggagccgcgcgctgactgcagtgccaggcggaacgcggcccagcgcggctgcagctccgccgtacccccctccctggaaccccggcccccgccctgcgcacctcggcagcagccgaaccgcagcttgggactccgactgtcacagcccctctcgccggacccggggtttctccgttttcggcgtcacaataataaggaagtttccccgcaagcctgcgggcggcggaatgcgctgggtgaatggcttcgcaccgggccaatgggcgccgttctgggatgggcccgcgccaatggcggccgccgtggcacgggctggaggcggggcggcaaggtccgcgggcaggaggaggggagaggcccaggccccagagccaggcgcaggctgcccgaggtgacaggactcgagggcccggcgcggggacagcggcacgggtgtgtcagccgaaatcggactgcaagacatagagcgttgacgctgaaataagattgcttttcactggcggggaagcgagctggaccgatcagcggttgcctattcaggttctggactctggtttttattatttatgaagaggtgaccgaaagccttgggcacgggggaaaaagctggagggtgacaattgagggagagtgcgctagtcttctgctttactccccttcgtaggactgtaggaagcgcggcgccggcccgcggcgctgcgcggtgggagaggcggggaaggaggtacgcggcagccgccggcgctcttctggagaggtggggatcgaagaccggcacggggctgcggaagaaaggcgggcctgggggaggctggagggtggacccggggggagcatagcaagaagagtctgagcaccagatcttaaaatcttgtaatctgaaagacactctgtggcctatacccagtaacggattttttaaaagtttgtcctcttccacttttccctagcgccgaatcccagagcttcc

SEQ ID NO: 112215 - DNA, 1047 bp, Homo sapiens
tgaaatctcaaagaagagcactaggagtaggagtaacattgactaaagcagctgacatttactggtcacttactactacatgccaggcaccatgctaagccctttttacatgcattttctcattaatcctcacaacactctagcaccttctcctgattttggagcttaaggtgggtaaacatctttcctcaggtttcacagctaacgtggttaatgtagggcttggattttagttcctttgacccttaagctctgctaagattatcttgaatctcttaccaagaatagatgagaaggactcaggaaagtgccaggttgacattgagagaaagttgtacttcaaaagtagtccttccttttgttttgtcatggggaaataagaggcaggaaatgcagccaagcggggctggtgtaggtgctgagggaagtgtagtcctatattttgcagcgaatttcataattgtgtattttgaaggaaaataaaagattctgctcttctaggagcaagcaagagagtgaatgaggaaaaatgggtgtaaggaccttggagatcaaaatgcccagcgatgcagaccgttgctgaaactagacctttaaagtcatggacatcagcagctacaagatttaggggtccaactggagtgtactttgaagtgaaagctgtgctaatggctggcttctctccaatgtgttgaacttctctcctgaaagctagatgattttagttgcttttttctttagttccggcagagcattgtgatgacctaggccgtatttatagttaggattgatagtttatttacagatacacatcttttttgtggttgctatttaattctcttggtgggcagtttttatttgaccaattgaagattccattactgtaactcagttggaagaatttttgaagttttcttgaacaatagtcctttttattatcttttttcataaattgtttttactagtcagtcagggatgaggccatacttcaggctgtttacacaggattgtgcttggccaaagcacccagaactcagatgactctca

SEQ ID NO: 112216 - DNA, 1046 bp, Homo sapiens
atctaaaatgaggattatagtctaggtgtggtggcacacacctgtaatcccatcactttgggaggccaaggccagaggattgcttgccaaggagttggggaccagcctgggcaacatacagatgcaaaaaaaaaaaaaaaaaaaaattagctgggcatggtggtgtgtacctgttgttcctgctacttgggaggttgaggttggaaggtcacttgagccctggagatcaaaactgtggtgagctgtgattgcatcattgcactccagcctgggcaacagagcaagactctgtctcaaaacaaaacaaacaacaacaacaaaaaaccccaaaataaataaataaataaaaatggggattataatactctttcataggtagagtaatctgtgtaaatattgaatgcagtgtctggcagttttatatcatgcctcagaaattatgctaccgtgcagtttcaccatcccgtgtaaaggctgatactgtctctggagttacagggaaagaagcctaagctgggagtttgagaactgggatctagttttttatctaccaggaaataattgcctgtccctgggcaagtttcttcctatttctgagtcacagttccctttcctgtaaaaggagtagacttcctgttctaatcagatagttcttggtgaaggggattcacatgataaagaagacaccacaaaactgctggtagtgttacagacagagaaatatgttacaggaaaggggtcccgatccagaccccaagagagggttcttggctctctcaagaaagaattcagggcaagtccgtggtacaaaatgaaaacaaatttattaagaaagtaaaggaatgaaagaatggctactccatagacagagccctgaagtctgctgattgcatatttttatggttatttcttgatgatatgctaaacaaggtgtggattattcatgcctcccctttttagaccatgtagggtaacttcctgccgttgccatggcgtttgtaaactgtcatggcgctggtgggagtgtagcagtgaggacaaccaga

SEQ ID NO: 112217 - DNA, 1017 bp, Homo sapiens
cctcctgatgcagctccaaggagctaatggtaggtgttgctgggcctctggatgtgagtgagctctggcaaagcagccgcactgcgtctgtctgcatactgggtcagctggccctcagtcatcctgcagacgccctccccacagggctgagtgactgcaagaatcccaagctagaggtgtgccaagaaggctttgggattcagcctcggaatccagcccatgcttgtgatctaaatttggaataaggcaggctgtagtgtaaattacaagagattccagaaatttctgttgttggttaagcttgtctgttaattataaactccatagcagcttggaataatgcctctttgaatggaaagattatgtgggtgggtgcctccctctctccatttaactttttcgttggtaggtgtgttctaaatctggatatgatttgcgtttgtttttaatgagtgggaagaagagaatgaacttgttttctgtgtttgcttattgagaaccatgacctggagagctgctagacatggaagggaagtctgtggcaggcctagtttgttacaggtatctgttggtcttggcccacaggaatgctacccccaagtagcttctgtggtatttgggaagggaacatgatggaaggccccttccttaaaagaggatttttctgggggttatgggcaggtctgtgatttcagcttggtatcattgcccagattggttgactttgaaatatgaaggattttaaaaagtgagtgtatgactgttcctctaaggctttgagagtgtgaagaagtgagttgaaggagttaattccatggtggccaactccaagtggcttacagagttttgaacccaagtggcaaacttaagtttctttttcttgctttgcagtactggctgtgaatggagtaatgcctgaccatcaacacttactttgctgattggacttgttaatatttctagtcctagcagggtgtccaccagcatgggtatggtcatctagcactagtctggagg

SEQ ID NO: 112218 - DNA, 1783 bp, Homo sapiens
gaaagaacagccatgggcagcttggcttagggaaggagttcccctcccaagccagcccacagagggtgaggtccctggaggggatcccactggctcaggtggctgccggaggggctcacagctttgccctgtctctctcaggagctgtttttggctgggggatgaataatgccgggcagctagggctcagtgatgaaaaaggtaggtaaacccttcatatgtatgtatttagtttaaaagcacattcatttaacacatgcttcttgaggatctactatgtgctagccccatgtgagatactaagggagaagcagtgaacacaatagagaacatcctcgtcttagtggagactgtattctagtgagtagaggtgcaacaaaaccagtaaatacacaggatttgagagtgcagcttcctgctttacataaggtggtggggaagggcccctctgataagaaaatgtttgagcagaacctgtaggaaatcaggtgggagatgggacatgtaaatgtctgggtgaaaaatgttcctgtcagagagaactgggtgtgcaaaggtgctcatgtgggaagagatgtagttggagagaaggggaagagtagcacagctgcaggtcagagaagtcgtgtagacccagttatgcagggccctgaggggcagggtgaggatataactggttttctcagtgagaggggaagaccctgagggtttggaggagaagcgtgatccactttggctttggctgtagtgggtcaagggggaagctggaagaccagcttggaggttgtgggagtaaagtcagattttaaacatattttgaagatgaggccagttggttttgttcactgttggatgtgtggtttgaaataaaggaacagctggaagggcaaaatgactgtttctgaaatggggaaaaccgtgtgtagtaaagtgagctggagagtgggcagggttggagagtgtagggaaaccatgaggtaggttttaggtaaattaaaactgagaagtctgttggatatccaagtacagatgcaggcaggaaactgaacatgcgtcaggaatccaggaatccaaaattcatgccaagatagttgtgtatatttcatctcaaaggcaaatggtagtgatattctgatatttaatttattctagatcgagaatctccatgccatgtaaaactcttacgcacgcaaaaagttgtctatattagttgtggagaagaacacacagcagttctcacaaaggtaaggagctcagagtattttactttggtgctggggatatgatgggtgattagaattgcttgattatgttagtgtagtgatggtgtgtgattacagtattgtggcttgaacttgaatgctctcttttatgtgggtttgttgttttccaaaggaatagaaaaagactacttttttgtatgtctctgttatcctctttggtaatcttgtagatttttcatatatatatatatatatatatatatatatatatatatacacacacacacataatgtagattatatatatatacacacatataatgtagattatataaaaatgtagattatatatataaatataatgtatatatttatatatatataaattccttggttctttatggaacaaagacagcactttgttatttttatttgttattttatgtatatataatatatataaaatgatgtcctatgttcctttaaaacaagtcatttaaatatgtaaaaaagaaacagcaatttaattaatgttttaaaataatcatgtttcttttgct

SEQ ID NO: 112219 - DNA, 1048 bp, Homo sapiens
tttttatattgaacaaatattattctacgttcactttgataaaatgccttaacatttatttaaatacagctgttaaaaaaacagcttacttaccaaggaatttgtagagcacctaatttcttacatgtgaatgatcatgtaaaatcatctcatttagcctagctcctagtttctccttttttaaaattttgcttcctaacacatcattgtactttcaaacgattttaaaaatttacagaaggcacacattcctttgagcattgctatctttgttccataaagatgcagtctgaaattccctttttattatttttctatttaatgaacatccttacaaagtgattttggccaagtgtcaagtgaatgtagtgctcttgtgcacattgttgtgataggcattttgtatacagggtttagaggtatacccttaaagatacagtgaagtcctatggtgtttgttccttgttagagtggaggtgtgtttacctttggcgctggttcctgtgggcaacttggacacgactccatgaatgatgaggttaaccctagaagagttctagagctgatgggtagtgaagtaactcaaattgcttgtggcaggtgagtgttcctcaaagcttgcttgtattcactaggacccagaaattggtcttatctttgtagtgatgaagaatgtgattatacctagtcaccgtcattttaagagatcttaactgcatgcacgcctatggtgaaatgtggagaaagaccttgatagagtgtggcaaggaagggttttagataagcagagcaacacggagacattaggcttcttttgggataaagagtagcaggatgtggggaagggataaagaaaggaaaagtgagagagtcccaaagaacttcttggaaatttttgcctgagtctaccctgcttctctctgttcatcttagaggccacatgcagtagatcattcagctctttcctgacttgccaccctcctcatgatctagagtgttagaggatagtattatggagagcagccgctgcaagaagagtcacgtgtta

SEQ ID NO: 112220 - DNA, 1043 bp, Homo sapiens
tatggccattcttcggctggatacaaaccccagcaaagtactaggtgaatttgctaacctcgatatcagtggttttatggtcatttgttttgttggtgtgactcctggctctcagtggattgagatccaagaatctatttgttgccatttaatatccttaacacttaaaacctttttttctttgctgttaatttttagctaaccctattttcaagttgaaaataaaaccattatttagattatttgaaatgactcatgccagaataatcttgattttatagtattcacaaacctaatttatttaacttgaaactatttttttctaccacatttgctcagtacctcagtattactgtacgttggtctttctcctatgtctaatttagggggtgggagtgaagtgaacagtttcggtgatacagaggtctccaaaacaggagaggaagaaaatgacctagtgtggacttaccaaatgtttgttttgtttttcttttttaggaccgttgagtccacactgatttttgcaggctccggacactttgctgagataaaaaccttccattcctcagtgatttggagagtgtctttcatgggagtagcacctgaaatgtttttattactcaagtgcaggaagtctatcacctggctttttacttttttcccccctggtaaattttgttaggtgtcattgcagctcagtaacttctgtgttccagatggactgggatgttacttgagtgtggtctcgccgtgaataaagagattgtgttcctgaaggtggaatactggcttttctatattgcctccacctttgtagaagagataaaaacagaaataataatgaaagcactagtaaatgttagtacttaattttttttaagatcaaaagccttttgggggcacattttctcaggtgttctagttgatgtgaaacagagaggtggcaatatcagaagaaatcttacctgactttcaagttttagagttttttcatttttatttttccaggctggaaaatacaaagagaacataattgttcaatt

SEQ ID NO: 112221 - DNA, 1048 bp, Homo sapiens
gggccctagaagaacccatggattggaaaagttgaccttccatatccttgggttttacaccctgcaaatactgtattttctttctttaattaaactgtttttgttgttgaggcaaaatagatacacatattttgggggtacatgtgataatataatacattatataatttgtaaagttcaaaccagtgtaactgggatatccatcaccttaaatatttctctttatgttagaaacactcgaattattctattttgaaatatacaatagattattgtaaactatggtcatcctactgatctatcaaatactaggtcatatttcttctatcaaaatgtaatttgcgcccatcagtcaacctctctgcaaatactataattttgattggcctttggttgaatccatggatgtggaacatgtgaatatgaagggccaactgtattttattttttaaactgccaaatagtgttttgttatatggatatgccacattttatttatccattcatcagttgatggacattgggttgtttccagttttgactattatgaataatactgccatgaacatttgtgcacaagtttttgtacaaatgcaagttttcatttctcttggtatatgcctaggagtagaattgctgagtaactctgtatttatccttttgaggaacttccacgatgttcccaaagtagtagagccacattttttttatatttatatttattttcattttattttttttaaattatactttaagttttaggatacatgtgcacaacgtgcaggttagttacatatgtatacatgtgccatgttggtgtgctgcacccattaactcgtcatttaacattagatgtatttcctaatgctatccttccccgacccccccaccccacaacaggccccagtgtgtgatgttccgcttcctgtgtccatgtgttctcattgttcaattcccacctatgagtgagaacatgcagtgtttggttttttgtccttgtgatagtttgctgagaatgatggtttccggcttcatccatgtccctaca

SEQ ID NO: 112222 - DNA, 2022 bp, Homo sapiens
taggattgtggctgtctctcttaccatctttagagtgatatttaacattagttcttcttcaaatcatagaaaaaagtcagagacttctttgaatcaaattattttagtcatagtgtcttgagtgttataggggttcagtgggcgtgttgaataaatgaatgaatgattaatctgttatttattgcatttattggcaactccatgtcctaaaacaaaagatgttttttaacctgctaatgttttctgactcaagttctgattattctcccactaattttctgtaatagtcatgaaactacatttgttcctaaagcctctctcagtcatttgagttctagaaagatgaatggttaacaaaattgaaatatttcttttttccaccttaaatatagatctgccgagaaagctatggagtgattgaacagaagaagctgatacctgggggagataatgtaactgtgtgcaaggataacaggttagtcctgaccttggactgttgcagatactgctacttcatatttctgcagttttacatttaagaccaaaataaaaattactttttaatattaataccttcttcagaggaggtaagtaagggtgatagggcaataatttacagattttaaataatttttaaagcagagcaagcacccggcctagattcaggagatgactgttttagttctagagctgcatctttttggctttgactctgagcaagttacgtaaactggtttcagttttctcatctgccaaatggggattataatcactgtgctctctacttcatgggatggttgtgagaatgaaatgagataattcacaggaaaatactttggaatgaatggactcccagcatctagcacagagtttctagtatctaacagagtgcctggcacaaaaatactcaaaaaatatgtgttgaagaaatgaattttataaaggtgcttactatcactgctattttactgctgattgatttgtcatagagtctggatcataacaacaaattcaagtacatttgatttttcaggatgattcataatctctgagttaactctttagaggagagaagatactcaattttgcttacttttatattaaattatgctaatctgcatgaaatcaatttactttacaaacactgagtgcccactgtgtgccagccatagtgctgggtatagagggtgaataacttctatccttagaagctttgggattagttgagaagggtcaatgtatggaataattgcaatagaatccagtgtatgtgatagaagttgtagcccaggtgccacggtactagggtaagaggctacaacacttttatcagacactaaagaatgcaagttggaggaaacattttaggcaccagatgagttgggactctgcagtttgacacatgatagagaatgttgggtacttgtggagtgggtactggtgtacggatgaagggagactatagtagcatcagagtggaggttatcaaggccttgaacggcgcttggagtagaacatgattggtttctattttagaaagattactttgggggtcctgtggaaatagaccgtgtgcagggatacccattaggaggcttttgaggtagctcaggtaaaggatgttaacagccagaatgaaggcagtgggaaacagagttggttatataaccaaataggagctagtgtctgattatatatggatggtatgagagagttatatattgataataatgctgaggtttctaattcaaacactaataggaaacagagtctataaagcaggttcaagggaaagttccattttgaatatattgattttgatatgtctttgtgatacccaggtgattgtgtttagagcagaaaatttatatatctcaataaagaagtcttatatgaatattttttaattagttatgtgagcctcaatcactattaaatttgaggtcgcttacagcaagaatcaacaagaaagaagtggtgaaatgaaaaacaagagcaaggaaaacgtaatttcttagagga

SEQ ID NO: 112223 - DNA, 1116 bp, Homo sapiens
gggccttcttccacgttgcagactgctgacttctcgttgtatcctagcatggtggagagcagcgttgggaagcaagctctcatgactcttataaggacaccagtcccattcatggttactgctgtactctttactatagctgttttggttagggaccaccagaaaaagacatgaatgaatttttttttcttttcattttatgctgcacaaaatagaaatcttaccaacaaagtacattgaggtcctggtaagaaaggctgtatgaagttgtaaaagattgatcattatagtcattatttccttggctatatgccataatgtagtcattagcagtcctaaattatatgactaagaaaatgaaatagctgtaagaagaatacctactggccttttaacttaggcagttgtatacacagatacttctggcattgaggctgtttttgttaacagtaagatatttgctggcattgctgccccaggggaaaatgccagaggaataccaattctgtattcataatttattccatttcatttggttttaaaatgctttctatccttggacagaacctacacagtcaaatgagttgtaggcatccaggtaaaagaacatctgtggctgattactggtggctgcatcatagacaaatcttgccaccagctggtagtcacatctggataatactatatcacatgactactcatggttaagcatttcttatggtctataatatggtgttaattaccattagtgaaaaacccatatgtcattctagattccctaaaatttaccttaatttgatgcaatcaaattaaatgcaattgctgtcttcccattttccccatattaaaaaagaaacagatgacacacacatggggctggggggtggggcagtggggggcagagagtagagtaaagagatcacatagtaagaaatgccaaacttaaggtaagtgcttcaaagggcatctagattccgtagtgagaacctgagaataaaactcatgcatgacaaacacttcttgctccttaagatctacttcaggaccgctggcagacttcagttgatctttcaggatagtttctgagggatgcagtctttaagatctgcattgtat

SEQ ID NO: 112224 - DNA, 1035 bp, Homo sapiens
aggaagcacgaagtttaggttcactgattatttttatatagccaaaaagtatagatctctttttcagtcttggccatgactatatgatagtcttttcatctaaaatatgctcttttaaataaagaaggttccagaataattcactagactctaaggtgtgggaggtcagggattctgggctttgttcacctagtggtgaccccagtcctcagtgtctagcacaagacctgacacatgacacaggcccaataactatctgtagaatgtctccttggtggcattttaattctgaatttatcaggtttaaatgtaaaaaaaaaaaaaaaatgctggcactgatgattcttctgctggcctgtccctgcagtggaaaaatactgacactctgggataatgttcatgtttcagccaagctttgtttgggattttttttgaaggcattgaaccaaatagtaaatgctctagagctcaaatacactgtgaaactttctccttctccaccggaatattcaaaatgtgtagaggcagaagtgaacttcttttatcagagagacactccttctccacaataggcttagaaccctgctctgtgtagccatctggtaggcctcatggagaaggtgtgttttccttcttgaacatttcctcttttacttctgtggatttgggttatgacattgatagacacctttaaggacttccatgcccaaggcccttaagagctcacagctgtgttctagatagacttcaccttgctgccaattgagtattttgtgtgttgtagtatttgttgctctgagttgggaacagattccctcattcagcctggactgggtcagacacgtagaattggcagacccagattcaaaacccagccccactgagattagctctatgactttgggctgcttaggtaacctctcagagccttggtgctttgtctatataatagatatctgttatagattgccaaggagattaaatgatgttacagacacacacacacacacagacgtttatctgtatatacttacc

SEQ ID NO: 112225 - DNA, 1056 bp, Homo sapiens
cgcgcgcgtgctctctaatcccccgccttccggctccggcggcgacgctcgtccctctccgctcgtccctcgccgctgccgggccaccagtgccagcctgcctcaggagactccatttgcgcttagtgtggtctgggcgccgcgcaggcggtcccagggcgatgcccggggccggcggactggcgttccctgtgccaagcggccgcccgctggctggctggctgcagcagtgacatcctggtcgccggcgtccaggcggaatccgggctccctccgcgggaggaaagacgtcccgcgctctgaagctcgcccagcggggagaggccctcgctaacacggcttctccctgacctcttaatttcaggaggtaggctcttcaggtccctctctctgtcaccccagattatgcctgaaagcattatttgtcgtatttagctatcacattgataggaggcgttaattttctcaacatagttgcaggataaatgtggataatgccacagatcctgatgttgaattgaaagaaaatgtttttggtattttcctttaggtttcggagcctccgagtatctctacagcccccacaggaactgcttctgttggtccatcgaggatcgtctttcaccaggattattgtaacatcatcttcaccgagcctgccaccccatagcctctaccttgggtcctcatttccaccgatgcagtttttttgatgctttctttagtaatgtgacatcacatgtccactatcctcctttccagctgccaaatctagtaggtttaagtcgcttttaaagtagagttttctgcctgttccactttcaccttatttgcactgttcacttctgtccgggtcatcttctcttgcgtatgatttccacaagcactcacttgcgcaacctatagcagagtccgtgcctagagagacagcattccatacaatccactgcttgacaaagaccacatagtcagagggtgagttttcccattgtattttcctgtatgtcaagtttgcaagtcctctcttgacttaaactgtttactccctagcacatt

SEQ ID NO: 112226 - DNA, 1089 bp, Homo sapiens
taccagtacagtttctagcctctagtgtgattgcacttcatgaaagaccctgaaccctgaggaggaagaaagatagaagataagagttaattggcgctaggctttgttgtaggaagtttgtaagttttaaaatagcaagtagattcacgtagaccttgtcaggaaattggtcactatccatctaggccctagaagtgagaggaggaatcttacgaactcattttctagttgctttgtattcaaatcttagttgttaattatcttgttctagtaatcacctaaaatattagacacttaaaatgttggggaaacgtaagcgtgtggtgttgacaattaaggacaagcttgacattattaagaaacttgaggaaggcatctctttcaaaaaactttccgtggtgtacggaattggtgaatccacagttcgtgatattaaaaagaacaaagaaaggattataaactatgcaaacagttcagatcctaccagtggagtatccaaacgtaaatctatgaagtcatcaacatacgaggagcttgatagagttatgatagagtggtttaaccaacagaaaacagatgggattccagtgtccggaacgatttgtgcaaaacaagccaagttcttttttgatgctttgggaatggaaggtgattttaatgcatcgtcaggctggctaactcgatttaagcagcgccatggtattccaaaggctgctggtaaaggaacaaaattaaaaggagatgaaactgctgccagagaattttgtggtagctttcaggaatttgttgaaaaagagaatctacaaccagagcaaatttatggtgctgatcaaactggattgttttggaaatgtctaccatcaaggacattaactcttgaaactgaccaaagtacttctgggtgtaggtcaagcagagagagaatcatcattatgtgttgcgcaaatgccacaggtttacacaaacttaatctttgtgttgtggggaaggccaaaaagccccgagcattcaaaggcactgacctttcaaaccttcctgtgacatattacagtcaaaaaggtgcatggatagaacagtctgttttcagac

SEQ ID NO: 112227 - DNA, 1040 bp, Homo sapiens
ttcattgaaaactgaagggttactctaattgaaaaatcacttaccaccccctggtaggctttgtgatgtatgcaggcatttaagatatcttaggtggagttataacaggaaatgagaatggaattgtaatttctttggtccagttctgttagcactttgctaataaaaagatgttggctttattcatagaagaaaatcttaatattggcataataataaaatacctttacagtggataatatagcaataagcaagacacctggaatattttatctaactaaagtaatacgggataagtagaaaaagcaaaagaaatgtcatgggagacagtggttatagtaattaggcccagctatatatagggagcttgtcatttggtttgaggggaatttagagcccacatctgattattttctttcgtgaggattatcatcagtgtcttcagctgagcctctggattctagaatagctttttcagaagacctctcagaatatactttctttggataattcatacatcattattaaaacactttcctcagtttacactgtttcacctacctgatagccttgaggaaatacaaccctgcaagataagtcctgaggctatttggcttcctggagaccaaggattctaaaacttgataagggtaatgacttacatttgaacactgctttgcattttcacattgctttttgctaacacaaacttaaactttgttcagtcatgacactgaactggtttagtctcatgttgtatcattaatcgtaatataaattatgcattctcattccgcatttcattgcaatacaaaaatcttaacctccttgagatattgtaatagttcctctagaaagacacatcatggtaatcttggttaacacttgccccttatgtgtaccctagtttgaaaagcagacatatgtactctcatttgactttgtacaccttaaaggaaatacctacaaattctgattattggttaataattctgactattggttaattttaaaaatgtatatgttttttagaggaacct

SEQ ID NO: 112228 - DNA, 1025 bp, Homo sapiens
cacaaattgacttttttttttttaatatacacactatatatgttaagcaatgatatctacagaattgcaggtctcatgtgccaactggggtctttgtctaattcaagttaaacataagaattcttatttttaaacttgccaaactaaaacttaaaatcaattttgtatacctcatctgcacactttagaaacactagccaagcagaaggagtagggttgttgaaggttaacagattggaatgcaaactccagcttctccactctttatatagttaaccttagcagcattctggacctctctgaacctcagtttacccatatgtgaaagagttgaaaggtaagcagtcacattccaggcattcataaacaccagctattaagcaatcctacagctatacattgagaacccctggtcttcaggcttaccctggagaattcatcacagctcttctctcacagagactgtgcagacccccaggaaacccaggcacctctattgaggtccagggcactgacccatctctgggaatgctggctggggtgtatgcataggtgggcaggcagcattgagttccccggaccctgaggactgtagctgtcagtcactacaggggtccatctgtaaaaaagttgagttacagataaacttgtaacttctagtttcttctaagaccaacaaaaatgatacctgattcctgcatttcagaatatcttgatcttctggaacttacttacaaagaaagtcacctttgagtgtaaaaaaagataaactcaaggcagttttactcatctgttgaagacttgacctgaactcaagtgatcctcccacctcagactcccacataactgggactacaggagtatgccaccatgcccggctaattttttttttctttctttcttttttttttttttgtgaaccagagtctcactctgttgcccaggctggagtgcagtggcgcgttctcagctcactgcaacctctgcctcctgggttcaagcggttctcctgcctcagcctcctg

SEQ ID NO: 112229 - DNA, 1069 bp, Homo sapiens
ctctggaaggagacccaatcttaggaggatcgacaggagattcacaggcatatcagtggcttggtgcatgtcaattcaaattgcagattccttggtaccctttacatctaagcggagctttttgaacttaaaatccctcttaaaaccctgcctcatctcctcttctcattaagaaacactgatgcacacaaatgagcagtaagggcacactggcttcatccctgtttcttccctctttctaatggcaccatcaaaggcaaaatggattgaaataaataaaggttgtattttattgtattgcctcaggcaactaagtcagatgcgtatctgtagaaatgatgtattttctgattctgctatgcatttgcttcaatcttcctatcaaaagtaaggcttatctttgtaacaacagaattcttgcaatatagctaatgtggtgtgatcctcagtgatttactgagtagaagtttgtcttactagacaagttacttggcctgaaggcaaatatgttaccgtgttatctgctcatgctgaaaagcaaatataaaatgatgtctgtgcatatgaaagagaataaaaacaggttttgatatggcaactgctttatcaagtattctgtgccacctgccttttttgcattttttgatgcagaaatctgagttactattggcttccggtgacattaatagaatgtaagcatttgataacttaatcacgtttgctttaagcacatttggagtaaggggttctttctatttagattttactaacacttttgcaaaccgtggtccccagtatgcaacaaacttaccaggaagcatggtgagatcacatcaccagtaaatggcagcatgtgagaccctttctttgtttacatattttcttgtttcttacactgtttttcatgagtccttaagtccttatataaattttgattttggcaatccatatagggattaaaggatctgactaaatgtcagcctataatgggtgctgaaatattgatgcattaaaattcccctggaaatataatgaaatggagaaaattatactcattagagttcttctc

SEQ ID NO: 112230 - DNA, 1118 bp, Homo sapiens
caggatgattatggtggttatgatacttgtcatgctgaacacccaattgagcacccaataagcacataataatttaatcatcctctggcttggatggcagtgttctatcagtgttgacttcctggttgtgacagttttacagtgttagtgtagaagagaatccttgctttagagaggtacttactgaagtacttagggttaatgcaccattgtgctggaaaaagatacgcacacacacgcacacacacacacacacacactctcacacacacgcacaaatacatccatgtgttaggcagagggagcaaatgaggtaaaatgttaacaattaggaattctgggtgaagtggatagagggactctttgactgttcttgaaacttctctatacatttgatctgtttcaaattcttcagaaaatcaaactacaaaaacttaattcatttagtgaacatctactgaacatctgtatattaaatagtgttaaatgaatgtcaattaaaatgctcaaacacagtagaggttgattctcattcacataagtccatggtaggtgtttttggcaggtgggtgagtttctcccttagggagattgaggaacccagactcctcccaagttgcagccccaccgtcttctgaggggatgcatccatacccacttcgaagtagcatacattatttcctttctcattcctttggataccagccacaatttattcaaggtagacagaaaattgtagtatatagccatatgccctgacaaagaagggagaacagattttggtggacaactagcaaactctgatacaatctgttattaagcactgtgtgtggatagatgctaactagaaggagattatcttcccttcagcaaatataaactgaatgccgtttatttggttgaaactaagctagatcatgggagtatagaaattttataagaagacatagtcacttctgtcagtgagctcaagaagaattagtatgcggaatgtaatcatacctacagggggcttgtgccacttaagtaaaatgaaacattattttgagtacaatttagcaataaatgtactacgagatcattaaaaatcatgtttgaatgttattgtgtcaaggatg

SEQ ID NO: 112231 - DNA, 1099 bp, Homo sapiens
tttttctatttggctattgggaatcctcacaaaaatcgaaaattgccctttcagtgtacgttacggtatttcatgccacacagattttctgaggttgtacatacagctttgccttgaggttccaatttttgctcagtggattgagtatatattatttgctatatatcagaagaggcatgtgcttcctacttatgtcaggtaactttgggattaatataattgtcctacaaagcatagatagatagaaatacttcatccttaatttctaatattatgacatatctaaagtaggcacctttaaaagttaatctccactaaatactaatgactgcttatagtggcaattcatctttcatggtagtcctcctacaaaggtatactaacatttatgagtttgaaacaaaggcaattcacaagtgttctgctagagatggtctatatctgctgtttgatccagcatgatggccagctggccctcctgtgcatgacggctcgtggtttaactgcaccattttgtttggtcatatacagggaaaacatggcatggtgtggagggcatgggcttgaattcagggaacagagagttggtcttctctctctcactctactggatgatgtcatctcccctctctaagcatgagttttcttatctgtgaaataaaaatgttgaattaaatgagttcaaaatgctttcagtctgtgtttaatagcttgaatcttaagacaatgtattcaattatgcgttgccagatccctggcaactcatgtaacctttctaaaccatagctactcatctgtaactggccagccaactgcccagggttggagtgtgaatgaaataagataatgcagacaaaagatttttaaaaattgtagtgcattatacagttgtaatattttgccaagaacttacattttctctaagaagtgtgtcgatacatgatcacagaaaatcttttccatattcctttgtagtttgatgatattaagtaagtaaattgtataacacaaagagggaaaagcatcactgaacatgccgttttatttagctaaataaaatgtaatcactattagttttcctctgatttccccaaagtca

SEQ ID NO: 112232 - DNA, 1046 bp, Homo sapiens
agttccacatgaagtttttgtttatctcaaggtaaaattttagtttatagaaaagttttagagagaaactattgggaacattggtggaatactaaaaagatcattattattttttaatggtggaaagcataatctaaatttcttgttgataattcagtaggacagggtatttggagaacggggtatatttcatcacttaaaagacaagataatcacagaaagcagccatcagttttagcctttctcatgaacaaagacagaaaatgagtaaacattaatgtgttggaactaccaatgaaaagaaacttaggcagtataagataaacttattagatttatgacatatgcaactccatttttaaagcagagaaattccacattaaaacaaaattcttataattttctgttgcttccctccaagccacttcattctccctagtgtaaaaaggtcagtcttagaatagcttatgtatttttgcttccaaatgcaacagaaacttgtagacagaatatatggctccctatatagtagtatttgagaaaccaaataccataaaaaggctatcttttgcagacataatccccttaatgtttgtgtgtggagttattccttttggataatacgtactctgttaaaataaaatgttataccagtctcttatcagacaccagcatattagctggattaattacctaagaagggtcagagtggtgagggccagggcatagcattggtgtattttgacagggaagttaaaaaaagtcactggcctctgacttagaattaaatgaaatacagcaacccaataatgaattctgagtatccagggaacaataatactctaaagcaaactcagagatcacaaaggggcatgacaggaatacacccaacggtacacaggcactggaagaaccttgtactacatttatactttagtcttaggtgtgcccaaaagtataacatacagttctttgatacaagtcccagaaacctacttttgctcacttcatgaaaaaaagaaaaaaaactggttattggaaggata

SEQ ID NO: 112233 - DNA, 1059 bp, Homo sapiens
tccccagtaatccttagttaacttcatcctctccattctcaaccataagcttatatctttcaacattatattcgcagtatctggcacaagataggcactcagaaggtatttgttgaaattcgtatgaatgattaactaatcaatgaatctgtgctataaaacagacaaattaaaaatgcctctaagtgccgggagcggtggctcatgcctgtaatcccagcactttgggaggttgaggcgggtggatcacctgagggtcaagagttcgagaccagcccagccaacatggtgaaaccccatctctactaaaaatacaaaaatcagccaggcgtggtggtgggcgcctgtaatcccagctacttggggggctgaggcaggagaatcgcttgaacctgggagacagaggttgctgtaagctgaggtagtgccattgtactccagcctgggctacagagtgactccatctcaaaaaaaaaaaaaaaaaaaaaagcctgtaagcgtaacttattggactttaagacctcacacttagtacttcctattttcctccttgacttagttttcttctgatcatcaattattaatcatggataatttgaaaactgtgctttcatgaatactagaaaactgtgctttcatgtcagaatgtacaggttcaaatgaatatgccatcacttatctccatctatatacttaactgtgtgactttgaaaaatgtatttaactttctcagtttcagttttattatctgtacaatatagatattaatatctattgtatatagccagcaggattgttgtattaactactttaaacacattaaagtgtgtttaaaaccaccaagaattttcagcgtattgtacatgtgttatgaggcaatataacatcatattgaaatagctagaaattaaagccaaacagtccaactattgctgaagagttctgggagattaggtaaaatgtttacacatctaaagcattaatgtctcaatgcttaatcacaaaatacaagttcctaactcagggcaattttaagggctagatttgataatatgttca

SEQ ID NO: 112234 - DNA, 1007 bp, Homo sapiens
tgtagtacaggtcatgggattgggttaactgtaaaaagccttgttcttaagtccctaggtgatacctgacacactcaagcactaactttgtaggcttgagtacagaagataagtgaaaagtcacacagtggttcctttgcatttggcccagcagccaagtttaaaaggacaaacaggctgtactgcatagaaggtgaaatgcttaaatgtcagagcagcattgttaggagctatctatatgcatagcaactatcatgtgttccaaaaaaaaaaaaaaacagagagtacatttcatgaagggaaataagaataaaagactgtatcctgctttaccattcccaaaagacccaggaaaatcttttaacaatttaaatgttgttgactttattgacctatgtattgtgttcctctcaaaaccaagggaaaatatacaaagtgtttacatatttatcctctaggggcacaacaggaaagccaatcaacgttagtcttcactttcttcattttcaaaagtagcatctagcgtctaacaaatttccatgtgctcccacatacaggcttttatgaaaggctggtaaaggatttattttctttaaaaagacgtgatgtcacataaaattgttggctatttttttctttctggccaggtaattttactctttggttttttcttccatcttttaaaagtatatttcctttacaaataaaataatttagctggaattatttgtaaagtaaattggttatttattatacaatgatgaataattatatttttttctcaataaattgagcatctttggatgagatcaagaagctgctctagctcaagtggaagtaacagggagaagttttaaatgactgacggctgaaattgtcataagagaaaggagataaagaataccaacactcacctgcttcaatcaagtgactgggcaccaccacacaatcttaggtatccctcagagccagttccacaatactctcccgctttataaagttctttg

SEQ ID NO: 112235 - DNA, 1079 bp, Homo sapiens
gagactctgtctcaaaaaaaaaaaaaaagaatatgctttgaaagcaaacaagaacctccttaatcttacatgtgatttaatttgctttaatgtgctttgtctaggtaaagcaaatttttccatgaaagaaagcttggacagaaaatacgcttggtaaatcagtcttctaaaagctgctggaggtaaggaaaaaaattagtaatgtaatgctgttgctaaactgcccatctaattaattctgggtaatatattaacaataattttttgatttttttggcagaaaatttgccttttttcactactcttatctcaatttacttcaagaagattcctttagttggctaggcaagaaaatgttccttgcctctcttacataacttagtgtctccacttaaataaaatgccttaaggaaaaagcaattgcaaaggaggtaggaagaaaggcaagaacaaggctaaaagaacttggttttaacaggcatatacatgagaacctttatagactaagaacttctggagggtggggtgggtcatcctgggattaatgatgaaaggaatctgtcacctttgagcatgagtactttttacctatggctccgcaacaaagaggctattgtacttcaaagcagaagctccaaacaatgacaaagaaaccaggcaaagggggccagaggggttgttgcttaccgaacatttcggtagcattttcaaaataattggcttaactacactatcaaactaagttataatttcaagggcaccacaattaacagggatttatgttaaagttctgttaagtagttctttgttctttctttctttcttgtaaacagatctctaagggacgtacccagggcctgcaatattatgggtcaatacttcatgaaacagaaggtactcttgatgcaaggatggtaagggatgtttggaatcagaaacatatagtcactctgagtatgataggagagatgaagatatgatatgaagaactaaataaaaataaattctaagaatattaagttcacactttatatactgctccagttaaaggcaatttagtgagttgttaaaagccaggc

SEQ ID NO: 112236 - DNA, 1460 bp, Homo sapiens
tccgccgctccccttctttggcccctttgtgtccccgcagtgtcgaggcgcgggccctggcaggtcctttctcgaggcagggggcacggtagcacagggagcttctctttgtgggcgggcgcgaggcccgctagggggttatactggggaacgtgcctgcgcgtgcttgggtaagaggaggttgcatgagggtcagctcgtggtttcagtaaggaggggcgggcgggggaggcggacgaaggggagtgaaaagcaatggaaaattttaaaagatacccccgtccaccttctaattgttgcggcctaacaatgaagcgcagccataacagtcctgagccactggcatgtttgcgggccctttattgccttgggaataaactgctgtggcattgtatcgtatattgttttcatggccttttttcctctctttatttttcccctgcagatagttcatttaaagcccccatccctgcaaggtggtgctttctaccaatatgaatcttttcaacctggaccgttttcgctttgagaaaaggaataagattgaggaagcgcccgaagcaacccctcaaccttcccagcctggcccttcttcaccaatttctcttagtgctgaagaggagaatgctgaaggggaagttagcagggcaaacactcctgattcagatataactgaaaaaacaggtgagttacaatgttaaaattgatgtaacatcaaggacagtttttaaaagatgaaaggcagaagggattctcatttttattcttgatgtcatatatattgatgcattgtcctgcggtgtgcccttttaaatacagctttgggactgccataagcaccatgtaccctcaactgagcatccatccattgtcgcctcacttttatatgagttcttcgaatatggccccatggtggaagttgaaattagaatttagggcatccataggtcagaacggttgctattggaagagcgatgtcagtgattcagtcctatgataaactttgaggctatttgggcagacattttcattcattccagtattccctcaaaatattgatcatctactgtgagctagacattgagcaaggtgcctaaagacaacctctgtacacaagggaagatcagatcacatcaagttcttgcatccacctgacttcctggatgtcctcagaatgcaaatgagtaattggtattcttcatggtgaatgaacatttttaacctcatcagcagattgtcagagacaaaagtatttgaggataagccaaaaattaagatttccactcgaatctatgttcattgaacagttaactattagaggaatatatttgagctcttgttgtattataggaatagtgataagtgcttcaccttctgtcatttaatttgcacaataatcctacaaggtagatattactgacatagaggttaatgtgaaatgagattcagagaggttatta

SEQ ID NO: 112237 - DNA, 2771 bp, Homo sapiens
gttattttgcagtttccactaaagtcttgttagtaaacaacctgtgaaacagaaaatgtaacaccagccctggttgatgattaatttttttctttaaaaagtggtgagaattttgatttttagattggaaacaatgaatgaaatttgagattttagcacatgattataactaacaacagattcgttttccagttgctcaaaatatttttctcctttttattctcttgcagaagattctagtgttccagaaactccagataatgaaagaaaagcaagtatatcatatttcaaaaatcaaagaggaatacagtatattgatttgtcttctgatagtgaagatgtcgtttccccaaattgctccaatacagttcaagagaaaacattcaacaaagatacagtgattatagtgtaagctgattaatagatatattgtatttgcatgtgtgtgagattttccaagaaaaaaacctacctaatttgagatattttggtgacttccctttttttttttttcttttttttttttgccccacctgcctttcttggccacatcttggttattttctctaacttatagtcatggagaggtacaatgtgtgtgttttctggataacagtgatttttttttttttttttttttgataacagtgattttgagagcagatacttaatttccttattatggaagtttaaaagaattgtttagtacctttgatcgtgtataactgctttatgatttattctaaagtccatgaatcaagtcattttaacatgtttattggaaacagtctgagctaggcactgttttatgattagaaatacaacagtgaacaaaccatccccagctttctttctgccctcacacagcttatattctagtcaggtagaaaagtaataaaagatgtagtgtgtcaaaagataagtgttatgggcaaagggaagaggaatagggagttagggtcagggaatcgtttctttttttttttcttgttttttctagaggtggggtcttgctatgttgtccaggctgctctcagactcctggcctcaagcagtcctgccatctcagcctcccaaagtgctgggattacaggcgttagacaccacacctggctcgagggtcagggaatggtttctaaagagcgtggtcagaaaagcctcaattgagaagacagtgcttaattgagaagacagtgctggagcaaagacataaagggggtgagaaagtgaaccatgtagatgtgggggaaagagtattccaggcattgggaatatcatgttcagtgactatattatgcctggtgtttttgaggaaagtgggagggacatgatgcggagtgaaggatctgaagccatagtgtaaaggatgagatgaaggaggggcttcatcacattagttccataggctgtttggtttttattctgactgagatgggaattcctaggagaatattgaacagagaggtaaaattatctgagttagatgtttaaaaggtcttaatgactgtgagggagcagtagtaaaagcataaatattgttgtaataacccatcaaaaaatgatggagacttagatgaggctagtgcctgtgggagggataataagtggttagattctggaatatactttgaagatggagcaagagaggatttgttgctggatttcatgtgggttgggagataaaggagtcaaggatcaccctaagatttttggcctgagcaaactggaaggatggagttactaggtactgagataaaggtgactgtttctgctgtgggtgggcaaacaccttttgaaggaaagtcagcaattcattcttgaacatgctatgattgagaacactcctagacgtctaaatggagatgtcaagtaggtataattagatttgggacatttgagttctggggagagattacatgtctgaatttactaggtgacagagtattggtttgctatttaaagccatatgatcagatgaaatcagtgtaagggacactagtatagtatagctgaagaagggaagtcctcttggttgaaatactgaggctaggggaactctggatttttagaatcagggagatgagaagaaacctgtagaaggttctgaggaggagcagctattgaggtaaaaggctacatggtcttctagaagttaagtgaagataaagtgttgtaagaaagagcaagagatcggactgtctacttctgataagatgaggacttcatcttaaaatgaacttttcacatgaagctgtgataaacatgcctaattctgaaatgtactccaagataaaatgtagtgaagatcctgcatggttaatcctgaggaaaattgtcatattttggaaaaattgtagaaaagttgcaaaaaaaaatgcattatcaactctcacagtcttttcagaattacccttgttagcattttcccacaattgcattatcactcttcgtaaacagcaattacaataactactgaacactttgcctgcagtattttctcatttatctcctaaaaacaaggtcattcattcatttgcatattaacagtaatatttcaaacccagaaataccaattaacactagtacagtactattatctaatatacttttcatatttcaattttgccagttataccagtaatgtcctttagagcattgctactcaaaatactgatttataaataaggaatatgtcttagaatgcaaatcagggtactgattccttcaccaagaatatcttgcagtgaaaaaaaaaaaacagctgaactaag

SEQ ID NO: 112238 - DNA, 3672 bp, Homo sapiens
ttctgttatttatataggctaaatttcaaactaggatgttcaagcaaagtgtatgcacattttaaattttaatatgtatttccatgtccttttgttaaaggttatgccagtttatgcttttatcaacagtatgtttctgaatgctcatttttctaagtggattcttactactattaattttttcgaggtttaaaatatgtacaaaaatacaaaacgatgtgttcccatggacccatcattctccaataattatccacctcatttttcttccactaagtggcctgtattcaagtagattctacataagatttttattttatccatatgaaatattttaaacctttaatttcctccagtttgagcaaggagacagtattttgtgggtgctacctacagtgtatcaagattcttttttgtcttctatttattaatagctgtgtgaccttgagcagtgttgcttgactcttctgtctttgtttccttagcagtaaagtagtataatagtgccaaactcaaaggtcgttgtgaagaactaataatgtatactacttcttatggtgcctggtacatagtgagtgcataccaaatgttagcaactatttgtttaagggtcatctgatgatttaaaaaaaaagttagaggtgaatgttagctgtgtcttcctcattatttcgtccctagcacttactttaaaagcttctgagctaggattgtgccactgcactgcagcctgagtgacagagcaagaccctgtctcaaaagaaagaaagaaagaaagaaagaaaaaacctcctgaaaaatgatacgctcagtgaacatttgttgagctgcaaaatagcttgggaagttttgtagcttcccaatacattcttgctctcacattatctcattagtccataaacatttcattaaaaacaggttgtggaattactttattccacggtggtatctaatcttttttctcttgagcaattcatcttattcaacttattcattaatttcacaaatatttattatgctgcttttactaggtagcacaggctgtggcttaggtactgaggttacatgaggaaacagtggatacaacctctgccgtcataagagtttacaatcattaaatttatttaacttcagctgagctttttcttattccattgtacttcagattatttcaattaaaaaaatgttaaatggcaaattacaaggaaataaaaaattaggattttctggttttttaattaaacttccatgctgcatcatggaacggacagaacagtcttatcagacatcttcatttttagtgtagtgcactttgaggtagtatatagaatgacaggtttgtctaaccttgaagataaggttaatcttcagtatactatgttattgagacaggaaactatacttgccattttaggacagttttcaacaaaagacctttttaaatacctgtaagtgatctttaacagatccagaaattgtgacagttcccattgtttcttttaaccacaaattgcagtcttaacagacagtatcatcctgcgtattaaacactagggatgtttttatgctgtttgttttgaaagtttgtttttgaatatgaaattacagaaacaaaaaaatgtatatccaaagtttttactctacttcagaagataagagtacgaatttattgatgttgtccggagtctctctagctgccctgttgtgtttttttttttttttaattttttattttgagacagggcctcactctgtcacctaggctggagtgcagtggtgcggtctcagctcactacgacctctgcctcccaggctcaagtgatcctcacgcctcagccttccaagtagctgggactacaggcatgcaccaccacgcctagctaatttttgtagtttgagtagagatggggtttcaccatattgccaaggctgatctcgaactcctgagccccagagatctgcccacctcagcctcccaaagtgctgggattacaggcatgagctgtgcacctggcttctgttctgttctttttaggaaagaattcagcatgtctaggtgatgtggcaagattatctggtttgaaggtttttttcagacttaaaatattacatttagaatattgtggttagtgtttgtagtgacacaaatactctgctttaaaatgttaataacattccatttttattttgtaatagccatgttaatgaaatttttaagctgacatgtatgtatgtatttgagctgcatagttagggctctgatataattaatgctgaaatcttaaacctttgtagtctttagcaggtgctttcatagtagcacagcaatatgtctgacaaacttgttctctgaaagcaaaagtatttaagaagtaggtaaatatatacataatgtatacaagcatacataagtagcatatgtagctctagtttgttttcttccagtcacgacaatatgcagatttcctgttactgctgtactctatgttatattctcttgtttttacattaaaagcatttgttgcttaagctctctgtatctctatcctcctcatttgtgaaataaaaatgttacctactttgtaggtttgtgtgtgaaaagtaaatgaaacaatagtttataaaagaccttgtgcaaggcctggtacatagtagactcagaaattgctggtttctgtgatggtattcagataacttacacttggtgggggtcagctttatttcactgctcaacactcagccacttggaagaatccctccctcctaatgttgctctgtagaattactcatcaatttagagatgtatatttttagattaaataatgtgatggtttatgaatatagtattacagtgatttctacttctgaaagactgcaaagaatgtttactttttttttcaattcagtcatatgtagaacaacaaacactgggcctgatatcaagagaactgtctagtattcattataatacatttttgcctttgttttacattaaattgattttttgctatttctgtgcaaagtttgagtgtgctgctctgctttaaaaggtggtgggcccaggaaaagaaaattatcttcttcttcagagccatatgaggaagatgaatttaatgatgatcaatctataaaaaagacaagactggatcatgtaagtttacatttgaattacagtatcaaaattggctgcttaaggttaggatatgtggagtttgtggatattattagacctgaaaatccacctaaatgaattcctttctatcacaactaagggaatttacgtctacatttaatttgtgactgtttttgctttttaatttatccagtatgaagcctgcttaagcacagactattttgtgtctgtggatatcagacctgaaaatttgtctaaatgaatcattctttcttttctttcacagctaagccagataatttgtgcttgcatataatttgtgactgtttttgctttcttttaaatttatccagtattaattgcttatctctgccctcttcattacattgggttctctgaactgtgtgcgtgttcatctccaaatttcccctttttataaggacaacagtcagattaggtcccactctaatgacctcattttaacttgagtgtctcactgatgaccctgtctccaataaggtcacattctgaggtactgg

SEQ ID NO: 112239 - DNA, 1369 bp, Homo sapiens
tcccaatgtccagtctaaagaggcagataggtgcggcctttcttttttcttaagagtggagtttgcaacatgctccagactacactcccacgaaagtggtgggcctcagagtgaggatggttattccttcaccctgatatgtggcatgtacgtatctgaccagtaccattgaaaatacccactacctgtatcaagtccagtcaacatgatgtcagtatagtggatcaagtgatactctctagactgtgcaaaaccatctaagtccatgagtactgtattatttgagagagccaggaaagttactctaactctgaagactgaaggtatatcattaaacctgccaagataaaaacggattgtttctgtttgatctaattgggaaaggggaaaaagcaagtacttgattgataactgcatagccatattgatttgctccagcaaaaataccacatcctgtaaagcagctgcagctggagtttgattgtttatgatactcttaaatacttgcaagactcatctactttttgtataggtcaaggaggcatcttacattgggatgggatggtggtgtcaatatctgcagttcctttaggactgtagtaattgcttattgttttgattgagagggacaattctagggacttggatttggtgtttcctataatagtagcccatacatcatgggtcagggaactgatatagtatgggatttctgccagtgccaaatatgtctgttccaactatgattctggagatggaaaaataagcactgggtcgaatcatatcccttgggcccgctgagacagatacagtcccaaattttatcagctagcttttgtaaagtgtctgtgtaacctcctggaccacatgagtatattcagtcaccagggataagcagagctggcataagtgtgggacccaagagcaaacaacacatgataggcacaccatctactaaatatttgattccgaagagctgtttactgttttccagatattttatgtatttttttattgaggtgaaattcacatagcataaaattaaccattttagagtgaactatttaatgctatttagtacattcacagtgttgtataccatcattcctgtctagttccaaacgctgtcatcacctcgtaatagcatgctatacccattaagcagtttctccccattccctcctccccctaacccctggcaaccgccaatctgccttcagtctctggatttacctattctgaacatttcatttaggtggaattatataatatgtaaccttttatgtctagcctcttattttttaatttcagaaaaatgtgttttatttgttttttcttttttcaactttatgttagaattggggtacat

SEQ ID NO: 112240 - DNA, 3074 bp, Homo sapiens
atcagtacttcattcttttttatgacttagtgatattccattttatgtgtttaccacaatttgtccatgacgcacatttgatatattaacaaatgaacaactgaagtttagttttcacttatgtagtgaaaaagcagtggtctagagttagatacttggatctgttccctcctcagctggttgttgtccatctgtgagctttaaaatactgttcttggaatttcagtgtgcctgggctgtaaaggtggcagtatgaattttgaagattttgaaatggtttctccagatgggtttcaccagtatgtcttattattcccctgctcaaaatcctgttgcttcttaaaaaagactaaccttaggctttattccatgttagctctggtttaattcttcatccttgtaacctattaacattctctgcatttgagcccaagtagaccacttagtattatgaaacacatgcaattttcttctttagtccagatatccatagcattttattggtctctgttttatgaaattttattttactccattgtgcagaggaggtatcagaatttagttatttctatctaaggtactgaaagagaaaaatagcaattcagttgttggataataaaggaggttgaagaagaagattgtatttttctccatcttgtgtgtatagcatgtggtgcagttctaagcagagtagaaaaatgctttttgattgactaaaatttttcctatgcatgaacacaaggagtcttttctttttgcttaaatgtggactttaaccagtttcttcaagtgaagttaagtgacagagaagaaggaaaagtgagactatgtatagccacaattctcatattaattaatctgttcggtttatacattatttagttccacttaaattccttttatcattgtttcagttttatgttgtgactgaacaattaatatttaagccattctgtgaatcaagagtgaagtaaaagtaaactcttctcagaatttgaaatttataggtggatatataatagtgaacatagatgagatatttgtatccttttaaaatttaccgttgtcttggagaaggcatcagtatacttgaattatattgagttaatttgaggatcattctagttttttaggagatttatctcattttaagcactgagaataaagtttgagttaccggatatgcaatcagggtctttcagtgatcttaagtcagcaatatttttcatccttaaagacataaatatgtcaatgttcacagaaacaaaaagaaacagtttggattcttctgactgatgatgataattttcagatcaagtcaaaatacaatgataattgccttaagaccattgttattgatatctcttaaattgttttcttttttttttctccccattagggagaggaatcaaatgagtctgcagaatctagcagtaattgggaaaagcaggaaagtattgtactgaaattgcaaaaggaatttcccaattttgataaacaggtgagtagtcgtgtatgaaaatttaatcagtgtgtactaagtgtttttattataaaatagtgttaagagttcaaccacataaaagcttagggtgagttttgtattcttctaattaaatgttctccttttatcaatgttataaagtattttcatactgtttatttatgttgtttatttaccttgtttactatagtatctatactgtatccctaagtcattaaaaaataaccgtaataaaaattgtgaactcatttataacatgtaagtcatctagaaagtcatctgtaaccctgcccccatcaagtaactgcttagtttttttcatgttctcattcttgaaatttcttacaagaatttaaaaagtattccatttcagtgtcttaatattttataagctttctactacttcccagatagtgagaatgttttcagagtcattaaaaaaaaagactcatgccacgcatcctgttgctaaaaggccctctgtttaatcccatgatcatatatagaagcacatatttgtttagcatttagagtacatttacacttgcactgatttatttgagtatatatgttcagatagtacatctactaaattctgatgagctgaatgcaaaatcttgttgcaatattggttctttacctttgttgaaactacgttttgaagttagcagtttgtaaaagcctagctgcatattgaaatttcatttttaattgagaaaacatttcttgatcctctagtgttcacagtacttcatagtgagcattagaaatgcaaaaaaatgtcaagttttctttcctttgaagactattgtgtatttgtggaggtgaaattacacagaaagcatttgtaaagcagtgtaaaaacaagtgcaaaataatcagatgtgaattctctgttttcaggtgattaacttatttttaaaagagcatagacgttttctgcaagttgctaatttgagatttttaacaaaaagataaatgacttatttctaggaacttagagaagtactcaaggaacatgaatggatgtacacagaagctttagaatctctaaaagtgtttgcagaagaccaaggtaattattctgggtcatagaaaatacatacttctcattatagtctgtattttagtatataagaaaatggtatataagaaaagctattagctgttaatcagagggtgggattgcaaaagatgttgaaagtaatgatgtaaaaacattctttaacaaccagtttttaaatgttttgacctgcctgttctttatcatagtgtaaaacaaaacaataaatatctttttctatttgttcagtctttcttaatagttaaggctacttttaaattgccatgttttattgagtgtaaaataacctttttaacaactgtcaggatggatcttgtgattggtgatatcatgtcattactgtaatgtagatgtcttagcctatacttgcacagatatcaaaagcactagcatcaaaaacttaagggtatcataggcatgaacacattttggaacactcttaattctaggaaccaaatgatagaggagaggtggtaaggaagagtt

SEQ ID NO: 112241 - DNA, 2652 bp, Homo sapiens
cgtgagccaccatgcccagcctatttgaataattttttaagtaacgatgcaacttagaatattgaagatagtattggaaaattatggatagttgaaacatacacactttttattagtaagctttatagtagtgtaagcatcattctgctatattcttcagtgttggcatagttgagtggggctgctaggaatatctgagacatcatacagatacgcagctgccatttgtgttctcaggacctttgttagaaaacagagatttatatttaattcattttaaaaacaagttatcacctgcttttgaaacaattgtttaacttcaaattctacttaagtatttttaaagtgtatcaaatttaacaataaattgtcgttgaattcttctgtattcaataggaataggtaaatgttttaagtttttatttgaagtctatctttatatttatgtatttctaatttagttactgtttttgtcttttatatacagatatgcaatatgtatcacaaagtgaggttccaaatggaaaagaagtttcttcaagaagtcaaaattaccctaaaaatgcaactaaaacaaaactaaaacagaaattttcaatgaaagcacaaaatggctttaacaagaaacgtaaaaaaaatgtttttaatccaaagagagttgttgaagactctgaatatgattcaggttctgatgtcggtagttcactagatgaggactatagtagtggtgaagaagtgatggaggatggctataaaggtaaaattcttcacttccttcaagatgcttcaattggtgaacttactttgattcctcagtgttctcagaaaaaggctcagaagataacagaactccggccctttaatagttgggaggctctggtaaggctttattctttttttccccttgtatgtgtgtgtgtatttaattcacagtaccggttatagtcaagttgtcttcagcccaggtaagcatagatgggtggccttatcctgtgtaaagtcaaacattactttcattgtaagccaatagtatttcaaatagtgtcatatgacctaattttgaatgaattaaggggtgattttcctgaaaaaacccaagctgattggctgggaatactgtcactcattcctttgcatagaaacttcgttcatttcactgcagaagaagaaattagagcttacatttaggaaggagttgtttgctagcctgttctgatctgttactgctgagacaccatgcagaaagcaagaatgtggcagaaattttactacaactacttgaagagcaatagcaacggccaggggagctccatgattcaaaatgccagcctaagtgttttatgcttcaccacaaaagaagcaattgtttattttctttttttcttctaaaagtaacagctcagtctctaacatgtttttgttggttaagcaacgtggccattttatggagtgtagcaggctgcagcgtttttaattggaaagatagaaaaatttctggaagcctataattcaagcgttaggtgaagggaaggcataagcactggtaagtacactttgcatgatcattttctggaatttgactttctataaacaggttgtatacagaatacctgcattttgagttttatgaatgccaacagtcatcaaatcttattcatacagataaatataagaactcttaaattttgcttcaacccttacgtgggcttttatagcaggaattgtatataggcctgttgtaaaagcaatatggatgattttttacagctttaaaagatgcagcgactcttgatgctttataaaattttttaggaagttttattccctaagttagggagcaaagttgcttttgtggttaattttatacttgaaacaaatctaaatgagcattaaatgccctgataagtgtcttgaagtggcaataggggagagtccctgaacaatggttgtaaatacatttttttaattaaaatatttgaaaaatacagaaacaacattaataatattccatagctttaaaaaataataataaaaccatttgttttgcctgaagcctttgcttttccagagaacatctgtcaaagcaggccctttcaaaacttgtttggctttgcctgagtgatttatttgttaaagtatttgctgaagggctttcttgttcttcttttcttccttttcttctttcttttaatctttaatggtctcttatgttgttgcagagttgggttgctcaggcttgttgagattctaatttatttaataagatatgcaattatctgcactagtttgtttagttgctgtaaatacttgcccgaatatcttatagtaaaagtaaattatacaattttaccagaggtatatgtgccagatgtttttaaaaaatattcagcaacttaacatgtggaaagcatatttcccctactaattaatcagcagagtttaaattagtcttgacatgaatttggagattatgcattacttacttaaacctcctaacatcttgcccctttctaaaagttgaacataaagactatattgtttgttctaaccatccatccaaatgtgaaatattttatgtaacagtctaaatgtatctgaaaagtaaactttctacttgagttcagtgaagacagcaaagtaggtgaatgagct

SEQ ID NO: 112242 - DNA, 1026 bp, Homo sapiens
cacctggccaatttttatatttttagtagagatggagtttcaccatgttggccaggctgggctggaactgctgacctcaggtgatccacctgttgcggcctctccaagtgccggggttacaggcgtgagccactgcatctggtcctttgctttgtttaactggtgatttctgtaaaatacctggcctaaattggccacttaaagcatggtaatacatatttcttccttctgaataaggtggcaccagtgaatttatttgtaagattactatatattcaggctttgttttaatttgtgtaagtttgataagtttgtattaaaaaaatctgcaagtacattttgagtactttgtaggctgctgccaggtatttataataatgaataagcttgggattctgtcctcagggctgtcttttggtaagtggggatttaatgatttgaaaattaaatctgcttttaaacagtttcctccttcctatggaaattcaaaaatatctgtacagtaagagtgacacactgtggcaagagagtgatacttcagatgctgactgtttttgaaagaaaaaagtcctttgagtagtcacttgagtttttaatgaagagatatgattggggccatattgatgagtttttttcatgtaattattcaggaagtagcaattagctttttaactttcttcctcctgaaaaaaagatttatcattttttgagaatgatttgttttacctaaaattgaaacagcatgtgcagaaatgaaaaagtaaagtttaccccaaattctaccaaagatacccaccatttaaggtgttttgagcatcatctatttatgtatacatttgtatacttcataccatgtaagcaggatcatcttttctgtggttttcagtaacttcagatttactaatagatcccacatttacagggtactttgtatttcttaaatcttttttgggggaaagttaagtaacttacaggattaagtgatttttgtgttcagaaaacagtaacatggtggcagtagagtgt

SEQ ID NO: 112243 - DNA, 1801 bp, Homo sapiens
tttctccagcttacatctcttccctaagatacagatctttatttaactaaccactggctctttctcgaaaatttggtagctgccccaaatttaatatatccagaaacagacttcctttgccatcttggtaaattttaatctcaatagatggtaccactaatctgttagcattgaagccagaagtctgggagtcaggcttaactcttcattcatctccccacacttaatgggttctacctcctgaagatcgtgaatcttatcagtttctccgtgtccaacacagaccactattgtctctcaactcaaagccttcttaatagttttttgctctcaagccttcttcacattactctcatagagttctttctaaacaggaactctctaaaacccttcaatagctttttaatgcccataagttcagtttagaacgcattaaaatgattcatacccttactgccttcctgttcagacttgtctgttgcttctctaggttctgacatgtgaatttatctttccattaaaacagttcttttattatttctggcttcttactccataaggaattactaggtcttagattttattagtctttttgtgatgagtgcccatgaacttttgttgtttcccttgtttataccagaggttatgcttgaaattgttacttgtgtttcccaatgttcgtagaccacaaggacagggctgtgtctatctcccagataattcaacagttacagtaatttctgttaaaaaaaaaaaaaaaaaagaaagaaaagaaatggtagttggttacagaaaaaaaaaagtgtattttgaacttttaaggtcttaaattattttatttagggaggtactagttatacagtgaaaagggcatggaatttttctcttacccagctttgtgatgttggaaattgaaccttagttttttcatctagatttggtaggctagtcttggtagttgttacgaggatttaatgagttactgaataaaaggtatctaatagttactagcacataaatggcacctaatgtatgttcattccttatttcctgattaatttgttgggtttctctcacatttcaatgtattacacacacatactacaatcagcatgagattggtttatggcctataatttttggttgcatttaaaaataaaagtattttagctaaaagttctaatagaacctccttaagacactgattgttatctatactgctgcttatgaatagatctttcccctgaaaagcacaaagtagggggagtaggagatcatattgtgattatgaattttgtccctgtgaaaaatatagagtagtatgcaaataaacttagtatttaacagtgccatttttgaagtgctaagaatagattggatattttgtatatttccaagttattctaggataaatatggaaaatgtatattgctataaactgtattttatttagttatcttagtatatccaaaaagcacttaattactattgcttgagctttttgctgaacttagaaatactgtgatcacagtgattacttagagttgttaatgtgattcttgtcataacttggaaaaatatgctaaataggatgacatgaataaaaatcgtgtggtattttcctaatagatggttttattttagtttcctagatttagttctggcttatgggattttcatttttgccccaagtatttcaaatagcttttggactttctcatcctttccactaaaaatattttttgtcatgttttatagaatatatattttcagctatctatctgaaaaattctagttctga

SEQ ID NO: 112244 - DNA, 1116 bp, Homo sapiens
tcttttaagattaatcttaatatgtaatagtcataggaaatgacaagtagaggtgagagatcagatttgcagtgactacatttgatactattacctttggtattagggaaaagtgaatttaagattttgaaatgtttttaaaaacttgataggagatagtaacaattacttgtgaatgtttctcttataagagaatagctgccagggtcaaagtaacaagtttgggattatgcattttttgaggtaagatatattttactttaacataatgagtttgatgtgtgacagtagaatataaaagtgaaacatgtagcaactcaaatataaacatgaagaatcaggttctcttagtagttgactataagctcattaagtaaaagtttaaattagcaaacttgttttcctcataaagaaatcaggattgcctttctctttcctagatctgaactattcaattatttttctttttatgctatagttcacaaagatgtccaaaactaatggcttatcagaagatttgatatggcactgtaaaacactgatccaagaaagagatgtagttataaggcttatgaacaaatgtgaagacatttcaaataaattgaccaaacaagttaccatgcttactggaaatggaggtggatggaacatagaacaaccttccattctaaaccaaaggtaatctttgttgaatatatttattcgtattttatctcaattatacaaaatatctgaatttatttctgtatcgtgcctagaaagtgatatggcaactagtggtaggagagaacccccaggttttctgtaatggcacataagtggactatgaactgtttttcattgatttcccccacccccaagtagggtattttattctatcatatcattataaattaaagggggggatggtatgatactatatgaccagtgtcttttttgcctcataacaggtaattgtttatataatcagagaaactgaaaaagtggttttagttactcctatacacaaatttgatatcctaaaaaaagtcagctgcttaattgcatcagcgtaaaacctcctttcctagcccattttctttttaatcataaataaaatgaaatgatatcccatac

SEQ ID NO: 112245 - DNA, 1039 bp, Homo sapiens
ttgcaatgttacacaactttcaaaatgagttacatctgttcaaagtatttctgataggttaagattagcagtaggatctcattaaaattaattgccttagttgctgattttatttacttctgatatttttctaagttaatgatcaaagcatatttgctgatcattggttaataatttaaaatcaaggtatggaaaaaaaaacaagatgattactggcctttaatagtaagctacaatcttttctgtgcccttctagggtgctatgggatggtgtagggaaacgtgatgcagttcccacaaagaagctcttttctctgttgcatagaaagaactatatcagcaaatttcatctcctaaaagtgtagttggagctgctgcttcttgttctccagcattggatatggggagttcttcactctacaagacttacccagttgagtctactttatcataatttggatttttaaaaatcaagtgctttattgcatcactttaaaaatttctctctcaaaaccacattcacaaagtcctgttacttgtaaatagtttgatcaggtaataaactatcctttccattagactgaggattttttaaatgaaatacttaatagatgagaaaaatagttgttgttgttgtttttttaagtgcttgttggatcttatccaaagtacaacttctaaaacctatatggatagtctctttaaagtttatttaagtgcacttttaggggttagaatttgttgtcttgatttttgttcttcagccaaggtaagagttgcataagcaatttttacttggtgtactggccaggcattgtgggtacttagtatgtagacatttaaagttgtctccttgctttagtaaaggatttattagcacagaggaaaatattagactatcctgatgaataacctatcatgcttgcatttttctctaaacagaacaagttcttcatgacgaagtttactttgctacaaactgttgcaaatttatgtgaattgtaggagaagaaagtttgccttttagaaatacaaatat

SEQ ID NO: 112246 - DNA, 1015 bp, Homo sapiens
tgtacttcaaaaccattactttcataatctttattttaaaatgtcaaaatttaaattgtttaaaatataatacagtgaggaaaaagaaaataaatccttagtatttctcctgttttattcttactatagatgtagccatctctaaagctttagttaattaatctataatttatcagccttaaaagatttctcacatgttcagaatacaatatatttaatcaagtgtgtcttgccttttgagctaaatctgccaaggttcttctgatcttgttcatcctgaacttgacagcatggttcctaccctgttcttacacaggagctctgagaccctttgtcagtgatgtgaacgcaaattaacactgcagatgtggtttcactaactcaaaagtagtaggatgtaaatgtttagtttgaacatttctgtcactacagactaatattgtggtagtatttgcagcagccatgtcatacttacgggacataaacttttggtcggacagcatccgtaacctgttttctatgaactgctttaaacaagtctctctagccctgtatttctgtattttaaactcaaatttatcacatcacatgtacccctgttgtttctattttacgcctttctcacctttgaaaataattttggaactagtttctctggcagatttaaacccaattgaattttcagactgtggagaaatcatagtaactctggagggaattttttttttcccctaacaaaacaataacttcaaaatagcctgttgcctcattttctttcattatctcagaaaatctttaaatcacttttttccttagtgagagataaaaaatcttcagttcagagatattttaatactctgttgagaagaaagcacttaacttattcagaagacctgagcaaatccccatgttcttaacagtaaattggtggttcagatatatatttggtcatgaaaattcttagaaaactgtgaagcgtcaaaatagatgggaaatatgattatatagcatctaa

SEQ ID NO: 112247 - DNA, 1004 bp, Homo sapiens
tctatgataacatgttccatttgttactacttttatagtagtagcatagaaattatattgattgggaaagcaaagaccttttttaaaattcagcaaaagaattgtaaagacagaattagaaaattataaagacagaattagaaaagaattataaaaggcagaattagaaatactgctttttctcctacctatacttttagttgtattaaatgggaaatgttttataagttgcataccccacagttaaaacatagattctgatttaagatggacatcattcaactacctgttcttcactcagttctaattatgtcttgatttcagagtttgatccttcaacaatttattatactatagctatgtccagacccttccctgtgtgcaaacaggatatatgcaagaggagattaaggggacaggataaaagctggagaatgggaggcatggccttgtcctatgttttcacattaatgtaaggtgttttagtgaatatgagaataggctttggagtgagatcgacatcctgaattaaaatcttagtcttaacactttgtagctatgcaacctcaggcaaattaagttttttttttttttttatctgttaaagtgatgatagtaactactttatgggatttttaaagggttaaatgaggtgatgtttgaaaaatgatatctgtgcctatgtataatagatgttcaataagtgataactgttaatagtttttaaccatttgaactattgttttcattctgttgttgttgttgttgtaattgagacagggtctggctctgtcacccaggctgaagtgcaatggcatgatctcagctcactataacttctgcctcccaggctcaggtgatccttccacctcagtctcctgagtagctgggactacaagcatacgtcaccatgcctggctaattttttttgtatttttggtagagatagcgttttgtcaatgttgcccaggctggtcgcgaactcctgagctcaagcaatctgc

SEQ ID NO: 112248 - DNA, 1041 bp, Homo sapiens
gaaagtatttattaaacctacctggccaaagtagcaaattatgtttgtgtttttttgtcctaatacttttaagttctttaatgtgctaaaaatcaaatcaacacaattcaattttctattatagatactagcttagtattaatattatcatagttaatattctaatcatttatggaattaatttggaggtactatattatgaccaaatatggaaatgcttgattcttactgccagaagaaatagaatagagaataaagtttgagaagatctgaaaaatcatttatgtcttgggttcattttttttaagtaggtgtacatagcatctaacagttaaaaggtaagattagacctaggcattttagtttttatgtgcattgtaataactaatagaaaactgatagaaatatagatgtgtaatatttggtaactctctctttaccagtttgtcactcaagccctatcagaaggttggtttgaattggctggcattggtacataaacatggacttaatggcattttggcagatgaaatggtaagtgtactttatttctaagatttgttgttgaaagtgtcattaaaaggtattcttgctgtcatttaaaacatgaaacttttttttgctactgtagttaactactgccacctcagtaccttatattttatctcatctttgtttttgatagagttagttctaccctcctcactcctccccaagatgaagatagatttattgtctttctgattatcagattagtaaatacatgttgcaaacataaaaatacaaattaaaaaatcgaaatcaaagtcacctgtaattctaccacttaaacaagaactagtttggtgtcttcttttctagatactaccttctgcagatgttgtgtatgtacatgtgtacgtacatacatatatgtgctttttctacagctgcctttaaaattgtaacttagatccctgtccttgtcagtaaacaaatccacatatatatcagcaacatcatttcagctattttatttttattagcggtctctccgggtct

SEQ ID NO: 112249 - DNA, 1580 bp, Homo sapiens
tcttctgttggatatgaatatttaggttatttcttttcttttcttttttctttctttcctttttctttttaagcaggtgcttgctctgtcacccaggctggagtgcagcggcgcactctcagctcactgcagcctcgacctcttgagcttaggcagtccacccacctcagccctcccgagtatctgggatcacagacatgcgccaccatgcctggctaattttgtatttttgtagagatggagttttgccatgttgcccgggcttgtctcaaactcctgggctcaagtgatccacccacctcagcgtccccaagttctgggattacaggcatgcaccatggcacccaacctatttaggttatttccagtgtttggctattaagataaaactatgaacattcttacccaagtccttttgccaacataagcgctcatatctcatgattatattcttaagggtagaattgctgggatagattaggcatatgtttcctccatttagtcatgggacattgcccttaaaccattcagtggatattaaacattcactgtgtctaagcaataaccaaaattatatcctttccatgcaatgcaaaaagtcttccatattaatgtgtattgtatatgaactagcaatgaagatctatccactgctcagtaaagtaagttatagcatcatttggagattataatcaattctgtcatttgagaactaagaacatagtagaaattcctttagagttgcattctgggaaatcaaaagtgaatacagcacagaattactgctttttcttctgtatttttatgtatttattttttgtttgttttaaaatgttatatattgtcttttaaactttttagggcctaggaaaaactattcaagccattgcatttctggcatacctctatcaggagggtaataatggtcctcatttgatcgttgttccagcttcaactataggtttgtaatactggagacaactgtatttaactttatcatgttttatataggtagaagagagtgtgtgtaagggtgtgtgtcggaggggtgttgtggtttcttagtttgtagagatgaatattaattttatggtctctttatacttttctcctttgtttatatatgtgtgtttgattatattggcagtcttttaaaaagaactcaaatgtaagtcagttttaaaattttagaccaaggacgatttatgttggtttcataatacttttagttacttttaaaagtgactaagagaaaatgagtacttttaaatgtagaattaaacagatacgtaattaattcctacacacataactgttccattctttctcaattcgttggatgtagaagttagaataagagaatatttgtacatgtgaatgtaacaaagaaaacccccttctctttaaattggaggttaataatcaactgtaaatataatatttggtcatctgcccttcattttgatgcctcacaaaacctcaagatcattttacataggtttcataaggagtaatattgtaaagggtctgtgataaaaacaatcgccatggtatttatattttaatttttaatttttatt

SEQ ID NO: 112250 - DNA, 1763 bp, Homo sapiens
cccaggctagagtgcagtggcgcgatctcagcttactgcaacctcttgcctcccgggttcacgccattctcctgcctcagcctcctgaatagctgggactacaggcgcccaccaccacacccggctaattttttatatttttagtagagacagggtttcaccgtgttagccaggatggtctcgatcttctgacctcgtgatccgcccgcctcggcctccaaaagtgctgggattacaggtgtgagccaccgctcccagccttttaacattttctttcaattatgtattgcagctttcatagcttggttacagtgtacatcaataattattaaatacaagtacgtcagtatttatttgagtatcacccgtgtctagtgctgtgctttaagtactggctgttagaaatgtgtaaataaaaaatgattttataagacattaaatttcactagactccaagctcttaaaggtataaccttagagatgttttttcttttggtgacagatataactgtgcgatcagcagttctgatgaccgtagtctgtttcgacggctgaaacttaattacgcaatttttgatgagggccatatgctgaagaatatgggctccattcgctaccagcaccttatgacaattaatgtaagagaatgtttgtaaagttttccaaattactgtaaaatttagattacgtaatttaatatatgtagtatttattagcagaatctgtattatgtagtttaatatatgtagtattctgtgttagcaagttttttctgtaaaagggaagatagtaaatatttcacactttatggactagatggcctctgtcacgtattctttgattttgttttttaacaaccctttaaaaaattattaggtcataagccataatttacctgttctatatgttaaactatttataaataatctttcatcatctcataaaggtgatacgaggacacaagttacctacttataaaagaagaccaatggttttcgtattcattgctgttgataatagcggacgtcaattatttaaattactatatcatttatcacagaatgttaaattattaataatggttttaatttatctctcctcccttcacctttcactggggaggatagacatgaaaggagtggctctttaagaaaaagctaatataaattttaccttcattcacaggcaaataaccgtttgctgctcacaggcacacctgtacagaacaatctgttagaactcatgtcgctgttgaattttgttatgccacacatgtttagtagtagcaccagtgaaatacgaagaatgttttcctctaagacagtaagcataaatgcatattttctcccaaatatgttatttgtgttttatctgggccattcttctgttaggtctcttttgttgttttcatagtgcatatgctctatgaagtaactttaagtaggtgataactctatatttggattggtttggaaaccagccaaaatataatgggaaagaaaatagcaatttccctaatcaatggccagaagtcttggttaatatcctaattttctgaaggatgacgattttaaattgatgaagagctcagatatatagtatgtgcggaaagtttgatcattacatcatctgtatcaaaattggctacgtaaattagtaacatttctttatgggtaaactataaaactagacaaagctagaatatccagaaaatgcctatgctgagaaatatattctgaaataaaagttcataaaaccaaagt

SEQ ID NO: 112251 - DNA, 1177 bp, Homo sapiens
tgaataattcctaaaaggatatgtttttattttgctcagaaatcagcagatgagcaaagcatatatgaaaaggagagaatagcacatgcaaaacaaattataaagccatttattctcagaagagtaaaagaagaggtaatgcatatctacatgttttttatttttattgtttttaaaacttaggtttttctctttactagaatgattatcttaaactgttttttctgtctcaggttctcaagcagttaccccccaagaaagatcgaattgagttgtgtgcaatgtcggagaagcaggagcaactctatttgggtcttttcaacagattgaaaaaatctatcaataacttgggtataatctgatttttactcttttatgtgaaaaagaatcttgtactggggatgcattttgtttagtcatataatgggatttgtgcattttaaaaaattatctggaatttgaggaaataattttaaaacttagttgatatatttcaacagttatccgcttggttttattttttactgtgttctctttgagtcacagaaaaaaacacagaaatgtgcaatgtcatgatgcagttgaggaaaatggccaatcatcctttattacatcgccaatattacacagctgaaaaactcaaggaaatgtctcagcttatgctaaaggtaaggatttcatattatgttaacactaagctttaataagaggttaagttgttaggctataagattggtgaacccaatgggcatactaaacctttaactacatatttaagaaaaacttttttttttcagaccaggtctggttctgttgccaaggcaggcagtctgggctcactgcaacttctgcctcctaggcttaagccatcctcctgcgttggcctgctgaatagctgggactacaggcacgcaccaccatgcccggctaatttttttgtacggatggggttttgccatgttgcccaggctggtcttgaactcctgagctcaagcgattcgcccgccttggcctcccaaagtgctggaattacaggcatcagtcactgcactgaaacacgaaaaacacattttagactaagttcaaaatgatctgggggacataaaaacaaagaaggactgataacctacattataagtcagcaaactatggccttacggcagtgactatttttata

SEQ ID NO: 112252 - DNA, 1880 bp, Homo sapiens
cccatttctttttaaatttttttttattattttaaacttatggagaatttcaaacatttataaaagtagaattgcataatgaaactgcccatatgttacttcacccctttgaaagttaccatttgataataacaccacccttgtttcatctataccccagacttctccccagggttattttgaaccaagttctagatgttatttcatctgtaaatattttagtatgttatctctcaaacagtaaggacttctccccctttattatacctaaaagattaatactaattttccttgataagtctgttacactaaaaggttctatgatttagatattttatcaggtataaacagttttattaaacttttctcatcatattattaattatttttattttgaagtatactgtgttttgttttgttttaaggaacctacacattgtgaggctaaccctgacctgatctttgaagatatggaagttatgacagacttcgaactacatgtactttgtaaacagtaccgacacattaataactttcagttagacatggacttgattttagattctggaaaatttcgagttttaggatgcatcttgtctgaattgaaacagaaggtattaaaaaagaatggcgtttcttttgtattttctcaattactttaacttcttaaagcaattctggcacactgacttgcttgaattagcctatgtctgttctgcattcttccagaacttagtgttttgaacattttcttgacgtattttcttgattacctcctttcctctgttgaacctcagacaaaaacaatagaaagttagtagactgtatctgtattgatgttttaaaaaaatcttaattgtcattatttcataggtgacaatctgtatgtgtgcttcaaaattagtttttaaagacactatttgttagttatttaagtaatgctgccgtttatgtgtgaaatagcctaaatttgtaaaatcacagtccagataatacatacataagcagttgtccacattttccgacgtttttcttatgaaaaggaagtaatttaactgttcttaaaatcaaaactgagagctagcttttagccctgaagttaaggcagtttattcatatataggctgcaataagacatacgtcttcggtattactgatttgtattaaagaagcagtttatcacagagaattttctgcaaatttatcaacatgatataagtaacacttctaactgtttaaacctgtcaaggctttgagtagtaaaacgattttttctatttctaattcatgtatgtattttcacagggtgatagagttgtgttatttagccaatttaccatgatgctggatatcttagaggttctattaaaacatcatcagcataggtacctcagattagatggaaagactcagatttctgaaaggttggtataattcatgttagttacaaaaaaataactcatttattattattgttaggattttaattgtctaacaaacaattgatagtattttgttgtttttatgtttgattacttcaaatcattaccttaaaataagagtaatttcaatggtcaggcatggtggctcacgcctgtaatcccaacactttgggaggctgatgcgggcggattggttgggctcaggagttcaagactaccctggacaacatgacaaaaccctgtctctactaaaaacaccaatagcaacaacaacaacaacaaaaatagccaggtgtggtggtgcacgcctgtggtcccaactagggaggctgaggtgggaggattgtttgagccccggggggcggaggttgcagtgagccaagatcgcaccactgcactgtagcctgggtgacagagcgggaccctatctcaaaaaat

SEQ ID NO: 112253 - DNA, 1003 bp, Homo sapiens
atagccagaggagaaataactgcaatactaagagatgtacatacatcttcaggtttctttttcatgtgataatgattgttttccattttaattacattatacaactttttagtgagatttaacctaatttgtttatcttacaggattcatctaattgatgagtttaataccgatatggatatctttgtgtttctgctatcaacaaaagctggtggattaggaataaatctgacttcagcaaatgttgttatacttcacgatattgactgtaatccttataatgacaaacaagcagaagatagatgccatagagtaggccagactaagtaagtgtttttagttggaatgtatttttaattcagtgccactttaatttgtgtagaccattagaatatagtgttggatgtcctgccttagtttttgttttttcggcaaagcatggctactgatgtattttataccagcagtgttgaacatcaactgcactacgtaacccttccattttctagtaattatccacccacattccaaatagttctgcagttcatgaagtattaacaattgacggccgggcgccgtggctcacgcctgtaatcccagcactttgggagactgaggcgggcggatcatgagttcaggagatcgagaccatcctggttaacagggtgaaaccccgtctctattaaaaatacaaaaaattagccgggcatggtggcgggtgcctgtagtcccagctactagggaggctgaggcaggagaacggcgtgaacctgggaggcagagcttgcagtgagccgagatcaccaccactgcactccagcctgggcgacagagcaagactccatctcaaaacaaacaaacaaaaaaattgtctacccctttgaaaaagatgagtaattaaaaaaacttgcttgttagatcagttaagtcccagacaaacttggtaatatacaaacttgctgggctgtcctgttaccctttaggaagtaaattgagttgtaaa

SEQ ID NO: 112254 - DNA, 1842 bp, Homo sapiens
tgtttttcccagtgtgtattttatttgctagaataaggatgtaatggcgtctcttatttactcgtttagctgtaatcatttgtcttcagctgtgtcccgggtttcatttaggtaattttgacactggactgatgataatacatgtatgcccttctttccatctctcacagtgaggtccttttcctctataaacaaaaatgtatatttgtaattgactatgtattgctttttgttaccaatctgtttgtcccctcttacatgaaactatgaaaggtaaagaccatgattcctctcaaatatgcttatcagatttttgtgttcctagagcttgccttagttgttaccagagtaccagcagcaggagcagcatctcctaagaaattggcaatttgaaatgcaaattcccaagccccattctatacctacttagtcaaaaactctggcgatggcacctaataatacttggtttaacaggctattgaagtgattctgataaagctaaaatcagagaaccactgctttaaaataaagattgtgtttgggttttttttcattaacttcccttaatgtattaattgtattaatacattttttaccttttggaactttaaaaatatatatatattaccacaatcatgactacatactttttgaatttttttattacagaaatagtcatacaaaaatgaaagcagtggctgggcgtgtggttcatgcttataatgccagcacttggggagacaggcgggaggatcgtttgagcccaggagttcaaaaccagcctgggcaacatagcaagactccatctctattaaaatatatatatatttttttaattgttgaaagtatagtatgaatgaaaaatacagcgatttaacagttgtgacatttgcagtgtttgttttttctacttcttttttcccattgatccataataaagtcaattgtaaacatggcaatttattttcaatatcacagcatattcctcaaagttggtacaataccattgtagcatctaagaaaataaacagtaattttcagacattatcatatattattcatatccagatttctctcatttgtccccttaatgtcttttatagctttccttaaaacactagggtccaaagttcacacacagcattttattgtattctgtctttagtatcttcaagtttaaaagaatctccttattcttttccttcttttctcttctccctgcattcttcctaacatagtatcagtttatatagtaatttatgaagtgtcaatttggattttatgggctattttcaagtctgtggatgagcttggaagcaaggatgtcagtgaactgacatccctaagagttgatgtactattttgtgttcctgtggatatatgtgttttgttttgttttttgtttttttaacagagaaaagaagagtggatgaaagtactcataattttagattatagctgaggtgtatatttgtgagagaggggaggaggagagaagtggttagttttgctacatttcagccacatctaatttataaaattattcatagttacagatctatcacagatcagcaaatatttgaattgccacctgtgctgttgtcactaactagtaaattaatcaactcatctcaaaatattctcagtgctaaattgaattaatcagggatggctagattatctgccactgtgacacaaagagatttagaaaatctcaaataattcctgtaagtgcttatactggggcctcatttaattaaaatatagggcaaacattggataaaccaggtaatttaaagtggctaatttaatcatcagctggtatgctgtgctcagaatgtt

SEQ ID NO: 112255 - DNA, 2219 bp, Homo sapiens
gattggttttcgttggtttaggtttgggtttgttatccttgttttccctactccatttcttacataaatgttttttatttagcaaatgtgagaagttaagtaccatgaattagatacgatccagtgtattaccgtgtatttttatatagctttataaaattggaaaaataaccttagattgctatgttggcaatatgaacaagaacatagaggaaatagccctaatctaagtagagcttaggaaagtttttaacaggggtgagtgacactgaagcaaactagcccttgaaagatgagtaagaattcaccaaagaaaaaaaataattgagacaatttttttttaagtaaaatatttttataaagcttttaatgctactttctgacctacaggtgatgaagggagtatgccagcagatatagccacattactaaaaacatcaatgggcctgtgaaataagaactgtgaactctcaattgatgaggaaatatcaacttggtgcactcaaggacatttacattatgatgaccatggggtttatgaacatttataactttttataatttccatattacatttctcatagtatggacaactttttgccactaactgaattctccaaatactcacacgtgaaatttcaaaaaagaagccacaaatatgtagttctgaagatgttgaataatcattttacaaagcagttttctgaatggggattagttggtgattgtttgtaacaaatatgctaatgctttagaaatgtcagtatttttgtaattatttctacctccaaatatatatatattgtctttcactggataatgtgtgtagatttttacatgtgccttatttgacaatgcttatgtcttgtttttgcttgtctcatttgaagttcttttttattatgttaaagaatgcagctgtatagattatatagctttcattttattgctatttgaagcagatgttcaccaatgtcagcaagaactcaacctgaatttaaaggtggcattccatatactaacatcccccaggtcctctcaagtacttctgctgaaacaaatttatttggctaggcactaagttgttttccagtgaatagtaactaaagaagcccctaccttgctccatggattaattccttctgttcattttccaactgcactaattgtgcatattactctgcctaatcttgtgcatgttttcattgatttccctctcccggcttttgcttctcttgaaactgttgcccagtcacttctgctccaattctcttcctctctaaatagtagtttattactgccacatctccatgcatcagcaaaatgttggtgacatttttctagcctggcagaacagattacttaaagctatttcatttcaaagcagactgaatgtgacttcatctaaaggcagcattaggtactgcatggaaataggtcattaacttgaaactcttatcaaaatatattttaccagtttccagaatttccagtacaggaccgcctgaagagagagccattgttcaattccaattcagtgtgagtgacaaagtgaaatttagaagtgaagttgtctatttgatatttaactctttattaaatctttctttaaatttctgcctgtcagtctatattgctgtttttattatacatcagtttctttgtataacttgtgagttccatgtgttttgtttttattatgtaaatatcattataaataaacttatttataaatcaaagatttgttaatttttggaaatcatgcttttcaaagcatcctaacttgctaagatgctaggtagtacgaccctctggatttggaaggcaaataaaactcttacagtgattatttagatattaaagactgagaactcacggcttaaccccagtcttgatggtatattgaacagactgaatatattttaccattacagggctaaaaggagtcttcatgtgttaatactacctccttgtacatcactatacccaaatcagttattcaaattgttaggaattttaccttttaaaatctcataatggatatctcatgttttctgtattaatgtattttcaatgataggctgtttctttttttgttgttattgttgttgttgttatatccatacttttatctctaatgaaatgtagttgggttcttcctgtaatgcgctattatgtcttgggcttaataaaaatatttgtgatcataagttgtattt

SEQ ID NO: 112256 - DNA, 1088 bp, Homo sapiens
gaaattggtgtgatgtttcttgggctgggcggtctgaggacctgaggtcataggtggatctttctcacggagcaaagagcaggaggacaggggattgatctcccaagggaggtcccccaatccgagtcacggcaccaaatttcatacgcgtccgtgtgaagagaccaccaaacaggctttgtgtgagcaacgtggctgtttatttcacctgggtgcaggtgggctgagtccgaaaagagagtcagccgagttttatgagttctatataattttgaataatagtcttttgtcagatacatgttttacaagtattttctccaagtctgtggcttgtcttctccttctcttgatctctggggtatctacatttttctcatcacaacaactttattcatgtcagtaaattcatctttacaagtttctctggctgcatatctagagccttttgagccgtgtcagattcccacagtcagctcttttctcgataactctttatattcagtttgaatttcattccaggattatcagtttttgttcctttgctgcactttcatctttgttggggagttccctcttttgattcatttttgtaaaatgtcaaagggatttatcactgggccacaagcaggcaatagcaatacaactacacactttgctatctatgcaggaataacagatgtgcagtgacctctggcagtctttgatagaagtgactggtcattggtcatgatgtacataggttatttacacagcgatatgtgaactggagagctactagcaaagtttgtgttttatgcaattacaggtaattgtggtagctgaagtccaaaacattttgggggaggggaagaatggtgttgctaaaccattatgactgcaattcgtgcatgttagaacctgtgcaaagcaaggtctgcctgtattacatactatttttctgtaattgtaaatgatgagaagctattctgaaagaaaaagatactgaagaaagatttgtttttattttcctttttaaaaatcagaatatggctaaagtgaaaatcttagtggagctggggagggagcatgtggattatctggcaggctga

SEQ ID NO: 112257 - DNA, 1038 bp, Homo sapiens
acaactttccaaaaactcctgtgtgcactcctggcaaattctgttcttctaacgtgcatttccagagcttcaggtgcaccaatgtttgtgtatatgcagagtcaaataaaactcttatatctgtgctactgacttctccttgagcccagattgtctttgtaagtttggtgaattatttcagtctaatgaaatgtaaattaataaacagtgtaattagtatttaagtttcattttaaagtacaatcaaccaaaataacataaagaagataagatttgattacacttctttttttttccagatatattttaaaaaacacatttcctgatccatcctagatagccactcctttacttgatggattcagaaatttctagcctcccttttcagaggaggttttttcaccctgagaatttgttgctatgaaagtttaacaaatgacttttagagaggttcgtatatttctcaaaagcattttcagatatgcactaccaaaattattttgtgttggaaccacgacatcagaatgtcctcaggccttctcattcttcttccccatcctgttctttagatgaggaaatggaaacacagatacattaaataaccaaagtaacactaatggtgagttcaaggattgtcatggtgaccaatatccaaaggcatcttttgcttttaattctttttttattggaaatggaatttttagtaataaatactgtaaaattgtgtgtatttggtagatttttaaggtgtatatgacaagaatatattcactatccatcttaagtgcatcaatattctgcctttgaaattttcacctgaccacaagatggcagcaatgtagcccactaccaacagtctaagaaatgaaatacagaacagtgcatttttcattatatattagccaagtcctgcttgttaattagatagtctatagctatcagcaatgtttctgcaacgtgttctgcctttgtatgatttaatcatgaacttggattgctgtgtcctttgaaattgtttttttggaattggtggtatgt

SEQ ID NO: 112258 - DNA, 1049 bp, Homo sapiens
gaataaaataaaaacatctttaaacaaataaggccccaaaagccccaaacttttatttcctatgaccagtaagctcttagaggactgttccacaaaagcaaggaaagaaaacaggagaatgaacccaggaaaacataaaaaaaaaaaaaaaatcctgggtaataataaagatctcaggatgacaactgtgaccaagtatctaggacaaccataccagagcgaagcagtgtgactcacaagatagacatatccatgccatctgtcataatcatatctgctgtcatcaagccttcattttaacttttggaatactagaggatgtgcccccaaataaacaatggagtaaacaaagaaagaaggcagcatccaggaacaggactccagctccatagaatggcatcactggaataacagcaaagggaattccaatgatgacagctgtgcagaaaacctggagaactccacaaagaatggaagtctcctagagagcgctccaagaaatattggaaataacagatgaactgacactacgttgaccttgtggaaaatcgtattggcaggctattggatactgtggaaagtcagcagtaaaagtgaaaagaagcaaaagaaagcaattactaattttaaggaagaaaagtgagaaagaaaatataaaagcatactacagtgcacagttctgtgcattatttgcatagcctactaatcacaggataattaaccaaaaaattttcacatcacaatattgggagcttggtgaaaaggaagcagaaaggatgactatgtaagagaaaaattgttatttcaggttgagatcccttatccaacatgcttgggaacagaattgtgttgaattccagactttttcagattttggaatgtttgcatatacataatgagatatataggggatggggcctaaatctaaaaaccaaattcatttatgtttcatttacaccttatacacatagccaaaggtaattttatacagtattttcaataattttgcacatttgctaaagtttgtgttaagtacttacatgtggaat

SEQ ID NO: 112259 - DNA, 1042 bp, Homo sapiens
gacagtttttgtcaggagcatttgttttctgactggagactaaaatttttaaataatagagggttttttttcttttgtctcatttgttaatcattatttttggtaataaatcattggtcttcctaaaagttttctcaatggtgccaatttaaaatgctcccgtgtagaagctttctaaaatggattgcttttgtaaaactgtataaatttattaaaaattaagaaactgtatactgacagtggatgaattgtatgtaaattatacctcaataaaggtgttaaaatcgaaagaaaattcttgaacgatttagagttcctctgtaaactatatttttgtgtgtgtgatattcaaaggttgattattcgtctttctgaccttgaatagtcttcagaattcttcactcattttcatccctactttgacttccacctcaaggcttcagctaaaaatttatggaggtgactccttattcaatatttttagtcctaaaccacaggctcattttttcagcctccttttggatatatctctgattactcttttggcccctgaacattcttccacaaatcctcaaatgcagtcatcacaccttttctcaaaccagctctcctttttttacccaacaaataattacgggcctcaactgtgactcagccccaagtagtggctgtatatagtagtattgaatagaagaggtaaattccttgcatgcatggcacgtatggtcaactggagaaggcagacattgaggagggtattgcaagttgaaaaaagtattttgaacagaaaagagaaagagacgaaagagaagaggagaaggaggaagaaaaggaggaagtagcagtatatagcatattgagaacggcaaactctgtctatgctgttcctctcctggttaaatagactgccttccacatggcaacgtctatctactgtctctaagatgattctacatccacaaatttttcgtatttttcttggtctctcttctttgccatctggaccatttcaatgatctcttaatatgcttccctgcagtag

SEQ ID NO: 112260 - DNA, 1117 bp, Homo sapiens
agacggggacgcgggagggcgcccggaggtggcgagggccggcagggacgggcactgccgctcccacccacccggctgccggcgtcgcccggcaccaccgtggtgtggtgtctgagtgcccagtcctgcgccagtctcttggagggtaggaagcgggactcaaaggaaaaggcgcgttagtttttctttgctcccaggctactgagaagcatttatttctcccccagatatttacagttttgtgtaacctgtttggggaaaacttctgcgcgtccagaaataaagctcgtttaagaaacacatttgtcatgaacacgagatttgttaacacttgagtacttgttggggcttttgtaagactgtgccttcggtgcgttttacaataagtggaaaaaggaagggcgtgtggacagggcagagcttggaaggaaaattcgtggcggcgctgggcagggcagatttagggtgtgatcgccagatcctatcccaagtccgccttcctgacggggaggacgtctgaacccgcctgccacggaaacggcccgttcggtagccttatttggccaacaaggctaggcgcgaatccctcctggaaaactgtcctgtcggctgctttcatcctgtgcctgtggctttagttcttcagctctacctacattctctctccattgcggggaaagagaatctcaagatatttctctttaatttcaggcctttttttttgtcactctgtgtagttcatcttgagttctcctttctcccctctcacccactaatgaagctgagatacaagtgtgggaaataccaagcttccttccctagtactagagcaaagacattgtttagactttccctaaaagaaaatccataactctacagaaattccaaccttttcgacgtgtttgaaagagtatgctgctatttcctgcctgcttggtatttgaggaagggcttgggcactaataaccagatggaggagtcttggaaaggccaataaaaatattgccattgcttggggcagagactgttttaaggcagatgaattccaaatgaagctagcagaagaagcatctagaaatgaacggacagtgactagaaatgaaatgacactggtttt

SEQ ID NO: 112261 - DNA, 1659 bp, Homo sapiens
agtattccattaaaacaaaagaaaacttcattcctctgtctcctgccgttataacaaccaataggaaactcgaagtttttttttttttttttgctttttaaaaattatatgaaagtactactaggagagtcatcacacgcacacttaacagcagaacagacaaaagaaagcaccgaagcactggttcttttctaaactgccaattccatttgaatgcattaacccagcacttttgctgtatttagtcataatcttattcactgagtggcaaatgcttactctctgcctggtgaggtgtgtgtataaaacaaaaagcaggttgtgactaacatcactgtactagagtattgcctatcgttgactatctgaaggaaaagtagatatcactttaagtgtggaaaataccatgtccccataggaggaaatacaagttgtagttcatgattggagagaatagttttgtgcattgaaaaacagcttctcattgtaaagaatttagtatttggaaagcatgaatgggagcctactgatttgcagtctctttcacatgttagagtaacttagaatttaagtaagtgcagttgaaagactcttgtcaattgcagacaaaagaatacatgaagtggagggaaggagaaaattattctgaattcaacctgaaataaaatcttgctacattagtgaagtattgtaaagtactttgagttaaactttgcatgcaagaagccacaaaattggattgaagcaagttgtgaaacatactaagtgtctagaaatgtattctgatatggaatttttagaccatggaaattgccatgagtgtagaaaatttatattagctcacagattgcttttcttaaactgaaattaatgaagaacttaattaagacttatcttctatatcctctcacccccctcaaacaaaatactaaacataatttatgttctagggtttcaagtaaacatttttgctaatcatctgattttctttcacagcatatttcattttctgtcattggactttgagccattagaaccatgagcaactacagtgtgtcactggttggcccagctccttggggtttccggctgcagggcggtaaggatttcaacatgcctctgacaatctctagtgtaagtaaactttacaaattttattatagatgttcattcagtgcttagtcctcgggctgagttgtttaattctctgttgacctgtactctacttattatcattgctcctgggatttgatcttggcaaatttgattatctataataaaggatgaggggagtagatttagcaaggataactgacttcaatttaacttcttttcgttttcccccatgttatcaataataaaatggaaaaagcatttaactaggaacagactgtacatttttgaactgtccctaatttggggaattctctgaatcttcgttctttcatatataattttcaaaggttgtgctatgggattttaataatctctttcagttccaaaagctgtttgttaaaaactgttgatcaaaattgaataaaatgattgtttcggaattatttcctcagctcactttctggtggaggtgatagccaacagtaagatggccaaaagctacttacccttgaagaggaaatgaagggcttggagctccaacta

SEQ ID NO: 112262 - DNA, 1353 bp, Homo sapiens
cctttgtttcttggctgtggatttttttaaagttatctttaatttatcatcaatttctgccttgatttcagttaattagattttataaggaagtatatatatgtaatccagcctgcaagttttaacacctttcatggttagatgaaattttaaatgtaaagcatccatgtgaaaatgtgtcatgtgatttattcctgtttgagtgagttggtattttatttcttctactgatgatctattatgggaacaggagcaatctttgagtattattggtttttacgttttgttagcattttatattttaaatattctactttaattatctaaagaaagttattagtttaaatgcttacttttttgctgaaaaaaagttcagaaacaaattgacacctaaatgagccaaacttaattatcactttgttgtgtggtaatagaaatgcaaatagagtatgtttgcgaattttgtggtaccgtgtctttaaaaaagtttcatgtgcttcagtttcctggcagacagtttgaggtactagctccatgttgtgatgctgatacaacagaacactgtgtacatacatatgtgccctcccctggcacagaagaaatgctttccttgtgtagacagagtgctaattaaaggattttgaacatactgattaaaagagactatggtaacaaagctgctgagttatttctgttctcttacaaaagtctctgccatctactgtgacctttttgggccttgtgcagtggggcatgcaattcattctggactggagaggattggaaggggaggggaaggagagaagggaatgttggctcaatcgggctgctaggctcttggcctttcattgtagttatttttaaccccttgtgtggtttaaatatgcctagtaacattgcctaataaaggtttgcgtttaataactaatttatattgtggtaagattgttaatgttataaatttttaacttactctcatcttaattagttctttggttatactttttctgccttaattatgtaaaattactgggatattactggtcatcaggttctttaattaatagtatcaagaaacaattaaaacctgaaagcatgcttaaaacatgtaatttaatgattcacttactttaataatgcacatgaaattcttagcaaggtctggcagtctctcaattatcttttataataatattataaactttaaaaagaaaactatttagagacttgaaacattaaatatttaacccccgtagttgtagggaacatacagttatggttttgttttgtttttttaaacttattgtccactgaaattaagaaaggaaaaaaaatcagaagtttgtacttagc

SEQ ID NO: 112263 - DNA, 1045 bp, Homo sapiens
aatttcacccttatgagactcagtgtgtttttattatcaacctttattagctaatggaagttaactgaaatcaggtaggtttatagagtgttctgtagcatagtgagtcaggcattgtgaaggtatactaatgtgtggcacaaggtagttactcattttagcctagtgtgagcagcagagtgtatgtgttggtaactatagtaacaaaaagagtaaggatgccagggatatttatatttttttgtagtaaagatgaggaaaggaggaatttctctttagtgtgttgctgtaaatgttaaatatgatgagaagagttttgaattagagaagaatttgcaacacttgttatttggattctgtgaattgttaaacatttttttccccaaggtccagagattgatttaacaatggccactgtacttcatgataattgtcctggctaaattttaattgaagaaaagagaaagtagttacggtaatgacattaacaatttaatgctgtttaccattgattggatcagggatttaagtgttgtgattcagttccattgagatctaattaacagcccagtatttttcaaatgatttctgggatattaacttttggaagtggtagaattaagagatttagtaaggctgtataacactagccagagcagactatgttctgaaagtatgtttgttctgaaagtatttttcttctgagaaaacgttaccggaggacagatgtcctttagaaaacaaatgttttgtcccttaactaggaccccttagaaatgttctggagaaagaaattatatctagctagctagctatcgtgttacacatataatttccatgattttggtcattcctttgaagtatctttatgctactcacttgcaaatatcctacaaatggttgttttgatctttttagggtagacgtttctgttttgtttaaatgtacctctgtctattctggaagattctggttatttggtgtccagttctctgagtgattctttgctattttagcagacaaaagtatttccaaaattcatcaa

SEQ ID NO: 112264 - DNA, 1096 bp, Homo sapiens
taaaataaaataaaatttcctcagcctcttccagccttcctgcttcccatatgtaatctttccagcacttttgtcttcatttggttgctctaatatgctccaacttcccccacaaatacatgttgttctgcagctttcttttttttctttaatatatatcatgggtatgtgtccaggtcagtacgtatagacatttatcatattgatgtaacatatttatgcatcagaatttctactgatattgtaattattttttatatccagaaatttttaaatgaatgtttttgtgggtttttttttgcctaatatatatttttatgtggctataaataaaaaatcaaatatgaactgtggggggtataatcttattgagtgtaataatttgtatgcaaattttagttaaaattaataaacaatttcaaaataatgtaaacatttttgtcaacaatgactaaaatattataaactctttatgaatgttttctatatacttgtttctgtataaaataatatctaatgattttagattgcattataaatattttaacccttgatatctgctgcaaatgtgctttctattcagttcttctcaaaattaaaataaaaataagcttattaaagacttataagtaaaataactagaattatattccatacactatgtattatttattcatattactgaaaattactgattatatccttccatataacagtggaaaaagaattggtttggtgactcgaaggacttgatggtcaaattaattgattttggatatttcatgtattctcattttaaaacttttctttagtttcttatttattatcctgtttaatgtaggctggtattaaaatgagtcagcatttctgataattgtgtaaatgttaaatgatagcagaagccaatttaggattaaacaaaaattgttgtggctcctctgctaatcacataatccaaatgtgaattgagagattattcaagaagtgatgattcaagaagttaaataatacttttaaatgacaatttttataaattgcaatgataagtaattcaataaattaatttgggtttacccagaagagcataggagtgctt

SEQ ID NO: 112265 - DNA, 1037 bp, Homo sapiens
tctgttacggctttggtctcattacttactattggtctgttcaggttttggatttcttcctggttcagtcttggtaagttatatgtgtctaggaatttgtcccttcttctagattttccaatttattggcatacagttgctcatagtagccactaatgatcctttggatttctgcagtatcagtagtaatttagtctcctttttaatttctgattttatttttaaatgtgcatactttttaagaaagaatttctaaagaaaagatacatatgccaaaatagaagtataatattattcatcactttatgtataacaacaaaaaaattaggaagtaacttaaaagactaaatagtagcctgttgactaaatacctttgatttgcagtgtggcagttcatcagatgtttattgtgttttgtgtttacgtctgtgtatgatagccctaaatagaaatataagatacagttagtttgaggagcattgtattatggagagttgggtacacatgtgaaaagtggaatagtataaaacagtagatgagagaaagagccttgcctcttctttaatatcttttcttagaattgaaggtaatgccttatgggaatagggccttattaaatgttaatgattaacattttgaagattattaaggtttttaaaaagcgaatccctgtttttataagctatacttaccttagcatgtgaaatcatgattttgcactatttggaataagcattctgttttaaaagttcttaaattttcttgagctttttgttttgaaatatctttagcttgtgggttttgaaaggcctgtgatttttcctcctgtcgtagaagtatgctggcctggtgtttaccaaccacacttagagaaactctgttctcacatttcattaaatcgtaagttcctataatttttttggttatagacgcctttgaggatttgtgaaaagtcgtggtcccactcaatggaatatacatgcatgcttgcacagaatttgcatacaatttcagaagatttgtctcatcattgaggg

SEQ ID NO: 112266 - DNA, 1054 bp, Homo sapiens
agtaaataagccagagttcaatctcagatttctctcttaatgtaatgatttgtctgcacacatctttttaagtacagaaattttaaagtatttttattgctcagtaattataaatacttcttctctaaaagttgttttgcttttccaaatacaacacagtaagaattttcgccattaaatttatttcataggagacagagaaaggggcagttatgaagacatttgtttgatattccagtcatttcaaatgccgtggaaacttctagcaaggagtcaaccctgttaagagtattaacagggatcacatattttaaaattctttgaaaatttttgctttattagtaccttacaaaatattccagtatcagtattacctcattcgtttccttagcagctccagtgtgtgcattctctgaatactaattaaagtagctttaatatgatcttcatctgtgaaacagttttttagttgaattacaatgcatggttaagtttgagtattgagaacagacttcataaattcatagcattttagagtttgaagcaactccagctattaaccagcagagccctttatctttatttatgattcaaactttcattttgatttgtgtaaaagattgcctactgtgacagctctgtgacaactctgtcacagtagtgacacaggaattggagtagtgtggtggaggagggaaggaagaacagattggtattaaactgtggtcttaacctttccaccctgttgaccttgctctgctgctttctccatctattttgtggactaattacaatgttcttttaggtatctcatctgtcagtatcttatgctgagattgggaaattctggatttagtggtaaattggtttatagcaaataccataactattaaagaaaccagcatgttttccattttctgtaaccttttcttatactttctttaagttgtttattttcctgaatttctttctttctttagagcctcaaaatccctccacttgattctagggtgccaaaatgtcctctctcaactgtacatatgtagagcttgaa

SEQ ID NO: 112267 - DNA, 1061 bp, Homo sapiens
tgcttccagtttttgcccattcagtatgatattggctgtgagtttgtcataagtagctcttattattttgagatacgtcccatcagtgcctaatttattgagagtttttagcatcaagggctgttgaattttgtcaaaagccttttctgcatctgttgagataatcttgtggtttttgtctttggttctgtttatatgctggattacgtttattgatttgcgtatgttgaaccagccttgcatcaacttgggcaagtttattgttgttaagatggtattgagacctacgtcttgcttggctgtaagtaaaattcatgctgttctttattttcttgatattgtgctgtctctttgtaatggtgaagtggaaattattatagccatctctcaaatgagcagaccaaggcatagataaaaaaggctagcatttaattgtggtagaatgggcaataaaatagtagtcaacctattcttgctgaatttccattttcctgtctacatatgagtgttcaactatattaaagtctgtcttgaggtatcctaaggtggtgttacagcagcccagtagagtacattctgagttttctgcctatacttgtacttcaaccaaagaagctttgcttttatttgttttatatactgaaccttgaattatattcaagtatgactaaggattataatactaacattgttgggggataaaaatgtcggctttctggtttttcttgttgcttttttttttattctagctgaaataataaatcagttccctattccatttttctgtaaaatgaactgtcatgatctcttttgtgtgtgtgttgcagggaggggggttagtaaaaaatttaatcataactaagttatgtaagtagatgatcttaaatgtttttaataaaaccatgtgttgggttacctttaaaagtagttatgataatttttttttgtctaaagcatttcagttatagcagtcataaatttaagttgagtaggtttttatgctcattatttttggtaaactaaggaaaatataggataaggattttgattagcctagtaag

SEQ ID NO: 112268 - DNA, 1871 bp, Homo sapiens
ttctttttttcctcagagcatctgctgcacccaagcctgagccggttcctgttcaaaaggtgtgtttttaagctagcacccagagtatcacttgattgtccttgctgagctactgtaattcccattactgtctcagaccatactgacattcatttaatttatagtctcagtacaattttccttgtagttcttttccttcagagatgagtagggaaatggagatcagcacataccatttgtaattatacatgttataaaacattatttccaaagccatatgttacaataacttatgtcagatttcttacatttctattcacttttgatgagcccatctttatccaaatccttatattttctaaagagaataaataagtggttactgaaaattaatatcacaataagtctttaataacattttattaataagtgcttaattacatttcagagtattcttaggttattggcaagtatccctcttcttgcatatatgtcttcaaaataatttcaaaccattattcatatatatctgttttatgcttttgggggctttctccctaattttatctgtgcctatttattgaactacttattatacagattgagcatccctaattagaaaatccaaaatgctccaaaatcccaaactttctgaacactgacatgctcacatgaccattgcagcatttcagattttggattcttggattagggatgctcctgcattctacaaagattcaaaaatctgagaatatctgaaatctgaatgcttctggtcccaagctgtctaaataagggatactcaacctgtattgattcgtgtgggcactaagctacttatttttctcaattagttttcttcttcctataagatgaattgaggctgcgcgcggtgggtcacgcctgtaatcccatctttttgggaggccgaggcaggcggatcacctgaggtcagaagtttgagaccagcctggccaacatggtgatacttcatctctattgaaaatacaaaaattagctgggcatggtgtcacgcatctgtagtcccagctagccaggaggctgaggtgggagaatcacttgaacccgggaagtggaggttacagtgagctgagatcacaccactgcactccagcctcagtgacagagcaagactcctgtctcaaaaaaaaaaaaaaaaacaagatgaattgagattaccttttttcttaaaattaaacagtagaaccaccattgtatgatttttcaaaaatttgattttttcttttgatatggtagggtggaatagggatttattcttgatctgaagtctaacgctctacctctgagctatcccgcctcctgggatttattcttgaatgttgtagaagcttagtctgattttgtttaactttaaatatgctttggaataaggattggcaaataaaaattctggtaattttaggaggaattgacctttcttactagttgttttttctttggctgctgacgatggggaaatattgaagatttttttttcttcatgtaactattaaatatttattttggaaaaggaaaagaattttattctatctctgaatcatatcttaaaacattcagagagagaaatggaggtggattacaagaaagaaaggattttgttttatttgcttttttaaagtttttttttttttttcaaattctttaagattattaattagagtttgcacattcctgagttaggtgaaaattatcttattccctgtgttttttgtttttttaaacttaaagagttagaaatgtgctgctccttctgcgtgaaacaaatgattccactctggagagaaatgaaacatgtttgaaaaatgggactatgggctttgaaagatgga

SEQ ID NO: 112269 - DNA, 1787 bp, Homo sapiens
cgatcttggctcactgcaacctccacatcccaggttcaagcgattctcctgcgtcagcctccccagtagctgggactacaggcacgtgccaccattcccagctaattttttgtatttttagcagagacggagtttcactgtgttagccaggatggtctcaatctcctgacctcatgatccgcccacctcagcctcccaaagtgctgggattacaggcgtgagccaccgtgccccgcctattttagatagatcttttaaaaacttgagaccgaatatacttgcaaagcaaactgtttatataaaaggaatattgaagattaatcatataaattataaataatttagtagaagatattttatccttttaatataactttacaatttttaattttttttttctccttaaccctagcccaccaagaaaacacattgtggagcgctatacagagttttatcatgtacccactcacagtgatgccagcaagaagagactgattgaggatactgaagactggcgtccaaggactggaacaactcagtctcgctctttccgaatccttgcccagatcactgggactgaacattgtaagtgaacttctaggtatcctaatggatgaatgtttttttgccccagagagtggcattgagactgattggtagttgtcagaaaacaaccccgagacagtttgcttttaaattatgctgtgcataacatgggtaatataaataagaccccaggccgggcacagtggctcacgcctgtaatcccagcgctttgggaggccgaggcaggcagatcatgaggtcatgagttcgagaccagactagccaacatggtgaaaccccgcctttactaaaaatacaaaaattatctgggcatcgtggaagccacctgtaatcccagctacttgggagcctgaggcaggagaatcatttgaaccggggaggcagagattgcagtgagctgagatcacgccactgtactccagcctgggtgatggaggggctctgtctcaaaaataaataaataaataaataaataaaacaccagcccaggagagtaacattgaaaagtatagatgtaatagtagttgtactaactatagtttatggccaataacaggctactatggaattcgttttagtggctccatggaagttgaacatttgatattgattggtgcaggtaattgcttaagtgattttgaagttaaacaaaacaaactaatattggatattgcttattatatttcagtgaaagaatctgaagccgataatacaaagaaggcaaagtaagttctctatctttttgacaattgaatgttttcctttcacgaatggtctcaatttagtttttcaaattgtcaagtataatggtatggcatttcgtctttgcagctagaagctaagcatttaactttggtgccttttgtgtgacctaaatgtacaacttgcagattttaaaagtagtagatattgtctggattttaaggcttgttttccctagtattgaaataagaagtgggcagaagggtatatttcggggtgctttgctaacaatacatatgtctgtgaatgagctcgtgtgttgtcttgcagtcactttattttgaacataaaaatgtatgtttccaagagggatctgtggattaattgctatatttctaaaaatgctctacccttaaaatttttgccacttaataaaacagctatgtgaaattaagcttttataaggcatgttttctgcatgatggaattagtctagaacctttttccttctatttctt

SEQ ID NO: 112270 - DNA, 1048 bp, Homo sapiens
ccttcacgtctttagtcccaaatacacaaaattacgtgactggcaccatgaagtttcagcacgtgctcttaacgtacagtgatttatgagccttgccccccaagcagccagcacataccttttcatttactttttttttttcaacttcatagcaaaatctgtattaaatttgccttatgaaaaaatagaactttttctatacttttctaacaatttcctattgttgtgagaaaaggaagatgaacatgttttgtgctagttggtagctcacaaatgtaaaaccaaaaaaaaaaaaaaatagaaaattaagggactagatctatttgtggatttgtatctgtttttgttgtgattagggtagtaatcttggaaaacgaattattttcataagttgaatttggttagttggttggttgaagcagaggataatgagcaaataaagtccttgtctaatttggaaaatactttctttatattattaacatctcccaagattactttttaagttcattattatgttacattcaaagttgattgtaaattattctaaataagtaaatataaggaggcaagaataaacaaagactttattaaagaagagtgcgtgcattgtagatttaggtatcttttaaagtaggtactattcaggatggctctatgaagaggaggaggtccagatttggctcctgaaaaaggaaagaagagaattttacccctatttgcaatggagaaatacagtattctttggtttggttggatttgcaaatcctatttcctatcaaaggaaatatctctagtggatatttttagaatatagacaatttctaggtattaactaataagatatggaaaagatagctttgctttttttaatcagaagaacataaaataaattacaatatgaatgattgtgagacatcagagaaatattttacttagtgacgtaaactactgtgcactgctgctattcctaggaagctgtgttttgggcaatacatggaagctaaatatatgaccagaaatgctttctgccttgtaatatagtgta

SEQ ID NO: 112271 - DNA, 1033 bp, Homo sapiens
ctgcaaaagaatcatatttttgtagaccccagtttagacctcagttgcacaggttctcttttattcatcttctcatcactttctttgccttggtcacttctcatcttttctccttagatcttcaacccagatcacaaacacagcatttagaagtcttcaaagtaaaagatcagttaagggaggactgaaagtcatgtggaagtcaaaaggaacatgcatttactttatttttttgccttaaattaaggatgtttatttgttgacttcatcacaggcagcctaagagtaatgagcaagcaaatgtatttagaaatcaaatataatcagagatatgtgaatgaagcaatgaaatgagaagcttcaaaatgggaaattaggatttactgagtaaatgtaatgaacacttaaaacaggaaagcagtacttaaaatattatgattttgcatgttatagtcttccatatatagcatttggaatcttaagtattagccatttaatttcacttaataaattttgttagaacacatctgttttcttcacatccttaaaagtttacttctagttctctcctggggagattctgttgctgagtagcctttggaaatgtgtaggctaatgtacagacattaaaaggaaggaggatgctaaatatcttgtaatgcactgaagaatcccacagactgaagaatcatccagcccaatatgccaattgtgtgctactgagaatgactgcattgagtgtaaatattcccttttccaagttttgttttgttttgttttgttttttgagacagagtctcgctttgtcacccaggctagagtgcagtggcgccatcatggctcactgcacctcgacctcccaggctcaagtgatcctcccgcctcagcctcccaagtagctggaactacaggcacacaccaccacacctggctaattttttgtaaaggcaggattttgccatgttgcccaggctggtctcgaactcttggcaatctgcctgcctcagcctcccgaagtcctaggatcgtcggt

SEQ ID NO: 112272 - DNA, 1105 bp, Homo sapiens
ccaattcttgttcttacagtttatgtagcataggggaagaaggacacagtactagaaagagcatttgagcagcaggatggaactgcctggcctcagtttggaaacctgagttctcattgacttctacagattaacagctttaaataaagtcacataacctctttgacaccctcagttttctgatctgcaaaatgaagaaagactaaatcatttcctatttctcccaacatgaacaaagtttatgattatgtaaaaaaaagtaccccttttaacaggaaaatgggactgtacttaaatgttgctaatctcagactcagccttcatctcttctcactctttatgctctccctgggtgatctctcatccaggttcctttcattacttagttatcgataatttacagatctttctctccaactgagtgatctatttgccatctcctggtggcacctcaaatccagtatgtctgaaaataaccatttcctatctctgggaattgcacatccactcagtcaccaaagctagaatgtagacttttagaccccacgccccacattctcacagtaactaacatctaatggttttactttttattatttctcaaatttcttctctgtgtcatcagagccattgctttgattcatgacctcttcattacaaatgacttctaatttccctgtctcctttcccctccttcagtctgtcccccatacctccatactacagcaagtgatctttcttttttttcttttttttttttccacggtggctcacgcctgtaatcccagcactttgggaggccgaggccggcggatcacgaggtcaggagatctagaccatcctgggtaacacagtgaaaccctgtctctactaaaaacacaaaaaattatccgggcatggtggcgggcgcctgtagtcccagctacttgggagactgaggcaggagaatggcatgaacccggtaggtggagcttgcagtgagccaagatcacgccactgcactccagcctgggcgacagagcgagactccatctcaaaaaaaaaaagagagacaggatctcactctgttgcccagtctcccaggctgaagtgcagtagcacaatc

SEQ ID NO: 112273 - DNA, 1007 bp, Homo sapiens
tgtagtcaacgacccttgaacatttttaggaagaggccgatttggagagggagcaacatatgcaaaaactgagagaatttggcttcgggtaggaaagacaagtagttcagtatgtttaagactgtctagtggcccagagagaaggttggctgcattaatgggggttttgaatgtaagagtgtggacttgatgctgaaaggaagctattaaaacatttataagccggaagtggcaaaatcagacttgcattattaaaagattattatagcattaatgtgtttaaaagatcatcatgacttcattgtagagattaaggttggagacctggagaccatttaagaagttattcaggtaatccaatctggagatagataatgaatattgccctgggcagtggcagtgttttggagagaattccctgggcagggtgactgcagggtatttacactttaacctaactgggctgctggttttaaccattgccctctctgggaacttgactccctatagagtacctatgtatcctctgttaaaacacccgtggaggattgtattcagtttatagcatattagaatgctaccttcatactttctttaattgtgtgtacacacaactcccagttgagccctgtttactctcatgtccctggtgttgacaagaaattagtggatattattaaacgtgtccatggaggcaggcattctactgaggaaaataaaaacatatattgatattagttgatatgatattatggcgatatactcaaggcagtagtattttatcatttaatattagactttttttttttttttgagacagagtctctctgtgttgcccaggctggagtgcagtggcgctatttaggctcactgcaagctccacctcccaggttcacgccattctcctgcctcagccccccaagtagctgggactacaggcgcccgccaccatgcccggctaatgtttttgtatttttagtagagacggggtttcaccgtgttagcca

SEQ ID NO: 112274 - DNA, 1033 bp, Homo sapiens
tgtatctgttagggatgggatagaaaggattcttgccttggataatagggagcttcaagtgactggcaactgctaagatctgtttcaagtaacattttctttgcatctaaactccgtttttgaaatttagatcatttggctaagattctagttaatgtgtttttcttttttttttaatcatacccgcttctggtgtgtgctacatttagcaataaagaaaagcttgtttacttcattgtagactgagctttggagagatctgatatgttgtttcggtgtttttttgttttttttttgtgagaaagactcaaatatatttgtgagatttgattagatcaaagactgaatgatgtgcatctcagttataagtggatataaattctatcttttatttgaagtctaagggagataggggtgagaaaggaaattactgtttctacaaccatcccaaatttcattgtaggctttgcactacagtaataaatcgagataactaaatttgcctagctaagatggatagatttattggttccattttaaaatttttatatgaataagtaaactgctaccagttgcgtatatttcatctcttctaataatgttttattgccatctgctcccctgcattttgacatcattaaactaaacagccctcttgccgtaaagccctgactggagctgtccattgtcaaaactggggtgtgaaacatgtaaatatgcccatctccttacataacaagtagatttttgtttctgattctcaggaaaaaataaaagtaacaaccattaattgcctgttttctttttcttctaattgttccttcattgaaatttatttgcgtgttggaagctttccagtgctgatgcaaggcttcatctgtgaaagctgttctttctccccattttcttctctttctgagattaaaatattaaactttttataaggcagacatctacatttgttcatatatgcttttcataaagaattgttctattaattgatgcatatggtttaaaccaaagtttggcaaat

SEQ ID NO: 112275 - DNA, 1031 bp, Homo sapiens
taactcaccttcaatatttaccttaaccatgtcttctcgtagaagcagaggtatgtatcacctgaggtcaggagttcaagaccagcggaccaacatggagaaaccccgtctctactaaaaatacaaaattagccaggcatggtggtgcatgcctgtaatcccagctacttgggaggtcgaggcacgagaatcgcttaaacccaggaggcggaggatgcagtgagccgagatcatgccattgcactccagcctgggcaacaagagcgaaactctgtcttaaaaaaaaaaaaaaattctatgcatacgtctgtcataattcttttactttgttggaatctttggttttctttcccatttacctacatagtcacagcctagtgtttgattcataacctcactgtaaatgtgagtgagtgaataacaagtgaatagattactgttaaaataataatttttattatttgattgttaggaaaggtttatatgtggcttattctcattctgattcttctgttttaactcctagtaccttccactggaagaatctcaaacagcgctacttactcaggatcagtggcaccagccaactcagctttgggacaaacccagccaagtgaccaggacactttagtgcaaagagctgagcacattccagcagggaaacgaactccgatgtgcgcccattgtaaccaggtcatcaggttggttgttttttgaaattttcttgaaagtacttaatatcaatgttgggttttttttttttttttgcatttggaagtatgtgtaatgtaattagtgaaaatattcttgccataatcctatagagtactaattattgagtaaatacgaatatctatctatgagaatctattttaatgaaaggtaatacggaggtctgtgaaaataaaagtactaattgcgttcgttatcagttatcaattcctattagaactaaggaaaaagtgattaatgtggcctttcagagaataataaaattttaagactcaaagggaccctgaaagtcatttatc

SEQ ID NO: 112276 - DNA, 1047 bp, Homo sapiens
tattctggataaaaacacctttgtggagacaggagtcactgctgttatttgtatgctattgtaagcaagtaattactgggtgagttaacaaaatgtcataccacatcagttgctgattcatgttgtgtagttatcaaattccatgatatcctgtaatcaccacttccggcacttctaaaaaacttacttaatatggagaaaatgtgaagatcaaagtagaaattacatttcaccacccctacctgccttggttttaaatttaatgccaggccagtatgcaattttaatgcacagtcatcctgccgtgtaaaataaatatgtattatgctaacatgagtagccatcacttattgctccctcatctgttaaattttatattgttctggattatccagtacttgttatcagttaagcattaaagcttcatttactaaggaagttaataggaatggggattagttcatgtcaagatcatgtaacagtaattaacatagcacatttgcctggtgctcaaatgcttaagcagcttgaatcgattgtggtcagttcagaggcctagtcaaagcataattctagttcttggcctcagtgtcactattacttaaccaaagcaagaagactttagatcaagtgacattctcttggacacctgttttaaaaacgagctgtagtttcaggcttgataccttcaatgcagactattataccctagcaagcttggagaagtttaaatttataatttatattgtgagttttctgtcatataatttatattgtttgtaccaatttatattgttttgttttatatttacttttcaatatttcgaatttgccaaaaaccattttttatgtaaaggcaaactaaagcacattttatgttttattttattttatttattttttttttttcagcagagttgattgttttagaaaacctcaggaatctgaatgttagaactgaactggttatctctttatagagcacattcagtttaaaattccgtaatcttatttggatctaaagtttaaaaattttttggtttattt

SEQ ID NO: 112277 - DNA, 1075 bp, Homo sapiens
tttgttttttgctcagtgattttcaaacctctctcataaggagcaccatctcagtttaccaaggaaaaacatgcataatttgttgcctgttttaccatttatttcagtctctgagcacccctttatttataggttttatttatcatccccactaattaagattttacttgaaaataaaaggcctcctggaaatgtattattagcccttgtatttaaggaaacaactaaagacattgaccaagactcataaacaagacagagaccaagatttcactatttactgttgtgaaagattagaaagaacataaatgtgcagcatctatataatgtaattttcagataatagttaaagttaaatgtgtttttagcatattccaaatattgcaccaagaattttgcctgaattttcataacaaccctgtgagacagttgctatgattattccacttcaaggttgagaaaattgaggcatagagaagttacgtatttgtttgaagttgcatatgtagtagataatggaacctgaatttgagtccagatttgtctaactttaatttttattcatgcttttaactaccactacataggaaaatgtttatagtatcatatgaatatggcaaaaatgaaataaggaactcaaaagtatgattccaattttatgtaaagaaactatacaccaagatatatatttaagcctgataacaataaaaatagctactatatattgaacttgattggtatcatgccaagaacttttttttttttttgagatggaatctccctctgttgcccaggctggagtgcagtggtgcgatctcggctcactgcaacctcggctcactgcaacctccacctcccaggttcaagcaattctcctgcctcagcctcccaagtagccaggactacaggcacctgccaccacgcccagctaattttttgtatttttagtacagatgggatttcaccatgttaaccaggatggtcttgatctcctgacctcatgatccacctgcctcggcctcccaaaatgctgggattaacaggcgtaagccaccacacccagcccatgccaaga

SEQ ID NO: 112278 - DNA, 1039 bp, Homo sapiens
agcctttcttttctggcaggaattagtaaacaaaggcattccttattagtcataacaaaattatggtaccctaaagttttaaaaataataataataaactgcctatctcaaacttaagagaatgatatgtactagcttatacaaaatggcatcatgttattaataagaaacaagttaacaaaaagtagggctagaaaataccctcttacaccccacgtaaaaatttttaatcactcatcaagagcctttctccttttgtgactcttgcagaattaggtgctgattctgagtaaacatcaatatggtgacaaagaatttacagtgggagatagttattgaatagcaaggtttatgttattgtcagaattttaaaaatgctgtgactttgcgatactcattgctatgacttctcctgttaataatctgcctggaagtctggtgtctgatgcttaccaacaattaccatgtggtcgcttagggatgataagtgatgttaatgaggtcaaaggcagaatatcagttgactagagcggcatactagaaatcaggaaattcaacttctggccttggctgggtcagtgattttatgatatttgtcatatcttttgaacattctgtaccttggcttctccatctgttaaactgaattcataataactgtcctggtctgtctcacaggaatgttgcatggacaaattagataagtgtaaaagtgccttggaggtaaagctgctctatgaatataaattagtgtgatatagctactgaaaagtatgttgcagaggctagaatggttagtctctgcaggcttcatgactagataaggcttcataatggattcctgccaagcaaaccaagcccatcttatcagttcatgaccataaagtatttaatggggaaaaaaatctcttacaaacatttgttaccttgatacaaatgtgtgttaaaaatcggtcatgttggggaggggggagagggaagttggtgcacagtgggtataaaatttcagttatacaagatgaataagttctagagatct

SEQ ID NO: 112279 - DNA, 1460 bp, Homo sapiens
ataaaagaatggcaaggggtgacacaaagtagcaaactgaatacttctccaatagcaaccccaagctacctcctcaccctgcatcttggagggaggcaggaaatttcttttgaaataaagtgctggagctgaattctgcattatttatcgttgctgctgaaaccacctataaaagacttgctggctaatgtgcattgtcatataatgtacactgtcacatctttacagtcttgtatgttatagaatacaaaataagttgatggttttgtttggtgtgagctttttgtttgtttgtttagttttgccttcataggttatatgccaagatagtatttgataagtcaatgacatttggatgttttcttcaaagaattttatttgacccagatttcttataaagttatcttacattaaggatgtcattttcatcagaccttctttctacatattattcatgaagcataatgttgcatttctccaaattttatgcctgaaagggtagtgttgcttcctaaggtatcatgttgtctttgtgctttgtccatctcttccgtggcgaagctttatatctgttcctaaaacagttaatcctgtgaaataaatattgaacataatccagaagaatctctctgtttcccttggggaatgccatatttaattcaccagcagtaatcctttaataactggcagagcactttattcttctggtgagctccctgaatatttatttttctgattataaattttctatattagtagcattttttaattattacttcttcactatagagcatttacttttagtctctagatgtatattttggaatgctgtacttggcataacatagattaaaatcataatgcatgactaaaaactccttggatttatttcccattttaaaatttttagcggtaagttcagatttataatctttctctagacttccatggtctgaatgttgcctgctgaagtagcaacctaaaaagtatcccctgcttatgcttgtccagttggccctccatgtccataggcttcgcatctgtgattcagcccactgtgggtcaaaaatatttggggaaaaaaatggatggttgcgcctttgctgaacatgtacaaacttttttttgtcattaaacaatatagtataacaactatttacaaagcatttacattgtattagctattataggtaatctagagatgatttaaagtgtatggtaggatgtgcataggttatatgcaaatactacaccattttctataagggacttgaacatcatggactttagtatcctagggggttcttggaacccatcacccataggggcaccataggacaactatagtaccgtgtttatttcctattaattcaggttccgtttagagtctaaaactaaaacctaatcatttagtcacagtgtaaaaacaaatggaaataacagctcaaatcttcaaaata

SEQ ID NO: 112280 - DNA, 1063 bp, Homo sapiens
attgcattactaccctccagcctaggtggcagagcaagactccatcacacacacacacacacacacacacacacacaaaaagtagaagttgtcattttaactcatatacagtgaattccatgaccaatagattgtgcagaaaatttgtctactaccttgaaattcccttagataaaaaattggtagtgtaatacttatatatgcagttaggtaaaatattgctttgggtaggtaaataatggaatttcataaatttatcctttctttttttttttgagatgagggtatgctctattgcccagtttggagtgcagtggcgcaatcactgctcactgcagccttgaactcctgggctcaagcaatcatccttccacctcagcctcccaaagcactgggattacaggcatgagccaccatgcccagcaaatttatcttctattgaatggttgaatttttaattaaatttcttcaagtagttagcatattttaatatttctaatagaaacacgaggagaagctctaccagtggaactcttaggactctcacaccacatgatagttaaatcagtttttaactgattagcttgcctttctgaaatgtgaccagtacttcattgctttttattttcttacaatttaatttagcctgcttagtttatggatgatttcagctgttaaaaaataagaacctaaattgacactaagacttggaaaatgtaacctatgattaggagactttattttccactaaatacactctaaggaaagttatcctatgtgtttaattgaacaatagaaatggcaactgtgcctgataaacgtatctaaatgtttaaaatcatcatgtaaacccatgatgattcttaggttccaatagtttcagtaaatcagcttcacttttcagaatatttcccagttgaattatacagctgtagctggtgaactcttaccagaattacatgctgcaaaatgatatgccctttcagcagataggcttaagaacacagagaacacacactagtggaatcctggtggtcagtcttaggaggaatcagaaagaata

SEQ ID NO: 112281 - DNA, 1032 bp, Homo sapiens
gaaactgtgttcagaaccctctcacatgcatgttcccatgtttcactccttatttatctaaaacataatttaaatgaaatggctctgtcaaaatctgtatttctttctttttttccttactatttttgagacagagtcttgctctgctacccaggctggagtgcagtggcacaatcacagctcgctgcagcctcaacctcctgggctccagccatctttccatttcagcctccaggatagctgggaccacaggtgtacaccaccacacctggttaatttttgtatttttttgtagagacagggattcaccatgttgcccaggatggtctagagcccctgaactcaagtaatccacctgccttagcgtcccaaagtgctgggattacaggcctgagccactgcgcctaaccaaaatctctatttcttgagtttgaaaattgtatgtcagaaggaaggggaaatgttagaaaaacccagctgtattttcccctttcattttcaattttagaaagcagagattttaccaaatggcaatcgcaatagaaaatacacacaattgagataggacagaatcataaatgtatgtgaggtaacggtgtttgttccttttgtcttaataggtgatccatgaggccttcacaatagggaagttgttctacgtacctcaagaaaactttatcacgtgcgtgccaggtgcctgacatgattctagatgctgaggatgtagcagttagccaaagggatataactcttgctctcatgcagtttatattctaatttggatattctaaatatttcatgtagaatgtcacaattaagatatcacataagaaagatactttcagagcttctctatttaataatttcatgtaggaaaagaaggtctccttagtgtatcttatctttcagacctttatatgtaataacatgatttttcctaatttagaattaacagttttctctagcatgtaagaaaaactgacttgtgtttggaaatcaagacctaagttcaaatcaagacataaacacaca

SEQ ID NO: 112282 - DNA, 1054 bp, Homo sapiens
ataggaacagctaaaaaaaagtcagtttccctgccagagtctgtggaaggctataaaagactgtcattacccttgagacacaaggaatgtctttaaggttcaatgctaggactgtaatactacttcagtgcgtgattatgggcaagtctcttgtatgttctgggcttcagttttgtttcctctaaaatggttggaataatgcatcatttagaggattggtgtgaaattttaataagataacacgcttgattgagcagagacagaaattcaacaggatattaactcaattgacatatttatatgctatatactgtgacaaatgaggggaaacagtgttaaatatctgtctccacttagtaacttattttctgggctttagctaggcttataacctccaggaggaaagacattttctagtttctctttatagccaaatgtggccatgtggttaaattttgactgatattagcaaaagtgttctgtactgctttcagttaccttgtttaaaaagagggtgataacctttctttgtctcttgctcttctgctgactgaaatgtgaacatagtagctggagctcaagtagccatcttggatcattaagtatattttatgtattgaagatggcagaacaacttggtccctgcaaaatttgtgaagccatcttatcagtcacttatctataccatgaaactatcctgtaacatgaatggaaaaatatactataattttaaatattctgaattttctcttggcactgttaagggtcaccttgcttgttgttgtgaagcagacagaaacgcttcatgtcttcatacagcttatattctagtggaaaaggttgggagggggcaggaaatagaattattcagcctgtccatttctagagcccacattcttgtgtgagggagaggcttgtatttggtcccgtgctgatggttaattaataatgcatttacccggacctaatataagacatagtgaacctaagcctttcagaatgagacctttgataaattgaattgttcacaaaaggccagtctttgatgccacac

SEQ ID NO: 112283 - DNA, 1004 bp, Homo sapiens
agagacagtttgttatgatttttgttctaggaattgaacgttaaaaaaaaattgcctttaaaacggtgagaaacacataccatcaaagtttttttgacaagaaattcatcagattttaaaaacaattttttaacttttctgaaaattgaagattcttcaagtaacttcatgaaagatgaaactgatcattacaaaatgcaaaacttacattgatgtagttgtgtttcagagaaataaaaatgttgatttgtttttaatattataagctacatttggtctccaaaatacagttagagcaaagaaaaaatagtatgagctgatgattttcctttagttgcagaaatgcatttctggggatggtgatgtggtggtaagctctaataaaaactgtccagtgtgtcatatttctggcttttatgtgttgcatacaaagcaccatcagtcaaatgagcaacacaagactaccatattaggcattataaacagtgacaaagtataagtagtgcaagtagtcatatttctagttttgaaatgcttaaactctagtagataaagaataatagaaaatgagcgataaaaaaggacataatttagattgtcaagagaaaacacagacccctaagaatttaattaagaggacagattatatttactttttcagcccctaatacagcttcttggacatatataagtgttcattacttaaaatgatctggaactttttctagaatttattatttattcagttaaacacttattgaaagctaaagtgtgtattcagcattgtactacccttgagatactgtggcagactgcttcctggtacatttcattgtgatttttttttttttttttttgttagtcactaattcagatacatagacagttgttacctagtacaactagctaacgtgtttggattataaattcattttggaagagcttacatctatataaaggaaggtacagacagtcctttgcacagttctgattagcacaatatc

SEQ ID NO: 112284 - DNA, 1073 bp, Homo sapiens
cattgtttctttagacataatgctcttgcacactcagtagactacagtatagtgtagacagaactttttttttttttttgaggcggagtcttgcactgtcacgcaggctggagtgcagtggcacgatcttggctcactgcaacctcctcctcccatgttcaaatgattctcctgcctcagcctcctgagtagctgggattacagatgcccaccaccacacccagctaattttttgtatttttagtagagatggtgtttccccatgttggccaggttggtcttaaactcctgacctcaggtgatccaccttccttggcctcccaaactgctaggattacaagcatgagccaccgtgcccagcctgtagacataacatttatatctattgggaaaccaaaaaacaaaaaacaaacaaacaaaaaaaactggtgtgatttgctttatagtcactttattgaagtgatttggaaccaaactcacaatatctctgaggtatgcctttatgtacagaaggtgttaatctagattactccatgagtcttgtctagcagtaaaaacttttgttgtcatttgctttagtcagctttatgcatttactatttttgaacagacttactttcaggtagcaaagttacttcctaagtaagagagttcttattatcaactgttttttttttcctgtatttgcaatctctgaacatactcctgctgttttagtagagatgaaaaattattattttattctttcatagtagtatcttgaagagatttttacctttttatctagtgttatcaaatgttccacagaagtgatgtatttcttttgcgaactgaattcattattattatttttttttaccttctttactttttttcatattgtatacctcttttagtgattgtgttcattgtccatgagggcttagcactggtgctccttatgaagtagtgaagattcagtttttaccaaataaagacagcatttggagaatataggagattctcaactaaagtgtcaactaaaaagacattgacaattcctgatgggttgagactcctggattgccatagga

SEQ ID NO: 112285 - DNA, 1064 bp, Homo sapiens
aagtatttgctttttcttattttcttgtcacagatacatatgataagaaatatatatgtatatttatgtgtgtgtgcacatgtatgtgtgtgttttgagacagggttttgctttgtcacccaggctggagtgcagtagtgggatccatgctcacggcagcgttgaacccccgcactcaagcagtcctcccacctcagcttcctgaatagctaggattgcaggcatacttcaccatgtccaactaatttatttttactttttgtatacatggggtctcactatgttgtccaggctggtctcaaacttctggcctcaagcagtccttctgcttcagcctcccaaaccgtagggttagcaggcatgagccactgcagttagcttcatttttatgttcttaaaaacaattaggcaggggacaatgaaattggaatgaggagtaagataaggcagcaagaaatcagagtgacaggaggaagaagatagaggatggtaaataatggaaagcagtgaggagatagatgattttactaaagttggggaacaaggcttatggtttcttctactatgatacttgtagacctgtttagctcactattctcagggccaggggaagcattttaataatagtatcatctaattttgcaattcatgaacaccttagtaacccagtctccagctaataattctgtttcatccttaccaaatagcccttatgaagagggaatctttcatcattctttatgaggggatctgtttcattttttcatagccctaagactggaagacactttttaatgttgatccctaatcatctttctgtcagctgctgctcattggtcctatttctagctcctagataaacatacaatgtgctttctccctaacaaatcctctgtatttggtgataactgtcatattccttatttcctgagctggccctcatatgatgacaaggagacagtagattgtagggcagaggttgatactatttttttctaatatttgtgtggtacgtttgtgttcttacttggaaatctttgttgggagggctaagatgatcctct

SEQ ID NO: 112286 - DNA, 1647 bp, Homo sapiens
gagatgatttatgtaaattgtgaatcgttagatttttaattaaacatgtctcttattttcagagtttatgcgaattccatgtgtggatgctggattgatttcaccactggtgcagctgctaaatagcaaagaccaggaagtgctgcttcaaacgggcagggctctaggaaacatatgttacgatagccgtaagtgttgacatctcaataatacacatacatttttaagaattatgatattcagactaatctgcttttgtgttagcagtgacttttctaggctaaaacactaacatgggccggcatgattcagcactgcttatttagcagaatttatggagattcaggtcgttgtattcttatcaaagaaatcataggaaatgaaatgttttcctctgttatcacaaatgatattttcagaggaaattaagtcagtttctaagaaattggggctgtaagtttagaaaaaatacatatgtgcatcttctcaattaggtttcattgaaatattatctctgaatgggaatgcttatggacacagttttttaaagtttctgcgtctgtccaaatacatttttaattatttgcagttcggtaaaaccaatcataaaaaccattctcttctcaaaagctagattggcccattacatttgcattgactccattcctgtttgtcattatatcattgtcatcctcaccacattctataatatactgttctactaggcaaaaagaaagcaagaactggggtatgggtatattgtaacagcgttaacaatttctacttcccctttctacatataaacaaaatacagaaaagaattttaagtatatttagcttaactaggcttattctgattttccttagagttttatttgctgagccaaaacacgtattttatcattcacctgtaatgcctcctaggaatttagttttatttctataactaggataacttttagtgcttattttccccattgagtgtttaactcggatgagttatattttgttataacacaaaagatatggcccttttataataggcagtccttcaaaaagtgatttatgcatataagccagaaagaaaggacataaatatattcatttatgataaagaagtaggaaaaaagattgaaactatagttataactcatatatagcagtagtcgtaaagctagcctcatttattctccttttcttactttttctgaaataggagctacaatagccataagtattgaaatgtcagtaatgaatctgaggacatagatgtcttaatatgaattttaacttcagttttcagtccccagtatagcctgtaaatctgcttatctgctccttcaatccagttctttttatcatagggtattagctttatttacaaaattctgttgctttatgtttataattttgtgttttcatatttaggatttttattaagcaccatagtttataatatcaactttcaagactgaatcatttattatatatttatatgattaattttagcaacatatattagacctcagctgagtaatagtcaaaagattagtggcatgtacttggagagtactgattattactgtttttattcttacttttctgtgtttgttactggaatttaagggtaccaaaagtattcttttt

SEQ ID NO: 112287 - DNA, 1033 bp, Homo sapiens
tagcatagtgtatttgaaaggaggtgagctccaactgtagaaagaattaccataaaatccgtggaaatctttggagaaaaactaggtcagatttcagttttaccagccttgacagtgcccattttaggaacttttcctaatggaagaaaacggccttatataatcctgacatgaggtaacagactggcataccgctaaatgggacggagtaaagctttgttgctgatgaactttttgaatcccagtctccttcttgcatatagagatgaaagaatcactcactggctgggaacgtttttcatttaaaatgcttggtctcttttcttccagagagctgcaaggcacttcatttatgtatttctctttcgaagtatccgaacagacttctgatataagcaatattttaaaatgcttctgccctttaactttgccaaaataactctttttatgagaaatttgacatctttcagatcagagaagaaaggaaagttgtatttcaatttggaaagaaataatcaaaatatgtgcgattgatgggatacaccagggaatgtggttttaaagcgcagtagtattatatttcagaaatgcatgcctttggcctatttacacttccttttcaaaggttttataaaaaagaggattatgttcttatatagctgtctttgtggcattcctcattttattgatttgtttatataactgtacacattttaaattgctgatatacttaaatggccttatagttttaaaaagctttatgttaaattcccatcctgtatttataattcctggggataaattggtgatttgagactagtgttctgttttgtggatattactgcctgaggtcagaaaataattgttacttgatctactggttaaaagatattagtagaggctagaagaaaatgattacgtgaaattaaatatttgtgcctttttatacaccgaggaagaataatgtacaaatcaaataaaaatgttttaaaattaaacaaatatacctctttatagaaataaaatgtatgct

SEQ ID NO: 112288 - DNA, 1654 bp, Homo sapiens
atttcctagaaagggaataactgatagggaaatattatagaccaaaaaaagtgaaattatgaactcaagtaaacaggttgatattaaaatgagaaaggacatttctgccatagagaataaaagacagaagataaatgaaagtataaaaaaacctttaagtagtaaagagggcactcaaaagtgtatttctgggtatagttctgtcttcccagtaaggtagatgtcaggctcatctgttaataaaagtcaacaccaaaatgatggtaggaagtttgtggttttgggggaaagttcaaaattggggctgtaggacatgtaaatcatgaagatacgattttttaaaatagccaaatagtaatataggtatgctatggtagagatcttgattgtgcatccattaatgtatagtgtgcttaaaatgtctataggctaaggaattattttgactttgatatgtggacaggaaggagcctctgaaagtaacttgaagaaattgatattttcagttttgtagcatcatatagtctaattggaatggacagagatgtgaggcagagatatcaggaagccattacaggaggccgggtgtggtgtggtaaatagtgactgcggcagagagaacgaaattatattgtaaagtgagagacagtactcagatagtttattatcagtttggctggtttttgcgtagcactgcaccaggtttatttaagcaatgtaaagtactctatctcttcagatagtttacactttgagaaactatgatctttccatttttgtacttggtattaaatttaaatccctcttttattaaatggtgtttggaaatccaagattctataaagtttaccttaaaattgtaggacaaagaacacatattactgcttttttccccatgcttgattactttccaaatactatgttataaaaagctaatgtcttagggaagacatgaaatagtaatttcgagtaattgttcttaattttatagatacgaaagtagaggcaacctgtgagagagtattgcacgtggcaaaaatattagatgatttttcttgggttcaataagaagtcatatatggttgccttcccccccaaccccacccccattctctgagtcagaagtctgaatggctttagaactttcctttcctcattaagaggacttaggtagggtgggaaaagtctaattatagaggcctacttgggggtttaaaaacattttttgtctaaatctgttttttccccttacctttaccactctcatttcacctgttaaagtcaaagtttagatatgtgaaacataagatttccagtctgcttattgaaaccctgtcaacacatattatcctctgctctttttaatagggttttgtttacatttttaaaattttcttatttgtaaccaagttgaagtactgagaactttctcaacttttaatcagccttttccttgctacaagtagggtgcattttccttggcggtgaggaaatatgaaaaataaatgctacgtaaaagtgaataattcagggccaggcatagtggctcacgcttgtaatcccatcattttgggagggcgaggcaggtggatcacttgaggtcaggagttcaagagcagtctggtcaacatggtgaaaccccatctctactttt

SEQ ID NO: 112289 - DNA, 1047 bp, Homo sapiens
gtacataatagaaattcactgttggcaaaattatagggggaaatgtaagcattagaatttaattttctttcctagtagacttcataaatacattttaactttatcttgaaaaacaatgtagggtctgcatgtggtggctcacagctgtgatcctaacattttcagaggctaaggtgagaggatcacttgagcccaggagtgcaagattagcctgggcgtcatagcaagatcgcatctctacaaaaaataaatttagctgtgcatgatggagcacttctgtagtcctgctactcaggaggctgaggtaggatgacacgagcctgggagttcaaggctgcagggagacatgattgtgctaccacactccagcctgggtgacagagcaagaccttgtctgaaaacagacaacaactaacacaatgtaggtatgtctattaccatttccctgctccaggaaattaaaatagaacttggcaaaattaaaagcagtatatttaataggaatgggaaaaaaaaagccttcataatcatgcagatcagaatggccagtatttcagacttagaaaaatacgttgctgctcatgatttacatccctgacttctaatctctttgagtgtgaaaacttcctttttaacaccacaaattattgttctctccctttgaggatataggtcacatatttttatagtaatgattgtacttacaaaatgtatgtactgagaagatatgaaataatgagtaaatgccaggaaattctcactctatgtctttgtattctttggtgtatacatactacaattaaatccacacatattgattgaaccaactatgtttaggggacactgcctgtgatggggattataggggaaagaatgagcaagaagtctctatccttgtgaggctttcacaggaggaggtagataataaacaagtaaatactacagaaaagatatttatagattgtgatgactgacatcaagggaataaagaaggtgatgtataataatggagtgtatttgagggtgaagaaagttctctctgtggat

SEQ ID NO: 112290 - DNA, 2550 bp, Homo sapiens
catctaatatgattcagcaacagtaataaagatgtgaccttagtttcagttcttatatttggaaaatgaaaatctttcaaattgtaactaacttcgtagctgtaattcctttgtgagtcatttattttgctgatctttgtgctatatttctgtagctgaatagtacagtgtggtagctactagccaaatttagctactgagcaatttaaatgtggctagtctgagttgagatgtaactgtaagggtataaaacacttggattttgaagatatattgtgaagatgataatacaaaatattttgttaatttattgatttgcatatcagagtgatatatattgaattgaataaaatattactaaaattaattttcacctgttttttaatgtgtctattagtaaatttaaattacacatgtggttcacatttatggctcacacatttctcttggacctcttctagagggtggttatattttatctaaggtgtcagatttagaatgacacgtattcttcttttaatttattttcattcttatgttcaaaagttagaaagtagtctaaagctgtttgtatgttctgacagttaagtaacatctgttttatgcaatgtagatggacacataatggaagttatgtttgaccatcacttgaccactttttgtaatgttgaattatattggtgtgccctagaagagagggaataaggaaaaaagaaacaaatcaagaatgaaaaaagggaacatgcttctggactataggaaatgccattaacaaagaccatagtaccaatattcaggaattacctattatgatttagagttacaccatatggttttctttaataagagctattatcaaagacataataacgttcccatatggttttcttcgataatagctgattttgaaaaccaatgacaaaaagttatatttagtgattttttcaacctgagggacaaaaacttatatcaatagaatatcacttagtttctgtttttttctcttacacagcattgtcatttgtgaaagagggagtgaaagttttcatattgtaaacttctaggacacagggaagttctgtaagctcctatatgatgccaatgagaataatcttggtttgcttaaaaagtgattgtctcttttccccatcccacccccatttccatgtttatttcttttgtttttttctgaaaagacatatttaatgtcctgcctaggtttattttctatttattcacaaaataaagaataacactgttatgttttgtatttgaaattgtaaggtacatttcttttttcttttatttttaatttaactctttgttttacagatgagggcagaagtgcagttgaccaagcaggtggtgcacagattgtaattgaccatttaaggtcactgtgcagtataacagatcccgccaatgagaagctcttgactgtcttttgtggcatgctgatgaactatagcaatgagaatggtaaacaaaactgaaaacttgctttatctctgggggaaaaattaaaaattatctttactatagtgcaaaacaaaaatatttgaaaaatgatgaacaaagaattcgtaagtggcatataaaattaataattagccaacattaaatttcaatgtttcaaaaatgtaaaatggttaatttactaaatgggactaatttttgaagggctgccagttttgatcagtatcaaaaacaaaaactccacagccctatagtatgatttaagcattcttactgtgaacattttaaaaataaacaatattaaaatagttttatcttcgttatatatataccaggagtagctttaaaatatgaacactgtttgcagaagtaaaattattttatctagatgctaggtttacttcgaataattttttaaaactctaataaaatctggctttagaaacaagttcagagcaactgtagagatctcattttagaaatttaattattgtaaacagcagtttcttttctctgtaaaacatttttagaccctagaaacaagtgatgtatcaataattttcagatagcctatatggttaattaaatgcatataaatctgtgatattaaggcttcacaatacgtttgtgtcacaaaatatccatttgtttctttatcatcttatgtgaatcactgtgtggatcagacattcaaattttggtatgttcctggtatgtaacacaaataaggtctttctgtggtttgtttcataatggcattttaagttgtgatattttggcagagacattttatttgcatattagacatgcagtattattctttactttcgtgtgttgtagaaacacgtggcccttttggcatactttttattttttttcacattttatagttgtgggtccaaagaaatattctcaataattcaaaaaaaaaaaaaaagataaaccttggcaataaatggctactgatatttggcccttgttgttagtgacaacagtgaatggtggggactgtggtaagttgaagagcccttgtcctattgaaaggggaaaaccactactcttctctagccagtt

SEQ ID NO: 112291 - DNA, 1095 bp, Homo sapiens
acgggtgaaaaagagcatttcctagatgtgttagatgtttagaaaaatgatttgcttcacatgagtgaagaactatttttaaactttacttactgtggttacaagctagttaataatttatatatttcctaaatagtaaattatttttaccttactctaaggaaaaagaacaaaacaatatgtaaaaggtaaaattgtatctttgcaatttattatcttttttaaagtttttcttctttctcagagatccttgttctgatactgtcttttttaatgaaactaattttccatcatactaccttacatgtattttatttttcctctatttatgaagacatgggagatgtacatttaagttaacatcttttgaagcccagtttgtcactttttactccagtgagttaaatgaagtgtgttgaagacttattgggcagctgaaaagtacttaggcttttttattctttctttattatactaactgttgttctttatttactgttgttctcttttttaaaaattcctgaatttttgctgtttgtccaacagctttctagtcagtttgctgaaaaaggttgctttcataaagttctaccacaagtgttattttaaacaaattgtttcactaaagaatagagcagttagttagtctggtgcctcttgctaattcaacctattaaatttgaccaattagaccaggttagcttttagtgataatcttcctagactatttctatgataatgctgttacttaatgaacaggctgagagcttgattttcagtagaggtgtatcagatacacattttggtctaattccacatgatcaagtattggcatttatattcagctttggccattagagaatgaacttctgaatgtaagaagctgaaattttatcttagaaaaataaaattattatagtctttttgtcagtaattttagcagtctaatacttaaaatttggcattatattattacaggaataatactttctcagcattgttagcttctagattgctactgcgattatgataatgcatttaatatcataataccacatagatgcccacttagttgagggcagtgaaagggcaaaa

SEQ ID NO: 112292 - DNA, 1013 bp, Homo sapiens
gacatatagtggagtttgactcacattcaatgcatgcgctagtgctcacgcttacatacctgaaatttaatgattcatcagctctgcagtatttgacaaagtagtgaaaatgaatacatatataaataaaaatactgctaaagaacaaggatcttcagaggtgaccctctagtaaagagccctatctactggtaagtaacctaaataatttctaacttggaaagctccttggtgcatgattattacaaatactataaccataatgcaactattctgccaatataatatagatataacactattgtgtaagtattttacctttaagtgttgtgaattattgctaaatttcatattcagaaaaaaatttaacatcaaaagtataaatacagattacttagttgagtatattttaattcttatctccttttagatttcataacttcattacaaaatttgaaattgttttattagagtatttgaactctaaacataaacttccatttttccatgtttattttttattcttattttggtaataggcccctttctattatagatgggctcccacaaccaaaccagataattatctgtaattagccagtcatcagttttcagggacactaagcctctgttgactatctcctcatacttcactctaaaagcaggaagaattaacaacaaagaccaccaggcaataatgaactggcatgtgagatagctcaactctgtatgttcttttctgaaaatcacccacctgcttccttatctatagattaagaactataaagagtaataaaaaaaattagcaggccaaccctgccaagggattggaactatgaggaacgtgtttttgtaagaaagttttgtctttagattgcaaagagaaataaaagaatttggggaaaattattagcttgaaaatggcatatcattttaaagagaaaaaaatttgtttagtctttagattgcaaagagaaataacttaaaagaatttggggaaaattattagcttg

SEQ ID NO: 112293 - DNA, 1035 bp, Homo sapiens
attctcagcttacaaagataacaggattaagagattaaagtaaagacaggcataagaaattatgagtattatttgggaactgataaatgtccatgaaatcttcacaatttatgtttttctgccacggtgccagccagtcccaccatttggggtccctgacttcccacaacatatatctgctcaggagatagatggagacagatatggaggcaaatataagctcttcagtgaaataagtgttataatgaaagaatacttaaagatattagaagtataataaaaagtgttgatgtgggggtggagtttcctatgaagatcagttttaaaaatgtaattgggatgtaaattctgtctctaaaataccttatgttatgtttagccatcagaaaggttcaaggttatttttttcttttaacttttattatgaacattttgaaatgtattcagaaatagcatttagtaaaccaccatgtacccatcactcaagaaagctttaaatcaatgaaaacctgaagccctttttaaaaacacgactttatttatttatttatttaatttttatagacagggtctcactctgttgcccagactggagtgcagtggcacagtcatagcttactgtaaccttgaactcctggcctcaagcaatcttcctgccttggcctcccaaagcactgggattacaagtgtaagccaccatgcccagccctattttatagtattttatagcttgccctttaaacatgagcatgatatctagagtaatagtggagtgatactagttgctttcagagctgagtatcaatttgtttagatgctgcaagacatcctgaaaaatttggcaatttcaaatggaaatatgaaataaagcttttttgtatatttaaatgaactgtcaagatagtttactttgaagatttgagtttcaaaaatgtattatctaaatcatgcattttcttagttttttttttttttttttttttttttttttgagacagagtctcgctctattgcccaggctggagtgcagtgttg

SEQ ID NO: 112294 - DNA, 1359 bp, Homo sapiens
aaggacttgtttttagcttttaggattatgtaatcataaaaaatagcaaataaaagatttaaaagttggttttggaactccatttgttaatttttatgcttgttataattatttatttatacatattatttatttatttatttatttatttatttgtttatttatttatttttgagacagagtcttgttctgtcacccaggctggagtgcagtggtgcgacctcagctcaccgcaacttccgcctcctgggttcaagcaattttcctgcctcagcctcctgagtagctaggattacaggcatgctccacaactcctggctaattgttttggaatttcactagacatggggcttgttgctcaggctgctcttgaactcctggcctcaagcgatccacccacttcagcctcccaaagtgctgggattacaggtgtgagccaccatgtccagcctataattgactttaaatagaaattataccatatctctccttattagtacttatagtcctggttttaggttgctttattcatcagtttcggcagggggtgttgtgttttggcattctatacccatttttaccttggctttgaaatcaaatttcattattgtgacagtcaaaaattttttaaatttgtcttccagacagggagagcatttttctgtttgcagaaacagcagtcagaaccactcctaggaatgaattatgtttatttacttatttctaaattttaaacccttttctatattgattgcatagagtctttctaagaaccctgcattatagtccgccagagcactaacagactagcaggcttaaccaaaagagtatgaagtcatttgttgttgtattttctataaaatttcacagtgttacagaagaaggcaaatagcccatcacataaggaatatttgcagttctagctttaatgaaattgtcgtgctgtgtttttttagacgtccttcacactctcaaatctgtacgaattatttcaactgattgtctgttagtgattcattccttggtttgccttctttcctatagcagaagctgctgaacaattgggaaagaatgttaagttagtggagcgtttggtggaatggtgtgaagccaaagatcatgctggtgtgatgggggagtcaaacagactgctgtctgcccttatacgacacagtaaatcaaaagtaagttccagaggaaactgttcactagaaaacttcagagtgtctttttcagaaacccagcattgtaggtcctaacaactgggataatatttacctgaaagtattgtgaagattcagtgagatcatgtatataatgtgcttagctgatacatgggatataggaaacactcggtaa

SEQ ID NO: 112295 - DNA, 1057 bp, Homo sapiens
ttgggccacgttcaaaatcatcctgggctgcaggttggacacgcttggtttagagttttggcaaaccataattgtattaactaatttacagacatgatcctggcatctgaatttggaactctcagataaattcctgttacatgtagtagtaaggctcgtggaaaccttgattaatctagtatcttcagtatcaactaacagaattacataaccaaaccattcatggacacaaaaatatgtccacaggaagatacatcccagcttcttagaaacatctgaatttaggagccagaactacttaaatgctataatatttaataaatttaaagattttgaggcttttctgtgaattttgttcatagatccccctttccctcatctaacctcccacttctcgcccatccccgaaaagaagagttcaaatacccatcaccacgcaggttctttgaatgatgagaactgtggcatggtacccttttaggaaaaggtggatgggggtgtgtgtagcagaaaacaacttgaaattatataggattgtaactttatagttacatattacaactttaggattacaattcaatacctttacatatctttcctacaattgagagtatactgctgctaagcagccaaggagccttgattctcacactttaatgagcagaactataaagtgtgttaattgcatgagttctatgtcagagctgttattttctaacttaaccagtgttacagtagacatgactgcttttgagcagcagttcaagtttgtttcatcaaattataatcccaagaaatcttctacaaagaaagagttgcataggtagattagttatgcaaatagtaattatttttttctttgcctttgagattcacagcacacattaatactaaagaaacctctttaattttatttgaatccactgattgccaaactgtttgaccatggatcctttctgcaggtggcatctgttattacactggacgtactttggaaaaatgctgttctagaataagtttttaaaataattaaacaccaggttcaaatgtattacat

SEQ ID NO: 112296 - DNA, 1114 bp, Homo sapiens
tgccactgtactcaaacctgggcagcagagcaagtccccatctttaaaattttttcctttaatttaaaaaaaagtaaagtttttatgatttttttaaattataatacatttctaagaaagacattgctaggctactgctatgtctttttccagaattgtttctagttttataagcttagtcttgtcaaaataaacattttggtatatgttttggatagacttagaacaacctaacagaatcatatctgttatttttttgtcttccagaatgtctacacaaggaagtacaggatttggcttttctagatgtcgtatccaaacttcgcagtcatgagaacaaaagtgttgcccagcaggcctctctcacagagcagagacttactgtggaaagctgagaactgcccgatacacggcatcatcccatctctaatttcccctctgtcctccatccagcggcttcttccgcttcattctctaccataccacttgtgcatgcatgtgatgttctaataccaattgaagaaccgctgtaggtacctccctaataagatttctaaacctatagttagtgtgatcatgactttgtcaaaggcaagtctccacccataaccgttctcttgtattcctgttgcttgagctacattaagtagaatgtgcatgttgtagtcctatgatgatgtaaacttggtactacataatgacttgctccacacatgcagtaaactacataatgatgtactggtaaactagaaacaaagaatgcagcaggatctgtctagcttattaaagatgaaactgaattggaaaaatagctccattttttggtgcttgggaagcacagtgaccaaaaaagttgtatggctgcttattcattagtctttcctactgatgtcaaatccatggtacctagagttaaataaaattccaatgctcttactctttaacttctggtttctcctttttcctttttagactattgaaactgccacaaacttggcaagactttctgaggtttctgattccatatttaattgactattatcaatagcctgatattgaaaaacatttgtagttttcagtgtgaaactaaggggttgaagaatcactattacaa

SEQ ID NO: 112297 - DNA, 1011 bp, Homo sapiens
aagaaataagcttgtctagactaaagaaaggaaagcaggttataaaagccatagtagccagtccagttcattctgcagatggccccataccaatcgctgttagagtttgccacctccactttcccactgagaactgcagcaattttaaaggatatgagaaagccaagactcaagagatgagaagacccccttggcgaaatatagtgtactcttcactgccactgccaccaccaaatgggtttttagagctttgaaacacaatctttgtaaattaatcaaaacctccctgtgacccacctgccttctccccatacccaaatttgaccactactggcctaaaaggcaagatgggcttcgatatagaaggactgcaagacagtagaaagggctgccacggaggtgacagtagctccttcctctccaacatgtgatgctacacatctctgtggataatctaagttggacttttgactctaaaacagctataatccaagaaagttaaattctaatggaggtaaagaatcttgactgattgttccctttgatgtccaaataagggaactattgtgagtacgtatgctacacttactataagaatgatactgtttgttgtctttctcctgggctggatagtggactatattttattacaggctttgaaagacatctgtaatgttgcatatctgttcatattaataacttaataaatagtatatgaagctataatggcatcatttggtttgtttgtatattttgtctctatttccagctcctagaataaggcttgctattgatgttcaacaaatatttgttgactgaatgaatgaatcctgcatccatgaagtttccagactgcctgaactaattccagaaagatagactgactgactgatagaaagtttgagatttgatagtttgtctgactttagggaaaaaattttaacaaaagcatcctaaaatcgtaaatgtgagagaagttaccatctaggccagctgccagccatcaatttg

SEQ ID NO: 112298 - DNA, 2738 bp, Homo sapiens
tttctttttggggtaatgaaatgttctgtgattagatagtggtgatagttgcatagctttgtgaatatactaaaagcccctgaattatacacatttcaaggatgctttttaccacatatgaattacatcttaaatttcaaaaatcaatgatttaaaaaaatgggacacagtggccagggaaacaagttacaagtgtcactgtttcactcacattttcttcctttctcagatatttgggatatgcctggcccagaatttggttagcgatatcgaagctgtcagggcgagctggtagaccccctgcaaccgctgctgcaagacactggacagacccagctttcgggaccctcccgcgtgccgaactgatcttcgagctgcatggacctaatcacagatgcagcctgcagtctcgcctaatggagctgccattaggggagtgtaaaactgggaaatgctgctcactgacagaattaaaaaaaaaaataaccagtatgaaagtcgttgcgccgtgaatctctactgtagccatgaatttatggacagttagatgcttaccaaaaaagaaaaaaagggagggtaggggacccagatgtacttgaatgtgcagaaaatacattcttgtcctcatcttccgtaattggagggctgggagaggcagctttgctcttcaccacaccttggacggaccaccttctttctgttccatggcctgaaggagtgcatctcctcaaagactcagcccctcacctgggagggcagtggtttgtgggcatccctccatgtacattttaggaaacacttgcaactctcatctgaagaagaaaacaactcatctttgggttcagattttgtgatggtattcagcaagtcacttgggcgagcacacttggtctatcctggaaagtctccttataagagaagttgtgtatttcatgtgcaccgagcaagggcattggaagacgtcatgaggctgtattttagcaggactgatcgtttttctaagtagacctgagctttgtttatcagtgaaattcaaggagaaaatgaggttaatgaagaggtatcagttaaatatccccttcttctcaccctgccaaaattagcagttggatttttggaaactctggaatattctgggtcattttgttttgtatgtttgttgtttttcgtcttccaaaggtgaaagctatgatacagttccacttaaattttagtgttttcttactcagctcaagcattaatttttgattaagtcttaatctgcatgacctgtgaatctgaatccatcatctccctttcctgccagcttttctacaaacattgaaatatgttatttggtcagcacttatttcctaggttcacagccttgggaggttgtggcatgtcctcccagtctggctgggaagagaccagctgtaccatccaaatgcttccctggtcttgatgatctcttccagagtcgatctgagtggccttttctgcaccctccccttctttctctttgaatggaattaaacccaatttggaaacaacattgacccagtcaaaagcttctaatggtttctttttcttcctccagttttagtttgcttttattaaaaaaagaaaatagtgcatggccatagctccttcagttctcttattgcagactaaccatcaggatggtatcaaagcacaaatactttggaggggaatgcgttgaactggggcaagtactctgtaacacaaagtgggaaaccacttcctggtgctgccgctcctgcccccactttaggtgggagggacgagttttgccctctagattttaatccagctggtgtccaccggatgttgccctcctggggagcagatatcagtctgtggaactctgggaaaaccacaggcacatttttcggtgcggacagatttgccagcacataactgggcagccagctagaatactttgtggaaattaagcgaggttttccatttcagccccatggtgcatggtggtggccgatgaatgtgtcagtctgctcagagaaaggacaaaaaggaaattattttcaaaactgtgttcactgtttgggtgtgtgtatggctctgcatgtgtgtgtttttgtctctgtataggtagaggtattcacatcttactccgactgtaaggttgtcttacttcatctctgcccccaccacagttgccattttgtaatgtccttccaacatggagaagacacgagctctctccagttggcatcatttgtcttttttgttgattgcctcattctccagtgaactccatctggccaattgattcagaatcaggcaagatccctgccctttggcacatccactgaaaggccaaacagcaagtccgagtgagttttaaatattaattaatcaccctttattttttacacttgagagtgattgtaataaaggctgtcattaataaacttggttctaccttacatggtgtgtctttcttcattacttctttcttgaaattgtgaaattttcgaatccagtggttctcaaactttagcaggtgtcagaatcactgggaggacttgttaaaacacatgaatgcatttgctccgtgcccataatttctaacttagtaggtctggggtggggctggagaatttgtattctgataagatcgtaggtgatgctgtttgcggcttgtttggggactacactttgagaagcattgttctgatccagttttctaggaggggaaacagaaaggtaagatt

SEQ ID NO: 112299 - DNA, 1431 bp, Homo sapiens
ccaggctagagtgcagtggcatgatcttggctcactgaaagctccgcctcttgggttcatgccattctcctgcctcagcctcccgagtagctgggactacaggtgcccgccactacgcccggctaatttttttgtatttttaatagagacggggtttcaccgtgttagctaggatggtctcgatctcctgacctcgtgatccgcccatctcggcctcccaaagtgctgggattacaggagtgatccaccgtgcctggcctgatttgtgttttattaaagctctgagtttagatgctactatcatgaaatactttaggaaaccttgtctttttctaagatggagacattaattagatagtggttgcctactggcattccatcgtttacatgggctcaaaaatactgcattgtggcaactgagtcaaacatgcatagttagaagtagatctcagtggtgacgttaaggttttgggaagtttcacagagatgtcatacccctttctctccctaaactaccttgccaaagtgctagtgaaggaagggagcacccacttttcctcctggccagtcttaagagctggactcttcatgttgttggtgtgatactttccaaagagcacatagttgaaacaaattaaagaagacctaagtaaatataaagatatcctgtgttcacaattgcaaaacttcatattattaaggtaacaacactcatcaagttgatctacagattcagtgtaatccctatcaaaattgtaaccacctttttagcaaaaatggacaagctgatcctaaaattcatatggaaaagcaagggacccataatagccaaaacaaatttgcaaaagtaaaacaaagttggagaattcacactacccagttcaaaacttagtacaaagctatatagtaatcaacatagtgtgtacttgagtaagattagccatatagagaagtggaataaaattgaaaaatcaagaaataaaaccaggccaggtgtggtagctcatggatgtaatcccagcactttgagagaccaaggcaggaggatggcttgagcccaggagttcaagaccagcctgagcaacatagcaagtccttgtctctacaaaaagtaaaaataaaaaaattagccaaatgtaatggcacatgcctgtggtcctagctactcagcaggctgaagtgggaggattgcttgagcccagaaggttgaagctgcagtgagtcgtgattatgcaactgcactctaacctgggtgacagagcaagaccttgtctcaaaaaaataagaaaaaaatatatatgattaaaaagaagaaataaggccgggtgcagtggctcatgcctgtaattccagaactttgggaggctgagtcaggtggatcacttgagctcaggagtttcaaaacagcctgggcaacatgacaaaaccctg

SEQ ID NO: 112300 - DNA, 1536 bp, Homo sapiens
atcatggctgtcctttcctatttgcatttgaggaacattgttttgctccgggtttaaagttttctttggttattaaatatggattctttcttatcccttgcccccttttttggtaatccttgatatttcacagctcataataatctacttatcaacagaataatttgccacaaagttcctaaaatgtgcctatccaaatattattattgcacatgcagttaaaagcaaaagcttagaaactcctaagtcctagtggcttctaacaagtgaagaatctgtgcagtggaatccgggccactctctcctatccctgagcattggagtccaggccactccctcccgtctctgagcatgcctgtgaaatggctctttcagtgccagcaaagcagcagatgtcccgtttcactcagaatgcaagggaccaaaagacacaggtctagtgccaaaatctgataagggaccctgggctcacaggaccttgacctatttccccaatagcaaaatggaaataatactagctactgtctaactcacagggatattatgacactaatgagacatacatgtttttatattaggctaaggtgttagggtcctacaaacttgcaggtctttatatacctgcactgaaaagtcgggtaggctgagcttggacttggacagcggtgtctgtggcattcatgtatatggcaggaccggagggcaagcagaagcccagtgaacggtagccttcttggggttggatagttgtctgcctgtgatgaagggaggcagcagccatgttgacactctttatgagggaggccatccccttccttaggcactcaggactgagcagggttatgtggttttgttcagtggcagcaacatttcgtcctggagtaagctgccccttaagtgggaaattaagccctgattcatgtcctcagccgacttcactgttttattaggtcctaatgggtgcaggctccctaataatccctttcctggcattattcctgactagtttgcatgacacattgatggagctttgtggacacacctcgaaatgcatgacccaagccctggaaggaccatgttgtcttgggatgctgtgtgctttaaacggaaatactacagtttcatgtgattttctttttgcatcatggaatgtaatgtttagaagtagctgttggtccggaaggtcttcaaatggttgagacttgatatttatttaactcagagaagtagagaaagtgcatcccagggaagtgaggaaggggcttgtgtagtagcctttgactccggccccatttaagaaccactgaatttaaccgcttgttttaatatattttaattggaagactgactttttaaagttgaaaatgtaaaacacatgcacttgtttttaaacaaactcagagtagaaacaaatatgatgaaaagttaacctctaaaatttttggtggtaatggatatatcaactatatatccattgattgtggtgacatttttgtgatgtatacagatgtcaaaatttatcaaattgtatacttt

SEQ ID NO: 112301 - DNA, 1134 bp, Homo sapiens
tgccagatctacagacatctaatgtctgcagatacccactccctgcctagcctccctaatcacataagactgggacatcttcgaaggcaaggataccccttgttcttactcatccttgtttctgcaaagcccacctacctcagggcctgactcattgtgggtcattcagtagatgtttgctgaatgaataaacattgtttgtcttttgttcttttaatgagtaactgctgtttcctttgcacccctccccaatacatttttctcttggctggcagctccttgtctgcttgctgaagatagaaccgcagaccacctgagcaccccctgcctcctcagctgctcactgttcttctgcatgtggccttcaggacctctgcccagcagttgtggcccatgtcaccctctctgctgttgtcaccagaaatttacccgcactgtaccctctggtccttcacagctcatttctcataatctattttaacaacaaagtttgagaaggttaagaatacaggatggtaggaggtggaaaaaacagtgggcgtgagcagtaagtcgatatgactaagctgagactcttctgagtcttctagatggaaggggaatttctccagagttacgggcagttaccacgttgcctcatggtcttgagcccctcttttaaaacccctgttgtctacattaagcggaagtctccccttggctgcattttgatgtcacttaaaatgttgctggggcccatgcttcctagaggaaggcaagcacagctagcattcccaggaaagccctcaactcaggggtttcattttgtttttatgatgggaaataactttcatttcgcggtcactgcccaccccactacttcctctttgaccccttcatctaagatgaacacatctgttattttaccctgtatagcaggtgcaaaagagaattaaaatggtgtctgaatccataaaaggaatatattgcatagagaatcaaggccacagtaacaagtgacaggcgatcttaaaatattggaataatctatctttcaagttacagaagcttactagagataggggcaggtcattgttacaagcatctggcagtacattaatcatgagaaattaattaggccttaatgtgggtcta

SEQ ID NO: 112302 - DNA, 1328 bp, Homo sapiens
gctttgcaataggcatttgtctaacttctgcgtgaattgggtcttacagaagatgacctcccccctctctgggggtcagggggtgtgtgtgttttttatacatctgtctttttttgtttgtttgtttttactgaagacctcttatatttgcagacactgaaaccaaaggtaacaccacgtcttctccttacagggtctaatgacagtttcttgggctcttcttttcttttttttttttttttctctacatatagttttcccaaaaatatgaacacgtttagatgttggaaagaaagcagtttccctccctccttccctccatccccccctccctcccttcctcgcttcctcccttcctcccttttgtttctctcttttctctttctctctctttctctttctttctcactctttctttctctttctctttctctctctctttctttcctctcttaagtattaatcacatacctgataatcagatgccctctgaaggttttctttgggaggggaaaggacaaatgcaataatctttacatgttggaaaactgaccccacatccccgtgccttgttgtgtgttcttttctgctcccagggagttctgtccaacatctcttccatcaccgatctcggcggctttgacccagtttggctcttccttgtggtgggaggagtgatgttcattttgggatttgcagggtgcattggagcgctacgggaaaacactttccttctcaagtttgtaagtattccactctctactctcagattgagagccaaaactttaccttccatcaggaggtcaccctatctacaggcaagacagtgagctgtaccaaaggcactggccaaagtagggcccaggtcattattttcttttgagagagctctctagccctgattcccagttgtgcctccttaataagtacaacaccacccccaccaccccaccatgccatccatggaggttttgtgcatatatatcacagacttggattccattccctaagatatctttaggactaaggtaggtatatatatatattttcttctaagtgattccttcccaccgttttaatgcacatagtaagtggggagctgtgcaggctgttggtttggagaaaccaggcaaaagcacagtgactgtggcctgtccagattaaatctgttaagcagtaggttttgctaaatatggagaaacagtaaaaggtaaagcttctttgtccttagctggtacaaagttctcctttgtaatttttagatgtggtgcggttggcgtgatcactgtctgagtgaatgtttgtagaggagaggtttcaccaggggg

SEQ ID NO: 112303 - DNA, 1045 bp, Homo sapiens
agctcagttcgaaccagaacaaacacagaccagagagtgtgcagtttgcaagatttaatagagtgaaaacagagctcccatacaacgggaggggacccaaaggggttgcccactccctgcttgaatgcctgagtttatatctcgatcattgtccctccccctgtgctctcaggcgatatatgatttgacaatttctttacctcctgctttagcctaatttgtattttagtgagcctatttactacctgattggttgggtgtgagctgagtagttacaagccccatgtttaaaagtgggtgcggtcacctttcccagctaggcttaggaattcttattcggcctgggaaatccagctagtcctgtctctcagtattagaaatgcctctttatgatggaactgacatttctctctgtcaattctgctactgctacctcttctttctggtgccaagttagctgtgtcttcttctcccataattaagcttaaagtcttttaagaatgtcttcatgtatccccaaagtcttctctctcttccggtggctgagaaggtccataacctgaaagcttcaggtactaacatctgtggttaaaggcattgtcagaggagaggctggtttcctaacaaccctgggcctttagcactgttgcttggattttttattttaagtttatttttgtagagaaagggtctcgctatactgcccaggctggtctcaaactcctggcctcaagcgatcctcccacttcagcctcccaaagtgttgggattacaggtgtgagccactccacccagcctgttgcttggattttgtccgacttctctggcaagttttttctcagcatcatttgtataggtggagaatttggtttgagtatttctgttttccttcaaccttttcccccggagtaaatattcatagttcactgcttggaaacccaagaaacaaaattggatcaaacctttggtctatgcagacttgtgaagggtgtggttgccttctttgatgtcacctcagaagttaatgaatacaacctcaatccta

SEQ ID NO: 112304 - DNA, 2977 bp, Homo sapiens
cacatgggtaagagtgcctgcctggctggtttctggtgagggtgaagtagtccaggtagcccagtgcctggctggagtcactgctgagaagtgtagttcttttggtgctgcttttattcaggccttcagcagatctcacccggatcaccccagagcctgctagctgcttccacagcacgtgactgccacctgagcgggcttctaaattcagaaatggcctggagcttcctctgctccaaatgccctcagatacaaacccagcctcgcccaaccagcctcttcatctcttctcaccgcttgtcacatagaggccccactgggccagatcctgtcgctttgtctgcactcttactgatgggaccttctgcccctccccatgcacccccataacacccactgcttgtgcctctgctccatgcactctgttcttaaccgtctcccctctagactcagctcctgagggtgtcactggatgttttgctagaaataacccttgactgacataatacctggcaactcacaggtgatcctcatgaaagtatttgctcaataaatgaacgagtctcatatttttgaggtcccagaatagagggtcacctgccgctagtccagacttcaccttttttcacttgagtttaggggcaccatgatcagagcctgttttagctcaggctgctgtaacaaaatactatagactgggtggcttaaataacaaacatttctctctcacagttcgccaggctgggaagtccaagatcaaggtggtgacagattcagttcctggcgagggccctcggtttgcagccgcctttttgctgtgtgctggcatggcagagtgagagagggagggccctggtctcttccttttctttttttttttttttttttgagatggagtctctctgtgtcacccaagctggagtgcagtggcacgatctcggctcactgcaacctccgcctcctggattcaagcagttctcctgctcagccttccgagtagctgggactacaaggcgcacgcctggctgatttttgtatttttagtagagacggggtttcactgtgttggccaggctggtctcaaactcctgacctcatgatctgcccgcctcagtctcccaaagtgctgggattacaggtgtgagccactgtgcccagcctcttccttttcttataaagacactaatcccatcatgggggtcccaccctcatgacatcttccaaacctaattacctcccaaaggccccacctcaaaatactaccacacgggggcttagggtatcagaatgtgaatttgggggagtcacgaacatttagtccataccagaacctctattaaatctttcagcttaaactttacacctaggctggaatgtttctaggtatgtctcccgtcttctgaatgtaaatgaaaatatctgggaatggctgagaacatgggtgatttctgaaaggctgcgcttttgcatgtggctgtttccacgctgatggggcagtggctctcaccagagtgtgtagagatggtagtttccctgcctgtgagcagtgccacctgatggaacttggtaccgctggcctccccagcagctacttgattgcaggattgtatggagacctaaaagatgactacccctccttctcctcttctcctcaaaggcaggtcatggccactttttaatctgcaaaaaaaggattacttgagtttcactaatgaccttttttgacaagaaaaaatgggaaggagccatgcacctttgaagcagctagtcgtcttttatccttgtatctctttgccaggcatgaactaagctgctcttgctcccttacatctccctggactgttcagggcctgacaggctttcttctcattcctagtcgtcactctggcctctgcagcagttccttagatagatggatgtttggagttttacagagtggcggagcatctttgacaagtttttataggggcaggttcctctgtggccctgtggtctctatttgttcttactgtgcatactgtttagaaccacatttctaactctccaggatcacccctcgctgagtagctgtattttctttgaaatgtcattcctcgttaccctttctcactagggaaatccttctctatctcttactctaggaaaactgttgtcagtaggatctggtttatggaggggttggtgaatcaagagctagtctcataaatctcaaaggggtccatctggcccagctttgggtacacatttcataggcctgtctctctctctttcttatccagcagttggaaggaatgtgcttgtatatgcaaaagcagaagagtcccagaccttggggtttattaatgctatttttgtatttcttttctgtgtgggttgcgagaagaagcttgccaggtggcacacagaggctcctctgtgctggtgatgaaaaaaaaaaacacagacactcctgaagtttattggtgtggaacccttctggagttttgtttgccttttcgtttctgcatgtgcatagaaacctctttcaagaagaaatagttactcagaacatattcctttattgcagaagcatggggaagaagctgcttaaattccagagacagctgaatgaataaggcactaatgaggagagggaaggttagctggtttgtccttttttttttttttttttttgagacggaggctctctctgtctcccgggctgtagtgcagtttcgcagtctcagctcactggcgtgggcaaggtccgcctcccgggttcatgccattctcctgcctcagcctcccgagtagctgggactactcccaccaccacacctggctaattttttgtatttttagtagagacaggatttcaccacgttagccaggatggtctcgatctcctgacctcttgatccacccgcctcggcctcccagagtgctgggattacaggcatgagccactgcgcctggccggttggctggtttttcacat

SEQ ID NO: 112305 - DNA, 1058 bp, Homo sapiens
ctccctctattccttctgctaaggcagactgtccttttgccccaccatgccacctgggaaaattctgattcagtaggtccaggatagacactgcgatgctctattttaacaggcctactagattgttgtgactgcagtcaagtttagttatcattgataaaagccagtgacatgctgttgagcaggccaaggacagagcccaatgacatgtcactagaaatttcctttggggttgacactcattcacttatgtgtgcccttgggtgtcatcagtcaaggagtttctcatccatctacttgtcattacatcagactatatttctgcatcttgtctttgtagatagatggtatctttcactttttcactggttaactggcctaggcacttaactgaacctagcactttcttattgaacccatgctgggtcctgaagcacatcattttctcatccaggtacttgggaacctttatcagcaaagcaaggactaaggcataatacatcactcctcaattcgagaaacgttttcctcacttggcttccaggatatcacactctcctggtttccatacctcacaggtggtgccttctcacatgtgtttgctagttccacctcatttccctgacctctaaattttggagtgcccaaggctcagtctgagctttgactcgtcttaagaaatctcatctagacttggggctttacatgccatctgtcactgatgacttccaaatgaatatttttgcttccaacctcatctgaattctagacttgcatagccagcatccacactgaaatgcctggtaggcttctgaaacttaacacattcaaaacaacacaagtgattctcatgccctcccaacctgctcttcccaattgcggtaaagaaacaactccactcttctacttgctcattcctgacactctgctttcttttctcctcataccatattcagcccatcagcaaatactgtcagctctactttgaaactatattgaaaatccgatttcttccaccacctccgctgttataccctgttctaagtggccaccacatc

SEQ ID NO: 112306 - DNA, 1330 bp, Homo sapiens
aggcagcctcaaattttaggagagtttcaggctccaatccatggaccagagaattgggtttgttttgtggtctcttgaggaggatgtgaagtgtgttgatctccttggtaactgcagagactgctctctcaaagccctttgggttaatttctgagttcggccaggcctctgctggagtaagttttcaaggtgaaccccagcctggtagacagtgtggtgaacactgcacctgctgagctgacaccatcagcccatgaatcagtacatcccctagacccagatgtggcgacatttacttgtaagaggcctggagggtaaatccccaaactggatcatagctggaaggatgagatttccactggaagaaacacattttcttagcagataggactttcagcatattcatgtgaagtacagaagcattgaaagcaaaaatgattaccccatacttaatatcagtctgagttttaaacctagggctaatattgcagttcaacattagacataataatttaaagaattcattttgtctgagttttaaatcaactgtaaaaatgcaaaggatgagtgtctccaagggaagctgatttatgtgcaattgttcagagatcataggatctgctgtttggaaggaacattaacaattatgtgacatgaatcacctccacaacacccttgacaacatccagtgacagtcaactcattcattcagataacatttattgagcacatagcatgggcagggcttgtgctgaattctagggaaatgtggatgaagtgacctagtttcagtcttcatggagtttatccagttgtaggaagggtgtgtgcatatacctaaaataatacactgcaataaatgctacttaggggtgtatatatgtttaatggttcccacagcaaagtgctcagcatttctgtctctttaggttgcccttcctgttggaaagaccttcattccaccgaattagaatcatgtcccactagttttcactcattgattctggatctaccctgttggatcccacagaataagtctttccacatgttagcccgggaggtatgtcagggtgagggcctggttccttctgagtttccaggctaaacatctgcttctctctaggtggtcctcacaggatgtgggctggagccccttgtccattttgttggtgctcatctggccccgctctggtgtcttttctgcaccatggagaggaagctttaggggctgtagagagtgtggctggattgcgtcctttctcccctcatcaatctagcttgggatccactgtagatcacggtgtctgcagctcactgagagtcccaagta

SEQ ID NO: 112307 - DNA, 1040 bp, Homo sapiens
tttttttccttgcctttcctcttgtttttcctttcctttcctttctaacagactcactgtctcactcaggctagaatgcagtgacgtgatcatacctcaatgtaaccttgaactcctgggctcaagcgatcctcccactcagcctcccaagtagctgtgaccacagacacataccaccatgcccggctaatctttttaattttattttcatatttattttttatattcactgtgttgcccaggctggtctcaaactcctggactcaagcaatcctcccacattggcctcccaaagtgctgggactacagactgagccattgcacctggacctaaaggcccataattttaaccttgtaccctgctgcttcctgccactgagtccatagagtctctgccttttcatctgctgtctccatcttgctgcggctgcctcttcctttttcagctgatgtcattctcaccaaattagtagcctcccaatttgtcttgctacctgcagtctcatctctcttcaattcattctttgtactgtgctggaaagatgtttctgaaatgcaaatctgataacttgttttgcttaaaatccttggttggcttcccatggcttgctggtcccttggtacccataacacatacagctatgctgatcaggccttaacccttctagcccagaggttctcaaacttcaacacatgtcacaattacctgcagggcttgttaagaagacagaacttgctgggccctgcccccagagtttctgatgtagtaggtctcgagctgcctcagaatttgcatttctgacaagttccctggtgctaccactggtgcgggaccatagcctgcctagtgccttgtctggctctctctgctccagccctggaaccacttgcaggttcctgaagggagatgctgtttcaggctttgatccttttggataagctgttgcctctacaggagatagtctttctatcgccgtctctttaaaatacagttcaagtgtcacttcctaggaagcttcctctgacccctgcagtgatct

SEQ ID NO: 112308 - DNA, 1852 bp, Homo sapiens
atagatcttctcatcctgcatttggagtggtcgggattctggagtcagatgcctgggtttgaattggggttttcccagtcactaggtaggtagcaactctagtccaggctacttaatgtctcgtaagctcagtttccacagttggaaagtgacgatatggtgtttacttcagtggttgtcctgaaactttattgaaatgacacaagttcgtaactgtgccagttccattgtaaggatgcaataaatgttagctcttgtttttattaatgacgaggatataatgtttaaactcaatgcccacttcgggcagttttttaccctgtagaagcagttgtaatcattttcaaatcaggcttgctacacccttccagctggaaagaaaagtctctaatttcattgattttcgagggcacatgctttagttgaatgagtagtaaccaaatggagatatgtagtaggcggttagaagtgttagcatctttgggatcatgtggtcaaccacattataaatgaatgcttggatgtaagggcagacctgcatctgtgtgtgtgttttcagtgggtggatggggccatgtggtatcacagcgtgccacacagggatttacggtggtcaagaagcatttgtggtacagagcttggagtttggagtaaggcttccttgttttgcatcctggctctaccactgtcaatctgtgtgaccttgggtgagtcacttaactgtttcctcacctgttaaatgtgaataataacagtacctctccccttttgtgaagactgaatgagataaatgaaaagctgtttgcagtatggtcatactaaaatgggagcagtcagtaccctccccccatttccagcagagtggtgggcaggtctagctagcccttgtacatacaccttgcagaatagtttatagtagtgagcatagctggtaaatgtacaataaaaaaagttcctgtttttcatttctacctgattgaatgagacacctatttaatgcaaatttcaataatgctctgatactaactctgttcaagttagtaagagagctttgtagagttattgtgacacctgggttaagtatggctgactttgggttaagtatgaggtctaatcatcccagtctgtcctctagattttttgctgttttgttcaatataattatgtaaacaggtattctctatgtaaacatttgtgaaagttaaaataccaaagcagattaaatatagaactagactggatgcctacatcagtgttttagtgacagcaaaaaaaaaaaaaaaaatcatctgttacatttaattattttggctagtttcagttctgttggtttgatagtattctttttagttgatatataaatttgcttggggttttataccagtcttctatttctgcatatttaaggaatattttaataaataataacttatgtcaaccttgaggatctatgacttttttcttttaaagagagttcatatattagtccataaccattgaatagatcgttcagagtgtatgaagaagagcataatcctgtgcacagctggcttttctgatttgcagggtatttagtgtacatttctctatccagctcatatgccggacagaggaacactttacccttctggtctctctgcctgttgggcaattgggttattctgggtatgtggaggagcttttttgattcttgttgtgagggatgctttcaacagaaaagagaggaagaatatttgtctttcattgctcaatacccagatatttcatattcatcagaaatagctacttctgaattcttttttcctctttaaattagacacaacattatcccgtctactgttatttctttttt

SEQ ID NO: 112309 - DNA, 1046 bp, Homo sapiens
tcaggtagtctcaaggtatgcattatttgggggaaaattagaaaattccctaaagacatttaaaaattctaaagtaggctgggtgcagtggctcacacctgtaatcccagcactttgggaggccaaggcaggtagatcacttgaggtcaggagttcaagaccaacctggccaacatggtgaaaccctgtctctgctaaaaatacaaaaaaaaattagcctggcgtggtgtcgggagcctgtaatcccagctacttgggaggctgaggcaggagaatcgcttcaaccagggaggcggaggttgtggtgagccgagatcacgccactgcactctagtctgggcgacagagggagacttcatctcaaaaaaaaaaaaaattctaaagtagcagaattgttatgtatgtatttatggatgggtgtatatatatgtatattaagaaatgctagtcaaagtgcagatatgatttacacattatctaatggaagctttctaacccccgaccccataggcacatccacgatgcgagaacacaggctcatgcagagttgaaacgctgttgccaaactaaatcaagactgataattggccagttagctcaaagagtcaatgaaaatgatgagggtgtgtgtaaaatgacacatactttacacattttattttaaatgaaaatacgattttgaagtagtatattgtctagcattttggttttttccctgctcgtgctgtgtgcatggagactctgatatttttcccccagtggtatgtcacttgctgtaatattttgagtactaggaatgttttgagataggcccaaggtctttttcttgtctaagtgtcctctgactgaagtatcttccttgtgtaaacttcagccataatttgtcagccacaacttccatttacatttttttaaggtggacctagaactcagcaatacttgcaaagtaatctaagtcgggaggtttttccagaatttttccagtgttatgcagttgtctccgtcacacctcattcaacagcaaacttttgtcatggtttgccttc

SEQ ID NO: 112310 - DNA, 2597 bp, Homo sapiens
ctaattttttgccatgaatgtgttcggcactaggaaaggtgatacatactagaactgaggaacttaactgggggttcatatgctttctaagagaccgtgggagagtttctgggcatctctgcacccctaaaatcctagcaaaattgtgtatgtgtgcacgcttttgtgtttttttctttttctttttcttttttttttttttttgagacagagtctcgctctgtcgcccaggctggagtgtagtggcatgatctcggctgtcagctcactgcagcctctacctccagggttcaagggattctcctgcctcagcctcctgagtagctgggattacaggcacccaccaccacgccagcgaatttttatattttagtagagacggggtttcaccgtgttggccaggctggtctcaaacccctggactcaagtgatccgtctacctcggcttcccaaagtgctgggattacaggcgtgagccaccacacctggcttctttgtgcatttttcctgagtaaggatgtgtagctttcattagatgctcaaaggagatccttaatccacagaaggttcagagccactgataggaaatatttaacactgacagaaaatagttctgaactttgcgattaaataatttattgtgagtgggaggagctaaaagagtgatgccacttaggagaagcacaaaggaatctgagctcgaggatgaattgttaatctatgttaatgaattcagtctgtacagggttcaaacaaaatatattatggatgagcctctaataaaatggacttcctctgctctgccagtccgacagttaatgatggctggcaattttctgccggctgattttggctcagtgctttggagcaggcacaggcccagttctcgccacttggaaggaaagggaaagtgatagtttgttactttgctctcataagcaatttatgacaacagtttaataaaagcttaagaagtgtcctcttcctgggcggggagaggagccgaggagcctcagtgggagcaccgcgtgggatgttaagcccctcagcatctcctggggccgcctgacgctgccacacaagagaagagcgagggggagccagcgaggtgtttcttttagcccaggcaaggctactgttatgcttgccaatttgacttttccccagcaaactcaagctgtcctgtgagtttccacatcagccgtgtgcctggggagctgctccgagcttgggctctggtgctgtctgctgcatggacctcattagcgctcacccagcagattgctttcatatcgctgcttcacccttttcagttttgaattaccacataaacatcagatattgggggttttgtgaaaggatccttagtctctaatatttagttaaggaaaaaagccctcttagggaatcagatagatttgcttagaggatttcctcaggaaaatacattgcagtatgggtcagttctaattttcctcaattcctgaggccatttagttttcacttctctctctctctctccccacctcaaccctgtgagtccaggtttaggggattttacagccagccttcacacaactttctgctctacatttgtggccttaaaactttatgatttataggaaagtatatttcatgtcatgaactgggatataaatatgtatgtatatatgtataagcaaaaaggtttcacaaggcaatatttgcccttatataccatagtctgatattttctattctgtcggggaatactgctggtcttcactcattaaatcattttcatggctcaccaatggtttgcaccctgcagttggaaaacacctctcagggatactcagggatccgtcctttctatcactgtgttgagggatggctcagggcaccgtgtagtggctgaacctctttatgtggtacagcagaaccaactttatgtattttcagtaacacttctgatattctggagggagtagagcatagtgatttaagagcgaatgttctagttagaatatgcttgcttggtcctgggtctctgacctaccacctgctctggtgttgggcaagtttcttaacctctctgaatcagtttgcccttctttaaaatagatataatttgaatacttatagcgaaacattgtgaagattgagatgtatattattaatacattattaatatatcctaatgcacatctattaagacacaatacagaattaatattaatagcaaacatttgttcaatgttactatgtgtctgtggtaaatttaacaaatgtttgctattaacattattaatactgtatcttaatatttatgtgtatctccagttggattacattttccttctgccctttgaaataacttatgttgagcctattaagaatatgtgggttgggtgtgctggctcacgcctgtaatcccagcactttgggaggttgaggtgggcatatcgcttgaggccaggagttctagaccagcctaggcaacatggtgaaaccctgcctctacaaaaaatacaaagaaattagccaggtgtggtggcacacgccagtagtcacagctacttgagaggctgaggtgggaggatcacctgagcccagga

SEQ ID NO: 112311 - DNA, 1010 bp, Homo sapiens
taggaaaacttctggtgttctcaggctatttcttctattaccatccaaggcctaacacttctagctccaagcagagtatctttctgtgggatttttatactcatgtcacttcctctccccaacccccaccttgaacatgtattatacatggaattctttggtaaatagaatgcaaatttgttttcaaagcttgtttggcacatactctctcctttagaaagcaaagggtgtcctttcagaaggttcttataatatttgtggatctggccttcaggtctaagctgaagcttttgttttcatttggactttatgcatgtattaacagtttatattttctgtggtaatggaatattttaggggttgtttcttcattatatttagattcttatattaaaaagcgtgcaaaggcatttaaccaaatttaatctagaaataaagataatatggtaatttcaaatagctttttgttcaagatgagattttaaaagttattattccacagtgaattttaatgatgattgtgtacaatggcatttatggatgtgcagcaattgaatgagtatgattagcgcgttagattatggatttgtaatgtgaaatgagaactttttaataagctttctccataatggttcacgctgtgaacaaacaaagtatgagacactgagcttcactaaatcattgcagggctttggaatcagtaggttcatgttttcaaatagtttcctatttttaaaaacaccgctaaaaagttaagaggcagctacataactagatatcttatattttgaggagttggaagaacatgtttctttttataataaaaggaaaatgttattgttgaagtatatttattgttcaagtataaaatggaattgaagttatgctttgagaaaaacttgattgcaagaccttattaggatttaacacctcatcaagactgctttttacattttttttttaatttattttttttttagatagagtctcgctctgtcacccaggatgga

SEQ ID NO: 112312 - DNA, 1056 bp, Homo sapiens
ctgtgacagtttcgtagacctttttgtttttgatgatcttgacagttttgaggaatagtgtttaggtattttgtggaatgttcctcagatttgtctgttgtttttctcatgattagactaggggaagacccacagaggttaagtgccatttttgttgtatcaggggtacatcctgtcaacatgacttatcactgatgtgatcatgtcaacataatcttgatcacgtggccgatgcaatccgctgccagatttctccactgtaaagtgactcggcccacctcctttggaaggaggccactacgtacagcccttgcataaggaatggggaattttgcccttcccagttgtgggcagaatatttacataaattatttggaattctcagttgtatttctaagtgtgtgattttaaaaactacttggatgttaaaatggttactgttgtattcattattgagtgaatacttacaaatgtggtctgatgaacattttattctacctaagggaaaaaaacagcttcccaaattgcagccaccctgcctagttcagagactgtagaatttgtattcctccccgagtgtgttcttagtagcacgccagaagtgccagatgctaccctctctttttctgtgtcatgatttaataccatttgtgcattttcttctgcttcagttgatttagtgtcatttttggagaccacagacctatttgtattttatatgttactatacagtgtgtattctgtttagaaaaataaaaacgctagtatgataaaatgtactattttattatctttatttttaaagtgttactatcaaagacatcctttggtgtctcataattggctttgactttgttgctctcaataagagtatatgattccagattttctgtttagtcaatgtttaaactacttcatgtttaacatttatgcacattataatacaatgtggtaataagggtcatttggcttcttggctctttcaaaatattggtataatttttaacaaatttattttgaaataatcatttcactttttgatgagtataaacttgg

SEQ ID NO: 112313 - DNA, 1010 bp, Homo sapiens
tttattcaataaatactgaatatctaccattttccaggatttgtgccaggtcctagggatatgacaatggaaaaagatctgctaatattgtatttttagtagagacaaggtttctccatgttgggtcaggctggtcttgaactcccgacctcaggtgatccgcccaccttggcctcccaaagtgctgggattataggcgtgagcctggatgactgtcctttttgcagtgatgtataggcccaggccctttccacgttatggctctgctagccccattgtgttccgttttatgtgaaagggtaaagaagagagcatggagtggatatatttgtttcttaaagccttgcctcagaagtgacacctaccacttctctcacagtccattggtaaagacaagtcacaaagccactcaaactgcaagggcagctgagacatgtggtctagctgggtgaccagaaagacaaaatggagttttggtagacagctaccaaactcggccacatacctcattatactagctgcaaactgtgttatcgttagttgcctgcatattaattagttccttctgcttagaacacttttatctagaatatttgcaacatttgccactcacttcatttaaatctcagctcatctgaaacttcttccaagtgtaagaccactcagtctggaaaagctccccatcttcctacactgccttttttactttagagcccctgtcacacattatattatatatatagtttagtttattgtgctcccctgcacaggaatgtaagtgtcatgatggcacagcatttgttttgctcattgttctatctacagaatctagaagagtgcctggcacttgtcttcaaggattatccacatcctgaaggcagagctttgttgttcacatttcagtgaatatttgctgagcggagcctcatgctagacaggccttggaggcacgtcctaaacaaggaaaacacgccccctgcctccctcaattgaagatattagtctcttca

SEQ ID NO: 112314 - DNA, 1052 bp, Homo sapiens
gcctttggtattattctcgaggttgtcagcatacatccccactgccatctttttctaatgcaaaggtcttttcattaatggatattttttcctgtgagacttgtttaggggagagatgcatccctcatttccccacccccacccgccataaggtttttacaagccaagctagagattgctttccagccactttcagaaaaatgctggggctccactttgtgtttagcacaatcagcacacataattcttgttctgcttgggctctgttcaatgtcacttgctcctcctgaccctagaaagagttgagaattataagcacggattataaggactcataatctcagttgccagagtaagggaaataacgttttcaccggttccctgaaatagacctggcggacagctgttgcctcccctcccctttcctctcatttcccctggagatgtactctgcctgtttcttctcctcgctaaaactaaggaactttcccttgtgttttcttttggcttctagattgttcacttggctttttatctaagcttgtattaaattgcttcatgatctgtgcctgcagaggctttggcataacatggctcacagagaagtgttgtttgttgtggttggaccactttgttgcagcagcatctgttcttgtctgaatggggcatgcaggtgaagcatgtactctaggccactgaaaaaggagggaacacaggcacctggactgaccattggcagctgtgatctacttatgtgactctcagacagcctctcagctgcttgtgataaaggctacaaaattccaggcagctttttggtccccataacaagtatatataactcctactttaagcagtccaaatttaatacagagcaatgggatgagatgtatgtaggtggtgtcacatccacaagaatatctttaatcattattcttttcagcaattcagtttcaagaggaataagtgaatttaggaaatttgtatatgggaaaacattgtcaatcagtaaatgcgtggtctactgtgtatattttctcctcagttcttta

SEQ ID NO: 112315 - DNA, 1030 bp, Homo sapiens
ccgccccgccaccaccgccaacaactaactgaactcgtttctacttctctgacccactgccctggccaaagtcctccctgcctttccaggcccctttcaggtttcctctctctccttttgtgtctagccctcattgctcaccatcatcttctctgacctcctgtggtacttgaggacatactggaggcagacccatctgcgattacatcccaaccgtgctgtgttgctttgaacaaggcagccacatctccgaaccactgaaaaaaggcataataatgatagctggatcctgggatttctggattctgtaaaaccaattgtgtaaaagttctttgtaaatggttagatgtgcctggtttcttcagtaatcagttatttttgaaattatttttaatttgtcccatagtaaggaatatattttaatgttgtgatgggcacatacattttaattaagagttccacaggaacattttcttctttttttgtgtgtgttaaaaacagtgtttattttgacccatttaattgattttgactatccactgtaggaggctacccacaatttggaaggaaccatcgggcctagatgacaataaaccctttgagggcagggaatgtattttgcacttctgcgtcctcataggcccaacaggttacgagaagatccagtctgttgatggattttgtgctgggagtaggcaggatggagagacttattcaaatttcaaattatttattgagtgcccctttgcaagaattggccagttaaaccctggggggcagctttgtagctgcactactcgggagcctgcaccctcttgaagacatcatgccagcgtctcctgcacttggccgtgtaggctgcagcacagctgtttctgctacaatcagctccagtatttgtattcctcctcttgaggccgaggcttgttcgttggccccagggaatgtgttgtgttggggtttgaatctcctgtcctgcgtgcggtgcccctgccaagggctgtgcacccacctgtcccagatgggtctt

SEQ ID NO: 112316 - DNA, 1017 bp, Homo sapiens
aacctccacctctcaggcaccctgagaggccctgttctcaggccttctcagggtactggtaggtgaggccccagcacgcgttgctcagagccagtttggctcaggtctgtaggaggtgcgatgtggacataagtggggtggagtatgaaagaggagagatggcaaaatgggagagcgtttacctggtcaagggcttaggtcacattaggttctcaaaggcaaatatggcttcatgtggatactttcttgagtccatctctctctgtttctgttcctccctctgcctaacctatcctggctctaagctggctcagacactgcgtttgtgtcttttcacgtggcatttttcttttttccctccaccttgctaagtgctgaaatttgcagtcagcatttatatatgccctatagacaaggcacatttctctagttttacctttcttgtcatttgtgatcttttaaattttcagtcaatggaaagtaattgttaatatgaattgcagtttggaaactttgtgccagatgatgaaactgaatgaatctgtggtctttacgtaggcagtgccttacgtatggtttggtttttggcccatgtactagatgtttgcctttctgtgggctgtcacagatctggcatgtacctttatttttttgggagtttctacatgtgttgctgcaatctctcagctaagagtatttttcagtcctcttgctatttgttttttaccacttatagggtgaaaggaagtaaaattagataggattttgatgtttgatttaaaaatcaacatttccatgaattcaaaacttcaagaagatgaaaggataacattgattcttctgtttaaagaaaattgatttcctttggctgaaaaagttttgttctctctctcttggtgttcattattttagatgttccctttggactctgtgcacatccccatcatagaacctactatatttactatgatagtaaattgacctctctgccaacaccactggaccatgtaagttcct

SEQ ID NO: 112317 - DNA, 2108 bp, Homo sapiens
gagaaaccttgatagggcccttggatgaagcactgcagcttatgctaagaagatcaaggccctgttagactggaaacattcattgtaagacctagtgccataaggtaaagaggtctctaggagaatgctcaagatctctgagggataactgttaaatatcctgtaagaattaggcttaaattatacacacgtgagaaaggtaagtgctctcagtgcagggggtaaaataaacctttagtgaaactctatgacgaggaaccctgcccatcaactgttggtaagtttagaaaaaatgaagagatgcaattcaaggtcagtaagtaggtgaaatatgatgtgcgcataaacctttaaaggtttgagaggttggctgtttttggtaacgggttaacttgaggattaatgagtcaggatatatggaaagttaaaattcccttctctgcaccattcaattcagttcaacaaatactttcccaggccaaatgggatcattagccttgtaggaaactcttggcctttttaaaatgatgacattgtggccagttttgtaaatacagttgatgcgtgaatctgtagaccaaggatcagattaattttgtaatgccctcagggaaggcagttgatgaactggtttctctgcatcataagagcagtgttaatgatccacttgtaccatgagattctaacattcctgagttacctaaatgcttcagtgttccctgccatgtaattttaagctgtatgtacatttttgggataatttttatccatattttgtttaaaaaatgaactaaaccaaactaaaattcagaacattttgtacttctgcttcttattaagattgtttagtccttggtgggtgatgtgagaagatcagtacttaacagtttgagaattcttgctctcataaatcaaaatagtattcgatgacagttttcaaacagtttcaagtgatgatttagattctcttgtagttgttatctactttagaatagtgttactatgatttaaaagttggtatttcggctgggccatggtggctcaagcctgtaatcctaaaactttgggaggccaagatgggaggatcacttgagcgcaggagttcgagaccagcctgggcaacatagactctatctgtacaaaatacaaaatttaaaaagttgttatttcatgagtttgcatttttaaatgcaatggacaatagatagaactgtttataagatatatttgcttgtatgtttttctcttcatattacgaggtcaaaccacagaggaaaaataaaatttggaggccctaagcctatttacccaatgtctcctagaagagcccccttcagaaacttctagcaattgttagtgttgcttgggttaatagccatggtcaaagcatgaacagaacaaaataaaaattttctaaatataaaggaaatatggtaataactgagaagccaagcattaataactgggaagccaagcattctctcaatatcctctttctccataagaaacgtgtagcattttccttggagaagggtctatgttacttttgttcagcccttgatgaaaacaacatatggttagttttatgaggacttagagacagatggtgacctacaggctaattatgcagtgggcaagattctttaaacaaatcactgtgattgtgacatggccctttctcatgagttagacaatctggactgttcattgtcacactaggtaaacatgttccaggtgaatgaggaagaggtgctacgtgagggaaatgtatttacaacatcttttcatctccatatttactttaatgggtataagagaaaaggaagtcaagaaggtaaaaggggagcacactaaaacctcagctagtgctaggattgtgttattttggacagctaacttttcagatagctgaggggttcccccattaagcataaacgtttttcttttaatcactttgaatgaactctttctgaagtcttccttgccctctgaaaacagaatgtctgagacgtagtaggctttatagtgtttatgatcttacttttcctgctttcccaaacgtaagcttcatgaaggtagcggtctcagtctgttctgtgctgtgaccc

SEQ ID NO: 112318 - DNA, 1114 bp, Homo sapiens
tacaaatacaaaaattagctgggcgtggtggtgtgtgcctgtaatcccaggggtagctgagacaggagaatctcttgaacccaggagacggaggttgcagtgagccgagattgtgccactgcactccagcctgggcgacagagcaagactctgtctcaaaaaaataaaataaatactaataaatacttaatgaaagaaggagaaaagtctagggaagttattatttggggaagagctaagaggaattcatctgtgaatagacaaactgaatatcattccacgattactttcactttaaatgtaagtatttaagggtaccgtgaatgaattccttcacagatgtgttggctctgcagggataaaggtgatggggtttccagttcatgttgcaagttcatgtctcaaggggaggttctgtgagacttgggctgtgtcctgaccacacagctttgcataattgattaattctgcataactgcttgcattcctttcctaaaataactttcactttctaattagctctccagaattaataagtgccaaaaaataggatgtgtgttgaatcttgtgatctaatgtgatgctgccaactcacacagatttaaggtataattaataatgctgaatctctgagggaattcttaattcctgaattggtagacagatctctaaaaagtagctaatacttattgtgtttaccatgtgccgggcactgtgctgaggactttacccagtttacctccttgatctgttttcattatcacaaacaccctaaggattagtattatgggtatctccatttctagagaggtaaagtcactcacacagccaattgacacagccagtgaatagcagaactggatttgggctgaaagagtcaggctctggagccagtgctcctaaaggccatgtgacattgcttctcttttctttctctggggtgttccagttttcctcagggcttcgtcattgctgctttctacttgctgacacttttgtcaaatgtgataaacagcaaaaattgatacagtacaggtccaaaataaacggaccctgataggtaccacaggtaaagttgttggcaaatgacatcacttatgtaatggtaggtcct

SEQ ID NO: 112319 - DNA, 1040 bp, Homo sapiens
ggtcagctggacaacttgcctcgctgggatagagcagtcagagtcagatgatgtttctatgaactgttttgttggggtcagatggactcaactgtgcagtccacatcatctgcccccatctgcactgacctgatatggtgggtggccacatcctaaaatagtttctcagagactttgtgtgtgaaacatacatataaatgtgttcatgtttataatgttggtgtgcaagagtttattttgcttaaagaagataatggaaattttggtttcaactaacatatctattttctctccactaatgagtatggaaggttttctcctagatgaaaacatggagagaatcactaataagaagagaaagctgttgagtactgttaaaatatcacaaaacagttactattatagtcatatatatgatacgttcattcttttagaggataatttaaacattattttgggtatatagggttttaaaaaatctattcagcatctaatatgaatgtgtgaaaaatttcacataaattttcatatagtaattgggaccaaattatttgctgtcttttgtctctttcacattgtttatgaagatctggcttgaataaaggagtcaggagctttcgccttccatagctaagcccaactgtcctaatgctgcataagacagctgggattagagaaactcttgaaaagcaggattggtaatgggaagtgatagctgtgtgtgaaagccttaatgctgaagtgcattcttgtaacgcaattttcttgtctgccttgttatcttacaattttagtgggaaaaataataacaatgttatttcaaagaaatggttaaaaaatagtcaaacttaatagaaagcagagccctgtcctttggttaaacactcatttactcagctctctctctctttttaaaaaacagaaccatgaatccttcctgtacagttgcatgggttgatattaactctctctcagcttattcactgtccacctaaaagaatagtacagggctccagaaatgtaccttgctctggtttata

SEQ ID NO: 112320 - DNA, 1048 bp, Homo sapiens
agtcagtctaatgaaatttgatttcatgcagagggtctcttagacaaaaattacatctataagcaaattactggctgcgcaggttactttgaaatatttctggtgtttttttaaaaaaatcagttaagctgatcagagacaaagggaagaaattacccttttctttttaatgtgcagcaaaatgtgtactaatggtgcaatcacagaatattaggttgttaatacaatcaataaaaagttaatccgttttggatttcattgtattatgtttttcttgtttgtggaataacgtaattgtgacagagtaattaataccctgcagagggattagccgtcaagattgagataaaagaacaaggagacaagagcagagttgcctagaagacaggggcgtttagaaagtgctgaggcatagagtttccttaaggtgattttttacctttcctgactctaattatacatttttgcatctagtagtgatacagctgggttggtaaaacatattattaatagaagtgagggagttctgaggtggatcagatttttccctttaagcttggtttccagccaagccaccggtcctcaattggtattttgctgtgtgttcagaatggctttttcacttctgtaatttacttatttcttattatttgttattcaaagatcttttggtcatttattctgcacaaatcctagaaaatgaaagccaaataaggagggattcccccaaatgagtactagtttttatatcagtgcatggtgggcctctcagtgccaacagattgttcccgttaatttttttttcccctttatattgactctggggtttctaatggtcagcctgtgctttcagattggagttattaactttgaccaaaacaggagtggtttgagaagaggcagtagagaggagaaagtggagatctagccagaatcttttgttttccacagaaattagagagggaaaagactataggaatcagactctgtcagccttgtcctttgtagcccctacccaggcagcaaagaggaaactgtcttcttcctg

SEQ ID NO: 112321 - DNA, 1448 bp, Homo sapiens
aatgttaaatcccttcttagtggtatttgttgtggatagaaggaattagattgaatgtggaactttgagcactctgaggataaattgtgccttctcattcaagacacattcaattctcttggtcactccatcttttctgaagttccttttaccatgctttgcagtggcgataggcctattgcatgaagagataaaatgtcttttaggctttttcctcttaaaaacttgggataagaacaagttagcctgaggcaatcacagagtctttataaagagacttttagcaaggaaatgatttttcaaatacagtacaggattttgggcatgactttgaactggaaagtctacatatataagtagaagatggtgtgtaatatctttgcaaatacttttgtgtattcattcctcatttgtaaatgttttcttacctgctgactcaagcactgacagtgtatttgtttgctcattcaactatggactgtgaacatgcttgggaaacagagttgagtattgtacgcaatctctgacctcagtaatacttaggcatatatgcttattcagtaactggacattttaaaataaaaagaaatgagtattttcactgcttgcatataatgggaatgattgaataactttcccataagatggcattagttcaagtgtccttattttagtaagagtatttcaggccaggtgtggtggcacacacctgtagtcccagctactcaggaggcagaggcaggaggatcctttgagcccaggagctagactccagcctgggtaacaaagaaagaccgcatctctttgaaaaaataatttggaagctctccgtaaaaatctcacctcttattttcctcaaaacaagctctggtgcattagggtatatagtagggtcccctggcctttggaatggggggttatttgagactggaaggtgggagtgggagagggagggggagccagggacaagcatggcaaagttccagattctctgtatttgtgtgaaaaatcacaaaaccctacattgactgtgtagtggatgtcagatgggaagagggagtggggaagcaatgaataatagcaatcacaggtgcaggagccacgtctcctcctgggcactttacatgcgttctctcacttattcttctttctcaccctgtgaggcttggtccagttgctattcccaaatcacccatgaggaacctgatgctgtgaagatcagcagcatggccaaggccgtgtagtgaagtgatgagcaggagttagtcccggtctttctgttgtctgagcttaccagctcttgccttcacacagtgctctctcctctcttatcaagttgaacgtgggtcaggaccatgaagttaattttcttcctccttttaatcatcaaaatggaatttctgttttgcctgttagagattattgatataagaaaggctgggcgttaa

SEQ ID NO: 112322 - DNA, 2067 bp, Homo sapiens
tgataaaacagggtttgagaagattgactccagtttcaaaagacgttctactgtgagtaaaatgccatctgacagcataacatgttacagagaaatcttttgtgaaaggaagagtcaatcaatgctgcaaacttcattgttgtcttattttaagaaattgccacagccaccccaaccttcagcgccaccaccgtcatcagtcagcagccatcaacattgaggcaaggccccccaccagcaaaaagattacgatgtgctaaaggcttaaatgattttcagcatttttggctataaagtatttttaaattaaggtatgtacattttttagacatgatggcattgcacacttactagatgcagtatagtataaatataacttttatgtgtactgagaaaaaaattgtgtgactcgctttattgcaatatttgccttagtactgtggtctagaatggaacctgcatatctccaagatatatctgtagtgtgattattttggaaaaccatttagtagttacccaagataagttaaaacatgtccacaaaaaagacttgtatgtgaatgttcatagcaacattattcacagtggccaaaaactggaaacaacccaagaatccatcacctagtgaatggttaaacaaattgtggtatatccataaaatggaatactactcagcaacaaaagggaacaaatttacagatacatacaacagcatgcatgaattccagaaaaattgtgcagtcaaaggaataaaactcagaagaccacatacaatgttcattcatatgaagttctggaacaggcaaaactagtctgtaggtacagaaagcaaatcagtggttttctggagtttgacatgggggtactaacaagggaactttttggggtggtgggaatgctgtatattttgattgtggggatggttacatggttggatgcatttgtcaaaacacacttaatggtaatgcaaaatgaatatattttattttatgtaaattatacctcaaagttgaatttttttaaaaagtttcttttaaaaagtaaagacatttgtggtgcttcttgtaaattttactgctgattatgaccttgtttctttagatttgactttccaagtttgaaaagaccagtttaaaaatgacttttgctgggcatggtggcatgtgcacgtagtcttacctactcaggaggctgacgcaggagggtcccttgagcccaggagttggaggctacagtgagctatgattatgccactgcactccagcttgggtgaaactgtgagaccctgtctctaaaaacaaaaataaaaaaaaattaaaatggctttttagattataatctatatgaaattgggggttatttcgcacttttatattatttgtccattttgcttctttctaaatagcctctggattgtgtgttattttcagaaagctcttggagattttttgaagtgtatgttttaacaggattttcctgttgctctttggcaaactttgtccttttattgtttaaggagtataaataacaacagaacagaattactttctggtgcattttcctcttctcctgagtcttttatgttcaataactctgaagttcctgttattcctgcctttgaacgtagaaaatgagactctctctcaaatacctgaaactaaggcacataaaaaatttaggaggggccaggcacggtggctcatgcctgtaatcccagtactttgggagattgaggctgaggtggatggatcgcttgagcttggcagttcaagaccagcctgggcaacatggtgaaaccccatctctacaaaaacaaaaattagctgggtatagtggcacgcacctgtagtgccagctacttgggaggctgaggtgggagaattgcttgagcccgggaggtggaggttgcagtgagcacagaccgcgccactgcactgcagcctgggtgacagaagtgaaaagaaacactgtctcaaaaaaaaaacaggagggaggagccaagatggccgaataggaacagctccggtctacagctcccagcgtgagcgacgcagaagacgggtgatt

SEQ ID NO: 112323 - DNA, 3044 bp, Homo sapiens
tagttctttgtttcaacaacaacaacaacaaaaaagagaaaagagataacacataagcaataacttaccattattgttttttaaaccttcacaaactgacttctttcatggaaatactgaaatatttattttgtatttaatttattatataatttaaaatgtagagcgagtgaattcagtttgggatctactgagtcacagtgcctggtagcagttggatgttgtaagagtgaagtctgagtgggagaaaagggttgaggaatctcagctgagtgtccctgagcaagctgcataacatctccaagccttggttttcacatctgacaaatggcatgagacctgctctttagggttgtattagagattaaatagtcacataaggagtactgagactgtagtatgtgctcagtaaatattctcttttctctctccctctttttgggtatgaaggtagttgtagttgtaaaattttcttccacacttaggaacagatatttctctaaatgtaagccccctgggcttattctagtttgttcgtacatcttaaaaatggaaacctcagactaaatatagtattcaagtataaatcccactactgcctagataatggtaaagacattacttcatagtctttgcgtgccttgttcccattaatacatatcatgtcatgttagctgttttataagacagttcattgctgattcatctcaccaattcagttccagaacagcaccgtgtcaaggatgcagtggctctgtcattttgatgacgagatgttagaacagttttcagtgtaagaatctgcttagcattacaaagcattcatttctgtggaaagaagtcttcacaaagcccgggaattgactaaaataaccaccccttttttaggggtttggtgtaaagaatagaacatatttgaagcctgggtgattggtgatggggaaagttacatgaactgagttttggcttcatttcccggagtgatgataatgagtttactgggtgctgcagtactacgagatcacagagtgccaagacctcagtgcagtgctgcgtgattgaaatgactgatactctcttttttttttcatgctagttcagcctgttttcatacactccagaggttcagtaagcatcaaacagggaaaaggaaatggcagtccaatagagcggtcgttcaaaatgaccaaagtaattccagaaattcaagaaagtagttgtttctcaagtgtccattaggatcgggctgtcttagagtctgcataactcggaagtgattagaggggttttgtggcttttctgttctctgatgactggagctggtttcagccttcagagtaagtagccagagagtaagataagaaatgctgaggagctgaagtgggcaccaattttattttccattgtgaaggagatgagcatctgtaacccacagcaagatcaaccaccacattaaatttatattgtttgagacagttctgatccacttgagtgtgtgtgttccactaacactctgagatggttgcataggccacaactgttctgtccagttcctgcctgataggtaagctctctgggtaactttattcccatgaattgagatagcagaagacaaacaccacagtggcattggtgtatccaaggcactgattttgtttttcttccatgcgctagtttgagctggccaactaatcatggtattagcctcaaaatgtattgacaacagatttgttttgatagcaaaattgcttttatacttgagaaatctgatcttttataaaaggcccagggtaaatgtcctttagcaacatcatgaacatgtgtgatatcagtgatatggtggggagatgttcctcagcaaaggatgtctgtatttgttcctaggattgacaaagctgtaaagcaaagtgcctggtaggggggagtctaaaggaactagtaggtaaaatgattagagagcttactgtagtacagatggcgatatgcagtctacaaatgacatctccttgccaccactgttactatgggttctaatgaaaagaacctgagacttttgagaatttttgagttcaaaggtatagaagaaggaaagaagctgtgaaaagcaggcataacattgagggacagagaatttggctaggtaggtctagactgtaaatacagtaaacttcccacactacagtggtaaagtaaaattttccccactttacagcatacagccaccttctcgccatattccaaactttttcattgctattatacctggtattatttcacttcactttattgcattgctgtatgtcatatgtgttaggagcctgtttggaagaagagcagcattgtagaattatggagacagccatctcttgcacccgtgtttgagcatcttcatttaaaggggttaccagtcccttgcataaatgtctatttaatcagcttgctttcctaatcttctgcatgagcaattctgtcgcagggcaaaagcgttgattgtaggggaagaagagagggaaaggagaaaaatgtagttttggaaacagaacacttcaaatgagggtaggccaggttctgtagcttcctcagggatttagagtagggttgatatgagagctgtgagtacctaggcatctgtggagaagagggagtggaagagaggtaagtgaggctttgtcaaaaagaaattttgaaatgagtaaagtgtttctggttttgccaaaaaaggagaggaaattctcaataaccttcttataccacaggcttcctccttatcagaccaatagtgatcgtatcagacatgctgcagattaaaaagacatttgtgggtcaacctttaatttttaccattaatcacaggaatgctttgttttattgtgcttcactttattgctcttcacatatattatgtttttggtttttgggtttttgcttcctaacaaatggaaggtttgtggcaacccttcatggagcaagagtatcagtgccatttttccaatcgcatgtgctcacttcatgtctctgtgtcacattttggtaattctcacgac

SEQ ID NO: 112324 - DNA, 2400 bp, Homo sapiens
gtcacaggaacaaacctagttcccagggagcctaggaaatatagtctatacctggggagcggggtcagggggaatcacatgcctgactagagctaggggagttcagtactaaaaagagtagcggggaggatgccggggcactgactaccacattagtcctcgttcctccctgaacagccttagggtgggtgagcagccctaagtgagttgttagctaacagagatgtataatgaaggggcaccacagagcattttatattcctactgtagccctaaatgaataggcagctctttgtacatacgcttgaatatgcttcttggaaccagttcattcactcgacagatacgtgctgagcgccagttctttgcctgggtgctgtgtggtctagtaattgaaggtacctgtaagatggccagggccagccctgctcatcatgaagggcctacttatgtagataattttgaacctcaaataggagggaagttggagttgatttacctgtcattaagttgttaaagaaagatttttcctactggtagcaactgaatggagctctactatggtttgaatgtgtcccccaaagagcatatattggaaacttagtccccagtgtaaccgtgatgggaggtggagcctaatgggaggtgtttaggtcatcagggctccccctcatgaggggattagtgctgattataaaagggcttgaggctgagttcgatctcttgctgcccctcatcttttgcattccactatgggatgatgcaacaagaaggccctttgcaaatgccagctcctcggtattgtgtttcctagccttcgtaactgtgagaaatgagtttatttctttacaaattacccagtctgtggtattctgtcatagtgacacagaatggactaagatgagctcagagggagagaaggctgtctaggcccggggcctttgctgtacagcagctgggctaatgcctctgcgaattatattagcctgtttgtgttaaatgaggagccctcctgcttgaaagaggcaaggcattctgcttatgaagccagagaaatcagtcaggcagcctctgacttacctttgccctccccttctgctcagaatccttcaactcactgtccgtcaggctcagccctgtctcccctggtctctcccagacctgcctttctgggtgtggggtcttcttgcctccctaggtaagggacagataatgccttgaccacccagggaagaggagtttgggacattacccctgaactgagaggtggtgctgatgagagtaattaagcacccagagacattgtccttcaatacattgcaaaggaaagcttgctcagagtagacctgcacctggacacgagaggctggagactgtattcaggacagtgctcgtggggagcttccttcactgctccactcttgtgtcctgtgttacaggggctgctggctgttgccactgtttttcagagaatgggctgcctgtacacacctgacttgggtgatcatgtctacccaggaggaccagcaaaaagggacaagcagtgatgccatctggttttacctccagcattccgagcactgccctggccctctcccccagccagtggtcggggttgggtgcgccccactctggctgcacaatagagtaacgcaggagctttaaaaactcccaacacccagagctcacccccagcaaatccgacctaaatagtcaggcatggggcttggacagcagtatgtgtatatattttaaggtttcttagttgaatttaaatgttacagtggggattgaaaatcttggtctagtggtggtagctgttgggttttttttcttttcattttttttgcatccattcctgttactaccctctagaccactgtgatttcttagtctaatcctgacttgctacctgaaaccctctaaatgtaagtctcgtgcaagagagtgagaggtaaagtttggtttttatgataagagataccttgctcagtaagcagaaataagtgccatgtgttagtaactacagttttgttttgttttgtttcctgtgggagcgacagaaaagagtttacagggtgtggtggggaaaagaagaaacgaacatctctctgagggcgagtataaggttgtggacttagtgggaaaagtcctcaacttcaagtcagagagaactgtcgaggagagagactgatgaagaagacacagtgaggtttttagtggttaaaaacacagcactgcgtttacatagtctatttcccccctaacagtggcaacatgttgtggattttctttttttttctttttcctggagagaagcatgctgcctctgaacagtggagaggaggaaaatcatcagcatcctcattggggtcaggtgacctgggcctcgttcttccg

SEQ ID NO: 112325 - DNA, 1033 bp, Homo sapiens
tatgaagagattgtgcttatcagaaattgtagcattactgtaaattttttctttcatatggagtgatttacttggtatttcagtatattaatttgctaggaaaatgtcaagttagtacttctctcaaaagggcattgtgcatctgaatcacccgtggaattaaaaaaaaaaaaaaaaaggttttgccctcaacccagatgtgttgtgacttaatctccagttctgggcctgggcacccatctaaaatggtgaagaggacagaaatgattcttgacttcttggtgtgtacgtctgtgaggaagccagatgataaacactgcagggggaaaaaaccataattgtaaattgtgataagtgctacggtgaaaaaataaaacacggggtaagagactggcagaaagaatgtagttttgatgggcgggaaggccgctctgaggaagtgagaccgcagctgaaaactcagggatggagaggttagccctgtggggggagggaggaaggagcatttcaggctgaggggacagagtaagggaggcctgatgtggagagggcttggtgggtttgaagagctgagatgattgggacttgtggccagagataggggagcggggggagccccgcggggagcgggagaggatggtgctcctggcagagatggcaggtggcctgctgtttctattctgtgctccttagtgtcttggttatgaaatgacttgccaaaatgtccctttaaaagaaaaggggtccttgccagttacagcagtgtcactgtttaggtctgctaagcaaattctagggtgtctgatggctttgtgttgggagttgtaaatggatttcatttgagaacatgacaagaactgaaagattagtttaagcaaaagaatttaattgaaggatacatcattgttcttgtaaatcctttgatatttggctgttgtcttccagccttttcattccctgcatcctgtctgctgcttgcaggactgggctgtaagccttcattcacctacaacccttttgtattgcttggaac

SEQ ID NO: 112326 - DNA, 3594 bp, Homo sapiens
gggaaactgggcctgcaatctgagaaggccataaccactttggagctgttggcctattttagaaggggtgtcagctactgtgccttgcaggacatgtgctacctttggcatgacggaaatgcatgaatgtgggagccaaggatacatgcatcccctacactgatcagcctgagttctggcttgtgtagagcagtaagcagtgctttgtgggagggcttggctgtcccctttgacattagcctccaaagactaggagcttatcacagactttgctaacatcctctgatacctttttggaataattaaatcattcttggctaggttctgctgtttgtcctgcctctcactagctgggtgtccttgggcgaattacttaatctctctgtgcctagctttctttatgtataaaatgaagaggccagactagatgataccatagatgtgagatgatctctgatgtccaaatctgattaaataatttttaggtatacatgtattttggtatttgctttttttgaatagtgagtcccacaaatattacttctgtgtaagtgacacctacaccctttcttttgttcataaattctttcttaaagatttctgtgagctctaatcccagtattttgggaggccaaggcaggtgattgtttgagctcaggagttcaagactagactgggcaacatggtgaaacccagtctctacaaaaaataaaaagaattagccaggcatggtggtgcacacttgtagtcccagctactcgggaggtcgaggtgggaggatggcttgagcccagtaggtcaaggctgcagagcaagactctgtttccaaaaaaaaaaaaatttacgtggagcttctcaatatctagtattcaagaatttggaaattggagtgtatcgttattttatggagagaaggacccattaattccctctctcgtaaatgatcttgtcccatttgttgttggaacaatactggttgcaactgttgtttgagaggcaaagtatgaaaagcatggtgtcgaattatagaaacatattattacagtggcactagaggctcttcatactaagaggaggagattgaggcccaaaaatgtttcagggtgagtctgaggctgtgcgctatgctccccttgagagtggaggctgtgctttgttcatcttgccatccagcgcctcttgggctggttttgttttattttgttttgttttgtttttaaacagctcttgtcagagtgacactaggtaaagatctctctttaacttccccttgacctgttcgatgctgaaatgccgtcacccatatttctaagcattatttcaaggtagcacaaactccaggagccgtgggtttccttttcagcatggtctgtgtaaacatgggctgtttctcagaggctgggctgaggccccagaagttttcttcataaggggtcacctcttacctctgcccctacaattccttttctatgaggttttaatctccaagagggaagcagaggtatggttctgaggagtgatgtggattctggggaatgcaagggaagcaagggccaagtgggttgagctaacgtggggactgagaaaccatagtgagggaaaaggacaagcagaaggaagggccttgtagaaccacctagtgcttggataagattcttctgcagagccctgggaaattggaaacactctccggggtggtgtgtgcactggcagttgaatcttagcatcttcgttgtttccttttgatttcacttgttctgcttcttctcttgctgtagttgccacgtgccctgacatttcgcagaactttgttgccatccatccagatttggccatttctcctttaattccacctgttgcccctcattgtaagtgtgacacacttatcttctttggtttattctaaggcattaactaaacatgtctgaaattccgacgagtctaagaatcaatatgtgtgtgtgtatacaaaaagtaattctgcctcagcctcctgagtagctgggattacaggcatacattaccacgccctgctaattttggtatttttagtagagacagggtttcgccacgttggccaggctggtcttgaactcctgacctcaagtgatctgcctgccttggcctcccaaagtgctagaattacaggcatgagccaccatgcgcccggccatcaacgtctgtgtttaatgccaggttttttcttttccctaaaagcattgttcggaaatctctgcatttgagaatctagaaataatgatagtcaaacacgggacatttttagtgaagagaagctgagtgattgagaacaaaatgattggaaagaaggggcgatgacaaccttaaaggtgggaacaatttgctaagagagagggaaaagtactgtattgtcattgtccctgaggtttccaggcttgtgtgaattttgaacaggggcagcctgtccagttgtaggaaggttgtggcattaggctctcttggtcccaaggcacaaaaactctgtagcaggggttttcatagcaggttacacgtggcaaggcagatgggaatcttgagaatatctgaggatatgaactgtggctgggccacacaggtatgggctgtcacgtggttcccgatccaaggcagcactggggggttggtgactctttcctccttgaaatttctgctacggtgactgtgatgatcctagctagttggcatcatctctgttgaagtagacacttgaattaaatatgttgccctatgttgttggccaatagggcatagtgtatatatcagggaggatggcagcagctgttggctgcgatggcatttagcttgggcctgacattcatgaagggcctcagatttattacttcatgttgtctccacatgaacttgtacgtttagtcacagagacaaactggcaggattgaaagaagatggcattcgtcatccagatttaaatatgtttctcattaatagacattctgcctgtagtgcactatgaattaatacattttataaatcttgtaactgccttatgaagagcataattagttataagtgtttggatgttagaaatgttaatttgttcaatataggcgttaaaatgttttgtcattttcttatttttaatgttattgggaactttaaaaaacaagagtggctcaagcccctcttgacctcttggaaggccctgctgagctgggtttgcatcggctgttctgggtcatatgttcactttgggtccagttggctgggcctagggtttcacaaggtgtggaaacctttgtcccccatatgtaaaatagcctggctccatttctgtcagaaatgcagcccactctacccgccacagcccaggcaaggggatggagctgggtcagtgggtgtgacaggctgatgacggaattgaagagggggagcctgtgagtctgacttacgggactaaagaataaggccccaggcagaattcttgatttagacataagactccaaagttttaggcagttcatttcagttttctgcatctacacttataaactacagatgaataacaccaaatgacttttgaaaactctgaagactgtaaaactcatttgtgctttg

SEQ ID NO: 112327 - DNA, 1064 bp, Homo sapiens
tgcagttcccttgggggaggtctattttaaattagataggtttgatgtccagtctgaaaagcatttattcaccagttctgataacaggtcaagtagtttaacctcttacacataagactaagggaattaaaacctttcctttccaccaccactaccctcccctcccctaaaaaaggaaaggaattttaaaaaggaaaaatgtagaaagaagtaaaatggtgtttatccttttttgttaaaatgtcacaatttagaccatttacaaatctgtttcttattacaaaatgatgagtctcttttgtctttgctcagtctccttcctcttagtccaccaatattataattttgttaaattctgcttatcacactccttcctgcagacacgttttcttctgtcccaccactcattttcagagctcctaaaagttcagaagcccctcttttctatactttgcactttctctcatggaatctcttccatgcccatgacctgctgagtctcaaagtttaactccagagctgactgacctcatttttaagcctcagactgactgtcctacctgacatgtcctcttgaatgttttaaaagtcatgtcagacccatcggttcaaaactgaactcatgttctctcatgaatgctggtttctatgactttttttctaagcacaactcaatatctcatttgcttgaagccctccagagaaccctcagacattgctgatgggaatgaaaatggcgcaaccactgtggaaagtgttttggtggacccccaaaaaagttaaagaattaccatatgactcatcagttttacccctaggtatacatttccaaaagaattgaaaacaggtgttcaaataaaatgtgtgcatgaggctggatgcagtggtttatgcctgtaatcccagcactttggggatctgaggcgggtggatcacttgaggccaggagttcgagaccagtctgggcaacaggctaatttgtctctatgaaaaatacagaaattagccaggcatagtagtgggcacctgtaatcccagctacttgtgaggctgaggcacgagaa

SEQ ID NO: 112328 - DNA, 1517 bp, Homo sapiens
gttgagaattaatgaataagttaatgtttgtggctctaccccattaactactaattaatgtaagttactgctcttatagttctccaagtactatcgtcatactgattctctgaactagggacagggacattgagaagactttttcttatgtactgtggggaagcagtgttttgtaaaatttttgctcttgcttttacaacagagtatcactccgtatctaaaattttacacctcctctacaaaacaaacaaacaaaaaacacagaaaaacccaacctagattaaatcaagtaacttcttatggagctcttagtaatgaaatgttacttatgttaatacgtatttttttttcctctgggaaaccattactttcattcttgactttatctcctcatcattatgctgcacttagtctgtacttggcaataatgttctaaaagctctcataacagttccatgaaggcatagtgtggtagaggcagtcctagcgttgtggtttgtttttttttttaaaggtttgtatttcaattctgtgtttctaaaggtaagatttggatcttctgcccctgaacttttgtctgtaaaacagggatggtaataacttctatttgggtttttgtaaggctttggaataacatatatgtcaaataccaggcctgaataccagcaaatgtggctgattgtgactaatgcaatgattttattactttttttcaatatgattcaatttggtaatataattagaaccaatttcatagtttcatataaagcaaaagaaggtatttatagggtcctaacatcaatcatatttccacctgacataggcttaccttaaataactaatatccaaacttactctgggaggacacctcttctgtaaatggataaaattgaacttttcaaagtacgtgaatacagaggaaacatggaattgtatatatgtatgtgtgcatgtgttgttttcaaataaagtaactcactgtaatgaattacagtgaattttaaatttcccaattttgtattaatgttgaaagccaccaaaggagtaagggatgggttgtatctcaaaaaggccaccggcctgagctaaaactgtttcctatactcttctaaaggcaatgtttatttaatcccaagagtcctttgttctcatgattacaaagttaaaatttaattatttgcattgtagacttgaaaggattagctacactcgtgattgatatgtaaagagagttttataatctctggaactatggcttttgaggaacaaaataatttaagctataattttgaagtgggacagaggatattattacaggtttattcataggattctcatcttttgattggactctaattaaataccttcttgtcagcagggagggtgtgtggaggaattatgattctcctgctttaatcgttgttgatttcttagtgatactttgaagtggcatccaactgtcttctccagctttcagaccctttgatgaaacaatagaaacttgttaagtacatgac

SEQ ID NO: 112329 - DNA, 1475 bp, Homo sapiens
aagatattctggttatgtgtaatacacagtacaactcaaagactgtgaaatagttcatagacaaattatccattctttgccactttagagtaattatgcttattgtttctgtttcaggataatatgtgtgtgtttataagcattttttcctttttatttaattgcagtaacatatacataaataactatgatggctagttttgaactcatttaaaaacaagtaaatttatgctttgataagctaaggtacattcaaagcattcccatttccaaagcaaagtgttttcagttaaagattatagatgttgccttttgccagggatgcttgtgagaatgtcatttagagaaatcttaaagtaatttatccataatattaacttagcatgccttctctctgcaatgtacaatgtatcataggacaatgtatgatacagctcagttttgatatatcagcaagttgagtagtaatttttgtttgtttgttttagttgttttaaaagctggtgttgcagattcctatgcttagaaggaccaggcagaaaataagccattaagggtgctgggaatgcaatagggagtgatggggagtgtggtaaaggggtcagcaatgcttctgccatgcctatcagggagctggtttccattagctgttggttgacccaggaatctgtacctgtgttgccagatctaaccattttccaggagaggctggaacttcatatttaaaaaatgagaatttgtcaactttaataatttggaagaaaattcaaattaaaccaataccaggcagtgtggtgtaccccacattacagaggaaagtaggggacttgggaggtacatgagtcaatctatagatgctcctgttgtcatgttaaacttgtgcttgctttcagttgctgttaacattttgggtccactgtatctagacatgtccttcaaaagttgcatgtaagttaatttttttttctgtatttaaaaaatggccccacaaacactagtctagatgttgaaaaaaacccttataccttattatggagacttctgatgagtccttttgtacagtgaacaatcacttgctgtatttacgtttgtacttttgtgtttaaaatggggaatggtgttagatattgcatactgcttgagttaaggaggtcgttaaccaggaatgctttggattactcagattattattgcactggtgtttgttgtaatggaatttgacctgtcaggggagctgtagatgtttggatgagtgttcagtccttaatactgttatctaaattctaggcatgttgcctgtaacttccagtttcaaaaaatctatgtcaatctgttcttttataacctagtgctgttgtttttttccctcttgttttatatttaatcattctctttggctcacaacagcagtccagtccaaagatttactttttctattttcaaccccatcattatttttgtgtaaaaagtatgtt

SEQ ID NO: 112330 - DNA, 2946 bp, Homo sapiens
tactctcattttgaatgacagcatatatgatgatcccttctaaagcccagtgatatgtagtcattcaggtaaaaggttttattgtcaggctcccagagtgggagagcctggttccagggtcggggggtcagaggggagctgttgctgaattttgattctggctgaagataatttatcttcttgaaactctggcagcatatacagatgtgcctgttgttaacattttaagaggtaagaacactctctgtgcacctgggattttggaatatgatagtgggaggcaccaagactgttacagaaatggaaaatgaacacagggtggcagagggtaggtacttctgccagtcagaggcagacagactttcaactggaaggggtcaaggacactattgcattgtgtttggccaaacaaacaaaatgcattctaggggagagctggttttagtcgtgtgtttagcgggggctcagtgagaggcacacagatgatctgtgcatccatttctctactgatgtaaagactcaaagaaggtagtgtgcacggtgccaggggaatcttgttgaattactaacagtgaaaaactaaaaagtggcctaagatcttggtttctaaggcctattatggccgagtccccagagacaaagtttcctcctgtctgacttggagcagatgctcgtctgcctcaggaaaggctctgaagaatccaggagaacatgctttgcaaggcactttcaaattgctgggtcccttcaggggaaaaggggtttttatgacaccactagtctgaagataatttttatcagatcctatagcctgaggtcttaaaacagaacaacactaaagagcccctctcaggcctggcttcctagcagcagttggatgggaccttgaagtggtggctcccttcatgttggccctgcagggtcaggcatctaagactcgtggaggcccaggcagtctggagggataccagatgacatagcaaatgccaaaaaaaaaagatcgagtgctatgtttgcctgtgtgtgggtgtgtttgtttcacaggtacaggtgcacccacccggagtcagggatggaacatgtgcagtgaaggctatatgcttcccagatattggggtgaacttgatgagagtctggtggtggactcagggacctggaattgtcttcctcactttcttgccacttctcagtgtgaatgttgtctgtagggggtgctctccttgcttgccgtgggtctcagagctaccagagcattagaatgtaggagatgcgcaggccttgtggacgttttgccagtcgagcgattcagcaaagtaattgcaaggtttctctaattgttaaatatctacaacaggctgaatttggattggctgaaaagaaaggtgaaatgaggtcatcagaattacatgatttttttcaagttctggcatcttgtgttctttgccaagcagaaatattccagtagaactgtgataatgcctttcatctatctgctgagccttccagatggcagtttctcagccagtgagcaaaagaaagggtgttgagatttatgagtaagttgattcccttcgtttgtacttcccagtgaactctcattcgctatttgtgctaagcaccagtggcaagttatcctcacatctttagctctgcagggcccttaagccagtaggccttacttcaaggggaggagggcttcaaattcagagtaataaatagctgtctaaatagagcccttcacatactttctcagagaactttttgtgatctaagtggacttaagtttcttgaggacaggggcactcctttctcctgggtagcaccaatgcacaggaagcttggcgttggattccgtgggcccctccctttctagttatgtgcacagtctcccgggttgagagaatccctccctttgctaagtcatcttcattcaatccagggatgtttagggaatatgcgtgcctcggatgacaatacaagatggattaaggtgattcttgtgctttgagagctctcagtccaatggaggaaaaacatataaataaatacacacataaacgagaagtggtgtataagtctaaagatcaggtaatgagggaatgttttagaggaggtggtgctgctgtatgtattggaggcgggtagggatttgctgagcagaacatgtgccatgttgttttctccatcaggcctcatggctggaacagctgcagtgcttttcgtttggtgcctcctctgctttgcctttgtcctgttcttgttcactttgagcacccttgcagcctaccctgggcataaccctccaggaactctgatgctgtttagtagatactcagaggttaccacttaatccttgttggttagttttgttccccaactcgagcgtgaattcaggacagggcccatctctgaccacaccaaatgcagtcagtgcatatgttaagatttagggaaagcgtttgggttggttagtcgagtattttcatagattattattacctggttatgtaagtatgacaagacagtttaacaatgacacaaatataagcagaggatctgattaaaaatacttttttttgaaagggaagcataagtttgtggtcagcagcaaataacccatttgatcttcattcatttattcttccatttattcactcactaacagtctgtacctttgtgaatagcaacagtctttttcttcattggtgttttttgaatgctgggtttttactgccctggggattttctttaaacctgatagttgttttgataaatcatctggataccagctttgagctaattcttttctattaagtacctcttagagtggctgaccataaaccatttgagaaatcactacattttattaatgacttttgagatttagcagcaacttaaattaataatactggagtgtgctttggataaaagaccaggagactgctt

SEQ ID NO: 112331 - DNA, 1037 bp, Homo sapiens
ttacaggcgtcagccatcgtgcccggccgtgattgatcacttttaagtacatgagaattcttggcatgacatacaaaagaggatgggcagagttccttttcctgtctgtgatatatttcatgacgatccagtctttgcgggcagtggttcagggtagtgcagccattgtaacctaaaccattcctgtgtgtttatttatcagattttctcaaagggtgagtgctgatcattttaaattctgtttaaaaataaaattgttcatcgaagtgatgaaataaataggggtcagatatgattttagagatttcgaatcctgaagagggtttgagatttgaataccatctctgtacactcaaggcaaacttcctgtatcactcaggactcataacttcatctgcaattttattattgggtgacataactgaacaggtcgctgcaaacactgagaattattgagttgtttaggtgagtctctcttgtttaaactgttgaaaggttcattgatttgtgggtgagggaaaactgttgtagcgtagttttagtgtttgcatttcattttaacattaccttgcaagggatttttcatgctgtactaaggagattacaaggccaccctaaggcattttagggttatataaggaactggctttgctgttttatgtactggcccttttattttctggctaagccagaatcttggtaaccctctcacctatcacctttgggtattaccttttcagctctccctttgccctcatgagtccaaccagtgccctggtctgagcctccatcctcccaactgccctggcttcctgctgtctgccttccgtgttcctgcctacggttcatgctttgccctggacctcagtggtccttcatgtctgtctgatcacgacacctcatgctatgagtgacctccacagcttctgctgcttttggtgcagcatcaaatcctcccggtctgtgctttctccttcagggcccacctgcagccttattcccttctcctcttccttctcttccactccagtcctcct

SEQ ID NO: 112332 - DNA, 1120 bp, Homo sapiens
gcgagtagggtaaaatcaaacaagaccagatacaggtggagcttccagatgagctgaacatgtggaggttcctgtagggtggtgctctagaaagggcatggaagcgccatgtcccttgccccatacctttacctgtgaatctcttcatctgtatccattgtaattttttaaaataataaactagtaaatgtaaaataaccaaaacaaagaaaccaaatgccggtgtattacatataagttgatacctagccagttaaatgcgttcagatgtgtcttgtttaggaggtaatcacccgggcctcccccacaaagtatggttcaaagggtcatggtgggtggctcctcagagcatctcagctcccttagacctgatgaaggcttcacaggcatttcatatctgtgcctctggccagtatatctccagggaactgagtgccaagggagaccaaggcatctttactgacattgttgtaccttaagtgaggcaacatgtaaaactgtgacacatgggagtgcttgatttttgagcgtgcggagcaacagggtccagtgttatggtggcaggggcaggagaactcatggcatcaggagcgtagacagccccactgggcacgaattataacccaggcagaggcaaggcgcaagggtggtcagacatctggccctgaaataagaagagacaggtgggaaagtccaggccaagaccgtggagcagagttaagaaggagcaggaagagccgatctcagaaacaggctggctctgttgaaattggactgaggcagataatttctttctttctttttcttttcacctttcagcactgttggacatgaaggaaagataatttctaagtttactttttgatatttatagataaaatgctttcaagcagttaaccagcctattggagagtgacacttagatcatcttgaagttggtttgggcgatttagagaaacatttataattaagttatgcagttaatgaaagccaagtggggacatttgttcagaacaattgtttttgtaccttttctttgtgatagagctgtaaaagtgtatttacttgtaaactgcaacaagtttttgctccttcccccatcaaaagaataatatatcta

SEQ ID NO: 112333 - DNA, 1051 bp, Homo sapiens
tggccagtccttcctttctggataacaacgccaacatttcttatgtcttacctcagggatcattttcaggccacagacctacctgttttgttttgtttttttaaaatggtagtatctacagaacattacagtttccgtaaaatcatgtatataaatatgcctagaaaactacctgaaatatagcagctatcccataattactaattgaaatacgttagttgaatctgaaataaatttcttagcctaggaacaaagttagcatccatctgggtctctgcaaaaatttgtaatgtgtaaaaataggcatgtttaggaagttgcttaatttattaatatatacttcatttttatggcagttacagattctctaattgaatttatatttgcatgattacagttttttttttgttgcaaacgatttttatgggctgctgaagtttaaggagtctggcattttaaattgttcttcactgtctgagaagtaaaaatatgtcttaaaaaatcattgatgttatagtaaaggaaagctccctcccttccctaagttagtgcctttcagaatgtgagcatttgtcaagtggaattctgtctgatcctttttcattttctgagctattataagtgctttcttttcctttaactgtcataaatggtttttcttcccttaactaagtaaagatttctggaacaatgttttgaccagattgaaaccagcttctgtcctatctactagtcattcatttcttgatttctcgtgcatttctaaacatagataagtttctaatggtgaagaaagtgaaacagaaaggaaggaaagaagcaaaagctgggttgggtcaccatattgagcgaaggatatgcttgtggggaatcctacactgtgatattggagtaaacagttacattatggggtgagaccaggtgagatggcttatgcctgtgatcccagcactttgagaagctgaggtgggaggattgctttaggccaggagttcaagaccaggctgggcaacaaaaatgagaccctgtctgtacaaaaaaaaaaaaaaaa

SEQ ID NO: 112334 - DNA, 1475 bp, Homo sapiens
aaaaaagggtgcttttttattccaaaaatacgggaacatcaatattgcttttttaaaggaaatttactacaataatattttctttcggttcaactgtattaaaagtggaaactcttcgtcaggtgctccgagaacagtgaacaaacacttcaaatgaaaaaaatattttagagtttcagttgtatttccctatgaggccttgaatttagcaaaccttagttaattaactttttaaaggaaaaatgtgctcttacattagtggcttttaagcatttcttccgactttaccggcctttcccccttaggacaacatttaaaataagtgttttcaacaaacagagcaaataccttgtgaataaacatcaatttcacacaaccagaaaaaaaaaataaatcaataaatctcctttaggcatttgaaaaactctatactttttaaaaagggaggagttgtaattcagtaacaggaaaactaaaccccaagaaaccaggctgttagttttagatgtttttcagcatgaccttatggaggcagaagacgggctgggaacttcctgagcacctgtttcgttattggtgccctacttatccaaggatgggcaacaactgcccacagggcaactcctgtgagaaagcctactctgtttttgtttttaatctcataactggaatcctagggaaaatagtgttttctttggtaccaagttcttttggcttcatctattgggttttgaaagaataaactgaatgaagagctgtctagatgatacaactatatgtggcattttcatattttttcctgaccctgcaagattaataatccctaatattctcactatatgctttgagagttttgctgtccagtgaagatttgaaacaattgcacaaaaatttgaaaacggtgttttacttgtcatgtttaaagatacagagtcactattttagaagtgaagggataggggtctcaaaacaaattgaaatatattttgtgaaatatatacatatgtattccacttaaatataaaatatatagtaccaatatatatccttgatgcttattaaatactgatctatatccttggactttttaaaaaaagtacagtcatgtatcgcttaacaacaggggtatgttctgagaaatgagtcatgggatttcatcattgtgcaaacattgtagagtgtacaacacaaacatagacggtgtgtagcctactacacacctaggctgtatggcataacctgttgctcctggaccacaaacttgtatagcatgttatggtaatgaatactgtaggcatttataacacgatggtatttgtgtatctaaacatacacaaggtacagtaaaaatataaaagataaaaaagtggtacaccaatgtagggcacttaccacgaatggagcttgcaggactggaagttgctctgggtgagtcagtgagtgagtggtgagtgaaagggaaggcctaggacatt

SEQ ID NO: 112335 - DNA, 1082 bp, Homo sapiens
ctagcttaccagaaacacccctaaaactgctggtttagattcattaatcaacctcatggtcctcagatgggttgtgactccctgttgcgtaaacacgaaccatgttacttcctggtcctcctgacctccactagctgatttcagcgaggatcaggagttaggtcgccagctgatctaaagcagcgagtcccaaagttcagccatttgtaaaccacctgcatggttttggaccaactcttgtgtcaccccatagtttctcagattttaatatgcatacaagtggcatgggatatgttgttcaaatgcggattctggttcagtaggagtgagaggggacaaagatccagtacctttaacaaatgcccaggtgatgctgatggctctggcccactgatctcactttgaatctcaaagatatagtccatctgaaacaatcttttcttttaaattgactctgattttaatcttaaatacatatatttaaaaaggaatgtaaaaagtatcactattcaaatgcatataatgacaataatatgacttactaacttctaggtagctattattggtgcctgttggtaagcctgagtcagaggcctcttttcttttgttataatggaggttaacaagtgtagcaagtgttcgacattctggcatcaaatggagactttctccttaactagaccagaggatgaaaagatagttgaaaaccagtgactttatattgaaggatatttaatgccacgttctaaaacttctcttctggtaccccaagtcaccagggaatcgcactttggggaacacttgtgcttaagtaatttgcagcaaggcatgcatttataaactgaaatctattagtgaggtggatggatccctagaggtaaaatgcttggggaatgtgtttaaatgtttgcatactccatgttctgttttctgttgagagtgtgggagagaagaggggcatcccccatttctgaaaagttgctaaccctaggcccagtgagtagttacatcttaggtatgagaaggaaaatgctttgggaaattgtatctcaggccagcaggaagtcaactttaaatgctta

SEQ ID NO: 112336 - DNA, 1103 bp, Homo sapiens
ctttaactggagactccataggtcactgaccttttagaagaattcttcgtctggttcagagtgagagagtattgaaagattcatcctaacttgggcattctggtacccttgtggtgggagggcagaaagtctgctgttaaggagtttagactttgagtgtgtctggatttttacccagctatgttcccaagcttgtgaccttagacgttacttgcccaccttgcagttaagtctccccttcatctgcaaaatggcacgtttagtagtattaatattattaatagtagtattaagataacgtctatctcggaatcctgaggatttgaggagttaatatgtgtaaactgcttggaatagtcaataggtattagcaattattatactgttttcctcataatttattttgattgttttcccttctttcagaatcattaaaataatcttacattgtaacatatattttttgttctctgtaatattctgcctacataagtgcattctcaaaataacttaaaaggaaaaaaagatctaacaaatgttcacagtgttcttttcattgtaatgagtggcacgcagttcttatcgtggataccagaccatgaattcgcttctattgtttgttgttaattttcccttttttctttacccagttacattcactattttctttgcaaaatcaaagtgtctcctattagtattttgtactgggaagttgagtttctgatggatagctgtggtggtgttaggcctaacacctgggtggggtggggaggatagataccctttgtcaacatctgttaaatctgggcattctggaactatctagatggctgtaactaagtgtctttagttctttatggtatcataaatcctgcatattttggtcatttttttcctctatttcagacaaattcttgaggtcatgaaggtgaaacttgagtcagtgatcctgataacttgggttttccccttatatgtccttccagctgatgcagagctaggattttggattgaactacctggatcattgactaatcatcttggtgaatgagagactcactggcttctcctctagggcataatgggatgcgatgagagcttgt

SEQ ID NO: 112337 - DNA, 2117 bp, Homo sapiens
aaaaccatgagtttacagtcataccttaaattcctgtctgataccacagggtttagtttttcctctccatattttataactgctttatttgacagtgagattcttggttcgcattattcttaacagtttacttatttggtaaatctccccatatgtaaccaatcttctgcagctgccaccacctttcctcctggggctgccctcctcagctgttagtgctctagcatcctgtgccaccacccccatccccatatggatacctttctccctgagataccctgctctgggcttccacagcatccctcttcctacgtttttgtaaacgtaggaagcctaccagattggacctacctaatggctttgaattttcaggaaggagaaggcgaagagcctcggctactcttgaatgatgtaaaataagacttatcttccttccccatggtccttcattatttaaaaatagccattatgtcattcctaaacattctgttttccacctttaaaagctcctagttcctccatgtgtttacactaatgatgtttttcttgtaagcatctcaaagagtcttccaaacatattatatctttgtgacagatgaagaaattggagtacagagatgtggagtaacttttgagatgttgaagagcatgtcagggttcggttttagagtgttaggtctacatatactgtttccagattgttctttgccctggtcacggtgctctgcctagggtcccatttggacacacctctattaatgcagcaaccagaatgaaacacgttgttcacaggcttttctaaccatccgaagagcagcaggctcttgaactctcccttcagtccctaggctgtgctgtgcctggtggcagaagcctctgctactgtctggaattgactttgagtaagttactttcacagattagttcctcagttgctcatctaaaaaaaccaggaaaataattttctgcaaagttgttatccagtattatgtgagatcatgcatatcaacgtgcttcataaatggtaaatctctaaatacaaatactagttattaacccaggctaaactgcacttgctttccctggcagccaacgaacactttggcttggattgactttttagtgaaataaaaccttcactttttcaagtgaactctattaaaccatccccctaagctatatgctaatcagaagccctaaccctccagttaattatttgaatttagatttagttctgtttatttctcccatttaaatgtcttattctggcccattggatttcaaacctgctaccagcaatcctaggcctccttgaggcgtatgtgggtgggtgggtctgtgctggtggggtgtggactgagcagtacctctctttcctccagaaaagcttggttattagtttgatattttgggatactaagaaagattttgcttgaaaaaaggggtcccaccacttaagaaagaaaagaaccagtattctagcctttagatgtctttgaatcttgatggccaaagtacatttttaaaaaaattactcctcgtgtgggtttttatctcttggaatctctccatgcatgggaagtccctctcactaactaggggtcacttctgtaggattagttgatatttcacccctttatgcatgtagtgtggcagcctgattagtaaggaaatttcagtcttcccactgggagatctggttcagtaggtccatccaggatggggtcctggaatttctgttaagaaaaaaatcaaaacttcctgcaggtcattgtgatgcccagctgagtttgagaagctttagcttgtttttcttgggaagatgtggcctctccttcccgttgctccctggaggggatgtgtgggagagctgggcgtgggtggtgtagagcggtgaccatttcaccagcacatgaagctagtgttctttgcttacgagaaaaaaaaggtggcctattttatccctcatggaattttttattaatccaaaaacgccagtttatttttaaacctgaaagccctaaaaacaaaatgagaaaaatctcttgaaagagaacctctggtgctgcaactagtttgctagcagttagcatcatatagggctagaagctagccat

SEQ ID NO: 112338 - DNA, 1021 bp, Homo sapiens
taaattatagacattttctgttagggagacttgtctgaagactagttttattactttcatttcttcctcaaagatcctttcataaaaaacaaacaaacaaaaaacaaaaaacaaaaacaaaaaaaaaccaaggctgggcgcggtggctcacgcctgcgatcccagcactttgggaggctgaggtggacggatcacaagttcaggaaatcaagaccatcctggccaacatggtgaaactctgtccctactgaaatacaaaaaactagccaggtgtgttggcgggtgcctgtagtcccagctactcgggaggctgaggcaggggaatcacttgaacccgggaggtggagattgcagtgaggcaagatcacaccactgtactccagcctggcaacagagcaagactccgtctcaaaaaaaacaaaacaaagcaaaacaaaaaacctttcactaatttcttcttggcttgttcagttcctggtatagtgtccgtgcttctctctccccactgtgaatctcaaatgtagtcctgtgagtcattaaatatatttttattattagaattacagcttcatgtataaaatctgaatccttttatataacagttgtaatgacattctgagtaacaaagtcaacatcttgtacagattcctttctcattagttatcacaggctggtgggggaaaacttgtttcctctgttatatattggaacaattcaagacagaagggaattgattttattgagggtgtcaccgtactgggacatttctcagaaaaccctgagactgctttgggtttgggggagggagaagaaagaggattttgttttaaagtcatttctttggggtaccgaacaccacatcccatcactcatcattaatagatgttttgcccttttggattctggcttttaactgttttggattctggatacttaactgttcccaggcaagtaaattgatctcaatattctggttatttattgctacataacctccaagcttagttgtttaaaacacagt

SEQ ID NO: 112339 - DNA, 1022 bp, Homo sapiens
tgtttgtttgtttgttttgattcttttccttgatctggcaaacgtgttcagcagccagacaaagagttctccaggacaaggggaaaacgttggttcaaagaccatgttatttttcttccccttctcatcccatctcatcctcttcctcagtgggcacccgcatttccatagaaagtaaagatggtggctgtctgggtagggggttctctaagttgctgttcagtgtgaggtaaacaatgctccaactgcaggatcaataattatccacagcagtctgaacacggaatgtatttatttgaattctcctttaatttgggctgtttgctgtacgtatatacatctgtgagaatagttgtcaatacggctcttcatattctttttttgtaccgcactcttaccaggttattttattttctgttttctattataataccttgcattggtcatgtatgttttgtgaggggaaatgcaagggattggagaccactttccgtgtcagcatgtcatctgtcttcaggactaataaagataatgaggggacacatgaatggatgtcatatccgatcattccacaggcagttttttgccagtgttgtgcatgattcccgggagcagtcacccacctccctgcaattaaacactgctacaagtacaggaagaaggaattattttctttctttgccccttctccatttgtgaaaatgtttaaaagtggtgggtagccacggttttgagtaagatattctgatttgattggaacttgaaactttgtgacttggagaggcacggactaccgaactgggactggttctttttggggtagtgagttcaggcctcttgtttctacttgaacatttctaaaagttgcacattttagctacccagcaacaaaaagcacccagggactttctctgccgtttcctagcagggggtggtaaggaaataaaaggatttgggtctgtttccctgacagtttgctgtaattctgtggagtgcatagagacaaatttagccctttctat

SEQ ID NO: 112340 - DNA, 1115 bp, Homo sapiens
tccagtctggcctgtcatttgcccacccctgggctgcaatgcctgtaaactgagccattctcataaacatcccagagaaaagtagtagttagcacactggtaaaggcctctctctgcttaaccccagcagcaagtctgcctggactgagctgagaagatggtgggaagactgcacaggatgccttcttcctccatgaccatgaaggtggctctctacttgcagatgtgaatcaacttaatctaaattggtcaaatcaattaggaatctctgattctaccggtagggagcagattttacacatcagcagtggaaaatgctctcaattaacttgtgaacagaaactggatataacatgaaactaaggttttaatctgagctactgtgaaatttaaacaaagtaagaacagattccatgaaattgactctgtctttgtgtacttctgggcagtttcatgatgctagtctggatcattagctcactttattccctgtggggtcttctcaccctccactggataacttttccgaaagctctgcctggtattataattcaaaagctttgagaaacatgaaatttgtgatctgagatttttctagttatgtaatgataaccctctcatttccattgataaccctctcatttccattaaaaaatgttccaaaaaaacttgaggaataaattttgtgacatgagatcacataaagactggattgttcaaagaattaagtgttcatatctcatgtctaaaattcctctactagaaataatcctctagatagcgtcacaatcaaaagcttgagtctcaaagtaaacggaaccgggttttaacctcagctctaactgtgggatctcagatgagacatttaacttctttatgtgctcggtttcctcatccgtaaaatagtgacaataattgtacttatagagttattatgaggatttaaatgagataatgtatataacatgtttagtaactcctggcaaatagttattcaagattgttactattgtcatgttcatcaagttcttattccctctcgtgtgctagacactgcactcaccatcaggattgcagctaagggtagacatggttcttctcaggaagccaagctg

SEQ ID NO: 112341 - DNA, 2382 bp, Homo sapiens
atgcagtcagctcagggactgtccttactttgttcactgttgatttagtaataattatagtatcataataaataacaatataataatatagtaatgctcctgtaatttagtaataacatacctgactcgctctcaaatattttaaaagtaattaaccaagaatatcgcaaaaatgaagagtaaattgtgctgaaaggaaaagggtgtataattaatttcctattttattctcaagtctatgttttttaatataaagactaataaccctaaatttttaaatgtatttcttgtgagtaaaagttaatgactacttttttcttcttctttttttttttcttctaggagggtatacaaggaaaggttaggacttcctccaaagatagtgattggttatcagtcccacgcagacacagctactaagagcggctccaccactaaaaataggtttgttgtttaagaagacaccttctgagtattctcataggagactgcgtcaagcaatcgagatttgggagctgaaccaaagcctcttcaaaaagcagagtggactgcatttaaatttgatttccatcttaatgttactcagatataagagaagtctcattcgcctttgtcttgtacttctgtgttcatttttttttttttttttggctagagtttccactatcccaatcaaagaattacagtacacatccccagaatccataaatgtgttcctggcccactctgtaatagttcagtagaattaccattaattacatacagattttacctatccacaatagtcagaaaacaacttggcatttctatactttacaggaaaaaaaattctgttgttccattttatgcagaagcatattttgctggtttgaaagattatgatgcatacagttttctagcaattttctttgtttctttttacagcattgtctttgctgtactcttgctgatggctgctagattttaatttatttgtttccctacttgataatattagtgattctgatttcagtttttcatttgttttgcttttgtttttttcctcatgtaacattggtgaaggatccaggaatatgacacaaaggtggaataaacattaattttgtgcattctttggtaattttttttgttttttgtaactacaaagctttgctacaaatttatgcatttcattcaaatcagtgatctatgtttgtgtgatttcctaaacataattgtggattataaaaaatgtaacatcataattacattcctaactagaattagtatgtctgtttttgtatctttatgctgtattttaacactttgtattacttaggttattttgctttggttaaaaatggctcaagtagaaaagcagtcccattcatattaagacagtgtacaaaactgtaaataaaatgtgtacagtgaattgtcttttagacaactagatttgtccttttatttctccatctttatagaaggaatttgtacttcttattgcaaggcagtctctatattatgtcttcttttgtggtgtcttccatgtgaacagcataagtttggagcactagtttgattattatgtttattacaatttttaataaattgaataggtagtatcatatatatggaattaaattgatgtggctatctttgtttttttataaagtaaggcacagtcattcagtcttaggtaaataatgtactctcttaatatgttaatactcatgagaattgggatctgatgcatcaccatttgattggtagcaacagtggttgtaaaacttggttgctgaattgagttgtttctatgttaagtgtcaaaatgatagtgtagggaaagtacaggtggtggggacatatgcattaagaatcttgttagtgttgcaatctaaatagaatggaataaacaggtgttaagacatatttatagtggtaaattgttgtagtatggtattctgtaaacttgaaaacttgatctactctttgtaggtatcatttgaaagcaaacttgaaaatgttttgtacatagtacatacttgtatagtcctgtgagatgaagtatggctatcagaccaaaggataagccaaactgtaggtagcagaatggaaattattattttgagaggaaaatttgtctttgaatggtgattatgacttaatcattttaaaactgataaacttgacaaaaaccctgtatgaaataaacatgaaattaatagcactgatttcattgtaaaattttaaagcagtttaaagggtaccacaggttatcacagtactctcaatgccacaaacacctcttgttcagtattctagaaatactgaatcagaattctgtgtttattataatctcagcatactgtacataatatctgctagttaaacttgggtaat

SEQ ID NO: 112342 - DNA, 1052 bp, Homo sapiens
gcactccagccagggtgacagagcaagaccctgtctcaaacaacaacaacaacaaaaaaccagaccattaacaaatattcataaaaaataagaacaagaggagattaaccatgaatagctatttttattattctattaatatttgtttgctcataaatataagcagcagcagagcaaatgaatattaataaaatcagcttttatgtctgccatgacattaactgccaaatttgctgaaaaaggctgatttgatagtaaataaatgaatgagtatttaaaagtcaggacagatcaatatatgcaaataaaatttacacatttaaaaaattaactcttgatttaaaaactgcctttagtttctatgcaaatacagaagagacatttgcagtgtaatgagcttgtttataatctattaaatgtaatttgggatttttttttaagcttctgtgccttattggagaatcttttgatgactacagtgatgatgtatgtggcgctgttgttaatgttagagctaaaggtgataagatagcaatatggactactgaatgtgaaaacagagaagctgttacacatatagggtaagttttgctctttgcctacttattttacagtattaagatgagtaaaaccagaagttattttatttgtagctttagaaatacttcagtttgtagatcctgttttccttgtattgttttcgtgaacacttttataattttgaacggctcaattggtgcgcaacgtcttgtttttttgggttttttcacagctatttatttatttatttatttagagatagagtctcactctgttgtccaggctatatatagtacagtggcatgatctaggctcactgcaacctccgcctcccgggttcaggagattgttatgtctcagcctcccgagtagctgggaatacaggcgcatgccaccatgcttgggtaatttttatatttttagtagagaccaggttttgccacgttggccaggctggtcttttaacttttggtctcaagtgatccgtccacctcagcctcccaaagtgctat

SEQ ID NO: 112343 - DNA, 1776 bp, Homo sapiens
tgattttgatgagagctttgattatccagtctactccttcctttatatatttgagcagactgagtttatcaagcattcttaaccttaggagcatgggtccttggaatacttattattgggctttgtcagttggtagagggacgggacattcattaactgaaattgcatagtttttgcatgtattttctagctgtagaaatgtacagagcttctaaaatatgtttgcttctcagaaagtttaagaaccttcaaattaagtgaaacccaagatttgatagctaataagtgacaaagccaggactctaattctgcaatgtcatgcctctggctttaagtcttatgtgctgtttaaaaactacatcaatggcagttttatgggcaataaagtaagaagttgacagtgttgttgcttaactgtttctaatgattatctctcaaagtcaaggtaacaatgttgtgtaatactgttgtcttctaaccctgtaggatggtattgagcctatgtgggaagatgagaaaaacaaacggggaggacgatggctaattacattgaacaaacagcagagacgaagtgacctcgatcgcttttggctagagacagtaaggttttaaaagtataaagcagttttagaggtagttttggaatactgatacttaagatatgttatgttttacatttgttacttaatttaagagaaggatgcccaacactagaaaatcagggtcagtaattatttttgttctgtcatatgactcctgtttatagtacagtgaaacatcctaccacattataagtcagatattttaagtgattggcagttgactctcaccacagtaagctcactgtggtcatttcattaacctcaaaattatagaaccttacattttgtatgattgaagtttttgcaaccctcttacagcattgctatatgtatactaaacttttaaatacttatatttttagagcgagggtcttgctctgttgcccaggctggagtgcggatatttatttatatggctcatttcagcctcaccctctgggttcaagtgatcctcccacttcagcctcttaagtagctgggactacaggtgcatgccaccatgcccagctaattttctaatttttttccagagatgggatcttgctatgttgcccaggttggtctcaaacttctggcctcaagtgatcctcccacttcagcctcccaaagtgctggaattacaggtgtgagtcactgtgcctgtcccactaaactttttagattagtgaagcaaataataaaattgttgtgtactaccatttgacctacatgttgtgatattaactggaacttctggctttacaagacaaattaaatatgagataataagcattttctgtagacagaggttccaaaccccaagcttataggagcggggtttgtagtctcttttgtatccctagcacttgaaaccgtgcctggtttatagttagcacttgttaagttaatcactttaaatgtttgaataagtgactattttgcttttttttagagacagggtcttgttctgtcgcccaggctagagtgcagtggggccatcatagctcactgtagcctcctgggttcaagcaatcatcctgccttagcctctcaagtagctgggactacaggtgcatgccagcacagccagctaatgaatgaatgactttttaagaagaaaattctgtttttgagggggaagatcatgagcaaataccatttttgaattccacattaaaaagtcaggacatttcca

SEQ ID NO: 112344 - DNA, 1037 bp, Homo sapiens
tgttggtcaggctggtctcgaactcctgacctcatgatccacctgcctcggcctcccaaagtgctgggattacaggcgtgagccactgcacccggcccttaaatctttacctgaaatattcctagatggggttaacatagcaccaggagaaccagactaaggatagtagaatcatccatggtctgtagacacagctaagatcattatttctgccatctaatattggagacaagcaaaagattcttaagagttgccaatttttaaatcaattttgctgtaaaagactacaggagatcaaatgatctaagcctcctaccttcaggcaagcaactaagtcatcgcaaatgttattctgttattttgatacttgggaaatagtttagaaatacagactgcagggttccatcttatatttaggtgattataatcccaagatgtagggcttgtaactatatttatttatttatttttctaaaatcagttttaaaatgattattatgttgactaaccagtgacagtttgtggtgtttgggaaccgttgatctattctactcttggataccttcaaggataatgactgtttcagtcatgcaatcctgatggtcaggaagttcatcgtttctggtttttgtttttgtttttgtttttgtttttttatgtttgtgaaaaaaactgtgtattaacttcagaaattatttcatctacttaaagccaccttatacctctcttctcagtttcttatatatatacatatgtatgcactgagttaactaacataaaatatatttttgtcagagcagtcactagaagtttttttgaaaattatacctgtcatctgaagttgattatttaactgcttttaagatctgttttgtccattttagaaattgactccttagaaacaagtaaacatgaacttttatctgtttattttcatcatatgttctaaatgtatatatatgtaagcacctaaactctatattacatattctgtgtttttaattgttattttcttttacctagtctgtacaaccata

SEQ ID NO: 112345 - DNA, 1101 bp, Homo sapiens
aaatattctaacttgtacatctttttttaggatcatatacatgctgaattagtgatgctactcttatgttttaatgtaaccccctcaagatattctgctcatacaaagaaatagattgtggtataaaatttatacatatgtatgtacatcttcaacagcagaaacaatatttttctgtatatttccagtgcttggcttctaatagatattttgtattcatttgtgttgctgaaaaaagcaaagcatacgattaaaaccataaactttgagagtatttgagaacattcatttgagagtaaactttgagagtatttattttttattaaaagcattgacacttaataataactacatttaaggcctaataatttataggtctagttttctagttaaactaggattattattctttgcccatcatcaaaacatcaagtagtttttcttctctagttttgtttattcaggactcttaaataactccagtcttctgcaccccccaaaaaaaagcttttcattctcctacagagaaaaaggaagccttgagccaccttccccaatcagatttgcatttatctagtttgtttggcttttaccagtttacataattctaccttctaattagaacagttctccatgcttcagttacatgtagtcaatgtcattacatagtaggtttttataccataacttagagatatgaaggatttttcagttttctataaatgtgtgggccacttcctaatttctgtttttttctagcaaatttattgcagataaccattgagtccttttgtatttatccagactgcatagtcttaggattctgtttagatgtgccattataaattctcatgatggacttacttgagagacctttgagcaccacagaagagaaaggaggcagcaaaagggaaaaagtattttattgaaggtcattcccacaatatccattcattttatgacattagtagcgctaattttatagtcacttagtatcccgtctttttttgttgcctagtggaggctgtcattgatgatgtagttgggagttaccattaggtagtgactcagcaaaccttatgtggtcttaggttgtctcac

SEQ ID NO: 112346 - DNA, 1028 bp, Homo sapiens
acttgccttgacctcccaaagtgctgggattacaggcgtgagccaccatgcccggccgattatgtgttcttgatatgaagactatagtaatcagttacttacagtgggacttttattttaattcaaaataacactttaaaattctaggaactgaatatgtttttcctgagtgataacttgcttttaattcctgtatgtccaaagacttgagagagagagagaaagaggattgtttctttttctttcttcccctttcttcactgggtctcacttgctgaggctgttttcgaactcctggactcaagcagtcctctcgccttggcctctcaaagtgctgcaattacagacataagtccctgcacccgttctgcttacgtttcacaaatactgggcagttgcaagttttggcttagctgttcttctctgttaggccaaccagagttacgctctgaaagtgccagtttaggagttagccaaaaacctgtgagggatttttacatatattgaggagcccacttctcatctacagcagtttttctctggtaccctgtcccccaaagcctacctgcctgccagtctctcattgttttcatcgagactcccactgtctgcctggaaacccatcattaattttaagctagtgggataggaaatgtcattcagtaattatctgtttgaacacttaaatttactggtaagtaaatgttgataaaaatgtttggttttaaggcattacttactgtatgtcaattttcaggccttaatcattctgtgtaaacatttaaatttattcagttaagtaatcaagttaataagttcctgttgggttaagtactgtgattattgagtaaaatcaagacatggtctccgttctgggtgactttataggctaatagaaattcttgtacatgtcatatgttgataagaaaaaacatatcccttgggaggccaaggtgggaggattgcttgagctcaggagtttgagaccagcctggccaacatggtgagaccttgtctctactaaaaat

SEQ ID NO: 112347 - DNA, 1053 bp, Homo sapiens
gtggtgttcttagccgtaaaccctggtagtcctggatttaaatgacatgtttacttttccaggacttcagatttgtctgaagagtggagagaataatggttgtttcacgggattatgaagattgactatattgagatgatttatagtatgttgagataatatgtatgaaaataatgtagcacatggcctggtagttactgcttagtaaatgttccctatcaagtaaaaactcatagtttggatgaggtgtgagcttttcaaaatcataaagcaccatccttttctgttcttactgtgtctgtccttctgctcattatttcatacctttatttaatatagtgacttcaatttactagaatgttgtattagtaccttgtagaaataattgcagctgtctttgccatatgtagcatttacatttctaatatggacacagctggttttccagttcagctacagaaagtgaaggaaggggtaatataaggaagcactactggatatgagtcaccaatcatgttgttatccattatttggtgctgtagcattgaccgaacacgtttatatttttgtgtcatcaggaagggggagagtgttggtatcagaattatttaggtgtggtaacagtaatctgggtaattatttctaacttaatcacgagttctttctcttttcatatccctacttactgtgtgtatgattgggggtggggtgaaggtggggaaggtctggtgtaaggatctgaggatagatagaaattattgagccaggacaataatttagagagcataccctaggtagtttaggttaccactccttgttcagatattactgggatatgaatgttagtgatttatcttctattgttcttaaaattttttcctcatcttaaaatttaaaggactggaacttctccagagtttgaagtctagttcagtatgccgcatttactcagctcttacctttctaaactcttacattaatgtcatctcaagtactgattgctcatggtagccgacagttatggatcacttcagtgccaaactcttggattgt

SEQ ID NO: 112348 - DNA, 1877 bp, Homo sapiens
tttgttgtactatataattcatattaatgaacaattgaatgccaaccagactatgcaaattagtggactttttgcttaatgaaagaacccactatatcagagttcctcgataatccacgtaaatttggctctggggttcatattccagatttcttcaattaaaagaaaaaaatatacttgctgagtgcggtggctcacgcctgtaatctcagcactttgggaggccgaggcgggtggggatcacttgaggtcaggtgttcgagaccagcctggccaaaatggtgaaaccctgtctctactaaaaatacaaaaattagccaggcctggtggcaggcgcctgtaatcccagctactggggaggccaaggcaggagaatcgcttgaacctggaggtggaggttgcagtgaaccgagatggtaccactgtacttcagcctgggcgacagagcaagactccatcaaaaagaataaaaaaaaaaacagaaacaaatttcacacttcattttataatctgagttaatgagcatgattattagacttagagaaattcaatgtagacacacagtttatacacagaagttgcagagggataatatgcaaaatgaattatgtaagcttactctagtttggacagaaaactgtaggcaaaaaacatttaagtaaaatattgtttaatttacataaagttaagaatatgggccgggtgcggtggctcatgcctgtaatcccagcactttgggaggccgaggtgggtagatcaccaggtcagtagtttgagaccagcctgatcaacatggtgaaaccccacctctactaaaaatacaaaacttagctgggcgtggtgatgcgtgcttgtaatcccaaggtactcaggaggctgaggcaggagaagctcttgaacctgggaggcggaggttgtagtgagctgagattgtgccactgcactccaacctgggtgacagagcgagactccgtctcaaaaaaaaaaaaaataaacaaaagaagtttccttaatctattagtaccggtgagttgcaccatcttagtcatagagacttttttgagaagtggaaatgagcatgggttatagtctcatcttaatatctgagtgatcttgaagactgaaatttctaagtcagctgaaagtcggaataagatatattacggtgatttcaatttttaaatgcagtattcaaaggtgacagtttgtcaactgtaagggactaaagttgacattccatgaatgttttatactcatgtatatccatgcatttacatactattttccctcttttcttggaaattcacattgctgctttttaattatcaatccttagccattagcaagaaatgcaaagcctgtgattcacaatcctaagatgttcttcccactcctatccctaccataaaaatcactagtgttccttcaaaagtccctaatcatgtctccagaaaaagaaaggggctgggcttggtggcccacacatgtaatccgaggctttgggagacaaaggcaggaggatcacttgagcccggagtttgagaccagcctggccaacatggcgagaccctgtctctccaaaaaattaaaaaattagctgaatatggtggtgcacacctgtgtcctagcctcaggaggctgaaatgggaggatcccctgagcctgggaggtcagagctgcagtgagctgtgatcacaccactgcattccagcctgggtgacagaaagagaccctatctcaccaaaaaaaaaaagaaaaagaaaatgattttgcgtgtgtgtgtgtgtgtctaaaatactaatagtcatttctgggcacttctggaacctgagaatgtggtcagaaatataaggggtttttttttttttgtttcccca

SEQ ID NO: 112349 - DNA, 1037 bp, Homo sapiens
atggggtttattagcaatcagaaaacctttcacactctggaaccagctctagaccttggttgccagatacttttgtgtatcttttcatggtagcttgtggttttgctaatggtttaccagtttgctttgacttttaaagacttttttttttttttttttttttttttttttttgagatggagtcttgctttgtcgcccaggctggagtgcagtggcgtgatctcggctcactgcaacctccgcctccgggttcaagcgattctcctgcttcagcctcttgagtagctgggattacaggtgcgcacaaccgtgcctggctaatttttgtatttttagtagagacggggttccaccatgttggccaggctggtctgaaactcctgacctcaagtgatcctcccgcctcagcctcccaaagtgctgggattacaggcgtgagccacagcacccggcacttttaaagacttttataaaactatttcaaaaactcttatagactacacaaaggcttatttttcattgcgttggtgtaaactatccttaccttgtcaaaattcaaggcagcttctctgcttgcttacttgtttttttattggcaccagttttcatttatgttcctgggaattaaattgactgaaaaactcataagttgttgctacagttaactgactttaggacattaatattacataacactaatgaagaataagtatgtaaaatatacattttaaaccccttgacaggttctgatgtccacttttgtctagatctgttcctaccccactacactagtgtcagtaaaaagcattacatctggtaataggggcaaggctacgagactgtaaactataaaacaataaggagttctgtgaggtttctgtcacatttaggtcccttgagttttgcagagtttatgcagttttgtttcagcagcacagagcggaactgcaaagtgatgaaggactatattttgagttagtaaatattaatagctcctgatatatccagggtgttgtaccaagtgttctttaggatac

SEQ ID NO: 112350 - DNA, 1040 bp, Homo sapiens
tcgcaggtaggcgcccgctgccccgcggatatgccgccgctgcgggacccctcctcgcttctcccctgctggctcctcccgcccttgcggcgagtcgggacgcgctcctcctcttccccccggccgcgtttcctcctccccccacccgcgtcgccaccgccccctcctgcctcctggggtccctgggtcctcgggaaccgcgctgggctcacgcgggggcgggggcgccacccgccgcggccatgtgggctggggcggaagcgggctgtgcggggtcgcgtggccgcgctagacctccgcgttctggggccggttccccgcgctggggcgggggccgccaggtgtgcgggctgccggaggcaggtagcggcgccgggaaggagggcagcccgagcgtcgcgagcctccacatccgcagcaccggcggggctcgggtctgggcgctggaggcgccgggccgtccgtcgggtccctgcggggtggggggctgaagctacctgccgggctctgagagatgggtggcccgaggaccgtcggagtcgcagagaggaggaacgctagctagctccagccccacttctttgtgctttactaccgtgctttgacacttaagcaactttgggggtggggaagggagaggtctgtgtaattcattcttttctttcggtatataaaattattaatttacaaaactgtaagctaacgggatgagtcacctgtgactgaatttcccagagtgaaaaggacagttccattgagggttaggcgtgaatgctgtagtgtattttaagttttgtgcagtagagcaaacccagcgttgaatggggtccagactgaagcgtgtgctcgtgtttctgtttactgaagagtactagtgttgctgctgcatttcgagacccaggatgagggctgggcggcaatagtatggctcttagttacagtccaggtttagtgaagagaggcacatgaatattcaaatattaaattggtagcgtcctgtggggaggagagccggaataaagagaaggcctgattggggc

SEQ ID NO: 112351 - DNA, 1051 bp, Homo sapiens
ttttttttttttgagaccgagtcttgctctgtcacccaggctggagtgcagtggtgtgatctcggctcactgcaacctctgcctcccgggttcaagcgattctgctgcttcagcctccccagtagctgagattacaggtgcgcaccaccacgcctggctaatttttttgtatttttagtagagacgggctttcaccgtgttagctaggatggtctgtaactcctgacctcgtgatccgcctacctcagcctcccaaagtgctaggattacaggcatgagccactgtgccagcctaggatgtttgattttaaggaaagcttttgttctttagaggagtacaaccagttttacttgaaaattgagttttccaagagttcttgatgttcgattgtgtttattaatagaagttttccttcctatttaatagtttatgtatgtctttttcatttgtgtgtaagaattttttgaggacagagggtgtgttttactcatttttgtattttccaaagtgccttgcccacagtaggccctcatttccttacatgaaagaaaagacatcagtgggcttgcaatggaaaacaaagaaattctgtatttacattatcctttgtaaacactgaatagtatagtatattgttgatacactcatttatttgcttatggttgaatttagttacttttcagttttttagctgatgtttaactttgtgaatagcatagggcagttgctgtctcctctggttagaggatcagctgggagggacctgagtgatctgtaactatttatatttataaggcataaaaggtagtaagcatagtgtaagtggaaggagacctggattttgctcccatgaccttgggtaagtcccctcctttgcttaatgaagcatcctcttcaatggagttgagcagaaggtgactaagagagcatccagggtgcctagtagagcatatagtaaatttgggccttattgtgcatataacctcatatgtaatgttattaaaatcagtaccaaggaaggcttaaaaatctttgaggggaaatgttact

SEQ ID NO: 112352 - DNA, 1041 bp, Homo sapiens
aactttgataccatcccttccctcacacagcttatggcctcagggctgtgtcacatagtaactacttacatgggtgattttagtgtgtgtatgactgattgggaatctaactactgtaaataaaagaatctgcaaaaattttcttgcagtttttttccagtgtatgattggttaattgtctaatgattcttttgaaatacttcgtaatagtttgttgacataaaattgaaatataactgtgactattatataacatttagcctaatattccttgcttatttgaaataaagtttaggttgctttttgaagtgaatattgaacaggtgtcatttcttaagcttttcccaaatatttaattcgcaaagttacaggtcttggtttttgcaaatagtttacaataactcttgcttatatacaatattccttaaaatgtttcttattaaggaaggcctgacactaattttccttttttgttcttttaggaatgttttaaaggaagttgggctactcacaagttactacataagaaagcaagtaagtacaatcacaaatttttacaccatttgtcttagaagtggcatttgtgccagaaaacaagaattcttctagttctgaaagtgtatatttgaatgttctgaaagtataatcctgaatactagaattatgacatattttaaatttttgtgatatgtaaataaaatatgtctggataatatcttaatcttgtattacatatttaacatgaaaacatgagatagttgttagtatagatggatcttgcttgagccatacctgatgatgctgtcatcttttgacacactgttatgttgctggaagtgtttgcatattgtagtcagggattatgtgagtgatttggcttcatttaaccagattccttttggtttcttttagtttcaatttgtattgctttttctactcaaaactatattactttgttttttggtgttttaatgttattacctgcagtcttatgtttaattttcttttttgaagttttttgtgtgacactacaaagtaaaa

SEQ ID NO: 112353 - DNA, 1107 bp, Homo sapiens
aattgatcagctttgtgagaaataattatttttgattttgaatttgctttgggattacttgggatctgttcttttagtaagaacataatttatttgtaacatctgacctcagttgggtaggttttactagggcttatgtttcatattttaaaatgggctttctataaattgatgtggtcagaatacatttagaaaagctgtctatgacctgttcttgttcgatattatgtaaaaacttagtatatgtttacatggagttttttcttccaagacctttagatcttcaaaaaggagttataagggttttgaatatagcagtaaagcagttgctttggtgatttaggttaaggtaaaagtttggtggatttttgtgcctggacttgttggcttggttttaaacaagagatattcaaagtatgctgctgctcattagcttgaccactgaaacattcctttccctccttctcctccttcctctcatatctattcctccgtctcccagaagatgaaaaggcgaagcgagaagtgtcttcctggactgtggaaggtgatattaatactgacccatgggcaggttatcgatatactggtaaactcagaccacattatccactggtgagtaaataaggtaataaaaacaacattccaattttgaattttccaaaaatgatactcgtaatttgttttccagtagtgaatcatataatcaggattgtgtttacaaaggaactcgaattttagctcttgagctcttacggtgcatcatttgggagctggtagtttggcaatcatggaagaagtgggaaaaattttagatgaaagaactaaaacttttaaaaagaagtgtagggtaaggtagaatagatattttgttgctggcatgatggtagtgtgtacagtcgtccctcgatatccatggatgattggttccaggacatcctcactccccatatagttacgaaaatccactgacgctcaagtcccttaaagtcaaccttccgtatcacagattgtgcgtcaacagatgcagaaccaggagatatggaggactgactgtattatacttttctaaaattattttattatgatatatttctcccttaattt

SEQ ID NO: 112354 - DNA, 1047 bp, Homo sapiens
ctttgcacgtgttactccatttaacactttcaacactgctgaggtaggttctgttgtcttctccatttttatagataatgatactgagacacccagcgaagataggtaatttgcaacacaggtcagtggaacaatctctgaccttaaggcctgtacacataattaatttagactttgtgaaattactgattttgcatgtcaaagaaggtcgactctcagcaattttgtgtggttttatctagcaagctaagctatccttgctttgttctctaagaagtggggaactgtattacataacattcttatgaatatcatttttaaattttagttaaaccctactatttcagaaaaatttaagggaaagatagtctaaatgatagcctactgttgaggatgtataatttcattatttttctatttaatcttaaatgtagtattagcttgtattttagaaaaacaatcatagacaaggtaaattctaacaaatgttatgcagtgaaagtaagttctagtccttagaggtaactgctattcacctttatgtacagaacttttcagaactattctatatatgtaaacacattaggaccccgtctctgccatctatacacaaatggaaaaaactatatttaccttttcaccttgctgtattcacttaatatgtcttacaaatgtgtcttataaagccacctcctttttagtgaatgaaggttatgtggatgtatcatatttcttaagccaggcttttactactgagtgtttagatcatttcgaggtttttgcttattgtaatttgactgcaaatttgttgcaatttgactgcagtaactactcttatatttatatctttgtccatgtgtcaaagtatttctgtaggttgatagtctaaaataggtggatcaaaggatatatacatttttgattttgagagatattacaaatttcagagatttttccagttccattaaaaatacatggatgtctcttttctgctatatttttcgcagcatagtgtgttacaaagctttatgatctttgctaatctga

SEQ ID NO: 112355 - DNA, 2716 bp, Homo sapiens
atttatttacttttaaaaaatgttaagtgtagcctaataaaaggtcacaaactggagattgaaaaacacttaactttggttcctgtttcagaaaatagtgtaattaattcatcagttgttgatgtataattgcttcatgagatgattatgaaagtaatttgtaaattctgtggtacttttcaaatgtatatcatttactgagtctgattatcacacggcctggcatataataagtactctataagtattggctgatttctaataggtctgaaaatttatcttttagaattttttcttcagttggtttagcgagtttccctttgatgttgaaaatgtttttttttaaaaatctaacctagaccatcccaaatcatgaattactgttgtgtgaaacagtgagactactgtttttatgccacaggtttataattatgcaaataaatactacatctttgcattcattttggttttacttaccgaattttcattccaggaatgtctgaatctgaacaggctcttaaaggtacttctcagattaaattactctcatctgaagatatagaagggatgcgacttgtatgtagggtaagagtgattttttctccatggggtaggaaatgtttaagcagtacttagacatgaagtcagtggtttgctgatttataaagatagcaaatgttatattgttagactgaccagccatgctttttttttttttttaacttttttttgagacagagtttcactctgtcgcccaggctggagtgcagtggcgtgatctctgctcactgcaacctccaccttctgttttcaagcgattcttctgcctcagcctcctgagtagctgggattacaggtgcccaccaccacacctggctaatttttgtatttttagtagagatggggtttcaccatgttgcccaggctggtctcgaactcctgacctcgtgatctgcccaccttggcctcccaaaatgctgggattacaggcgtgagccaccacacctggcctttttttgtatttttagtagatacagggtttcaccatgttggccaggctggtctctaactcctgacgtaaggtgatctgcccgcctcggcctcccacagtgctgggattacaggcgtgagccattgtgcccggtttagccatgcttttcattaaactattgttagtatataattttagtcaacagttttcttcttaaaagcctatttcagaattaatctggtggatagtctatatttagatgacaatccttttcatttatttaatgatatttaaaaacattttgtcattttattttcacaagtcatcataacataggacagagtttaaggctcagagggttatgctgtaggcctttttgtgaaatacctatgatgagtggtagtagtggttggtactcattaggtgaaatcacatatttattctgaaggaaaatataatacattgatattattcatttaagtaagattcttaaggtttctattcagtgctttaaaagtgatttgattctaattttgtttgatatcctggagaactttctcttcctatgacttgctgtgattctttgaggaattcattcatctatttttttttttttgagacagggtcttgctatcactcaggctagagtacagtggcacaatcatagatcatatagatcatagctcatagcttactgtaactccaaactcctgggctcaagctatccttccacctcagcctcctgagtagctgggatcacaggcatgtgccactacacctgactactttttttttttttttttttaagagacaggatctcactatgttgcccaggctcatctgttcttttttcttttcctctacttttccccattatagaaatgagagaagactacctctatcagttgatgatagtttagatttcttaggatgtatattttcacatagaaatcagccaaccttactgctgcttgcttgttaacccaatttttatataaaattaatgtttgtttttatgtatttacatataatatatttatatattttctataaaattataatattcaaggggagattcatttttaccaatcttccacagtcaaacagtagaaagggtatagatttctgtttctgtgtcttttttaatgtattgagtgttccttttttacagcttgctagagaagttttggatgttgctgccggcatgattaaaccaggtgtaactactgaagaaatagatcacgctgtacacttagtaagaacttcacttttttactttgagtaattttgttacattactagatgctttgaacttaaacattaagtagatttaagttctgagtgtctaaggtaacttgggtaaactcatttgaaagcaaatttttgctttgtttcaaatatggaaaacattcaacagtcattattctcatctttaagaatctataatattaaggtctgaggtaagcttgaaatatcttgtttctgaaacaacatatttgtaataagcatttcagttgagcttttataaaatgattgattttatctgctttaagtaaatcctgccactacagacatcaaatattctgaaataaaaaaaagaatatgacttctgatggtagattagttaaatgtttcctcaaggcaatgaacagtccacataaatatttgtagtaagtatagggattaaaaataaataaataaagattgtctgcccatcaaagagag

SEQ ID NO: 112356 - DNA, 2040 bp, Homo sapiens
ttcatatgttagtataagacgtatcgtatgcaataatagcattttgagtatgctctgtgggccaggtactcaagtgcttcttttacattaactcattaatcttaccaacaacctcttgagggtaggtactattgtaatctccgttttataggtaaggaaactgaggaagagagaggttaattaattaaattggtaaaagttacacaacttgtaagtgatggaattggcattttcaatctagaaagtctaattctgtatgctctgaactattatttgtaatgctatgagaagtagagaagtatattcctaaatgagggaaaagccacaaatgtagttattggttgtaagattttttttttttttgtaattgaggaaacttcatattaatttagattttcagtaagaatggaattgctagtaaaatcatggtatattctgcatattctgcaaatggtatattgtgcaaccattaaaaaatattagcctgaagactagagcaggttggaaacagaaattacgtatactgtgattaccactgtgtaaaagcatccagtaaagtaagacttgttatggagagcagaccatgtttttctgttaggagttcttttgttgttccactgaatgtggttattaaaatatctggaagtactttaccgtttcttaattatactagtagtcatttttggggcatagtgatataggcttgtttcaacataagaattataattacatcaaaaatgcttgttaatatttacttcaaatattttatttttactttaacatttttcataaggactagttaattctaaagtaaaatcttcatatgtggtaatatttatatatatatttgttatagaggttgagtatcccttatctgaaatgctttggaccagaagtgttctgaattttgaatttttttggattttggaatatttgtattatacgtaactggttaagtgtctgtaatttcaaatttgaaattctaaatgctccaatgggcatttctttgagtgtcctgtcggtgttcagaaagtttcagattttggaggatttcagatttttggattaggaatacttaacctgtatgtcattttacttttcctttgtgcagttaccagtaaactggtttgtgtatgtgtacctgactggcacaaaccctgttgtatattgtttaagataatatccagtactgttactaaaataaaatactgagttcttcatagtagcatgtgtccaactgttttcacatttttcaaattttaaaatctgtaatttcatacagattttttcttttatatattccaaattattttttctgtattataggcatgtattgcaagaaattgctacccttctcccctgaattattataatttcccaaagtcttgttgtacctcagtgaatgaagtcatttgccatggaataccagacagaaggcccttacaagaaggtgacattgttaatggtaagaaaaatatgttactttcatcaccatgggcaaagaaacaacaaagcttggggaatctgacagtgacttgtgttttcttgacttgcttcctgtacttaaactttttcctttttaaaattcagtatcactaactcttaaatctacaggaagctctcttaacggttttgtgcatgttgcttttaagatacttccggtgtgatgtgtttggtgcagtgtatttctttaatgcttatctcatatgtgattggtaaataggtcaaagatgtcagtgaaatgtggagtctagtttttttcccccagaagttcactaatggttttgaagagaccagggcaggctttgttatagatacaggaaaacccttcataatatatgaagacctaaaggaaagctgaaaatcttgcagaagtgccttacttgagtggaagtagctttaaagacccctatgttaagctaccttgggaagttacaagtatagagagtagaggaagtagtttaaaagacattaatgaaggctttcctagatggcatttgtttttgttttgtgtattattttattttttggagacagggt

SEQ ID NO: 112357 - DNA, 2280 bp, Homo sapiens
attccatcttgatttgatatttgggatatataaaaaatgtggttgtaatacatctgatgaaatttaaacatcaaacatactgaagaccaaaatgaagttggaaaggcattagctaaaacaattggcatgtaaataaggatcttagtagtgaattttttccttggctttcttcttgatagagttcatttagaaaactgagtgaactaagaaattgtttttgtttgttgaaggcggatggcaggatgaaacctggccagatggttggactgcggtgacaagagacggaaagcggtctgctcagtttgagcacaccctcctggtcacagacactggctgtgaaatcctaacccggcgacttgacagtgcacggcctcacttcatgtctcaattttaatttctcccaagatggcacatctcagtaccttcttactgtgctatgcattttattgagagtacagaaaggaagaggaacctttttttaatcacttgttttgttttgactatagataagaaaggactacagcatttgatgtgtgtcctcaagaacttgtcttgggtctgaaaaagctgagaagaataaaggaaacattgctcaactcttcagccccctccccctgcacacctgttttctcatttgccctttgagcacttttacttaaacttgcttgtagttgcttttatcactgccgcaaaacagccatcaagagccatctgctttccaggtgaacattggaaatgagaatctttgaaacttagcaatatgtgttgcaccagattttttaaattatatatatggaaatatatatgtatacattttaagttctgtatacataattaccaaacactatgtgacctggagtttgtgttgtttctgctctgacaggtttatatgttcttacaaatggatccatagtttgcagtgatttaattcctggttgggatttggcctcccctctcccccatgctaattatttacccttgtaattgtgcatagggaagcactcacccaatgagactttctccaatgtggactctgtgtgtcagtgaatgaatgtagtaaaattcactttggaaggttatcaggcttttaaaaatctagtttatggcaaaaatagccattttccaagtggtggctgactgttgcagggaatgagaatttcataatacactgctatttcagacctctgtttggtcagaaatggaaaagaaaaagccccctttcttcccttttctgttttacttcaagggcataccttggaggtgctcagagaagcgtgaagtttgcactatggtggaggatggggaaagagttctaaagtgtctccagctgtgaacccaggaggtcaagtgggctattaaaatctaacgttgagtaaatgtgatagtgatgagaaaggaattttgtgtactgtaaccttgcagtagagatgcagctgtccttcgtgtgtggaaacacacctctcctttacatagttgggaacctcattagaaatgacctcagctgccccatatctacgttcctttcagcagttgtccaagtaggagtgtatccagtgaagacatatcaaatcacaaagtcattgtcattagagtgtacttgattactgggcatccttgtaatataatttcataccactgacacattatacttgtaagagaacatctttcccagagtgcctcagaccttattgctttaaaatataataatgttttcattacttttattatttgaatgatttagtaaagttgactgaatctggtatagactttgggagtatgtgtgtgaagtttttatcaaactgtaatatttgtgaatggaatgccttgcaatatgaatgttaatataatgtgtaaagggagattaaaaagtttgaatgattatcctaccatgtagtcattaactttgctgcatttctttgggatttcagagggaaatggtgggaatggggaggctgtttgataatctaaaataaattcatgaccatttgagtagaaatgttttttcaggtgtaatggctgtacataaactcagtagagtgccagcagcatttgagatgcaaccatatttttgagagcttttaagacagaatgctgaatattaggggagcattttatgtactgattgtggaattaacaatgtgggcttattcagtgtctgtcattagaatataagctgaaggaagaaagatcttggtgtgatagttttttggttaaaagataaaacaccacactggtgataatgcttttcttagtttgggagattttaaaacaatatggact

SEQ ID NO: 112358 - DNA, 1386 bp, Homo sapiens
taaatttaaaaccaaggaaataaagtcctgtattagtttttttcttccttgaatatcatgattatagaaatctttgctgatgtggacctaaataagcttgttgttgagacttccagagttctgtcctgggtagtttaaaagtctcaattggccaaaactttaatgaggttttagtaaatcttaatacagaggaagggaaatttcaaaagtatttacttcttcactgaaaggtgttggtcaaattcttcatctccatgctattttggagtttctcattactctttaactcatcaaaaaattcattcttttaaatgccttttgtcctcagctaagtaacaagcatactgcagaaatttgttgaataaattaatgtgtgatttcttttaggatggaagagtgtagaaagtgtcccaaagttggtgtctgaatatatgtccaaaaagataaaagttgatgaatttgtgactcacaatctgtcttttgatgaaatcaacaaagcctttgaactgatgcattctggaaagaggtaggctttctctttatatatcatagaatgtaataatgatgttgagtttgaggggatggagagtcgaaaaacacaattttagttgtcttaaaggtatcatttaaaacttagtatgttgcttccttttacagcattcgaactgttgtaaagatttaattcaaaagagaaaaataatgtccatcctgtcgtgatgtgataggagcagcttaacaggcagggagaagcgcctccaacctcacagcctcgtagagcttcacagctactccagaaaatagggttatgtgtgtcattcatgaatctctataatcaaggacaaggataattcagtcatgaacctgttttctggatgctcctccacataaataattgctagtttattaaggaatattttaacataataaaagtaatttctacatttgtgtggaaattgtcttgttttatgctgtcatcattgtcacggtttgtctgcccattatcttcattctgcaagggaaagggaaaggaagcagggcagtggtgggtgtctgaaacctcagaaacataacgttgaacttttaagggtctcagtccccgttgattaaagaacagatcctagccatcagtgacaaagttaatcaggacccaagtctgcttctgtgatattatcttgaagggaggtactgtgccttgttcatacctgtaccccaaattcctaggatggcatctgcccttcagggggcactaaaatgtattattgaaacagcattctgggcttaaataggtgtatgtatgtgttggttgtgactgtactatttctagtatagtgaactacatactgaatatccaagttctcagcacctacttttgtcaaatcttaacat

SEQ ID NO: 112359 - DNA, 1541 bp, Homo sapiens
gttttatttttttttatttttgagacaggatctcattctgtcacccaggctggaatgtagtggcacagtcacggctcactgcagcctcaaactcctgggctgaagtgaacctcctgcaggcacgtgctccgctacacctggctaattttattttttgtagagatagggtgttgctatgttgcccaggctactcttgaaatcctggctccaagttgtcctcctgtctcaactttccaaagtactgggattataggagtgagccactgcacctggcccaccgttttaatgatgggattttaaaataattccatctgatccataagttgtaccttttaaaatgagttcagtattctgacagtatgatctagaaggatagtgaatattggaaaagatggataagattataaatatcttataaatttcctttataaggcattgctgcaaggtgctaaattactaatgaatatatttgaaattgtagtttacaacactttcttaatatttactggtcattatttttaaaacatttctttttcctgtgggttttaagaaacctaattccaacttgcctttttcctttttttttctttagagtcactcaagggaaaggattaatgccagatggtaccagcagatttacttgcaaaggaaagacaattttgcattacatgggaaccagcacattttctgaatacacagttgtggctgatatctctgttgctaaaatagatcctttagcacctttggataaagtctgccttctaggttgtggcatttcaaccggttatggtgctgctgtgaacactgccaaggtaagagactgacttgggttttttgcttctgccttctaatttaattcagtgaaactttcctggaatagtgaaattggccaatctgtatgaaacccagtgattctcttgactctggtagaatgagtactttataaactttctttactcctagttggagcctggctctgtttgtgccgtctttggtctgggaggagtcggattggcagttatcatgggctgtaaagtggctggtgcttcccggatcattggtgtggacatcaataaagataaatttgcaagggccaaagagtttggagccactgaatgtattaaccctcaggattttagtaaacccatccaggaagtgctcattgagatgaccgatggaggagtggactattcctttgaatgtattggtaatgtgaaggtcatggtgagtatgggcttcattcctttttagtttatggaactgctttttttgaagtgcagttttagattaaaaattgttttgttttggcaaaggaaaagtctcttaataagaatttttctagtgaaagaaggggaaaatatctatttgaactacaatgggaaatgatacaagaacagctcagggaaggatgagaaaagatgtttctttgcctttcaatgcctgctaagtgcatgtctcatgaaatgaaaagacagaataaagcagttgtgcagagcatgatctttggaatcaaatacacatccacttactaactcagtgac

SEQ ID NO: 112360 - DNA, 1052 bp, Homo sapiens
taccctatgttaaccttggctggtcttcacaaaggcgactggaccctgggccctccctgtcccaggatcccctaacccctaccccagaatggtttgtcataatctggaaatttgttggctcatttttctttcaactcctttatttttcattgaacaaatctctgcttttgaagagttgaggttatctgctatctttttttcttttctctccctccctcctgctgcaaagaaaagaaccaataagttttagggatttttgtgtgtatagacattgtcatccggatgtaacttgctttgaagcagtgtttctgttgtgagtgtctcttactgtaaatatttgttcatatttttgtgaattcagtactgtgtaccattgtattaatagtaactttttataaagcaaaccataaatatactgacttttcttacagataaaagagaaactaaaggggtgtgcccagtatcaccagccgttaagatataaaacagaattttctgtacccattctcttcacataacagcaggctaaatttgccaaaccatgtagtaaggaaagacgtgcttctgagattaaacgaaatcatttttatgaaccactgcccagtaagtgagagtaataaaacttacccactaaggctattaggaagactgcaggagataacctaactccttgacacagaaaaggtagttgtttttattgtactaggtaacaacactgaaagaactacctctttgaggaaatttaagatccccttgtgtgtgttccgtttttttttttaattgaagtagagcatgcatattataaagcacttaaggtgtatagatcttaagtgtacagctcaatgaatgattatgtatataaacacctgttgatttgaacgtcacccagatcaagatagagaaccctgccagcacccgataagctccctcatgtcccttccaagtcagaacctacctccctcttaggtaaccactgtcctgattcttcctttcactgtgaccttgtataaatagagtcatgcagtgcatgctcttttgtcaggtttcttttt

SEQ ID NO: 112361 - DNA, 1688 bp, Homo sapiens
tatttcagaaatagtcattacctctttaaaaatcatatttcccagctgtcatgaggaaactagaagtgagttggattccacctgttttgcacacaggcgatggttctctccatgcttgaaggcatagtgcccataaaatgaccttgtttaccttctcttgctaacgcgcgctgaaagggggactagatgttccctatttcgttgcatataaatgcaccattgcttttatgtaccactaaaaaattgctgccaattctaattgttaagatgccatggattataagcacatgctgattttagagaggttaaaatatgaaagaaatgtgtcttagagtcaatgaaatatagtattataataaaatgacttttcttgtatctgtacctctgaattgcatgcacacatacttacacattcgttgttttaatgtcctgatagatcattgccactgcggtttgccacaccgatgcctataccctgagtggagctgatcctgagggttgttttccagtgatcttgggacatgaaggtgctggaattgtggaaagtgttggtgagggagttactaagctgaaggcgggtaaggagaatacttgaaccacttgtttaataattttggcttattcctatggggaaattgtttttctgataaaactacccactatttatgaataggtatcatctaagtagattgtcaagattaagttgattcctcatctgggaagcacaaatatttggatatttttttctctctgattttgcagactactgtttttgtgaaacttttctaagtacatttccaaaaccaattttggcatattaagcaagaatttttagagatgcatcaatgaagcaggattttgaagcatataacttcattgttcttcagttattgtttaaagagtttcatttagataaaaatattgaaacatactttttgcatggtcagacagtatctgaatgatgttacctaggtaaagttctaagacttgaagtttttaactttgcaaagccacatccgttgacaggaatttgcaagggctgatgttttcatttagaaatagatactacctattcaggatgtctttgcatttgtttccaggtgacactgtcatcccactttacatcccacagtgtggagaatgcaaattttgtctaaatcctaaaactaacctttgccagaagataaggttagtatctttttatgttcttcttaaaacacaagtgctgcgggataattaaggaatcacagagaccgaggggttgaggaggaattatttaataatttaggttcattaacccagtcggattaacgttcaaaggactgagtcccgaacaaagagtcaagctaccttttaagcatttcgtggggtggggggagacctttgtagggggagcatattacagaagcaagaaacaaagacagttattcaactgagacatgcattacatcatttcttatttttcaaggaacaacgtgttttatgatttgagatgatctgtctagtgaccttgcagctgcacagctagagaaacagagtcttcacaatgcgtgggaaagggagagagaaggctcactagccacagaaaaacaggcagttaattttaaaggactccagctctttctcttcctcagggggagttgggttttcttacatacaactgagtttttgcttacacattctttaat

SEQ ID NO: 112362 - DNA, 1015 bp, Homo sapiens
ggctaataaaacgaagtcagaagtcacagtcttaacattagataaggtccaacacattacaaataaagaaaaggagaaggacatgttgtaattgtcaagaaggcaatccttagtaaagatctaaccattatgaaaatctgtgtatcaggtaacagtattcaaagtcactgacagcctttgggaattacatgaaacaatacatcagtataaggagtctttaactcatacttctcaacctatgacaatgtaagtagacaaaagatgagtatgtggaaaatgtacatgctataattaatacagatagtgataccaaattttgtaggctaaaaaaaatgcaactcgtattcataaaagtaactatattagaccacaaggaaaattttccagaagtaaaaatataggcagcttctctgataacaatacattaaactggaaaataaacttggtgagatgggatgaaagccttattttaaatttgttttctcaagagcttataaaaggggaaagataaaaagaggaaagatagaagaggaaaccaaatttgaaattatgtaatattttgaaaatagagataataaaaacactacatatcagatctatagatctagctaaagctgtgattagaggaaaattcatcactttaaaaatttatgctaatgagaataactgaatataaacatattaaaaagatttgactcaaggcattagaacaataatgaacctgaagaaataaaaaatggaacttaataaaaaatgaaaagagatacaaaatagaaataggaaaattgttggacatatgaataaatccaagatctgttgttttttgaaaatggtagcaaaatgtgaaaagtattagctaactggatcaagaaaaaaattacaaatacacaaaaatgagattgcagaataaacaaatttagatgaattatgagataaatctcaattctatgaaaataaatttggaaacctggatggaatggataattttctgggaaaacatgaagttccaaaattg

SEQ ID NO: 112363 - DNA, 1701 bp, Homo sapiens
atccctataccttttttctttctcaaagtcagttctctcagtgacacactttccctttcacactcactaattccataacaaaggcatttattttattaatagcctatgatatgaaacattttcaaaggcttttaagtttttaagtacagtatatttaccaaatcctgtatttgtgcccatttttccaagaactagtgtaataaattaaaagaggcatgttttcagttattttgcgacttgttaaatttatcatttataccatcacctttccagagagacttgagattcattggtctctaattaatcaggttcctcttggggccttaaatttgtaatataacattttccagaaaactggctatttattaattatacattttaggagagagttcttttgcctcattcttggtttcattaaaaattatggataaatgtcatctgagcctggtgatacatcttttatgcagtcaatgtggcttacaaaatcatgactgccagctattgttcaattttgtacctgtgacctgacaattttggtgaagaagttttcaaatgtgtgtctctttgtagaaacagatacatggaattaattaaatctataaactatttccttttctttttttctttctttttttttttttttttttgaaacgtagtcgcttgcactgtcacccaggctggagtgcaatggtgcaatctcggctcactgcaacctctgcctccgggattcaaacaattctccagcctcagcctcccgagtagctgggattacaggagcccgccaccacacccagctaatttttgtatttttagtagagacagggtttcaccatgttggccaggctggtctcgaactcctgaccttgtgatccacctgcctcagccttccaaagtgctgggattacaggcatgagccaccgcacgtggccagctatttccctttcatgattcatgtagatggagaggaagtaattggagaaggcattctttggtcatagaacaatgtgagcaaatatgtggcagtaaaaatgcgtttgttttgttggaacagaaataaagttggaaaagtagattactgccatattcaggaaagagtttttaaattaaggatttcagattttatcccacagaaaaagataaaacattgaaagtagtgtttttagaaaatgagcctgctatcagtgtgtggaagtaggttggaggggtctgaggccaacaaggaggaaataaaattaagaggctatttaaatgatcaaagtgtgagatataagaaattgatgtagtaaattcaaaataatgcattgtaattatattatttcaaactttgtttcatatatttttgaatggatttgttttgggaaaagagaataatcatttttagccaactttcataaggtcttattaattagtaacctctttccctgttgtcttaaaggatatccatatcaaaccagagcactatagtgaactcataaagaaagaagacctgatttaccttacgtcagattcacctaatatactgaaggaattagatgaatcaaaggcctatgtgattggaggattagtagatcacaaccatcacaaggtactattaaatttttatttttgcttttgcttgttcttaaaattgatatatcaccatttcctgaaagtaacaataatactaatgatagctcatctttattgagtgcctactatatg

SEQ ID NO: 112364 - DNA, 1049 bp, Homo sapiens
tgcatatactcttgtgcacatttttgtgtgcatttctgatttatttacagaaatttaaggaaatactgagtcaaagggtgtctaaatagagattttgaagctcttaaaacatatatatgtgttgccttctggaaaaattgtaccatgaccaccagtagtatatgaaacaccccatttctttagacctttactagcattgctgaatatttaattgatattaaatggtatttaaatgatatttacaattaaatgacatttatttgtctaaagttttatttatattattttatggtttaactttaatcatattgattatttgagttttttaacttttttgtgcttgtaaattatctattcatgtcaaaagttgtttttcagaggcaccaaataatgtcatctgaaatgttgccagcatttattgaaacttctaatgttgacaaaaagcaaggcataaatgaagatcaagaggagagccagaagccaagattaggtgaagggtgtgaaccaatatctaaacgacaaatgaaaaaactaataaaacagaaacaatgggaagagcaacgggaactccgcaagtatgtgtttcaaaatgtatatgctctcttcctatttagagatatgcaatgttaaaccttgcatagccctttggcatattaaatgtaattgtgttacttaaaattcaattactaattttagacaaaagcgtaaagaaaaacgcaagagaagaaaattgaagctaacaacgtatattgttagctaacactgtcaactggctgttaaaactattttttaaaattgtttgggtttcttttagcactgttgatgatcttgcactcaacactttttctaatgcagaaccttattatgagtagcagcacaatttttgaaacaactgacttagataagggatgtaattagtgtctgtgtgctagttatggaataaaaacagccaactcagaaagatcaagttttggcctgacattgattttgccacaagaactgttgcaggttttggtgaaagcagtttggctaaatttgtcgttgtaata

SEQ ID NO: 112365 - DNA, 1867 bp, Homo sapiens
taaagagtaaagctatggctgttttacttcagccataaaaaagccttacagattctaaatttaaatgcattttattgtgaatctgactcactttttgaatttaattttccacttgagttatgtaaaatcatgtgatatggtaattttctgtataaattaaaaataatataggcaagagatgtttttctctcattttcaacacagaaaaattaggagcctttcttcgttgttttgcatttttaacagtgggactatcttaattccttcatccaatactcacaagaatatatgaatgaatacacgtctgcaggtacacacttaattcttgaacgggaaaaaacagacatcactgtaactacctcccactcccaaaacactaactccagaccccgccccgcataaacccctcccctttcttccattgcgggttcgaaatggccgcagttcgatgacgtaagacgcaaccgccgtagcctccactgcgtaactaccgcccctgcctctgggaattgaagtttctgtggaaggaagcgtgagccgtaaccaggccaacccagaaaggctttctttctgagatttcacttccctgtcaactcttcagctcggtaagtgtcctggcactggttggcgctcccccgcactatggtattctctggacgcaaaggggcgcgtgccatgcagccccctactagcaacaagggcttccgggggagaggggagcagtggtgtggaagtggtttcctgcggcgctcttgctgaaggaaatgacgtcgatgacaggcgccccccgcggcctacccagctgctccctggttcgccagagacagcttaatcccgtctctgaaatgcgtttgctggctgggagcctagaagggatagtgggcgaggctccgccccgtggtggggcgctttccgtcggcgtgtgttttggggttgccatcggcccgtagtatgtgaaaagtgagtttgcaaagaatcagtgggaaatctgtactctaaagggccggaaagcgtgttatggccctgccacttcgtggctagagaccgtgggctttacctctttaaagctgccttacctcatttttcctgcaaagggctgacgtcgctgaactctctgaaatgtagagagcccgaggggaagttgctgcaggtgctgtgagctgaggacagttttataaagatcgaagtgttacttgatttcactgaaatactttaaatttgggaatttttctacagatatgaagaggatggcaacacattacttgtcactttctgaaagaatttcatctgccccttccattcccaaccctctgcccaaaaggcttgacaactgaagtgaacaaagggcttttcgctcctccacgtttagtccgcatgtcttttaaaagggcattcctggccgggcgcggtgactcacgtctgtaatccccgcacttcgggagggcaaggcgggtggatcacctgaggtcaggagttcgggaccagcctgaccaacatggtgaaaccccgtctctactgaaaatacaaaattagccgggcgtggtggcgcatgccagtaatcccagctactgggggggctgaggcaggagaactacttgaacccagaaggcggaggttgcaatcagccgagattgcgccattgcactccagcctgggcaacaagagcgaaactccgtctcaaacaaacaagaaaggccgggcgcagtggctcatgcctgtaatcccagcactttgggaagccgaggcgggtggatcacgaggtcaagagatggagaccatccaggccaacgtggtgaaaccccgtctctactaaaaataacaaaaattagctgggcgtggtagcgcgcacctgtagtcccagctactc

SEQ ID NO: 112366 - DNA, 1357 bp, Homo sapiens
gaggctacggcggttgcgtcttacgtcatcgaactgcggccatttcgaacccgcaatggaagaaaggggaggggtttatgcggggcggggtctggagttagtgttttgggagtgggaggtagttacagtgatgtctgttttttcccgttcaagaattaagtgtgtacctgcagacgtgtattcattcatatattcttgtgagtattggatgaaggaattaagatagtcccactgttaaaaatgcaaaacaacgaagaaaggctcctaatttttctgtgttgaaaatgagagaaaaacatctcttgcctatattatttttaatttatacagaaaattaccatatcacatgattttacataactcaagtggaaaattaaattcaaaaagtgagtcagattcacaataaaatgcatttaaatttagaatctgtaaggcttttttatggctgaagtaaaacagccatagctttactctttattcattccttgagctatttttcctatgctgttttgcaaaacatcagatgacatttcattgtttataatacttgaccttatataatcttttgctatatatagatcatgtcaactgagagagaaatgaaatacaaccccgtagattgtcattttctatttagtttttttctcctctacttctaataggtgattattgcagaatttgaaggtaagaatgaggtttgcatcttgaatagaagactggcttctcatatagaaagaattttgaagtaaattatccttgaagatatttgaacatgtttaaaggcttcagtgaatagaaaattaaatccagaatttgagattctctaaaagagccgaaatttctttgactttagttacaaaactaaagtcactcttgccataagcccttaaattttacttgaaacactgtatcagctataacactgttgtgagtccctcttctgtttcttcctcatctcaaacctaaaagatctttgttaactgagcactggcaaaaaagtctggatccacttctgatctgttagtagggcatcttttttcagctgcctccatatgagggcaaagagtagctgagggaggattagtaattggatatgtagcccttcacatgtaggtcattaaattcaggctggcaaagtgatgtgccaaatctttccacagctgttcagttgctcctatgggatctgttttataaataattatacagttttttcagagttaatacctggcctccttagatattttaaacaaagttttaaagcaaaaaaaaccacttcatattctaataatgaagtcaataaattttcttttgacatagacatttaactttgtagtcatttggtgcaaaatttaaaatg

SEQ ID NO: 112367 - DNA, 1038 bp, Homo sapiens
gattcaaccttaacccaaagtataaattaaatatccacaagtccttattgatatagtgattaaataaatcaattggaaattaaagacaaatttcccatgtggaggaattcaaataatttacgtagctactccaccctcaaggaggaggaacataactcctcactccataaatgtgggatgtacatagcatttccttccaaagagtgcactatgaaaaaaagggtgaagaaaaacaattaactttacaatggagaaatctgacaacactgctgagccaggtgatcaaagtcaatgtaaatagagataaatcatgttgatattatgtacctctgatgtaatgtggtatcaagaaaatagcactttacctctgtggtattcctcctccaaacttaacaacctcagtcaaatcatgagaaaaataccacaaaaattcactagaggaatatcttgcgaagtatctgaccatttctcctcagagctattacagccaagaggagcctaaagatacttgagaactaaatgtaatgtaccctggatgggagattggaaaagaaaaaaagaattaggtaaaaacaaaagtaacctaaataaagtatgaattttagttaataatatattaatattggtttattaataataacaaatcaactacactaatgtaagttattaacagaagtaactgtgcaggctatatgagaaatctttgtgttattttagcaatttttctgtaaatctaaaactgttataaacaataaacctattttaaagtaacatatacattatacaatgtgagaaaatataatggcaaaaaaagaaaatgcaagcacaaactatattccgtctctcagggataataattattaaggtgttcagtgaatattgttctaatcctttttctgtgctcatatgtatgtatattgtttaaacaagaaatctcaaaccatatctacatctgctgtttaccagactgcttcctttacttactaagatatggtaaatatactatatttacaagtttacatatttacatataccaaa

SEQ ID NO: 112368 - DNA, 1030 bp, Homo sapiens
aaaatgatagaattcatagtgaattaaagaaaattaaatttcctgatacagatttaagaaataagacattatctttggaaaaataatgttgctacttacagtttctattttaagatgaaattaattttaaaaatacatatgaattaataccattgaaaaggcaagtgaaaaaacattttatgaggaatggtttcataaaactgttgtgaagtgtattaatatagaatcatgtttcagatcagctacattataaacatcggttttccaaatgctgcattgtgtaaaatgatcactttttagtttcttaggaagacacactgttaaaaaccaattgatataacaacatagcgttatagggaccaattttaaaaccatgtactctaagtaattgatagaaaacaattcacttataaacttataaaacctgttagggataaatgtggcttttgatattaaagtaaagtttgcctcaggattttttgtgtagaaaatttccacatgaggaaaaaaacctaatcttcattattggagcaatagagggttaaatttaaaccaattcacctcagcaaatcacactgtaggttcttgaactaaagaaaatattttcaccaatttctaaatatttactatttaaacatacagttcttacttggacaaaagaaattttttaatgagaagaagatttataaattatatctgactgagagtgttatatagaggacttactatttcatctgccaaataaactgttgagtagtcaaaatatgtgtgatttaaataccatagtatcaaacctaataccataagtattttgagaaaaataattgagacatggtacttatcatgagcttctcctgttttcccattttataaactagaacattgggtgacctcatgttttcaaatatacttataaaaaatttaaggccgggcgtggtggctcacgcctgtaatcccagcactttgggaggccgaggcgggcggatcacgaggtcaggagatcgagaccatcccggctaaaacggtgaaa

SEQ ID NO: 112369 - DNA, 1080 bp, Homo sapiens
agcaggaacaaagtatttcaaatgaatattgtacatttacaggaagcagtacaagcatttggtaatgaagcttctcgatgtttttttccccttatttgggcctgtatgcttagttagatttacaggatgttagaattgaaagggagctcagggactattgcatttttcctttataaatgaagaaactgaggcctggttagaaatggggaagcaaaaactcacatctcctttctcaagctgcctcctaaagaatcaatttcttcaaactttgatttatacatgtcaactcttgcccacaatacagcacagtatttcacatgccctagaagtttccatggtgactagattgaggctgagaataattatggtataatgagtaaacacacaaattctaagtttcaactccagcctctgccatttgccggctctgtgtgtctcctcaggtaagttaaataatctctctgagcttcagtttcatcatcttatgaaactgattagatggtagtagctcatactttaatgacttattgtgaagattgaatgaaattaggcacataggacatttggaatgattcttagcatagtataagtattcaataattattattcatatttaataaaatgcttttatggttattaattccatcagattctatgcaaaagctgtacgttctttgataaataataaagaattagtttagggacaattgaatttgcatttatcaaatgtttgtgatgtcctcttcaaactttaatctagttccatagtggactcatataagtggtagaatcaagtgagcactccaaaaatagtgacttgacttggatatttgaacagaattttctcctacactgactaactggtatgtctctcctagttcagtgcacttcaccctatgagactggaaattaaatattaaaaccccttcacatgtaaatgaacaaggcttaaagtccatttgcagagcaggtggcaaagaaggaaggaaaaagatcttgaataaccctattctctcccaccaaccccaagaaatctacttctcattggaaggaggggagagaggaactcattatgccagt

SEQ ID NO: 112370 - DNA, 1050 bp, Homo sapiens
aacattgtgctctttctcctctccctacatctgaaatgctgccaacaccattgctatctactcatccctcaagactggtatcacggatcattatcttccaggaagcctttcttcacccccactagcttcttttacaatgctcctcttctgtgctccagagcaccctctgtttgcctttattctaaaattaccatgctgtgggctaattaccttcacatctctctgccctccccaccagccagaaacatctaagtacatgaatcattgcttgtccttgcagctttacagcctagcctggctcatggcacatcttacatattcattgcagtgctacatctcctcagaaataaaaatcctgaaaattgactgagaaagttattttggctttgttagaagtgggggagaaggcatcaagaactcagaacttgagaaatttaggagtgcaagacaataaatagtccaaaggcagaaaagaccaaagaacaaatcaagatctactctgcaaccaattcttgttttccagttgtccagtcccttcataatttcctctttacccacccttacccttaatatagatcaccagtcacttcaacatctctttcatttgccctgttagtttaacttcacattctcctctgctacacttcccctaaagatctccactcaaggtcaaacaaaccatgtcctattaagcgtgttctttatcggcaataaaatgcagataatacctaatttgtgagattggtgtgagcagaagatatagtatccttatgcagaaataaacctctttaaagcacattctggaaaccttgttacttaccttcttttctcactccagctatcagatggattcacctcttttaaaatggagtttttaaaatagtggtgagtgattggttgacaatgacttgaactcacactatataatgacaagcttatgaagttgattgtacatcactatggacaaaaaaaatgtaaaggtttcctagaggatctgaaatgtttctcattacttctcattggggaatcattggtgactggaccagtata

SEQ ID NO: 112371 - DNA, 1012 bp, Homo sapiens
aatgatgtcgtttattgtttgcaaattgctaactggagttaggagctacagaatgatgccagtagatccagtctgaaaacaatctctcacaacacatggaagcttttcaagtgcctaggtgaaaaatgatagacagtaatttaaagatcaaaagcaaacattcttcatttaaaaataggacatgaaaggaaggacaaacgtcctgttgtgacagttctggtcttcactcagtgcttttctttttcagctgggcaccaaagaaggttacctcaccaaacagggaggcctggtcaaggtaaggaagtgtggttttgctcatgccagccacagaaaaaagagaacacgtcatgtagactcaattctcatcttgatagtttttcttggaagcataattgcctgctcattttaacccatttgtaatattcacctgactcaagagttcatttttatggctcattagtcaaaattctggaaaatgacttgactgttctttgacaaagccctgcataggtgtagcctgcagttaaaagtcaataaaacatagtcctcataatggaatgattgaggatgaagatagcaagtttactctagaacatctttcgttcttcttctaaaacaaggaagaagtcaaaattgtataaaatgtttctttaaggataggccaaaaacatcactgatgctactgaaactatgttataaaatccaaagaaaaacacaatttaagctcttacaagttcagagtatccaaatgttccccatttatgagactgtatctttagaattcctttgtttcatctcaatgtgccaagaagaccttcatggaatgtgtctgctccttctcgttttaagagtcacggtatttaacctctcacagacactgacatgcttggaattagcctaaataatttcattatttgtgtcccttctagatcgaatgctccctgaggacagagagtattcatattcatagcatatttatgtttaaatcctctgttacttcttttaactgggc

SEQ ID NO: 112372 - DNA, 1020 bp, Homo sapiens
atgctgaaaataaacttattaatgactacaaagtttttggttgctttatttagggttatagtacaggttgaacatccctaatccaaaaatttgaaatccaaaacattctaaagtctgaaactttctgagcactaatatggcattcaaagaaaatgctcactggagcatttcatatttgagatttttgggttagggatgctcaaatagtaagtattgtacaaatattccagaattcaaaacacttctgatacccagcattttggataagggatattcaacctgtattttgtttcagtcatgggaaataaactatgttctgatttacttttggtaactatgtattttggacataaggaaatctgagtttcaggctttgaggaacatttttctaacatgtaattttcttaatctctttattttaggactaattgtcagcctagaaaaggaacttgctccattgtttgaagaactgagacaagttgtggaagtttcttaatctgacagtggtttcagtgtgtaccttatcttcattataacaacacaatatcaatccagcaatctttagactacaataatacttttatccatgtgctcaagaaagggcccctttttccaacttatactaaagagctagcatatagatgtaatttatagatagatcagttgctatattttctggtgtagggtctttcttatttagtgagatctagggataccacagaaatggttcagtctatcacagctcccatggagttagtctggtcaccagatatggatgagagattctattcagtggatcagaatcaaactggtacattgatccacttgagccgttaagtgctgccaattgtacaatatgcccaggcttgcagaataaagccaactttttattgtgaataataataaggacatatttttcttcagattatgttttatttctttgcattgagtgaggaacataaaatggcttggtaaaagtaataaaatcagtacaatcactaactttcctttgtacatatt

SEQ ID NO: 112373 - DNA, 1149 bp, Homo sapiens
tgaggaggaacctgtctttaaagctgtccctgaagtgacagcggagagaaccaggcagcccagaaaccccaggtaactggcgctactttgcctggttttgaggcctagtcccgcaggtggcgcgggtggtgagattaaacagaaggagaggaccctctcttcttttctttgggcctagctctttggggtggaggggcagggatggggtgggctgaggtaaggtgtgccagctgagtacctgtgggggtgctggggcactccgactcccactgggctcgctgggccaagccctagaaccgcgggggttttacctggttctgaccagggctgatctcgcgtattaagttgtgggtggggaggacgaggaagccaaagagggaagagtcaccgggagtttctcttccaggcgtggagattgatcctgcgagagaagggggttcatcatggcggatgtgagtgacacccctacataagaggaaggggagagtggggaattttgaggggcatactgagcggggagaggtagaacttcccaaacagaaatttgttttgatcctcccagccccacccatcccagttaattattttctctgatatctgaagtgggagactaatatgaatgaatttgcaggatcctgagtttctgcctcgaatgggggtgtaggacactaaggtgcttgagactgagaaaattaggttctccctactccccagtccagctggggcataagagaggctctgtatatttaccatttgaaattctgaatgatggtttgctgcttttcctgtcagaatttggtcagtaggacatgtacccacaatacttttttccagtaagtgataacaatatctcatttggtttattgtagcaatttacgatgatttctaacccatgcctctttagaaacatggtaacgtgtgtgtgtgtgtgtgtaggaggataaaatgatcagtcgggtttggagaatagtaagtgctggatgctcaaaacaagagatacctgattaatccatgtgaggtcaaaattgatacctaaattgtcagtgaaattcctgggataagagagtgtaatgagacaaaataagatagtcttctggccaatgcggttgcttagtctgtaatctcagcactttgggaggccgagatgga

SEQ ID NO: 112374 - DNA, 1655 bp, Homo sapiens
atagtttttaaaccactggggaacaggagtagagagaaaggattccaacgtgagttgacaggattctatccttatttattttctgtgtttgttttacctgctatacttcaaataaagttttcattaaaatttttttcctactaaaatggcttttaggaattgtactttgattttttttaagtcagttaatcaaaatatatcaaagggctcctgtaaagcatcacttgagcttaagcaactaggtgacaaaaattttattcaattagcaaaatatttttctttattaacagaaacagatatgcagtatgcagcaaaagtataccgtgatgatcgactccgaaggaaggcagatgccttgagcatggacaactgtaaagaattagagcggcttaccagtctttataaaggaggatgaactggaatttttatttataccttttagcgtactctttattttttctgtaagtaagtttggtttcatcatgagggatgaaggaaaagatttgatactgaaaactaaactgaatagttggttcctgaaatcttggactgtttatgacctactggctcctttaaatagtaactgaaaactaaaatggaatattttagttaacgcttctacaagtattttcattttaaaagcttacatgattcctaactaaagtgtcatgagaaaggattatcacacctgtagcaatttccagttttagtgattctccattttttcccttgtcatgtaaatatttatggaatgatcattttgtgtacatacaggttactgcttttttatttaaattcttttagtgtttagctccatgagacacttcagtttaaattgatggaataaatgttatatgacacatttacattttccttatcaaggtgtcaaatatgtggactttaaacaatgaaactttttcaaaaagaaaaaacaaaaactttaactttgtgtaaaatcttatagtattatcagcttagagggaattgatatttttaatattgccgttatattccaaaatatatattgagataaatgaactggtgtagaatatcagtttgctatttagttttatgaattactatacatatacatgcatagaaatgaaatgctatactgataaattttaaagaaaatatgaggaaatggctataaatattaaactaaaagggtcttcaacagtaaagtgcagttatgtcatttaaaattccaatactttaaaggccaccaaattttgatgtatatgtccttgaagggctgctaaaatttatgaagaggactcacattttcccccatagaaatttgcagtttcttggtgatcatttaagcaggatccaaagaagttcctttacaaataagtaataagaaaaatgagtactaaaatacagctttgtgccttttaaccctatgccaactcctaaacatataagtagattacagtatacttatctgatcagagcatgatctgtttggccacatgcaagtgtgagcagaaatagagcagcacgtagaatagtaacttaaagcaagtcatcctttaaaaattctgagctaaaatctatttaccattgagtaattgaattaatcccataggaataagctccttgtaagtaaatccatgatatgaattagaaaaaaaaaacagctggaaattgaa

SEQ ID NO: 112375 - DNA, 1054 bp, Homo sapiens
atgaatgtaaatataaaacataacaatcaacaataatgggagtcaatctttaggatctagggtgaggcaatgattttttaagacttaatcccaaaagcacagtacataaaaggaaaagttgttaagttggactttaagattttttaagcttgctctgccttattacgaggatgaaaagaagctccaggatggaaaaaaagatttgccaggcacgtatttgacaaaggacaggtatcttgaatatattaaatataaagaactccaaacactcaaaagtaaaataacagacagtccaattagaatgggcaaaaaaatgaagaggcattcctttgaagatgatatacagagggcaaataagcacagtgaaagattttctctgtcattcattagtcattagagaaatgcaaagtaaaaccaaaatgggatatcactacacatttatcagaatggctagagtgaaaaataatgacaataccaaatgctggtatggatgcagggaatggatcactcatacattgttaatgggatatataatgacacagctgttctgtacaacagttgggcagtttctcaaaaatctgtgcagctactatacaacccagcaatgcactcctggggatttattccagaggaatgaagatttatgtttacacctaatcctgtacatgaatatatatagcaattttatttgtaatagccaaaaactagaaaaaaactagatgttattcagtggtaaatggttaaacagtggtacatccttaaccatggactactactcactaataaaaagaaatgaactgttggcatatatgacaacctggatctccagagtattatgatttacaaagccaatcccaaaaggtttcattccatttatatatcatataatatcccatttatatactgtgttatttcattaatataatattcttgaaatgacaaaactgtcaaaatggagaatagatgaatggttgtcaggggttgggaagggagggaggaggagttggatgtggttatgaaagagcaacatgagagtggtgttagaaatgttcta

SEQ ID NO: 112376 - DNA, 1908 bp, Homo sapiens
aatgaaagtatcttacccaaggtcacacaacaattagtagcaaagtcagaatagtagctgaactttcagactcgaaaaggcctttaaccgctacactgttgccttgccattagtatttccaggttaagaagaaagttatcgatagattcaattaattgtagaaaattattaatgaaaatatggggccacttgttttgttgtctcttaaatttttttctctacgtcgttgaagccctgtgctctttgcttttctctctatcctttccattacattgccttctaacactatacccatgaggacaggaaaataaaatgaaagaaaagagttaataattttttaagttgtggtttaaaaacctgccaaatttacggtcttaactatttttaagtgtgcagtccattagtgaagtatattgacattgttgtgcaaggactcttcagaactttttcatcttacaacacaactgtgtactaatcagacagctccctaccgccccgtctcctaagaccctggcaactaccattctactttgtgtttctgtgaatttaactactttagttacctcagataggtagattcatgcagtatctttttgtgactgtcttacttcacttagcataatgttcccaagtttcatttatgttgtaacgtgaagaattcctctttaaaaaaatactgattaggctgggcgcggtggctcacgcctgttatcccagcactttgggaggccgaggcgggcggatcatttgaggtgaggagttcgagaccagcctggccaacatgatgaaacgccatctctactaaaaatacaaaaaaattagccaggcgtggtggtgcatgcctgtaatcccagctactaggggatgctgaggcaggagaatcgcttgaactcgggagatggaggttacagtgagtcgagatggcaacactgcactccagcctgggcgacacagcgagactccatctcaaaaaaacaaaaaaaaaaagaccaaaaaaaagctacagtaaaaaaactgaataatattccattgtatatatacaccacattttgttaatccattcatctgtctatggacatttgggttcctttcacctcttggctattatgaataatgctgctatgaacaaggatatgcaaagagcctgctttcaattattttggataccaagaagtgggattgtaggatcatacagtaattctatttttaatttttgaggaaccacaatacagtttctgtagcgcctgcaccattttactttcccacgaacagtacatagggtttcagtttctcaccatccttgccaacacctattttctgtttttgttggttttgatagtacccatccttgagtgggaggtgatatctcattgtggctttgatttgcatttctctgatgattagtgatgttgagcatcttttcatatgcttattggctagttttataatatcccatttttggagaaaatgtctgttcaagtcctttgcccatttttaaatcacattacttgttttttttttgttgagttgtaggagttccttatttattctggatattaaccccttatcagatatgtgatttgcagatgttttctcctatttatatgttgccttttcatcactttgttgatggtgctatttgatgcacataagtttttaagtttgttgtagtgccatttttctatttttgctttgtttttttgtgcttttgctgtcatattcaagaaatcattgccaggagttaattatttttgaatcctcccctactgttgaatatgatttcatttagtcattatctagtcctagagggacagttttaacattaagtgagtaggcagtctagacagaataacttggcttttgaagtctgactccacctactagcttgtaaccttatttttgagcagg

SEQ ID NO: 112377 - DNA, 2701 bp, Homo sapiens
caccgtgggtccgattagccttttctctgccttgcttgcttgagcttcagcggaattcgaaatggtaaacttcgcagagacgctcgatgactccgcgggtttttgccggcgagagaaaaacccgttacacagagggatgggggtgaagtggcgacggttgggaacgcgcggagacaggatttagaagagtggggggaggtgttttgtcggctgctagcggagcagcctcggatctcgcggcgggcggcgacggttgggtggcgcgcgcagcgccgctgggggccggcgggcggaggcgcgcggccgtggcgagcgcgcggcggggggcgaacgggcggggtcgcccctgcggcgcgccgcgggccggagaccccggcagggtgcggggacgcgctcgcggcgggacgcgccgcggtgggggatgggcgcgccgccttggtaattctatattctccgttcctcctccgctcgcgggcgtgtgcgcgccgcaggctggcggtaaggctggaaaggactccggaaaggccaagacaaaggcggtttcccgctcgcagagagccggcttgcaggtcagtagttgttcgtgcagtctgggagtcatgatgtttttctttgcatttccttttttgttattcatcgctctcgatgggcgttttgtgtatgcgtgggtgatgcggtgtcgcgacttgggctgcccatacgataaatatgggggggaggaatcacgtgtttcgatgtcgggacgcgttgctgcgcccgtgccccttgctttggcgcgcatataatttccccatctctagttctcatttttgtgcatttatgtttgtgtatgcttaaaatttaagttcccagtgggccgtattcatcgacacctaaaatctaggacgaccagtcatggacgtgtgggcgcgactgccgctgtgtacagcgcagccatcctggagtacctcaccgcagaggtaaatgggtgaacgcctataatccggagaaggtttggggggcggggaggcggcaagagggaaggaggaaagtgatgcaagaaaactcccaggccctgaacgcggcgagaggcctaagagaacgctagagggagctggtgttcaacaaggatcctactgagcttgagttctctgctcttggaattaaaattgcgtgccccctgtatatcttgccagtcagatagtgaggaacgattccagttggtagatctgcgtttgtgagggttttattctgttctctgaatcttggccaaaggaaagttggaaggcaactgacagattctgccttttaggtacttgaactggcaggaaatgcatcaaaagacttaaaggtaaagcgtattacccctcgtcacttgcaacttgctattcgtggagatgaagaattggattctctcatcaaggctacaattgctggtggtggtatgttaacttctaacattttaaaaaatttcttcagaggaaggaattttttgctgcttttaattagtttttccaggagaggaaatttaagtatattttcaatgatggaagtatggttgtatcatgaaatttgatttatatgtataactcaatgaatttttacttcatacttgagctgcatgtttttaaagatacctttcaagttgaacagtatacactttcttggtttcaaatactgtgattttttaaaaaatcttaagtagaattaattcctgtcactctcctaggtgtcattccacacatccacaaatctctgattgggaagaaaggacaacagaagactgtctaaaggatgcctggattccttgttatctcaggactctaaatactctaacagctgtccagtgttggtgattccagtggactgtatctctgtgaaaaacacaattttgcctttttgtaattctatttgagcaagttggaagtttaattagctttccaaccaaccaaatttctgcattcgagtcttaaccatatttaagtgttactgtggcttcaaagaagctattgattctgaagtagtgggttttgattgagttgactgtttttaaaaaactgtttggattttaattgtgatgcagaagttatagtaacaaacatttggttttgtacagacattatttccactctggtggataagttcaataaaggtcatatcccaaactagttgtgtattaaatttgcttggttgtaataggaacttgttttgagtatctcatctagcagcaataactaagcacatttctttgtgactgaactgtcaaatctgtagatcaacaaagtgagatagcccaagtatatttttttaatgttatatgagctactaaagttttaatttaaaaagttggcaggagctggagtgggattgtcagtttcttaggctaagtgtgaccatttcagtttgtacattggcttcgcttgctgtgtgacagcactgcactagtatgctgttagcatggtggacttggggagggagagaataggtaggaatgtcctgtatatccacagaatgaactccgaatttaaactttaaagataatagtgctacgtgccaggccctgctttgaagtctgaagttgttaagtactcagtaacatcattggggatatactatctccattttatcgaagagaagcagggtttcttatttgaaagtaccgagttatggtagttagcagaattaacagcttggctcacagcattatgtaaaaattgttacc

SEQ ID NO: 112378 - DNA, 1119 bp, Homo sapiens
tttctaattttaaaaagtatggttgcatctgtactaaacatatacagacattttttcctgtaatttcctaaaccacatagtgtaccaactatttacatagcataggcattgtaatggatattataagtaatctagagatgatcgaaagcatacaatctgcataggttatatgcaaatactatgccattttatggaagggattgagcattcatgaatttgggtatccaagcggtggggtgtggggacagatcttagaaccagtcccccacagatacagagggatgattgtattagtatttttgtgacacttatctccacagctaaattgtaaatacagtaatgcccctattgcatatttctaacatagtgaccaaggaaattgttgtagagatttgacacatttttattactgtattgtcttcttttgtctgtatatatgcaactgagatggaaggcaataccatacattataccgcatgatacataaccattccctaataatagaatatatgatagcactagattggtgctgtcagcctgttaggtaaaatagagcatagccatcaagtcattctactttccaggcaatacaccaagaatagcagttgggagatgggatatgtagtgcttaggagcttccctcaatctagctaagaagattaaacagggaggaaaattcaaacaatgtcttaatcattaaaaccacattaagaaggctgttacaggctgggtgtggtggtttccgcctgtaatcccagcactttgggaggccgaggtgggtggattgcttgaggcaaggggttggagaccagcctggccaacatggcgaaaccctgtctctattaaaaatacaaaaattaactgagcatggtggtgcatgcctgtaagtcccagctacttgggagactgaggcatgagaattgctggaagccaggaggcgaaggttgcagtgaatggagatcatgcaactgcaccccagcctgagtgacagagcgagactctgcatctaaataaataaataaataaataaggctgttacaaaataagtatctgattggctgccaaatcaacagtacctctagtttaaaggacagagacagttgcaagctggagcgtttt

SEQ ID NO: 112379 - DNA, 1010 bp, Homo sapiens
agaactaatttacattcccatcagcgtgtataaacattccttttctctgcaacctcaccagtctgttattttttgagttttttttaataatagctattctgactagtgtgaaatggtgtctcatgcggttttgatttgcgtttctctaatgattagtgatgttgagcattttttcatatgcttgttagccatatttatgtcttcttttgagaagtttctgttcgtgtactttgcccccaaattttttttttttttttttgggaactttgcaccatgtttgtaaagcgacatttaaatggtattaacttgtttaactcatatttactggacaccttctaagcaccaggtattaagcaaagtgctagagatacagtagtgaataagactgacttactgcctgaaggaggagataatcattaatcaactaaccatacaagtaaatgtcaaactataacagtgataagtactacaaacaagaagggtatgctccctgagactgtatagtggggcattcgacctagtttgaggtaaaagaaggttttcctctgaaggtgttgttttgagtcagaaggatagatggggtttattaatagatagataaggagggtaggccatgggagaagagtggctcagacaacaaaagagaacatacaaagaccctctgttgtaagggagcctgatctagtcaaggcactgggagcaggccagtgtggcagagctcaaagagtgggggtgagcacagtgagatgaggctactgaggtacacaggggtcagcaatacaacacctaattttaagctggcacatgactacttggaaaaaagactacatttctcaacttcctgcagctgggtttggccacatggttaagttttggccaatgaggtgtaaaatgaagtacaggttgcaatttccagcaagtgtctttaaaatgagaaggcatgtcctttccccctacttcatcctttctgttgacagaaatttggattacatggttggggctcaagtagc

SEQ ID NO: 112380 - DNA, 1700 bp, Homo sapiens
atatactgcaatgttaggggaatgaacatgttttcctactgcattggggacttctagataggttaatgaaaggccttttattctgttactggacatgaaaactttgtctaatttcttactctattgtacgtttacagtcgcagcactaaaaatggatgacatcaaacatttttaacaaaatgatgtacaaactaaggactatttattgataatgttttgctactcttgtcagacaatggctataaactgaattaggcagtcttaaaaaaaaaaaaaaacagaaaaagaaaaaaaagaacgttgcaaatttgttaaaatgccaaaaaggacagtttaattttgtacagattatgcttacctcaggtttctttagtgtgcttgaatgcccttctttccatataacacttatcttcttcttaattcggcaatggaatatcttttaagttttaaaaaaactggaataattatatctatcttttttgccgtttatatttaggggtttttgttgataaaatcaagtcttggttgtggcttgctgaattaaatatttatgagtggtgcatttttaagtatagtgaacaagacaccatattaagtacagtgataaagcatctatattctgtaaaaaaaaaaaaaatctgcctatgcatgttttttaagaaaaaaaaaatggctgtatcggcctgtatgggactgtaatgcgcttagtggtctgacatatactggaaatgtatgtatactggcgtactttatattctctaaaatgcttaatgcctttgaaattttgtaatcaaaaaaaagctttgaaaaaatctaaaggggagagtattctttaaagtttttaacataagcttgtcaatgcacatgtagatggttagcatgtttagcaaaccttgtgaaattataataagtttgtagttacatgtgaaactctaaatgcatggcaactgttaatgtcataacagtttagttattttgttctgttctgtcatgtgccacaaaatatgtacttttttcacttttttccctttgtatatcagttacgggttacaactggttcattctgaaaacaacaacaacaaaagtccattcatattttttaacaattgtataagtgcccaagtaattcactacagcctaaagccttgcctttgtaatttgacttctgacatgttggcaatcaaagcatgcacttgtaacaatgaaaaagaaaaagcattttatattactactcaataaaatgtgcatgaacttacagaattctcatccttccactgagtccgctgaagggatttatgtgcacaaccaccatgtgtcttctaggtgctggcccaccaccacacatcacaggctgatttccacaggcttcttcctaggggcctcgtgatctgaggggtggtgcctacttccactgtaagaaagaatcttggtggatttgtgtctcaaatcagataagagaagcctgtttaaagagcagatgccatcttctggcttcctcaaggagccagttaaaaaaccagagcattcctttttattgaaaaataaaattaatttgttatcaggttgtttcagttgtattggatgccctatctatctgctaaagcaaaaagtactaggctactaagtgcattttcatcacagaaaagagttgcatttgtattaacaagaaatttgtatacccacgcttcagctactatcta

SEQ ID NO: 112381 - DNA, 1044 bp, Homo sapiens
ttccaaagttaagtggagacaggagtttataatttctttttttttcatgtcatcattgagttgcttgtcaagaagttctttctgggattctgagatggcatggaaatgccccggttaattccttttctagctccttttagctcctgctttaagccctttgctaggtttttaggtatagcaaacatactgattccactgaatttgccattacctagtacaatggaggaatacaaagagggacatgctgcagcctgtctaggttaaggtgtttgatgcttatgatgtggccagttgatgctggttctagaggcttgtccctgaaagcagctttcctctttatgtgtccactttggatttctttgagctaaactttcatgaagacaggagaaatgcttacatcttaataacttcaagaggacattttggttggcaagagacattggctgttttcaaacctttggttacttccgagtatggtaaggagtctgttgtgtggtgtgcaggtcccgtcactttgttcttcactgaaggattccctctcactgagaaatctctaacatcacctgctgcaacagctgtgccctttgttttcctttggataatcctggttttctttttttaatgattttctgtttagctatcaaaggattttcaccacaacataagatcactagcttcgaggaagccaagggcttagaccgaattaatgagaggatgccgcctcgcagagatgccatgccctctgacgccaaccttaactccatcaacaaggctctcacctcagagactaacggcacggacagcaatggcagtaatagcagcaatattcagtgaccacttcctgttcactttttttttttttttttttttttttttttgagctgcggggcatgatggggattgctgcatatcagcagttggatgttcttgcctctgacagtagcttatttgctctgggggccaggaattggattcagtttacactatcattaaaaaagagggagagagataataaactatattttggtggggatggtgattaaa

SEQ ID NO: 112382 - DNA, 2030 bp, Homo sapiens
taatcacagaaaacaaaaggattatatattttgaatgatgtggggtgggggttatggcagctgttttgaccagtagcttataaaacaataatctttgagctgaaccatgtccctccctcaaatcactttcaggcagcactgaagagaataaaaatagccatcttaattctagtcttcagaagtttgtagccaaaggaaaaaaatgttcatttaaatagtgctttgttgtagttcaacattaatttgtatctctaaaaaatattccaacatgagacagctgtatataagatgaacagttctggtaatcttaaatcaaattgtaacctactggtatttgtatgagaattaacaccagcaaaatattataaaaagttcaaaagcatctagtggctgtggaagtggccgataacaagaatagcgagtatcaagtagcactcaattgatgaatgtgtactgagtgtctgctttgtgccaggcactgtactaggagctgcaggggacatcaagaagtgtccatctccagctgtgttctagcactgctcaaggacagtagagtcgaacctttagtatttgctttttacttgactgttgtttaaatatatagttataagagaactgcatatcaaaatagtttttaatatttattatacataccatatcctttggaaatttcaaaaataataatttgaagttcccctttaaaacaaaattcttcagttgtattttgttcttgcaaggtaacttttttgtttttctcaaaattatgtgcatatggtcctttggtgtgatacaaaaagtgccactttagactcttccaatttgtacatgatttggatatggtaggggaaacaatagcactgtaagagaaaatacaactgcttcctaaatagcagtgaataaactgctatttatgtgggaattctctattcctcttggcaaattctaatctgcagtgtgcattcttgttgatagtttggctgttttctgtggtttctgtgactctgtgttgtgttaagtatactaccaatgtaaattgctaatacccattgtctgaccagcaactacagcagagcacattcttccataccaggatgacaaaaatgattagaaatggagccccattccagaagtatccattgttctagctacatttttaacactcccaccctattggcttttaaaacctagaaatttcacttttaccatttaaattaattaaatcatttcataaatgataatgatgacaaacttttatacctgttaattatgatgaaattatattcacagtagtctaaaaaagacagtagagtaccacttcatgctattcttttgtatttcaaaataattgagttagttttcagggtgggtgctcattagacagctctattattttgcaatttattactaaattagagaagaattaacaagctttgctttgggccttggtctttccccattttcgcatcttattcctctcacagttgactaatcaccattatgctaacctttaaaatgcagaggggggaaaaactatttctcatcttttaatgagtattgaaacaactgtgtatatcttttaggaatctcatccatactaataaaaggcactgcacatttgtgtaggagtggctggtaaagtttcagcttgaaactgctttcctttttttttttttcccccccaaataaggttgggaggataaaggtaccatgaaattatccttaatcagccatggtgatgcagcccaattgagcattggtgattggccctgaaatatctggcttgcacttcacagggagtaaagcaaactgatgtcattggttccccatttatgtgttttatttgcagctcaccagttggtgtactcactgaagaaatcattaagttttttgtacaaatgccttacctatcgctgtagcacaccaaagattactttttaaaaaaatcaaatatcattcccactttgagaattccatgttttaattgaataggaccaaaaccagttcaatgcatttttgctaaatattgtgaa

SEQ ID NO: 112383 - DNA, 1013 bp, Homo sapiens
ttattccgtcaaatcaaatcacttccccttatttttgctgagccttggctgaaaaacttaacatcagcattctctatggctcacttttaacatacagaatgcacaacaaacactttgtattgagatgcctgattacaaaatcaaaatggttttctttatctatctagcttcgatactcaaaagaaacagaacctccctaattggataatgtaaactttatggtagcaatcgtttatggaacattactggtatataaataaattaaaataaagtatgttaaaaaaaattttaaaaaaagatccggagagccaagatagagggaaatgtgggtgcttatatgcattttttttcctttcagtcatttctttctttttcacaaaagaaattaaaagttaatgtcgcccctcattgtgccttccagagaagagagtgagagtgtgctgacgctgaaaggcttgaccccaactggcatgctccccagcggagtactttctggagggaagcaaaccctgcaaagcggtaagcaggctgatgggtatgactgtgtgctggggcatcgcagtcagctgtgtcattagagccctgatttattcattcatttaagctctgtcttggtcttcggttcttcttctcagctggcagaagggctgaaaccccaatcagtttgatcagtcatgtccaacataatagctccctcattctctggaatgtggtctttactccacctttcccccattccctcattcacatgttaatctacatattcagcctagctacaggacaactcatttaggttgcctacatgcacaataggtttgactactttgagccactccgttgtcaaaaacaactttttaatcacatttttaataagtattctggttatgtttcatttatgagataacacatacacacataaccactaaaatatacctgtatgtctagattttcaggagatgatttcattatcctcttgaatggaaattggaagccatttgtgtcttttctctgat

SEQ ID NO: 112384 - DNA, 1064 bp, Homo sapiens
atctctaaatataacatataatgtagtgacaaaaatattttaaagtttagcatacctgtaacctcactggggagactgaggcggtaggatcacttgagcccaggagtcctagtccagcctgggccacatggagagatcctgtctaatttaaaacatgtatatattttaaagtttataatgcactggagtaaaattggggaaatttaaagtggaactcaatttcaaagaaaaaaagaataatataagatttctaaatatcaatgaggattttattcacggacttttctctaagtgaatgatagtgggactcaaattgctgtgatatttatatgccattggtaacagagtaatatagccatttcattttaatctcataatgtttacaacattatttacaactatttaaacatggaatgggaatagtattctttggggatattattttgtagctacatgactaaaaattataaaggctacaattttgaagccattccatcagagtaaacaattatccattgcttatggtgctttttttaaatctaggactcaagcgcctggtggtgtaggacaatgtactgaagcacttgtcacaattcatagccaacagcaaaactgggtggatatctaaagtaacttctgcataacatccctttgctgggatataagagctcaaggtttgttattgttaagttaggtcaggaaagaaaaagacaagataaggtttagggattacttcaactgttggacatgtattttcccaaagaagacagtctttatattcataattttcgtcatctgtaaaaagctataaagaccaattacacaagtttcttagaggtatctgaagtctgttctgtcttatgcattatatcttctatttcaaaggtgctgattttggatggacacaaaacccatttttatctttaatatagcacaacaaaagatactaattatctcaataccttatgcttcatttcatcaagaggttttattcaaattcagtaattgctctgtttggcaaaaaataaaatctgaaggaacattgaaactctgtttaataatat

SEQ ID NO: 112385 - DNA, 1098 bp, Homo sapiens
tgttttctcccttcactttgttacatgttatcatgcagagataacatgtaaatgtcattctagtatttgataaatgtataaatccatatgggcccagaattaagttccagtctgaatgcattcttccagcacttatcacgtatgcacaattatgtcctcagtaaatcctattaaacagttatatcctcatccatgtcaagagcaatctttgattagacatccaggcattatgactgcttcccttttagataataaattgatattattaaatttagatttattcctttttgtttttattttctgttattactttataaaattgatgtgtttttgtcacgataaaggggttgagccaaatcagattttatggctcttaattgcttccttggtaaatattaaaaaacaaaggcagggggagcaatatcctctgtaaggcatgagctgaatatgtgaccgtttcttgaaaaatcaatggaaagttcctaatctactgtaaagtctttcattttcacccagttagaattctgcttatagtcagcttctgcgactcaaccaaggagtcattaaacagacggaacacaacatcttagagaacaaaagtgcatggaatccaattagagtttggaagtgaaagtgacttataattaaacagaaaataaccaaataatgacagttattgggcatttgagtgtagtctgtccatttttaagacttcctatccaaagaatttggttatgttttatgacaagagaggtggagaaaaatttaggctcttctggccttccttaaaatccattgaacacttaaaatccgttacacccttaaaatccattacacaggagaaacttttttaaaaaaaattacattttaaaggctcttctgttgctttcaaagtgggttgtaagacagaatagccttatgccaaatatcacaccattcattgcaggctcttaatatatactgagattgtagtcaagttaaaaaaacatatggaagaaattcagaatatttgctttagagtgatttggagtgagtggctattatgtcccaattttatcacctatgggaaggataggtaatagagttaggatccatatt

SEQ ID NO: 112386 - DNA, 1044 bp, Homo sapiens
cttcgttagcttctgtcttataaataaaggaatttgataggctgtctggaaaaagattgctgttttaaattggcctctggtcttctatgttgaaaataaaatttaaaacttctgttatcttgtaaagtttggaagcagtttaatgccaatgaatgtcttttgatgatctaatttatatgtaatagggtctttgtttcctgtttccacttcttatttcgaatgttaaaatgatagtctggtttcaatttagggttgttattcactggaacactttagagaaaaaagaaatccaagtaaaggtatctcatttggcagataatgctcattaatgaagaaggctcatttcagaccaaggtttagtaagtgattccaaagtagagctaacagaaatcaaccttcattacaagagtttctttattgttcattattataataaggaagtctggagaaacagtaagcattagcaacctagtgatagttttgtaagttaggaatagttatttatctgggactgtcttttaggtcctaaaatcataggcactgagatcacttttttaaataatacaaattatgtttgagactgtgatatgtgataagtctcactcaccagaaaaaactgtggaagttaaactgaagccctgtagaatgagaaaggaaagaaaaaataataaagtgaatacatttcaagccaaatatagtttcaggctgcactggaaagacttaatattaaattagaatttatgtgtctgcttttatctaaagagcaaaccacatggtagaactcttatcctttgtcaacatttttgccttatcctaatgttaaccataagcaagtgaatatggaatcagagtagctttttgcatgcctctatgaaaccatctatgtcctataccagaaaattatcttccatagtctgccttgaattagataattcttcgtatctaataccacaggttccagagtgtctccctacctatttctgtctagctgttaacagttgtacagaacttaaagtgcaaagttgggaattagtgtgactaatg

SEQ ID NO: 112387 - DNA, 1085 bp, Homo sapiens
taatctgtgatttgagttatggacgtttcactggatatattatacctctcttaaagaaaaaaaaaactttaaaaaagtagcctaagtgccttcagaacatgtattctctcccccagcatataaatgaaatatattcaaaatagcaatttcaacatgcaaatgtatttttaaaggagttttcatatccattcatattccaaactagacatcctaaattaacgaccaatttggaaaaatacatatattactttcagattaaggtatagccttagacattttaaattggggacagtcctcccattgacattaataatagtttatgaatatcttccctgaaatgtgagacaagcttgagtaatacaaactctttttattgaaacatgtaagtacagctataaaacccgatctgtagcagagactcattaagctaccggactactcactgaggtaacaggaaacgttacatacatcaacagatcatgatgctttaaggatcgcttgtacaggccatttggtcaacttttcagacatattaatatcattagtcacatgaactttagctaataactataatcagaaagtggtaattagaaacttaaagtaacatatataatttaatgtcaacctattgtttatttcaatcataattacctagagataatatcttgcttgaacaacaaaataataaacatttgttctgataattagtattttctccaaaacttgggctgtatagtcaaacataattagttctcactcatttcataaattatcatataagctaagagagatgattactctttacaagtagtactacaaataaattgtcagcagcttttccctatagatattatccaggatatctactgtattggaaagccaattattaatgtataaatctcattgattttgatttcagattttagtaaccagaattagacttgtctcaatatttttgtagtttttatatcttcttagcttcactttgggaatacaggttttacgaggataaaagggcatacttgtttttcaaagcctgattttctgttccctatggattcttaacaaatgtcagttgacgataa

SEQ ID NO: 112388 - DNA, 1031 bp, Homo sapiens
taccatccacttatggttccataaccctggattatcaacaggaggaagcagatatatacttgtagtatatatctgtggttaacctctaacaaaacctctaaacaaaatctttctctgcaaaattgtagattttggaaaagaagaaagttttggtaaatagaatatccaaaaaccaaatcaataaattcaataaattaatctcctcatgctgagaattagacataaatttagttctttaacattatggattttattgtcttggggaactgtggctattatggaaaaaacactgggttgaagtaaaggaagctgaaagtagtgaggaactccaatggtgaaaattgctaaacgattcagtaacgtcttttctaaaggaaaaattgtgatctgttagtttagtatgaactggaaaaacttgtataagaagtttttctacttcatgcaagtcttccaagatgataaaagccagtattttggagaaactaaaaggtctttatagaaaaataaataatgagtcaagaattaagagcacttgacttctaaatcgtagtattgacacagtcttgctgaacagttttgaaatgctgatacattaaaaatctagttttcatttgcagtttgtaaatttattgtttcacaatttttaacaacatactcctctgtccccagacaacctaattttcgtaaactttaacatgaaattatatgatattataaaatttttgctcattgttaacaagttgacccaatgatgttctttaacggatttccctttcatacaggcaagtaaataggaccaaatgtgtaagtctttgcactaagtgaaagatattgttgagtaattttatgtgaaaatgtatattttatattacattggttttgtatcttctattcagggtgacagctgtatcagagttcttttcaagctattatttgtatagctcttatagtgaaaccttaccctaaggtgttcagtattatctactttggtttacattctctaatgcaataatttaattgccagtatgaac

SEQ ID NO: 112389 - DNA, 1036 bp, Homo sapiens
gcctcagcctcctgaatagctgggattaccagcacccgccaccacacccagctaatttttgtatttttagtagagatggggtttcaccatcttggccaggctggtcttgagctcctgacctcgtgatccacccgcctcagcctcccaaagtgctgggattacaggtgtgagccaccattcctggcctttttttgttttggccagagtcttgctctgtctcccaggctggagtgcagtggcgccatcttggctcaccacaacctccccctcctaggttcaagtggttctcctccctcagcctccccagtatctgggattacaggcacatgccaccatgcccggctaatttttgtatttttagtagagatgggatttcgccatgttggccaggccggtttcgaactcctgacctcaggtgatccgccagcctcggcctcacagagttctgggattacaggtgtgagtcaccgcgcccggcctatttcactttttttaacctcgatgtggactatcaaggtaaaatttttctatagaatgtatatatagccaagtcaaatgtctgcctgtgacaaaatgatcactttgcctgcttttaggcaactcctattatggtatgctagtgtagacactggccttccctgttcttttggaaacaaatgacttttctcttacacatcaactccatctgttctttttcctgtattcttctgaaatttgcaactttacttgaatttgttcagaattgtttaccaagtattgtaaagctctcacctgtatgtgttaaaaagagattttagaattgtgtaaaatcctaattgccaaccgagcatttttttatgtctgtatttaaatgattcttaggactgccagtcttctagagctaatgaatcctttcccatttggcagcagacagcttactgccaacttcctcccatctgataaatgttcccataacaacactaaggcagtctgcttagtttcattaaataccaaaattatagcctgagaaaaatgtataatgtattataccatatta

SEQ ID NO: 112390 - DNA, 1546 bp, Homo sapiens
tatgcatcagaaccaactatggagctttaaagaatatacatgtttagctcctattgtgggagattgttattcagtaagtctgaattgagctctgcttttcagaagctccacagatgaccccgattcacacaccaaggtaaaaacggatggctttcaaatgacacagaaaggagatttcacacatggcagggaaggaatgtaaactactgacaaccacccaaaggacttttctctgtgtaccttgggtgagtattgatagctacttggaaaaatgtgatagtaagtaaaacagtaaatatttaagtattcctgtagatgctagttaattcctttttaaatgggattgaattttagtactttaaaaaataccaaaatgattatttgcccaaataagtttgactagactagaatgcgagctccttgaaggcagggatttgtgtcagtttcacagatatattggtaaatgtatcagtaaataagagtgctcaataaataagagtttaaataaattgaatgaattttgaaagcttaagatatttggggaacagataagaatgattaattataggctgggcaagaatttttgagtgaaggtagatgaaacgtgattattctgttacttttcttagtaaaatccaagtataggtatatctaagaaaagtgcagacatgtagagaagagatgctaggtgtgaggttgacccaagcatggtgaacattttttggcaaatatgaaggcagtctcctgttgttatttttttttttcacctctcaccctacttccatgatattctttcccagcccttaactcctttccagttagttaaattccatttatttatttgtagtaacatgcaaaatgtttattgcttttgctttttaaattctgactgatgctctctgttatgtagttaactgtggctttagaattaccaggaaaaattatagccttgagggtccaggagattaaagcctaacatctcaggtactttgcagtatattctgccattggatctctatgggagattttcaacaagagtcaggaggagttttttttttcttttctatgtagttttatataattgtgggaaaaaatgtcttgatgctctaaattacagacttttgtgttacttgttctaaggccacttttcttttgttatttcaattggtaagccaagaatcttaaattattatctgggagtaatttaagtcacttttgtatcttgtgttacagctgttaattggaccacgtttaagatcagcaaatgctagcaaataaatactgtattttatatggaaaactatagaaataggggaaatttccataattgttagcagagccaaaaaacttgggccttgcctgataattagctgcctaaattcaaaatatactgcatgacacttactgtaaaatgaacagtcttttcagaatcaaaactgactccccaaatttaagaggataaaaatcaccaacatgtcttaaaagcatggtttgtaaattatttctgagtcagcattttttgaagcctcttcttacagatttctct

SEQ ID NO: 112391 - DNA, 1051 bp, Homo sapiens
gagagtgagatgaaatggagggggagtgggtgatcgttcgagagatagttcaagaaagagaagaaaattgtggggagtcaaatatgatgaagggatttgtaagattggtgataacaagaaacagttgatttgaccaatagacttaggttccacagacaaaataagaatcattgagagttagccaggggtcatagaaataattatctgctgactaagagtgaccagggaatgctagttttgaagatgaggaaaggatttgtcagaggtggtttatgtgtggttggattgaatctgaggaattaggacaagaggggcaatagtaacacttccattaatatgagggctgtgtgaagaacacttaccaacttgagggttttatgttagatttagtgatgtctaggtgtcatgacaaatgtaaatgcttatttctagaaagggaccagtggtaaaattatgatgggaatagacatggcctttttgaggatagacctttagaggtttcggagttgacttactctggataattatgcaatttagaatggtaaaggcaaagagaggaagggttttagcaaaatatgtatcctgattggtcaaaggactctgggagcacagtaccaaaagtctgtccagtagaggtcaatgggagacagtgtgactatatttgttagatagaatacattattttcaggggcagtatgaccatgattttaaataaaaatttcagatgtaaaggtaagtcttttttggagcagattttgattttttgcttaattaatcaaggcctaatgctaaaactgttaagtattcatcatgctactgacaaataaaatctgaatatttgcatataaagtaaaactgaaacatggattcatgcttgtgttctagattctttcacataacaactgcattttatgtgtaatgggcatgttttaagggtaatgctttgccacctagtgagaagatcattggctttagaataaaacagacataggctctaatcctgcccacaagttacctaacatgctcctcatttaaacttctgtgcaagtga

SEQ ID NO: 112392 - DNA, 1036 bp, Homo sapiens
gctggaaggttagggttaaatattaatctctataaccagcacttactctgataccattctatagggaatgggggttgaagggatctttgagcaggagagttacataatcatgtttgtggctggaatagtgtcctggatgagatgagtaggaagaggtggggaggaattcttaagagtggggtgattaggaaactttcatacttgttcaaggaagccatggcagggtagggggatttaatcctatttttattacaagaccttttataaaatgagtgttcaagttgattttaaaacatctgattagtttgtatttaaaacgttaatatctcttaaagtcttcttgaaaacagtaagatgatttgtgcagggatccaatttacatttctccctgaagttctcatattttcctgttttcctttcacttagcagagaacattccactcatttgtaatgcaaaagcagaccgggagcttaggttttttgaatagaatgatttagaactcatgttctgctctctgggcagaggggataggccagcatcagctgggcaaactgctaatctctctggtttgcctgtttcctgcagtgggggatttgtccctgggtcagcagaggattccctcagtgccggggcctgccatttagcatgtcaggcagttgccaggagaaccctctggctttgttcctggatgtgagagtggactggtggccaagtttaaggtcatggcagtccttcccttacagcagctgacgtcaattaggagaattccccttgcctgcactctgaggagagttaagcagggataggaatctggtgtcttctgggacctaaaagatcagtgtttattctcctcatagtgtcatttgtcactatgaagcaatgtggccttagtttatatggagataaaatattttgtctggggcattttgcccacttgtgattttagtggccaaatctttagggcctgtcctgcagccagagacctattttggtacccagcccactgctggcaagtcagcacatttcagtcccagc

SEQ ID NO: 112393 - DNA, 1031 bp, Homo sapiens
ctactaaaaatacaaaaattagctgggtgtgctggtgggcacctataatcccagctacttcgatggctgaggcaggagaatctcttgaacccaggaggtagagggtgcagtgagctgagactgtgccactgcactccagcctgggtgacagagtgagactccatctcaaaaaaagaaaaaaaaattgtatagtatacagcttctaataccagagactttggatctactctttatggagtttgcttaatttacaggttttcatttttgaagaagctaaaaatattttcctcttaaatattattctgatttagacatagaatagtgttctttttgatataaagggggcatctaaaagtatttcatatatattagtgattgctaatttcttttaaaattattggtcttcaaatgaatatttgaatttgactgttaagaaagagataagctcttttgagtatcagactacacctttctttatcaaaatatcttgaatgattcccattctagagagattgacattatttacattttatttttgtctggcaatgctattttttcttatttgtaattcagaagtattaactatgtttagggtcaggtagaggaggaattggctcgaggaacattaacccaatattggaccagtggtgagtaagtcaagccagagacttactctgtaagttactgaccgataacttcttttgtggaattcagaaataagcgtagtagatatgtaaactctcaaaagaagtgatcaatattttataattaaaaagccactaccatattttcctctagtccttccctcctactttttattaataaaaatgtttcagtctcagatgtttagagaagagttgtactaacatttgccatggtttgcccccatttaagaaaaactgaggaattaatgtcctagttattggaaatctagatattccttcattcttttagcattttttaaagttaaaatgaacaaagactttctcttcaagtgttcataagacaatgaaaggtttgggttcatttag

SEQ ID NO: 112394 - DNA, 1091 bp, Homo sapiens
taacagagggtgcatcaattcttcgacaggaaaaaaatttgctggatattgatgcgccagtcactggtaagtcctgaggagggaggttgcccacttgtatacacattttgttgtttatagcatgaaatcaaaagtcctagttaccagtgagtcttcaaataccttacccatcataatcttttactgttgaatctatacattagagtagtaagtatattatacatatatacacatattttcatgtgttaaatatctgtaagattgcaatgctctaaaaagtggaatgcaacttagagatggtgatgatttctgaagtgatactttaagaagtgatattgtttttaagtagaaatactaagtggcacacaggatattcattgggaaagattagacaaagtatcccgagacttccacaatggttgagtaagggtataagttaaaacagtggttttcaaagtgtgatccccagactgatagtatcatcatcatcaccatttgaaacttgttaaaatatgcattcttaggccccactccagcctactgaatcacagtacctggggtgagacccaacaatctgtgtcttatccagccctctgtgtgattctgatgcacattaaagtttgagaagcactgaactttcggaagaaggacacatttttttctcttttgcccgtagcattttgtccctacaaaatatcttttttttttttttttgagatgaagtttcactcttgtcaccaggctggagtgcaatggtgcaatctcggctcactgcatcctccacctcctgggttcaagcaattctcctgcctccacctcccgagtagctgggattataggtgccatcatgcctggctaatttttctatttttgtagagatggtgtttcaccacgttggccaggctgctcttgaactcctgacctcaggtgatctgcccgcctcagcctcccaaagtgctgggattacaggcataagccaccactccgggcctttttattttttattttatttttcgtgttttagttttgttatttcttatggtcagatacatattttgtgtaagtatgcttctcttaggccataaaaatta

SEQ ID NO: 112395 - DNA, 1063 bp, Homo sapiens
tagagagacacaattttttcttactacttatatatttttttctcatcatctttaaacttgttctttagttttgcagtttaacactttgccaactatctcaagcaaaaactaataattataccacctggtaagctcttcagagcttgggttggcttatgtttgttatctgtggcccatttcttcctgctcctctcactgcctagcatgggatacagtgcatagttggtgcctaataggtgctgctggttgattgattaattgatatagtttgattagcatggtggactgtgacatacacaaatgtccacaagggaatagatggtgttccaatctaaggaggtcaggccagaaagtgttttaagctgtgtctgacatgtgatatgcttaagctgttctcttaacatgtgctgacataagtatctttgacagtccttgttcacacagtagccacatgaaatatgggacaagagctgttcctgtacatgtcctgattccagagagggatgaaataaatgtgtctggacttgcgaagacattgcatctgttgtggttgattgactggtgtggagcttgttaagagggaaaattaaagtgcccagcattttgtatgcgtttacttatggtatggatcagtggatctcaatctgaaattcatatttgtgtaacctgggattaggtaaaaataggccaatgccctggccctaccctaaaccagttaaatcagaatctctagacatagggcatgggcatcatcttttaaaaaagcaattctcagtgtgcaaccagttttgaaataggttgaggttttgtagaaattaaaccaaagttgggaaagaagaaaggctaagaaatttaatttccactcaccttgttctcatttacttagaaggatgcagggtctagaataccactgtccagtaaaagaaagctagataagcaattttaaatgttctagtagacatattttttaaaagtaaaaagaaatagttggaattaattttagtaacaaattttatttagcccaatatgttctaaatattattatttcaacataaaatcaata

SEQ ID NO: 112396 - DNA, 1039 bp, Homo sapiens
ctatatgtgataatactacataatttagtatataaaacaagaggggagacgtagcagattatgaagaaaaagcagtggtcaaacagaaaagaaagatttagttgaactttaaattataatccagtgaattccttaggaaattgatgaggattcattttcctaatcgaaatttaattgtgttgtgttttctgtttctccatacatgtgttgtctttattaaatgtcatttatgtgtatgtatgtatgtatgtatgtatgtgtgtatgtacacacctacctaccattacgctatagacatctgtgttttcaacattgaacctatcaatagagccacatttgttttatttttggaatgcttatttaaagtagatcatgtttaattgcaaaagaactataaacatttgtacctgcagtactgcgtcgtgtccatcatataaaaaaataattatcctgaaccatggacatgtttgtggttgtaaatctgttctcttttctctgcttgaagtgatagtgtttcatgatatcagtattcttcaagcatttatattagaagacaccatgaatgcagaggtgaatgaatcatgttcttacatgagagatttaactctgagaggccattgtaaataggatgtctgtacattttgaagtcttaggcttcatatgaaaaaaaaagaaattcctgtaagatctttgagtaaaaatgttacttgtaaaggatgtgccaggtttcaaggacttcccagtagccatagtatgaatacaagaaacacagttgtgcatttggaacttcaattcagttataccgtgaactgaattgatgaatttactgagttagaacttttttcgtttttttgacagctgttgaaaggatctttatagagactccttcacgtagcaaaacttttttatgtatcagtagtctgcagcctctgacttagaccatttgtgttacaaatatgcactacgtattgcacagaagcctgggttattgaaacatgtaaccatttcaatatcaggaggttctgcatttttcctgttt

SEQ ID NO: 112397 - DNA, 1045 bp, Homo sapiens
tctggttgacatattaaaaatttctagacgtatgactaaatgcttctaaatattagaacttaaggtttatgaattattgaggcatttatgattctgctgcaaaatagattaaaaaataatccagatctcatggaatcacactgttgtgagttctgagaccttaaacaaaaaacattttttaataaagaaggaactgtatttatctagccacctctctttatgtatctcaatactggtgataaatggttccaaatatagttttttcttctttttaatatctctctctctttttccaatctcttgggcattttcttctatcctttcccaatttttttcgttactatctcacttttctttttgccctatttgccttaaaaacaactgctactcacaaagcactgtctaccttttgatttcctccttttctacctctccccattcctactgcccttttcaccctctccattgtggatgaaactgggaatatgtacagtacagaagggaacagttaactcaacatttggcccaagggttatagtggagactgactcctaagagctcaatttatactaatgctgccttttgattcattttttttttcacccaataccatactgccaaactccctagttgtttcttcaagtcagggtttacttttgcaaagaataaatagatcaaaataggaagcaaatacagttcttgaaaagtacaagaacttttagagagaagaggctatcataaaattatacacttttgctagaatgtttatctgattcttatatacttggtaattaaattctgaagaatattcactttctttgtacaggggaatcagcagcatccagaaccttgtatagatagctggcttcttagacccagcctggagactcaagctgtcttagctttggggctggacagttgaaattccattcaaaaccacaaggcatttttcttttaatgtagtttggtgtgtgtgtgtgagtgtaaaataatgaataaaagttgtattacacttgtcgtgttcaatttgtcacttaggttgtat

SEQ ID NO: 112398 - DNA, 1019 bp, Homo sapiens
attaaaaaacaaagtaaagcaaaatctcatttgtatagttcatatttagataattaatttgggtagatagcagcctaatatgtagaaatgaagaagttattttaataaatactagtaaatctgtatggtgtttttcatttattactgataatttctttttctgttgttagaataccagaatatagaccattaaaaatggaaaaacatcagttttaaaaattgacattttcagaataaaagaacaaaaaataataatagtatgtttttatttaaggtcatgaaactaatttaaaactcaagagtgttaggaaggaggttttatatagaaatggaaatgcaaagagatattccttttttctacaaagctgatctgtggtatgaccataagctaattgaaaagaaagcatgtaaaattaaactcataagtgtttggtttccatgtggtcagtcataaggtattgagaccaaaacctgactcatgtatgaaggaactaaaggtggtcaggttcaaggccttccaactagagataaagcatttatttctattgcatatactcttgctgattttattttgtctcttagcattgtcactttgtgtgaagtagctacaatttttttttgaagaaaataattccaactttgcccagtggccaaaaattatactttaactcctgacagactatataaaaaaatgtgtgcctctggtcccaggaggaaccaaatggctcagtcagcacaattcatcattactactggcaaaaataactcagcatgcctgcgctgcttggtggtgagtcagtggcatcatattcatatactgacagcaatttttttctttttaggaattaccctctgtatcctgagccaaaacacagagcagtaagattaaattaggtatcagtgttttaaagagcaaaggctgatgttattttaaattattaattcattttaaaaggtcaagtagggtttaggtgctgaggtgatgacagaggtcaatttgatgatggtcttgatcttgg

SEQ ID NO: 112399 - DNA, 1023 bp, Homo sapiens
tctctgaagaatagtggtttccttttaattcaaaaattgccatttattccagagcagttatgtattgcatgcattaaaagaatcatctttaattctaacaagaaaactacatgaaggaattctaatctagaaatttaatgcatatttgggtctgtctggctctaaaactcaagttatttttacatcatactgctgtcaggtgacttcttccacattctaaattgcaaatagtcataggatgttagagacggaaggaacgaagtattggtcatgtagtaaaactttttggaagggccaaaagaggtttatggacttgccaacaaccaacagatagtggccagactagaatttttgtcttctaattactgatatttgctgtttccaagctcctttccgttaccatttaggagcagttaattaaacacctactctcttgggacattgtttatattattcaactctctctctttctcatatatgtgtgtgtgtgtatacacacatatatagagttttaaaaagtgtgtgtgtgtgtatatatatataggttttttgtccctcttcaggcagtgcatagtgaagtggcatatatatagtagcactcaataaatatcgattagtttgctgctactattttgttattgtgttcttcagtattgctattttgctcttttagccctctgacaactgtaagcaactttctatattaaaattcttttgttgaaatacctacattgatatctagtttcctgattataccttaatacatacaaaataaatcagaaactgaatgaaaaaatatgtatagggaaaacataataagctgcatcacttaaattttgtaaattctttgctcatggtaaatatagaaatgatgctcatactgtgtttagtacaaaatgcagaatagtataatgggacataggaagggttggtggggaaaaaccttctgtgatggcaaagaagtagacatatattaagatgacaaggaggcctgtaatcccagcactttgggaggctgaggtg

SEQ ID NO: 112400 - DNA, 1034 bp, Homo sapiens
cagatgttgaaactaagggtatgaggatatgaaagatacagccacaggtacagtataaaacagtaagaagtagagcttggattagtattcaggtctgtctgactgtaaatcctaggcattctcataacaccacactgcgtgaccttgacccagaccttgacctaggtgcttaacttatttaagtgacagttcttaatctataagaaaaggcttagattaatttatatcagaaatctcattggctctcaaattccaaaaactcaattattcttgtgtttaaaactgaaccacgaagcactcatttaatatttattaaataacattgaataaactattaccatcataccttatacagcgtttcagaagtacaatctgtagacatccaaaatctaatgttaaatggctagcactgagaaaagtaaagaaacagtaatttgctatataatttgggaaaaattcactagaaaattagtttgctattttgtattatgttgtaaatgtattgagggaactgtcttcaaaatataaaataatataaaatactaacaatttgttttgaatagtttagttttgtcatattaaaacatgatataatacattatagtgctaaactgagattgataatataatgttgttggtttctgtcctatattaagaataaagcaaagcaatgtaaatattttaaaagtcattttgtagaagataaaactgaaagctaatgttgactgaaagttctctgccatgtacttaaaacccagtaataactgaaatgtcaggaaattgaaatattaatattttaccctcacaaaatattaactccttatgttcaatactttttttttgatgtttaactttggtatttcaaggaagaatgaatgtactaaaaaacacacacacacacgtctttccttttgcaatgggtgaaaatttctagcaatcttgttccaaggtaatttattgtattttttaatggatgctttaaaataaggataaataataccaaaggcattgttttaaaaatattttatatttta

SEQ ID NO: 112401 - DNA, 1067 bp, Homo sapiens
ttacttcatagatgggaaacgttaaatgcttattttcttttgtcctcaccatctctattagtctattggtgactgaatctgctacctaggaatacaaccctaacattacagtgcttctcagggaaccagaaaatcctacttgtaaacattcccaaaacataaagctgtttcatattaggtctattgactccttccatcattaaaactctgcaatcatcatatctcagtttaacttcatcagacttcttaatagtcatttaaatggaaatttctattgtagatatggtttatttggtatcagtgagtactaacagtagtgagcaggcagccttgctagccaaatatttgcctttggagttggccagtgattttgattgctttaaagtacatgtagttacatttctggcaggtgggtatttaccatttctagcaatgtttatgtaccatcatgtaattagcaacctgttgtaaatcatccagccagtgatgatttgccagaatgaacaatagctgagattatgcattgctgactttgctattgtaacccaaaagacaacatcctttttcctggttggtaggagtctcttcagacattagatgatttttaaaaagttaactctatagactctgactctattcagagagcaaactaatatagcatttttattgtgctaatagcaaatctctattaagaattcatatatgtacctttgttacgttttgtaatatgttttcaataaaaatcttgatgtaagaagagtggtgaatagaacatcagcacccctgttcaggggcagaaaagaatataaattgttagggatactggtaatccaccaattactttaactatctaatgaccatagtttaggcaaaagagagaggaaaatgatttaaaattattcattatcgtatttaaaaaatggaggaggaagagaaaggtgagaacagtaaagtagatttgatgcttatttaatgcctcccttgtgaaaaaataacattaacacagaaccaacagtgattatggtaacaaaacaaagtaacaagctaaacatgcttatattttagta

SEQ ID NO: 112402 - DNA, 3564 bp, Homo sapiens
taattctgggaagaataatcattaatgcttgattatttcttttgatagctttttttttgggtggggggagaggggaagttaaaacacacattgactgtaagtttttttagaaatgagttcttcagaagaatgtgtgagaaaactcatgatgattttatagttgatttgggaatttgcagagctcacagttaattagatatttctaaacttatatgtaaatttctggtaatgctttgcaatgagatcactgatacttttgaagaaagtgaagttctattttttaaagtgaaaataattatactacattagtcacttataaaggacaatgcttattttttttcagactgatttgctgaaaagagttaactgtggtgtttgcaaatgctttggaagaaatgcagatgtttggaaaatgtcttttaaaaatctggaagttgtaaatattatgcagcaataatgttacattatggtagacagaatatcttgttacaaatactaaagagtaaagaaatttatatttttgctccagatttaaggatttgagtctggagtgctcagtgctagatatgttgccttcttttatggtattttctacaataccatactttcaatactgtgattgaaaactgactatacttctattacaattcttgaaggagtttacctctgatatgctgtaagagtctcatctccaccatttgttttaatcttggtcaaatgatttagttagccagacctcagctccttatttctaggagatatgaatggtacctacctgatgcagttttatggaaattaagtaaagcaatacacataaagtgtttagctagagactgctatatagtaaatgctcaacagaagttagtgatgatgttaccttgcttgtggaagatcttgtcaaaaaatcatttgttcttttgccattggcttgtgctttctctgtgaaaatgatacctctaaccccttttcttttgtatcctttcttttaagaactcatttattccctgggacagtggaagtaattaagtgatttactttagtggaacttccttctagcttactccagatagaagtaaccagaaagtaggtgacaatgttaattagaaagataaattaataccttttatgtggataatttacctgatgataatgactgagaaatcattgtgagattgtcagagggcagtttatagaatgaattacttttgatgaacgaaggttgctttttcaggggcagaagatagtttggacttacattttagagagagagggaaagttacaatatgctgctggcattcatcgtttagttaataatttggctcatcagggctgaaacagagtttgcattttttgatgaaggatcatttaatataaaggcttatttagatgacctattgtcattccatagagatcttgggtatttccatatggactagaatggtgctaggaagtaaaagattttctgggaaatcagatgtgctattttaaggaatgattttatcaggtcatttaaattttgtgctagacttccaatatttttgttttgttttgattacgaagtgttctgtaagaccagaaaggaagccagcatgttaagaaagttttaaagttattatatttctgatactgcacgtatacagacacacacatacaaacacaccatttcttttccatctctgaaaatctaaggtaagatttaaattacagacagtatgaaatcctgtgatgccaagatctttattagaatagcagtttgcacctttgtcgttgatacgatttgccccgtattcagaagcctgtgcagctgaagatgagtcattaagagaaactggaatcagtaaaactgcattttacaataatgctttctaaactggtcaccttgctaaaattggatgaggctgaagacagcagtttctgccttgaaaggaaggagtaattactattaacattggtcaggaactttcttatgttcgtgccttgacagctcttagcactttatttaaacatatactttggaaacaggttgtgtggcttgcacagattttaggggcatgaagctgataaagtgggagcatattcacaatataccagtgtaagagaagagagcgtgtggcagaagattgacaacttattttaatttgccagtccagatcttctgttctgatggaaagtcaacatcctttaggatggtgtgtgtgtgtattttagtccaaggaatctaaaacaactttcagaatttgtaaattttcctgaacataatgatttcaatgtgacactataaataaatctggcttataatgatgtactttataatcctgaccaggttacttttacgtcatgccagaaacacattttttaagctagcacttagaaatattacttttagctccagaaaataaattatctggtacaaaaaagaacaaagttttgacctgtaaggaaatggtgcccactgtggggactggtctgtggagtggagggcaactgaacttactgggatttatcgatctccttggtgatcgtggtccatgtggcatccaggctcattgtggatgcttgcttgcttgctgaatgaatgaatgattgccttcctgtcaactgggaaaggaggaagaaaaccatgaaattgaaaacaaacgtgtttagcagtaagattcctatccgctgggttcatgacccatgttctgactagttatcacaattgaatttatctcaaggacacatgagaggaaaccgttggtatgtggggggtggctggagaggaatgatgatagaggaggaaagtacttgtagtgtgactttcctcagagtcaagagaaggaagtgcttgcagcaataaaagtatttaaatataaactgaagaacacctctggttcttgtttttggtagatggagaaacccagagcagagctgaagaggtgtcatctgctctccagatggagtcagctgacaactcagaagcagaaaccaggtcttctgactctgggcaaatgttagatgctccctttagtagcaggaagacctgggtggaaatcctgatttggagtgtggtttgttgggcttcaacagttcacttgtctggtttctcctaaaagacatttgatttcacagatgtttaatttcttttgggaaaggaaactggacttcattgtcaagcttgagagaagagccaggcttaccatttctcctttctttctgagttttagcaaaggaagtctcaagctcttcaggtaaagagatgaggaccaggaaatgggtggtggtaaaggagtagtttagctcagtagtaggtaaacaagaaagagaaaaaaattcaaaggaatgaaaaattcctcaggaggattatggttttgtgttaaagtcacacatttcttatcaaagcagagatcattgattagctaactctaatttagatagtatttactgtttccagttggaaagttagtgtctaaaacattgagagatttgagggaacatataggttatcttcttgtccaagaagaagactcaggtgtggacagtgcagctgcctcttgtccagcccttctctttccttttgcttgc

SEQ ID NO: 112403 - DNA, 1100 bp, Homo sapiens
catttcagttttcatattaaactaaagattaaaaaaagactcaattcctattaaaattaaaaagtcaaaaaattcaaatgcaactgtgagctacagtgacttctcatttactaataaagtgctgggtcataaaaaataaataaaaaggaaggacagacaacagaaacagttcctgccttgggggaaaaagacatgggggaaaaagatatgaaaatgattcatgccttatttcatttatttgatgtaaatgaagaactttatgtgaagacatattactttttatgtctattttgaaatctagacatagacttcgatattggggtcaaattgctaatttaagtactgtgagaatcagtgtactaagctaatcttgtgaaaagatggttttggatggagactcttcccagtaattattacggagttaaggcaccctttttaccatcttctctgtcaacctaactgacatgaatttctaacctggtaaagtgagaagagtgatcaggagaagataatttgcatagtatatatagatttctattccatttatataaaacccttgaatggtaccttagtagaaacaatataaaataaagctaatatgggttagatgataatgtggttaagtggatttttttttcctgtctgaacaaaagaactgacaatttaatcaatagacccctgtcagtctggagagatgcttctagtggtcagcacggcactctggtctttgtgtgtgcatatgggtgggggcagggcagggtgttgcattttcccattaatcatggtaaacattaaaaaaaaaacactagatatcaaaatggaaatgtaaagttgacagtggaaaacaatttagaattttagaaagttaccttaattgacagtaaggaacacaccttgtctgtcttttcttgtgagccttattgccctctgtgaaggaagtattaacaaaaacatttgtttgttgattataagattgaatgagatacaccacatcttttacagtaacagggacaagaatggcactgatgcctagaccccactcttagaaattctgatttaatttatctggaatggggtctaagcagtagttttttgtgtaa

SEQ ID NO: 112404 - DNA, 1069 bp, Homo sapiens
atttattcatgtttccaagtgattcatgtttagttatcctttccttgaatcaccattcattaaaagtggtttggtcttctttatgcctatcttctctgtttgtgataatctttctattctttgggattcaggtcaatttactaagaaaaactcatgattaaatatcttgaagaaagcagacatgggctgggtgctatggcacacacctgtaatcccagcagtttgggaggctgaggtggaaagattacttgagcccaggagtttcagactggcctgggcaacagagcaagaccctgtctctacaaataaataaaaaaaataaataaaagagtagctggctcccagctactcaggaggctgaggcaggaggatcgcttaagcccaggaggtcaaggctgcagtgagccctgtttgcaccactactgcagcctgggtgacagagggagactctggaaaacaggctctattgcattatttcatatggctaacaaattataacctacaatacaacaaaattcagccaaattcttatggatatagtggtaatataaatttttggtttctctcctgaattgtttttcttttaatcgtctagaccagagctgaaggctacttccccctcagagagaattgtttggcctaaaagagatttaaacagtttgtattagtttccatcataggggattcagaagataaaatctgacttttccctgctacctcctttaataagggcatatatcaccagaactctaccttgcctcctctatcctgtcttccctcatacatgctatgtttactttgcctcccctggctcctataggcatttgagtttgttgtcttttcttgaatgattaaatgagatatttgcttagtgattatttgaacttaataaaccattgtgagaaattgaaggtcactgtgcaactgggcttttagaatctggatttacactgagactgagggacaaagatctgcacaacaaactgaattttatgtgcatttgtacattttgcatttttctgtatgttaaatagtaattgcttgctggtctcaaaaaactgattcatga

SEQ ID NO: 112405 - DNA, 1217 bp, Homo sapiens
catttttgggcccatcttttacccttgtttgtggtttatctacactatattagtttatggggagacctttcctcttaataaatagcaggaagctgtccacttccagtggtgctgactcatgtagcaacaggaagaggaatgattcctaaagatgggaggggaaggggcatgatcctcttccctcccttaaagagacaaattcgggacagaattacaaagcagtttatgtgatggatgagtaagccatgggttaaaagattttctccttaattatgcttttttatttgtgttttattcttactgtactggcttacccatgtgaaagcaattcctaatgcccactgccttttaagtttatgtttactttctctgattagaagattaaagagaaatatcatgtttacacttacagtcagtattaacttctgcttgtaactggtggtatgctggtgggaaaatggttaactagcacttaacagtgatggttggcaccagtcagttcttattggttgaatcgaaataattactgaaaggattttaactatataagatataacttactagctaaatgcataaattgttagtatgtgtcatgagtttattgtcgactgaaagctgcttttttaattatcaagttttggaaaacatgtagaatcctgtaaagagaaatccagaagatttgagaagacaggtgggagtgctgttatttggagaacagtttctgtgtgtgatgtgaactctctgaaagaccttgaggaggaggaggtgaacatagatgaagtggctggctgaggtgggaggattgcttgagcccaggagtttgaatctgtactccagccttgggtgatatagcaagatcctgtctcaaatatatataacagaggtctaactaaaaattattagaattgatttttacatgtagtttatggaacaattcttaaaaattcataaagtcacactgtatttaatctactttggggttcaaacttacaaaaaggacttttaggcaatgattttttggaatgtaaaatataccataattaaaaatgaatattatcgaattgttaagtcttatgtagggcatcaaggacttcactagcccacctgtaaattaagaaataaccattcagattaaacaaagcaagtataaaggaagttggatggaccctttttgccaatatgcagatgtatcatttctagaagatgtactttaatta

SEQ ID NO: 112406 - DNA, 1051 bp, Homo sapiens
gattcttgacttagaaacacataccagtttgtattctcaaaacaatatctatcctacttacatctatcaagtcatgaattggaggatcaataatgaaaatttataaaattcttgtcctttgaactcaggatgatctgaaggtcttatagtacttcaaatgaccaaaagtcaatctggagaatgttcttttggaattctgaagccaatttagtttctcttctgctcccttcctgctttagttgttagcttttcgttcttacctgggaatagtttgctccttgtttgtcccctttcagctaactctcttaccttaagggaacattaaaaagtatttgggttacaagttatttctccataaataaagtgcatgtgtatcaacagagttttccattaagaagatatgatacagtctacccacagagagtttttgtttaataaacacttccttactctgtgccaggcaccgtttcaagtactttgtagatattaatgcatttaatctcatgaggtagataacattattgtccacattttgcatgtgaggaaactgtggcacggagaagtaagtggaggaactgaggttgtctgactatataattttgtgtgctacttctctgagcataagagaaggatcagtactaaagagaagcatgcaaatgatcagtaatgttgaaaacatacttttcttggatgaatttctgttgaatagataagtgaatcttgatatgattgccttattgtcctacgtatcttgtatattatagaatgaggcattatgtctctggaatttatccaggctttgggggttaacagaattgggtttaaattctgactgccacgtacttataattcttataattatttataattctaagcaatgtctttaagtataaaatggaactagtagtacttcctaaggtagttatgggataaatgagataatgaatgtaacaggccaagtatattgaaggcattcaataagtggtatgtagtattaagtgctataactaggatggtagaaatagaagttgtatagtggaggagataaacc

SEQ ID NO: 112407 - DNA, 1028 bp, Homo sapiens
atataacattgccgacacacctcagaattatgggtaggcctggttggccttcatgatcagttgtttttcaggacacaatgaagttaatattccacctctgtggtatccgcagtctgctttatagcagagcaagagtctcaggaaacatagtttgagagctccaagttcaatatggagaggtctgtttctgagcagcagctatttctaagccactgcagctgggaaggtggtagagggagtgatgaggaggggatcaggtgtctttggggcagttaatggacctaattctgagggttagtgagaggcaaaatttggggtaatggggtaatagcagagggctgacaaatgacaggtagactaagcaatctttaaataaaattgaatatattttaaagacatgcttacctcattgtaagcttataattaagaaactgaatatggcaaaataattgcagtgttaaatttatttcataacattgaatttaaaagtcgtagttaaaataactttttaatttttttatttttttttttttttttactaatagcttttaaagtttcattttttatgtttggtgccagaattaagaagtggccctttctccgtataaagcaaatggagttttatatgctagattcaatgttgtgaactgggaaaaacatatctggttttatataggctttaagaaaaatcaggactgatcctaggaagattaggaaggggatttataggactaatatagtcactatctcagtgttatgacttactgctttggttttcatggaattttcttctaaagaacattgtgagtcactggtgtagacagaatcctgaacactcttagaccactgacaagtagaaaaccctgtttgcagccagcagggtctgtgatttgcccatagtaggtacttaataaatattgttgacttgatttggcttaggtttgtcactggaaaatgtaaaagccaatgcacatttatagattgatttaaattttggggagcatttttgctatgctatgtacatttag

SEQ ID NO: 112408 - DNA, 1038 bp, Homo sapiens
acctccttacgtctgctcaaatatcactattctcaatctggctactttttcttcttaattttctctctaatgcttatttgacatgccgtatatttgtctgtttattgctttacattccaagaatatatgctctaagagggcagtgacttttgtccattttattcgctaatgtgttcccatttcttactacagtgcctggtccatagtaagtgctcaattaatatacattgagggaaaagactacatgaacattactaccacgatgatgttatagttgatttcagttccaggaactgaaaatgtgaaagtgcttccgtcaatttctcctttgaaacttcactttagataacttacttctttagtgagaaacagcagccccttattcttaaaggaagatttccattgtgtgcctttttcttctgcagctgtctctgagcaaattgctcattctagcttcttcttggaatgagtctcttctctgaacttctcttggctcttccctctttcagcttggcttctgttcacggagcttagttctacttcctgacctcacagagcttgccctttttatagtaaaaagcctgtggtgatgtcattggctcagctggtttcaatcaggctgctcagttgaagctgatgaatgactctgcaagttatcttttggagggctgtacttattctgatacaaaatacgcagttatatacagcattaaccatttagcaattatcccatgtgagtcatgggaatgctttttcccactctttactaacggaaattctaattgatcattggctgccccacaagcacagcagagtcaggtatctgatgttggtcaactgcttactggctcttactctgcttctaactctctaggacctcctgcagcctttctcctgcctgttactttattctgctttctaaatgtcattccttagatccttaattaagctaccccaaacttgtttctcaccttgaacctctgccttactgttactcatccatttgctgctcttggatcacacatttttttttgacct

SEQ ID NO: 112409 - DNA, 1960 bp, Homo sapiens
aagcaagttaaggataataattatttaaacataatcctttatgtcaaaattaatattgcatgaattttgaattctatatttacctgaaagaaacctgtaaaatctcggtgctgtgtggacgttacagattttagtgcattgaggtgtgagacagtgagtacagatagagggagacaagatagagaatccttgtctcccatcagtatttgggtttgtgtttgtgtggttttcttgctgttgttagaaacaatacgtttcttaagaagatgccaaaagaacttgctttagcaagttgacatctattgatgaataagtatgacattttaatccccatattttaaatgatgtttggttactatttgtttaaaagcaactgaataaaaacatcttcagctatccagattccaatctgtacagatgactaatcatgtggaatatttgaacataaaggttctagtgaaaaataaaaattaaaacaaaaaatgtagttgctcccagatttgaaagtacagaatgttttctgtgccttttagatatgggtaactatgacattgaaaacaatggtaaccacgggaaatgcaccttacaaaataaataaggggaaaaaaaaaagacatgggggtggggagtaggaaggagttggtgtagtaacagcttagtgagtaaataaatatttaaacttcatgctttgttacttgtgtaatcatgagatttgcagaattatgttttatattacatttttagttggtatcttttttatcttgtgttaaataatctgttaagccaaatttaagtactgttcagaaacaaaagcaagttacaagctttgtgggtgttaatgtcttcatgtgtaaaaaaccagaaaattgaattagatatatcctaaggttttttccaagcttttaaattccatgattctgtgacccaggaggtgtccaggagtcatgtgagtaaacttttaagttttgaagtaacgttaactccaagacttgaaacccttgaaattggctagaaatcctatacaagatttccagaaagttaccgttatacttcctgattacgcttatggatacaaatataaagcaaacaataaccaaagacacataaaacaaaccctgattctagcagtttacgaaaagaggaaatttattagaaggttctgggggatcattgtccagtagaactttctgtgatgaggaaaatgtttagagaatctgagctatccagcatggtagtcaatagtcatatgtgactatttagcacttgaaatatgtctagttcaactacaagactcgattttacattttatttagttttaattaatttaaatgtaaacttttaagatttaaaggaatcctgggagtaaccgaaacgtcggtcttgagaagaataggaagaaaccagggtggccttaggaactaagaactgctttggaagcagtagtggtgtgttcttcagagtcataccatgacttagttattagtggtacccaacctggatttatcagataacaatggcatcttccagggagagaaaatctgattgtctttacatgagtttggtgtctaccctccaaatcaatcaactgtaggttgggttgcagaatgattgcgtacctgccagagtgctgacagttcccagggaaggaggaagtggagccaggcagcagtcttaagagcggtttgccacattacttaagagaaatatgtttttccctgcaagcactgatttttctaactttaaaatactcttattttgttaatttacttgtattgcacctgacttatttaccttttttattgctaattaaaaataccactctatgttgagtaaacttttactaacctgagagactaatgatttataacattgtgtagaaggaaatcaaagaacattatagccaaaagcaacaatatgagccatgctagacaatgctctcttgttacagagagtattgata

SEQ ID NO: 112410 - DNA, 1669 bp, Homo sapiens
taatgattttacaaatatgtggagcatgtggaaatgttatgagatgccaagtgaaagtgcagaatacaaaactataagcaaaccatgattacacctatatgtatatatgtattctgatatacagatatgaaggaaatgtgcaaaataaaatgcaaattttatctgtagagttatttttgttgtaacttttcttttgagtatattttaatgtagatatacatagttttaatgaaattggaattacatttataatgggtttataaaagatagcagaccagtgtcatttttcttttttttaaaattgaaaccggtaagtaagagcttgtttttttcctcctacgcagttggagagtgacagatattgctgatgaccctcactttcaggatttctgtcttgcagccaagttgggaggaaatgtttcgaatcaaaaaggggaaggatgaagagactcaaggcacttcattttgtgtgtgcctgtgtatatgtgtgtgtgtgttttctagggggttaacacattgccccagcttggattatttctatcctcagaacagcatataaacattttttggggggaaaaagttaaaatatttacacagctgcttcctttatttttttttaaatacacagataatatttttactacctcatgaacatcatcatgtctttgtaactagcatgctaaactttatttctccttttggtagcactattttgttattaatcccttctgcccttcctccttcccctccttcccgttgttccctcttatcccctcctccgaccactcccctccccctcccgctcccttctcccttctcctcccctctcctttccttcttttaaaaattataatctgttaatttgtttgaacctagggtgcctgaaaattcagataacttgagagtaattaattaattccacattagtattccaatgcatttgtaatgacagccttgcaatttttggggggtaggtaaccattaattttgcctcagtaaaataaatggcctttatgtataagctaagacttgtacaaaagtagattaatgtccttcacctgtgactctacaacaccaattcattcactttggtttttcagccagacatctggccattttagtgatttattgacttaactgattaatttggtaggggaggttaatactattgtgccttcagatatagccttaagtttctgtcaccaagaggtgatggcaatctaacctgttggcctcaggatgtgctttgccttccctggattcctcagactcctatttttatatcagattctactttggttgctggcatgactttaagctggcagggcaaagggctttcttgaaggtgactgtctcctcaacctgtctgacttaaacggttgggtcaaggaaggaaaaaaatggtatgatgcagcaggaattgggttgttgaaaactgtattttatttgcatttcttgagtttgcacagaacttaagttaccagcctttgattagcaatataaatttaaagtttgtcttgggcaaacttactgaaaactcctttaggcactttcctcacatcaattaaaaaaaaaaaaaagagaggttaatagaacactagctactattttgtttcctttttaatgccacgtgatctgtataccttggaaggcagaaaaataattttat

SEQ ID NO: 112411 - DNA, 1031 bp, Homo sapiens
gccagcttcccagaccttacttcaccagtcatgcattctctgaccgtaacactaagagtacaatggtaccaaaattttaatgtaacattttgaaatagtaggtgagatttggataggatggttagcaagttggtttatcaaacttagcctgtaaatgaccacacaggtttggaaatagaaaataatttacattatgtgatatagtacataagattgtcatgtggaaaaacaatacaaactagattgaatattcaccatatgagaaaaacactttcttcccttttgaatcacattagcttttaagaatcttcaaaacttttcaggaacatgctatatccacccaaccccttgttttttggttaattgttgtttgccctatcctaaggaccaaaagctatacttacttccatttagtttgtcagtcttttaaatttatttttctaaattgagaagagcctgattaaggagttctgtggcaatagaaaatctctcttcaattcattgccaaagcatagaggcttctgtatatagtatttaaaagtagagctctaaagtaattatttccttggatcctaagaggactcgtgttagtgaaagcaaagtgggacttatttcgacccacaaagaagagctgatttagaggccatgtggtgatgccatgggagaggcgcatgtactgctggtttaggacgagctcttctgataagctctcagctgttacaacagataagagaaaattgatagtttcagaaagcaatgaaagtcaactaggactacagataaacagcatctatgattcttttcaaatgtttgagtacaaaacacccatattttaatttaataaacaattactggagacttactatgtataatatgctagaaatgttagaagctctaaaagaatgataggacagagttctgcccttaaagactttagaactttttagggaagagtcaggtcccactataggggccgtgtgtgtgtgtgtgtgtgtgtgtgtgtgtgtgtgtgtgtgtgtgtgtgttcatgg

SEQ ID NO: 112412 - DNA, 1079 bp, Homo sapiens
cctggcatcaagtgatccacctgcctcggcctcccaaagtgctgggattacaggcatgaaccaccacacctggctggcaaaaagggattttaaaattaatttaaaacattaaaacaaaaatggttttatcactatggtaatattaatggtgttgcaccggtaggttgctcacggtttatgtttttgatgtgatatttgtcctttatgtgttaggaatacccaagccaagatgtgtgactgccaatttttgatcctaatagcttttctgactaaacctgttttatagctactatgatcaacatcttctggataccaagtgtttatatgggtagcttgacttgagagattgaaatgtttaatgagtggacattaaccttactaatttgtatctgttaagtgaagctaatttgtagcttatttgtctgatttgtggtatgaccctatttgtggtctgacccaaattatttgtctctctgaaatagcagtgtgttagtctgttatctgcttatttacttcctccaccccgccttcttagtagactatgtttctgggaagcagaggctattatattgttttaattttaaaagatttttatgcttttaagagattattatcttgatcacctttgcaaattcagtgccaagcatgaagctgggtacacattcaaaaaaagtgtgttcaaagaatgccttttaaagtagctgtaagactatgtggcatgctggtccttgatgatatagggcagacagtgtaaacatggccttacctcctaatgcttatgacctgatgaaaataagttagacattttataatggaaattataaatttatttactcatattcatttcctgaggctctgtacatatttggtacaatgggggtatttaaaaagacaagtgtctgtcctttagcattccaaagagttagaggacaaaactgtaaaattctggtatgtaatatttatttcttataaataaatacatatatacacatagcagtcatgtgctgcataacgatgattcagttagtgacagaccccatataggacagggtcccatatgattataatggagtatattt

SEQ ID NO: 112413 - DNA, 1038 bp, Homo sapiens
atataaaatatggtgctatataatactgctttaaaagctggacgcggtggttcacacctgtaatcccagcactttgggaggctgaggcgggtggatcacgaggtcaggagctaagaccagcctggccaacatggtgaaaccccgtctctactgaaaatacaaaaattaaccaggtgtggtggcaagtgcctgtaaatcctagctactcggtaggctgaggcaggagaatgtcttgaacctgggaggcagaggttgaggtgagctgagattgtgtcactgcacttcagcctgggtgacagagcaagattctgtctccaaaaaaaaaaaaaattacatatatattatatataaatataatatatataatatataaatttaatatataattaatatatattatatataaatttaatatacataatggttgttaacattacttgtgtcaaggattatcaattgaattgggtgattcataacacagatttcattggaaatgtttgagtagggagggcctaatatttagcaggtagtatcatgttatttgacattaaatcaattgaattttgtagtttcagtaaacacaatgtgaatgttggacatttgaagatatgaatgctagtttgtatgtcagtgtctgtgtatatgtatttatataaatgagtcattttatatacaaatatatgcatttatgtaaatttgtaaatgtaagtataaacatgtttactgtcttggtgtttgagatgattccatttgtggtgaatgatggtgacttctgttttaaggatgtttggaatgatttaaagtaaaatcctgttcctaaatctaaagattgtgataattttagatgaatacttttcccttttcattattattttttggtgtctaccagaatatttatacatagtgatagaaacagtgattttttttgtatggagagaactcagaattattcagagatattattattttgagggaggcagatatacagtacaatccagaatgacatttaggactactatatgaaatattacgtggcag

SEQ ID NO: 112414 - DNA, 1031 bp, Homo sapiens
taattctcacatcttaactaaaggagctaccacaactaaacaaacagacaaaaaaaaatcagagtataccttcacaaaataagcagtctatatgaaataagggagttgcatttggtttttttgtcagtaagtctgtaatgctcgatatatcaactttcagaattacagtaagtcagagcaaagagaatgaaatctgtagctcagcttgtttatttttttggtttgcttctgctgaattttgtttcccccaagtcagaatacgagtctttttgtgttctctctcttctcttattcttccgagaagtgaaggtggtgggtgtacagcccatatttgtttactttttctgtagctcatatatctattattactggtggtttcttagtggaaatttttctttcactctcactttggctttacctccaagtgctttcttctcttggctgcaattgagcactataatttgtggctttccggagggggagccttggtggtcaggtggaggaggcaggccacattccaaaagtggagtggtaggtgttccagacagagtgctgattcaagagtgagtaggggtgtagggtgaaagttggctactaattcaagcctcacctgaggcagtgttgctcaaacagaaaagtgccctctctaattagctgcccccatatgcgcttagattaatgacagccaactaacttagaaaccccttccagagtaagctagccaaacaatagatgttccatggacatgacaaagagctaattttcttgtgctaaggaatttttagctcttgtatttgtggtggactgcctcatcacctaatgaaggtgaagtacattctccattttaggaggcagagttaaaacattttcctcctgtggatgtctgattagaaaaaaaaaaaatctcctacttcactgtacctttccagcaagtcttatcctctcaaagcactgtgtaaagctttgaaattaactggttcagtgagtagattatattttggtactttcctatttgtccttaaaaacatttt

SEQ ID NO: 112415 - DNA, 1318 bp, Homo sapiens
catagatgacaaaggccttgctatcaaagtacagaaaagggatgacagaggaaggtggggctggggttgggaaggtttattattattatgattattattattgtttttgagacagggtctgctccttcaccctggttggagtgcagtggtgcaatcatggctcactgtagcctcaatagcctaggcttaagtgattcttctgcctcagcctcgcaagtagctaagaccacagacgcacaccaccatgccaggctaagttttgtatttttttgtagagacggagtttccctgtgttgcccatgcgccacaatgcccgaccaggaggtctttgtagaaaactctggattcctttttctgggaagtatcttcctcttgctaatggaaaaatgtttaatcttatgtatataaaatttcacattgcagaaagtatgttttacttgaattatgaaattttttgtgactacaaaataaatgaattttggctaacactttattaaaaataattatgggccaggtgtggtggttcacacctgcactcccagtgctttgagagtgagaggacctcttgaggccaggagttagaaacatagcaagaccctgtctctgcaaaaagttaaaaagttagctgggtatggtggtgggtgcctgtaatcccagctacttgggaggctgaagctgcaagatcacttgagcccaggagttggaggctgcagagagctatgatcatgccactgcactgtagcctgggtgacagagaccttgtctgtgaaaaaaaaatctgaaatattacatgtaaggggattttgtgaacattctatatgctaggtattgtgataaaactgtaaccaagtatattgtatatagtatggaatgatagtaataccaatatctttcatagagaagtttctcctttccagttttaaaatttaggattactttgggtcaggtctattcatctttgaagaaaataattttttaaaattccattgtataacatgaagatttttgtatgtgaaaaatacattaaaatcttgataaataagttttaattttacatttcaggccagacatttgttgtatgaatctatgagagcacatacaggattccttgtcatatgtggacatgagtcattataaagtgtactgttaaattgtttggaggcacacccaatagatgaaaaggctaaaaaatgtaatatgtaattatgaaattctcccttgactgcttagtaaccattatgctttctttatcactaattatttcgggtaacagattcaataggtttacaataaggattcaaatcgtgaagtggaagat

SEQ ID NO: 112416 - DNA, 1045 bp, Homo sapiens
ctttctatatatgtcttatgttacataatttaagttataatttatatacagacagttttcaacttaagagtcttttgactttatgatgattttattgcgatgtaatgtcattgtaagtagaggaacatctgtacttacaatgaaaatgaaattgaatatattttaatgatccattttatataattgcaatgtatgcattatataatacatatatgcatgtatatttactttattattcagtttaatcaaaagtatatgtaatctctttatatttattgactcctgattgtctttttcaactgcttataattaaatgaaatgtctgtgtaagccacatagaaaagtgcttggcaaagagtaggcattcattaaatgtcaactattatcattagtttagtttttaaatgatacatagtgatacaaagtagtagatattagagagttcagcctggataacttacaaattgattgtatgtgtgtcttcataactaccttgagtggaaagagataaaaaaaaggtaataaattggatggcttggacaaggttgtatgttcagaacctgagctttaccagcagaaaaattgcagcatcatactgagcgatggtatcatttttttggtatcatttttgtatccttctatcccccaggctgaagtgcagtggcacgatctcagatcactgcaacttccacctcctgggttcaagctattctcctgcctgagcctcccgagtagctgagattacagacacacgccaccatgcctggctaattattttacttttgctagagacaggttttcgccgtgttggccaggctggtcttgaactcctgacctcaagtgatctgcccactttggcctcccaaagtgttggaatcacaagcataagccactgtgcctggccaagaggtggtatcttaatgtttagtattgccttacaatatagagaggcagcatggcttaggggccagaacacctaacaaatagctacagacttcaggtaacttattcagttttcatgatttttaaatatctccttagataa

SEQ ID NO: 112417 - DNA, 1304 bp, Homo sapiens
cagccattttagaccttgaggataagattcatactaggcaagcaaccagccttattttgttgttttgctttgttttaggttttcagcagtccgaaaccatggtttttagtttatgtttctagtgatgagcagaaaagggggtgaggaaggggctgtactggcccaaccagaaaccaaaactacgaacccatgactgtattctgttcctgggacatgcctgcatggagtagtccaaatccttgatgactttgtggaattgccaaactataggctagattacccactttgacttaatttctgtgagcgggaactgagcttctatcttatttaagtcattgttattttgggtttgtcatatacagctgaattaaattctagcagataccattctcagtgaataggacctttcttgtatactttattggctttattcttttgggcatatttctgcgtcttgaatgagagattctgattcccacatgtcaatgtcagtgaataatgagaaacagcaaaatatgcatgggggaaagagcatgaatctgactttgaattttactgattatgtgatcttgggcaagttattttaccttattgagcctcagtttacttttttataaaactggggttgtactgtgtcttagttcatttgggttgctctaacaaaatgccttagattagatggtttataaacaacaacagtttatctctcacagttctggaggctgggaagtcagggtgccagcatgggcagattctgatgagagcctatttccttcatagatgtgtgtcttttcattgtaacttcacatggtggaaggagtaaacaagatgccttgggcctcttttttaaagacgtgaatcccatgtaggaggactcagccctcatgactcaatcatgtcccaaaggccccatctcttaatacgatcagattgagtattaagtttcaacatgtgaattttggggggagcacaaatatccagatgttaagatttctgtaagtaggactgttgtatttaatgaaaaaattataaaaccaagagctgttgttttgaatcatgttttgaaaaaatacaaatgaaatatgttgttcttctgcgaagtgatttttataaaagaagaaattaagaagcagttacccttataatgaaggaaggtagccattcagataatttgaagaaacagaagaatttttatactttgtttccatttttctttctctagttcaattgaaaaaaatgtcaaaaatatctcatagggattacttttattttcttagaaatatattggtagatatttttcatta

SEQ ID NO: 112418 - DNA, 1290 bp, Homo sapiens
aattcactacagattctgtgtgtgtgtgtgtgagtacatgtacacgcgtgtgcatgtgtgaattcttagttgtttctataagatagaataatattacctgatactgttttgtttttagagttgatgatccttgttaatattttggcttgttgtccctctattcactgactcgtatggaaattggggattgggtagaagaaattcaggtatacacaatatcttatatagtcttcaaaattatcctagaaagctggtgctatctttgagatgaaattcaggtataaggctacatgtacatgacgtagtctgcttaataatatatgataccacaaagccaattgtacttaagagtttttgctgggtcttctttatcactcttagtatgctatttattttgtatttaaaataggtttcttgatataagtttatcccttggatatttaaacagttttcatcaattgataccattatacttctgttctaaaacatcttctaaatatccctgaataaattcttacctcaattttttaactgatttgtgagatttctttttctccattaacctgattcttattgaaaggaatgaactgctattatggaagtactgccaatttcatatcatctaatctgcccatttgaaattgatgatttagtcgtaaaggagtatttttagtttgctttaattaagtagcatggcttgtaatgtgaaagttttgggtactcttgaataacattagattacagaatttatagttctaaaaatttatttaaattattgaatcctaaacatatgcttaagaatgtgagtgaacctttaattggacacttccactaatttgtagcctttccatggaaacatgccacaaatcaataggttaaaataaaacttagtcactttgtaaatagtatagtaagagtttttaaaagtaataatgccgtttaactttcattcttttttgggtatacattactgaatgaataaactctctgttcttcctttttaaagccaggctttttttttttttttcaatatggtataactcagaattcttcacgtttaagagcccagtaaattttaataaattttctaagtggctgcctgcttttaaaataatatttgtcttcattatgttctcattcattgctaatttaatttttaaaaataactttagttgagagattgcttgtccagcagaaatggagctatcctacattgagaagagcaaacctgtgtagaagaatttaagaatatagagagtttgaaagaagtgggaatctccaagctatcat

SEQ ID NO: 112419 - DNA, 1051 bp, Homo sapiens
tcccagctacttgggaggctgaggcacgagaatcgcttgaacccgggaggcagaggttgtagtgagctgagattgcaccattgcactccagcctgggtgacagagtgggactctggtctcaaaaaaaaaaaaaaaaaaagatgtcagtagatttagtggtgtttggtgagagcctactttctagctgtgttttaagggcacttcctaatctcgttcatgagtgtctggcctcatgacctaatcataccccaaaggctgtatctcttaatgccatcattttccaagatgatggttaggatttcaccatatgaattttgtggagacataacatttagaccagagcggtagtgattttcatgcattttcgaatagactgtgctatctattttttatgggtaagattaggcatgtttttgttggcatagaaaaaattgctatgtgaagagagtgactgttatttctctaacatttaaccagaaagcctaaatatgttcaaaagagctcatttgacaagggttctggggcagaagtgttaaaggacaaatgaaacaaggatttcttattcttaattggagttgagggaaagggccaaccttctgtagggaaaatgactataaatggtctttgcagtgaagacatcctctgttgcaacagccacctttttggtcggcttgtttttcctctttcttcacagagtactgctattaaaaacacctttctcttggcacttgcactctaccatttgactcttcagatttttcttgtttctgcataaaattttattgctcttagttttgaacctttgtgcagccgtagtaccaagctctttgcctttttcttcatttgttattcccatcttggaggcttattcactggtactcggtatgcctggaagggttcccttgttttatgccagatgacaacaacaagtgaatcctgctccctagtccttttatagatagcttttgggggaagaaaatttaaaggaaaaaataaaaacaaaaattttattgtcattaccgaagatggaatgacattcattctcatctga

SEQ ID NO: 112420 - DNA, 2095 bp, Homo sapiens
gtggaattatcacaataatgtatattttaaaatgcttttgtagttatgcctcagaataggcagatagatactgcctattcatatttgaacttctgtcctgtgaagagctagccccagaagggatcttttgcttttgattatttagcctatatttaagaggtttcttttctcttgaattgttatccccagctacttgttcagagatgtttgtaaatgaagggagtgagtgggaggaaaagcttatgttacttgtagaccagagaatagtatagcagctagaagtggtgtttgtctgtaggctacccttagttgatttgtgttgtcatgcaagaaacattttgatgcatttatttcaggacacggcattttggagacttcattaaatgctacctgttgctgtttgtgatggaatctagtctagaatgttaagaggcagtagaaaaagctgaaatggcaagaagatggcactcttcagtctttaagattcacctgtttgcattttagaaacacattaccattctttttgcttctcttaaaattggagctatttggattaaaattaaatttatcattatgatgtgacctacttggtgtcagttatttttactgtttcttttaatccctaaggtaatcctgtgaggaggttaatatggaaatctgttctgaagtctgtgaatcaaagatgctaaataattttctcatgatcagagagctagtaagtgatcaagctggaattgaaaaacagaacatttaaaaattattttgaaaaaatgtcagatatatgtaggagttaggaggacagttaacccacatatacctatcccatagattacttatggagattttattacatttcctttattccctccttccttttttggagacagagtctcactctgtcgcccatgctggcgtgcattggtgcagtctcggctcactgcaacctctgcctcctcggttcaagtaattctgcttcagccttctgagtagctgggactacaggcacatgcgaccccacctggctaatgtttttatttttattagagatagggttttgccatgttggtcaggctggtctcgaactcctgacctcaagtgatccgcctaacctcagccccccaaagtgctaggattactcttcttttttctttgccaaagtattttaaagccgatcccagacatcatgttaatgaatgcgcacattttaactgtgaggctagtgtttagaattctgtacctgatggcctaaggtataaaagagcatgacacaatatgaagactgtgagcagtagaagccatattttttctacaacataagttatatatctgcattgagttttcttgatatggttagccgtcatttgccactcatttgttaaaaaaagatcaatgcaataactaatatttattgagtactgactctgggttaggaacagtccctcatattttatgcatattaactcatttagttaacagtagccctgtgttctgtaatcatttattgtgggttccagttgcttgttgaaaacagttacctcttttacataaaaatgaaatattccacattgctttgacttgtggtatcttttccattccttacctttagtaattatgatttgttaaggaatgtatagaacagtgctactcaaaagtgtggtccacataacagtagcatcagcattgcctggaagcatggtagaaatacagaatttcaggccctaccttttgaatcagaatctgcattttaaattaggtctttaggtgatttatatgtatattaaagtttgagaaggtttgggttgcatttaaacagccttgcaagcatggtcacacattacaatcacttggaaaacttttaaagctaccaatgcccagcactgtccctgaacaattaaattagactatctaggtaagcctccagcatctttttcctttcctccccctttaaaaaaaattagattctctaaatgagaccttagtattgttattgttgtttttcaagcatcccaagtgattcttaagtttggccatgctttaacatgcactagttttataggagtagagtatctttgtgttctgttccagcttcttaaca

SEQ ID NO: 112421 - DNA, 1075 bp, Homo sapiens
ctagacaaaatctgtatttaaatcctctgtcctccatatgccaactgtgtgtccatgggcaagtcatgtaaccatcttgaacccatttttcttacagaaatttggaaacgatactaattttttaaggttgttgtaacgacgagaggaatattatgtaaaatgtctagccttagtgcctgcacagaaagtgttcccaatatatgttaggtattgtaattttgctgctggacagctcctttgaaagacatgctttttacttgtagaagtagtagtaattttcattaaagtaatacacttcctcacctcctatccactgtcaaatccgttgtacagtcatttggggggccctaccattccatggaggcaggttggcagtggctgtccaatggctggtttctgtgatatttgacaggtgtcaccttgtttttctcgaaaggttgtcctcattggctttcatgaatttcttcttttttgactttttgctatctcatcttgactgaatcctaaatgttgatgttccctcattcctttatacctttctctaggcagtctcatgtccttacacttacaggattgattaatgcctgtaggctgatcactggcacatctgtatttgaaacctagacttttctcttgagctgtctctcaaaccctatatacaacagttgctgtggatgggtatggtgaaaatacagttggatgtctgttctcctgtgtttcctatgcttggtgatgtcaccaccacccatcccagtcaattaaacatacctctcagttcaagtcttttaaatacttctaacctagtgctgcaggagcctcccaacatcagtgtctctgctttcaacctttttctcttgcatacacatatgttttgtcacattggcactaggattatttttctaaaacgaacacttgattatgccgatacctacttggtggttgatccctttttttactggtttgcaggaactctgtatattacggaatttgaccctatcacatgaattctgaaaatatttataatatagcatatgttacattgtactgaacttattttaagtctccaatttatttg

SEQ ID NO: 112422 - DNA, 1052 bp, Homo sapiens
cgccattgaatttggcaaatgtagtaaaattggttgtaatttgataactagtttcagtttcactgagatatgaaggagaccagtggcttccaactatggtgtcaacacagtgttgtgttaaactcagctgtgaggtattaacagctactgataacctaaagaagtttgcagatgacttattttaagatatctacgtataaacgagagtggatttacgttcaaccctaaaatgctactttcacttgcattctgacatgaagggatggagctgcaactgtcatggtgggcattttgtataaattgcagttgcttgatcttactgataagtctttaatcacagtggaaattacatatgtgtgtatttccctgaacatttttttttatagtggttcattagaatctggatttgtttatcctagtgtttcgtagaagtgaatgttatatcatgtatatctctggggggaagaaaggccgagacctgtcatgggagactgtgcctttgctagccagtctgtaaattgaataatcttgaaacatttaggtaggcacatttggggtgacttcaaagtgctttatgaagtcttctctcctcacacatctccagagactaccatacctgaaatttcatgattgtttaagataagaattgcttttttgatagatatttcagaagtaactgatatttaaaacataattaactgactaatttaaatttttttccttttgggtaatgttgaatctaggaaaaaaatcctgttattcaggagcctttttgagagttaactttcatgcttctttttaaatccatatcccatgcctctttgaaattgtcactcgggggttgggcgcggtggctcacacttgtaattccagcactttgggaggccgggtgggtggatctcctgcggtcaggagttttagaccagcctggccaacatggcaaaaaatcatttccactaaaaatataaaaattagctgtgcgtggtgtcatgcgcctgtaatcccagctacttgggaggctgaggcaagagaatcgcttgaacctgggaggt

SEQ ID NO: 112423 - DNA, 1283 bp, Homo sapiens
tataggttgatttcctcaaaggtgagtgatggtttctttctcaggaagacaggtgatgatactaaattgaggggagagccatttgacaagcatatgggaggcccatattagtcttcacaatgtgcaaattcaaatgaataaaaatgtataagattaggaattagaacagagattaaaacatactgtacaccccgataggtgataacttactgtgtatataccaataaaaaatcttcaggcccatcacgagtacaggctgctcatgagtcacctctcctgatggcatgtctgcatggtgagtgtttttagaaaagctcagtactggactccacaccaacagagtggcagtatagtgaggcacttgctcttagtcccatccttacagaagaccgctaaagctgcgctaccccagatgtggttgtatgacttctggttaaagaaagccagctgggcctttccaagctccattttatttttgttctgaatgaatatttccagtctctcacatgggccgggatatactttgtctcactaacacagaaatactttcatttcaaagagttgaagactaaggaaactatagtttcctacataaaatctcactgttagcttctgttgatttgcattcagcaaccaggagggaatctctgttgtcctcgcctctggtcagaattctccctgagtactctatctcgttccacgtgcccttccagaaacggatgtgttaaattttggagtatgttttacaaaacagtccccaagatgattaaaggactttaaataaattgtgacaggaagtgagagattattcagtctgaacaaaaaagggtgagtggtgatttaactagaggcttcaaatattagaaagtctctttctgtagtggatcatactcagaagttgttcatcaccccagtcaactaaagaagagaaaatatttagaagcatcagagaattaggtgatttttaaaaaaatttaaccagttaggggcatttaacattgggatggtttatgggaatcttctgaatggagagaatagatgattcttatttatttttgttgtaaatgtgaactttatgtgtgctgaagaatagtctaagcctaaaattatggcattttgaagctggaaggaaccatggaaatctaattttctgtctggctcagaaccctctatttgctggggagaaggattgggggatgtaggggagacctttgatctcttacacttgctcatgcctgaatttaggcctacaaatgagactcccagaattggaaggtacacca

SEQ ID NO: 112424 - DNA, 1004 bp, Homo sapiens
gatattgtaaaattctcatgtgcctcctgaagccttctaaattgtttttattttgagtgtattatattaagttccatttgtaactggttctgtatggtgactggcgaattggagtgcttctttctccagcccaatcagggcatggagtatgagaaggaggcattaataaggttacacaattagaatgagagctgttctgttcggtcacttgaactcactttgtccctgctgaatgtaaaaggctaagttctattcaatttaatttatttgcttgaacctgacagctgtctttcagtttttattgtattcccctttaggctggtcaatttctgacaaatgagaaaaaatatgttaatcactgagtgtttgattattggatgatttgtgtattttagttattgtctagatttggacttgaagataaaatgacctggtaaatttcatgaaaaagaacaaattggaaaaaacctctttccctgtttacatctcaatatatcatttcctataatgcttctgtaatccagaaatgctgccttctccaacatgacctccttcccttctctggcccccaaaatgtcattggatgccatccagtggaaagatacatgggctatgaaaagttaagaaaaaggtggcactaacgctgctgtctccttagattctcacaagtgggctttgagccatccgttgacatttgtttttaaaacatcttgtaagttatgctgttttatcaagttaaattaaaagcaagatatattcttaaaaagatggaacctgagtcaggaattcaagtttgttttattttttgtttgctttttacaaaggaatttgattttaaaaaatgataaatctggcattgttggttcatgtatatttaatgctattaaagttacacacattcctgttctgctgggcctgattattgggataacaaatgttctcctgatcattcagttctcttctttcgagcttcagttcagaagttacctcctttgagacctgca

SEQ ID NO: 112425 - DNA, 1041 bp, Homo sapiens
gagcatacagacagacggacacacgcgcgcacgcagcgggggcgggaggtagggtcgctgccgggggtgggggaagcccgcacttctaggggcgctgtgcgcccccggcccggccttgccgctcgcctcggctcccgcccctcggggccgcttcggggcgccgggcgaggggcgcgcgttaggcggcctggacgccgcggcccctgcggggctctggcttcctagcagggcgctcccgaatcccaagggctggagccggtagggaagcccccaggaagcgcctgccgggcccaatcaatggtcggggaacgcaggcagcacggaggcggcggcggtggcagtgccgctgatagagtcatgcggtccatagcccctaagggcaggcccgagcagctggagggtcggcatggatccaagcatgccagatataaaaataaagctcatctgtatattccatttaagcgtgtctcagttacattcacatctcttcacagattaaactacaatttcgttatcataaacgacttgtgcccagtaaagtataaccctctactggtttttggtgcggtcttaaatctcctggttatagagcagttactcagaatgttcatctacaaggcattgttaggcctttatgataattactgtggatagaattatagtgatggtggtagcaatggttttggttcacagctcataaaatactgatctggcagaggggagttttctttttctctgaagagaccgctactggcacccactgacaggcctcccagtggccaccattcactggcatctgagctgctttagtgctgggcactgtattaggtacaggctggggataccttcgggtggattacctccccacataagaaagcttgagccgaaatatatattttagagctcattgtttcactactgggtggagtgacaactgaaagcttagctttaaaacatcagtaatcaggtcctcaccaggcaatattgcagtggcatttagattgcttatggcatgttcatcctagtcctttcgtgcccact

SEQ ID NO: 112426 - DNA, 1053 bp, Homo sapiens
aaaatattctacatactggtgatcttttagtaaatagtaaaggttagggtcaagatattcaataatttttttctagcagaatcccacaactgaatattgtcaagcagtttaaactgcattcgtgtttgttaaaactttaaaagggaaacttaaaactaaagtatgttgtttttctgattttaatattgtgctttctagagatgaatccttttactgtttgaggcactataggaattatgtatttaaatgtatgtatttaaatttgaagcaatgtacttttttgagtttataaacttgggaagacaggaaataaaaagatttgtttcctgtagaattttacattcatgatttaattgaattgctaaaatggaaagaacatgtacgattaatggagacttggaatctgagattattcatccatattgatacacctgcaattcctaaatgccctcccctgcttgtttagataaaatgtcttcctgggctgcagcctactggacaaacttgaacacaaaggaacacacgttatatgtacatttaatactggaaccgaaaagctgcttgcagtgaaaagcaaaccacttctaaactctttgagactttttaaagaaggtagtataatccttttaggggttggtggtgatgtgaaaatctattatctttttgctgaaatttcattcttatgttaggcattggcactcacttgtgctgagtaaatgcccgtgtttttcaaacccagatagtaaatactgggggtatacatacaaaaatagtccttcccctttgtaagcattgctttgatctttgcacttcctttttactctacctcttaaacaagatctgtgttgattgagttgattaaagcacaattaatctgaaataggcagaattttagatttagtgattatattccttacatttctgttgttactgttcctggaaacaaattgaagtagtttgagaaactaatatttatgcaggttgttttaactacacttttagacttgcagataattgattaagtaagttactaccttgactttcagggattgc

SEQ ID NO: 112427 - DNA, 1024 bp, Homo sapiens
agagcaaaatgccaatactccctgtcctagtgtcattgtgccccctgggaaccctaatgcagtcctgtgggaaaacaaccattttattgagcgctgctcacttcagttcattctgctttgctgccacttagttctggttctgaccctgatctcccctcacatcactcacaacaaacattcaagtttaaaaattaagttaaaagttagttacatatatatgtaactaatgtgtatattaaatatactgatatatattagttacatatacagatatggcaacaacaaaaaaggttatatatatacatatttgtaactaatatgtatattaaatataatgatatatgtataaatacatatttgtaactaatataattatatttaatatatattagttacaaatatgtatatataatattttttgttgttgccagcaaaatgagaaagaaattaaatgttaacatctataacaattgcactgtaaagccgtcattgttgaaaagtactccgaagattaatagcggcagtgtttgttaaaataataaaataatccaggcactctgcctgtgacttccccatgagatggcttccagaaaaagataaatttttgtgtgttcccttacgagttcagtctgcagcttctgggcatgaagagaagcataaacaaaacaaacaaggctctaactttgttataatccttacgctactagtagaaatgtatggacaattcatgcatttcatattggaaaataaagctattagatttttctttgagatgaaccttttttttgtaatttattttttattttttattttttttcagtagagatgggattttgctctgttggccaggctggtctcaaactcctgacctcaagtgatccacccgcctcagcctcccaaagtgccgggattacaggcgtgagccacctagcttggccaaggtgaacctttttgataaatgaggctcactaatatttctaggatttacttttcactaacttgaactaaagaaagtataagacct

SEQ ID NO: 112428 - DNA, 1882 bp, Homo sapiens
ccaaatttaaaaagcaatccttagaaactttaaaaatatttcctattttaaaccattacataatcatttaccctgcagttacaattctttttttgtgatgggtggggaagtatcccatttctcttagaaagtcttctgtaatagccaaataggagtcaatccaagttgcttagagaggtagttcaatcctgtgttgaaatagatgacttttggagtaattgtgctatatttactgagtatctgttgaactgtaggagtccagtcattcaaggcaagctacagaaatgattttattgctgaggcacttaagtatcttcacatctatatgccaatattaaatttctcatcatccttgatccccacccctttgcacagattggtatccccagcacattagggaatgcggttgttagcctgttagggtccattcagtagatttctcatgccagaaatctagaagcccttcttatacattcagctttcttcttcagtcagtcaccaagttctatcaaggcagcctcctcatctccagaatccatcccttcctcgttgaatttctagattttatttttgcattgtctcctgcttctaacccatcgttcatttcgcataatggtcagctttctaaagtgtaaatcggatcatgtctctgcagtgaatcccagttgtcttcacaagctgattctcgcacacctcacccccttactccctccggtgttccccaaccatcccctaatctcaaatcctccacaccgactttcagtttcctatccacagtttctgactttgaatgcctttgcttatgccctccctgtatgagaagtgccttttctttcctagccatcctgctaacttctaaacccttaggcctggtttgagcatcaccatttctctcacttgcctttctgttttctccctcccctttccataaagagttatgtgcccccattctgtgttctcctgaattcctgtgggtcctagaaaagaaacatcttgagggcaaggagttcatcttatttactttttatttgcacagcacctggtgtgtttgctgaataagtaaataccgaacaagatatcaagagacagtgctgccaattaactgtgtggctctgagcaagttaattaacttctctgagtcttatttttgttctgtaaaaaaaatgaggtttgacaaaatgagcatctctctctaaaattatgtgtttctttgatgtaattgtattaattggaagacttcagattttcttgccatatcaagataggtcaacttaagaaaaatgcatgtgagtaagtaccaagccaattcttgattatcagtatgataatatgaggaactgcccattttgtcgataataagttataatttttggtctcagtgtaggttctttctcaaatccagatgtttctggtgttgcattttttcattattattcagtctctcgcattcatatttctccaaagaaatttatggaaaacttgagacaaaaattgaatgtaaagtttaatatttaaatgctagattgattcaaggtctcactaattataactatatttggagggagaagaaggggaggtggtggtagtatgagctgaatcctcctctgttccttcctagaaggaacacaacgtcctacatcaagaaaaaagacagaagcatatcttggagatatgaaaagaaccaccaggtaaactaaaaagaaaaagagtgttaaaaagtcagcctttaaaaagcaggattggagatgaggaggggtggagtaggggaagcattgcttgtttatagaagctcttccatcttcgtatagtgtgatttttatttttttattattttttccttccttttttttgacctccagctttagtatagtacagttgacag

SEQ ID NO: 112429 - DNA, 1019 bp, Homo sapiens
ggaacttctatccatttgagaagatgataaatatataggtaaagttagattgcagtaaaactatgctgtctagtgttaaatcaccagtatatataagttttatagatattatgtgactacagagctataggttataggaaaaatataggatttcttggcagaaattggatttaactagagccttgaagagtggatgctattgaggtagaaaagatggcatttcaggatgcagggcatattgtgaacaaatgtacaagatggaaatgagcaagtcattctgaatgattaatctgtctatcatagagggttttgattaggacatagtagtagttgatgcttataatatgatttaatataataatgtaatgtgctgagtggttgaagtctttggactttatcttataagtaatatggcaataatgtgaaagattcttgaagaggaagaaaccctgcagtgagggagaacagtacagagcctattactgtcattcagaggtgaagcaataaaggtctctcctaggatgttggaaagaaggggcagatccaagaaacaacatgaagaaaataatcagcagaaattggttattgactagatatgtgtgaaaatgatatattggcagaaattgcaaagtcaaaaatggggctcattgcagcaggaatgatgaaattgcttttagatagagaggtgaagggatttaaaacattaacttgttttaaaggtatcactgcttaaagctaacagtgatttattaatatttgcactctgaaagttttaacagttttaattttatgtatacaccacagtgttttggctactatacttgcctcttttgttcagttgggaattgagtaaactaatagagtaaaaaaatgagtacaaagtgggctttgactagaactctaacaaagtgtgatcactgaattaccaagataattaacccataccccacatatactccatttcccatgacacatattatattgcattgtttttgcctatttgccttcctacttcctaa

SEQ ID NO: 112430 - DNA, 1055 bp, Homo sapiens
caaggcttggacaaaatagttctcactatgtgtgtgtgcccctcagggtgtaacatacttttggactcagtctttttattggtttgtttttgtaagtagatgaagctcagtagagcaggccctcagcaaagttgtgatgtaaagaaatctggccgggctcgttgactcatgtctgtaatcccagcactttgggaggccgaggctagcagatcacaaggtcaggagttcgagaccagcctggccaatatggtgaaaccccatctctactaaaaatacaaaaattagctgggtgtggtggtgtacacctgtagtcccagctagtcaggaggctgaggcacaagaatcgcttgaacctgggaagcggaggttgcagtgagccgagactgtgccactggactccatcctggacaacagagcgagactctgtctcaaaaaaaaaaaaaaaaaaaaagaaagaaatcagtctttggttttgccagccttgcattttgtttcttccttttcctcttatccatcttctaggcccaggcctgttaaatttcttatccttattcccaaacaaaagacaaaatgttgtgacgtcgttctttacctttcaagtgaaactcacccattatttagtatgggtactactagtcatagttgcattttaagtctcttagctccaattgtggaatgaaagatgttttttctattaaaggtaattaggcgggtaaatatgatggcttaagtccacagaagcagaccacggtcttatggcctcacatcctttagaaccttgatgaggaatgaggagcagcaataaagaactaatttgcacttattaaacaccaaagacttgccaagtggtttgtataacattatctcttttaatctcttagaaatctcagtaggtaaaaagtgcaatgcctgtgaacccaaacagactcagagaatggaattataataactggcctttctcacaagactagtggctctatatcctgcagcaggctattgctcaccgaacctctcagatataatgtgtgcatttggggtactgggggcagggagat

SEQ ID NO: 112431 - DNA, 1752 bp, Homo sapiens
gacacgttataaaatatttagcagcctccctgaccttgactcactagatgctaataggattcctataattgtgacatccaaaaagtctccacattgacaaatgtcccctggggggcaaaatcacccctctttgagaaccactgatgtggatgcaacaaagaatcaaccttaaccttacccatttgcatacttttctactataaagttgtctcgcatagattacgtagaattgtccaagtgtattattttataaacgtgcctttcttggttattagtagatatttcttattttcaagatggtgatcatggtgtctgtataatttctgttagaatatcagagttagtgtacctggatactaaggagaaagatagaaaagataaaatatgtatcttcaacattttgtattctgtgatgaccctaaaagctaatgtgggagttctattgactgttataaactattacagaagaaaaagtgaaagtggagagttaggtccactgtgtgtgaacaatgggagggtctatggaatgatgctttcaggtaggcagaggcctcgtggagggtggccccacactcacccccagaatccagaagccattcccacaggaacttcagagggagagcatttacatttacaggaaagaaatgatacttctgagcctacatttgccacatattcattaagtgcatttgttcaggcattacagtaaaatgccatgggctgtgcttttcctcagctacagcctctctccttccaacctcacaccctgtcttcctgtcatgcctttgtgagagcgccaccactctgcggtgcctggagaggaacctggaaacgctgatagttcagtgcatactcggtcatatggagacagcaggaaagagtcaggggccaacttgaaagatttggggcctggctgtggtttgcaggctgtagacaccaaactatactttatagaacatgtgaaaatatagcctgtatgggttactctcttactgattgtctagatttgatgccttacattaaatcattttaaaaccaactctagaagtctactcaaatcctgcattttctactggaatagtgtcccatgcataaaaccctgtttcgcataggtgtaggctagcttacagaccctcttaccatgttgagattatttctagaactcaggctactgaaccatctggtgctctgcctgtgtctttcacatagctaagaagaaaatttccatttagctttctgatatcttgctgtgcaagtcttcatgctctttttttaaaaaaaattttaattataaattctttcaagcatatagaaagtttaaaaattgacataacagacactatgtactacaacacaaatttaataggtattagcatcttaccttatttgcttttgatagctctctctctctctctctgtcctctctctctctcaaataaaatagttacagctaaaaccccacttatccatcactttgtcctccttccttctcttaggtaagctgctactctgaactttcactccccaagatgtttttatatttttactacataagaatgcatctataaatactggcattttcaagaaagttaatttttactaacttcaacccaaatttgccattgtataggatggctccttttcagggcaaacataggttcaaactggacgccattgaagattaactggtactcactttgatcctattgattcctctttgctgtctagataaaaatgtatttgtcacaatgt

SEQ ID NO: 112432 - DNA, 1005 bp, Homo sapiens
gttttggacacactttgatcatatctaatgtgttctacttcctctaattatttttatgttattaggatttttaaaaaatctcttagattaaaatttctcagtgtatctttgtttgcgtgtctttttttctctctccacttatgtaattgaagcatttctgacatatcctcagaacacacagattcttatcaggacttaactacccagggcagggccctccttggatttactgaaaataaacactttgggtactcagtctcagttttaatgacaaaagttgaaatctttgcctaacatgaaggtttttctttgtctctaaattttgattttccatgctatcagaggtcccattgcaacaggtaatttgagtgttgattgtatgttttctcagtttgtaattgtggtgaaatgtatttaaaatgttcacaattttaaagttaagtttacctataaggttctttccaactcagaaattctgtgatggtaaactttttttttgtagtttgaaaatgtgatctttggatgttgtcttctgtgtcctatgcatatgactaggaatcatagaattttagagctggaaaatgagtgagacattatctagtgattctgcaaatgaagaattaaaaggcccaaagaggttaggtgactcacgcagtatcatagcagtacctggtgactagaactctggccacctactgcagcactaaaaattaacccaaatgtttttatctgaaaatttgcagacttcaggctaggcctgtaaataaataaataagaagttaaaacatatttgagaaaggtaagcttaatatgccacatttgggaaaagatgtgcctgacacaaatgtatttggtgtaatagagaacattcttccattataccgaaatgaaaattttgaacattctcaaaattcttgaattttgagacatttatgttaagcacagtttattcagactctctataaactgtgctgtcatccctgttgttttctccaagcggaatca

SEQ ID NO: 112433 - DNA, 1317 bp, Homo sapiens
aatccaaaagaattaagcttttaaataagacatatttattgtgctaaaaaacttgtattttcatcttcctaatacactaaaatggcacacagaataatagtgtagcacacaatacaaactgatatgtgcaatcaataattctaaaaattgttgttttaagtctttctttggaagtccttaaatgcaaaagaagaaatttttaattttgtttaatttttaaaaacatttttcagggttttctaatcctggtttaaatagtttatgctgaaatcccagttaatctggcttattcactcaaaagaaaggaattgtttaaatcaactataattaagctgatggttgcatttcaggctttgaattccgatcaagtttcaaattggttattattttggaggttgtgctttcatgttcctaggtatttctttgtttgactgtgaaaatatttaagtgtgaaaaacctagagagagagctttcttttaagtcactaaaatcggattcttttgatgttagaaaaaaaaaagactctagattgaaggaagaagcttaaattgatttgaaaaattaaagtgtgctttatatgaacttgtttcaacatcctcttgaaagactggcgtgtctcctgttgtatgtcacagtttgttcatcatgtgttgtggaatacccttccaattcctgattgacctaggagagctttgaaatgcaggctaattatcacagttttagactgattgatcacttagtgtttctgcagatttattccagtagggttctgtcagtttgaagtgtttattttctttggtcttgtttaatccctattataatcatatcctttagaggaaattttagatgaagttttctactagtatttattattataaaacctccagtatggtgtctataatttggtgtttctgtggtttgctttagtaatctttcaggattttagaaagaactaatggttatttaaatttgagaccttaaagcgggaatagaagtaaattgtttctaaggaaagtgagggattctttcactcttgtagtgcagtgggttgtgggctcagtagttgggagaactcatcagtcattcactcattcaacaaacattttgagcatctcagctcctgaatttgatcattatgatgtctggttgtagagcagtgagattttctaaccctatataatttcagtgagaaatttaatcaagatgccacttgagagttacaatagactcagtagtcttaacgtttttagtgtttcctatgaaaagtcagtactcactttctaatttgatttttagctgagaaatttttgcttaca

SEQ ID NO: 112434 - DNA, 1735 bp, Homo sapiens
tgagaagcctttcctgaatttcccatccctcagtgaactcctaaaaggttttccccaaactcctagaacactgatctgcaccatgaatttaatgtatgtcctgttatagtgctgtctcactaagtctttcccccactatcttaaaattatgttggagggttcttggcagcaaagacattatgtcatgcttttttttatttccagcatttagctcattgtagatgcataataaatgttaactttttaacatgagttattttgtgtgaccaagcaaaagggtcaataattttttaattcagcatcttcaggatctttttgatggataatcaaatatttcactagttttaacaacactggggacttaagaaactgttgtagagtggatttgggtgtgtactgctctgtggtctctctggagctaactttcagccttcatacccattggaataaatataacgcttcttgaaatttaccatctcttcctctttgagtgctttctatttccctttaagatgtttaaaaataccattagaatcagtggtctttctgtggctagtggtgggaccaaatcaatcttttctcctctggtttctcttcctttaaatacagataaagaagaagtgcagaggaaacgtcagaagctcatgcccaatttttcggatagtttcggcggtggtagtggtgctggagctggaggcggaggcatgtttggtagtggcggtggaggagggggcactggaagtacaggtccaggtacaaaaatacttattcttcctaaaactttttcatattggagagggtagaattttcttttctttggtttctgagcatgtctgtgagttgagtggctatgatattattgagtatattaattaaaatttcctgacaaatgtaaatttatttttcaaagaaatccatgttcattttacaatatgtaggtaatctcaaaagtcattaagaagaaaaaaaagtaccccaaagccagttatttaatgaataccttcctaaagattttggtatatttctcttttacattttttgacatagttgtcttgtttttgtttggaaacattgaaaagattgtatattatcatactacaatatagctatatattaaacatctctatatactacattgtagaaactttgaaaatacataaaatctgccatcaaaggttaactactactatttttatgtatatgttatagtatatatttgtaaattttaccctgaatacagctgtgatcatcattatgcattttattttaatccatttatttgcaatactattttactatcatttgcaccatgactgtgtgtatagagtcataggtgcaacgtttacctgagatgttaacataaacatttcctccagtaatatgaactttaagcataaattttaagcatcattttaatgactcatttcctcaagtgaacaaaccatagtataacttacttacatgtagtttcctgttttctatataaaatgctatactgaacctctgtccacctaacttttcacttattccagattacttttgtaaattagagtctttgtagtaaaattactacgtcagagggcatgacatctaatgccatctgttttcccaaagagttgtaccagtttatgcttccaccaaaaatgcctaagaatgaacagtggtggccatttttccattgaggagtcagtatgtttttctgtgctttgtttgattaagtttttttcctcaaggg

SEQ ID NO: 112435 - DNA, 1108 bp, Homo sapiens
agatacttgggacatactgtgaggatgttattagccaaatgtcagaattagccaaatgctttcacatcttcctgcaatctagtcttgtgtttatgagaatcctttctgaattctcttgactcacagtggacctttttttcccttagaaatcaagtgtagttttccaaccactgtattatctatttcatagctggggaaactgctgaacctcagcaaaataaattggtgacagaagcaagaactaaaaatgagatctctctctgggcctcatatgctattacagcatacattgccttgaaaacatttttggtagcaataaaagtaaaatgattttggtgaaaatgagtctatactggaaaatcaggttgaattccctttgtttataagtgtccttagggatatgaccaagacaaattatttcctatacagtgaggaaggaaacagaagtctaacatacactaatcaaaatgctatcttcttatgtaccaaattccaatattagaatattaagactttaatgccagtggcacgactatcattttggtattgactgatttgtttaatcaaccaatctttatttggtgtctattatgggttacaaactatgcgatatcctaaaaataactacaaattaagggcttaatgcttaggtatttactttttaaaaaaatgttaagtatttgctttttttcttttttaatatctgtgcagaaggagcactgggctgtgactcaggagatctgggttgttttccggcggatacattattcctttctcaagtgcggacaatgacgtctgcccttgctcccctgggaaggccccctggcagggtgagatgggtgctgaaactgagtggcaagaaagagccagccaattaagagctttccagggaatgggaagaaacagtcaaaaggttggtcagactagtgagccaggggagcagagaaaacacttgggaatggaggcgcagtgtggaggaagagcttccacagcaatgtttaagaaagcaaacgagtaaagcagggacacagttttatctttaaaacctcgaacactgctaggcacacagtgtatgctggatcaggatttgctgaatgaatgactgaat

SEQ ID NO: 112436 - DNA, 1036 bp, Homo sapiens
ttggagcaatcttttcatgtgacctccttaacagatatttactgaaggaatctaggttgtattttcagtggacaatgggaataaagcatttctaaagcaccgactggagaggaaggcaacagagacaaggagagaagccgagagacatgtctgcgtgctgccacgcatttgagcgattgctctgtgaagagttgtacactgaacactttcaggggaggctgtttacccaggcaatgtcctcaaacaagcctgtgccggggtgtcctggaatctgtgccaggactgtgtttttagcccttcacctctcagctttagcaggacatgaaccagttataacaagatggccctgcagctggttacaagaatgtgacatggcaggatctatggaaccaaatggaaggttttgaggtgatgtaggtctttcacagctagctttggggaatacggaatactcaaataaagtgctttgttattatttcagagggaatggcgattgaaatgttacaacagagatttcttggtggtagctatttgggtaaaggtatatgggtatttttctgtacatgtgaaattatataaaaataaaagttatataaattacattgacaacttgatatttcatctgtggcttatttaaccgttctataaatattcaattttgcccaatactgtgctggaccctaatttccatttagttctcgttattattctgcttggtaaactgggagagtttgaagaatctaaactaagacatgtgaaaggttttctctggaaacagtcatgtaattggttatagaatggaccagcaaagagtgtttggctttaaaattaagatattattagtggttttggttttaaaaatgagaagcattatgttcagtgactctaaaagtaactacagacaatccagtcttcttcagtatctaagagtatcctcattttatatgtacacacacacacacacacacacacacacacacacacacacacacacaaagccttatcaaggggataaggggacttagggctgggactc

SEQ ID NO: 112437 - DNA, 1050 bp, Homo sapiens
ttaaagcaatcaatagctacctagaatctataagttattatatacagtcatgcaccgtataacatttcagtcaacaacacagttcatatatgatggtggtcccatgagattataatactgtattttcactgtcccatttctatgattagaattacctacagtattcagcacagcaatatgctgtacaggttagtagcctggagcaacaggctataccatatagtctaggtgtgtagtaggctataccatcttggtttgtttaagtacactctatgatcacacaatgatgaaattgcctaacagcatggttcgttaatgcctgccctggttcgttagtgcctgcccagatgttgtgagggtgacatgacataatgtccagagtgctcagagcgcttcacaaacatgggtgccctccactgttgactctccctcacatgctcactcccttagaaccccgatgagccacaaacagctgggccattggacagtgcctctctgactacttgaccttgccgtctcctgacactcttgattattttcagagtacggaggaaagtggaaaatgcttcattactttgctcagaatttctttgctccactgttgccagtaggctttgagaatgaaaacacgttctatatctatggtgtgtcagatcttcactcggattattcgatgacactcagtgtaagttacttggattgttttctaagatcgaaggagacttttagatgatttctttagttgtttggttacattcttttgggaaaataaaagagaaattaatttagagttagaatacatatattcaggctacaaccctgccattaatcatgtgaccataagcaaaacccttcacatcttgttgattcaatttcttctcagtaaaatgataccagtctctcttcttacaggatttctatgagtaggaaataaaataactagatgaaagcaaatcacatatgctataatgtgccccttaaatgcaaggttatttataattgtgagaggctggaaatagtccaaactttataaaaagaaatggttaaaaa

SEQ ID NO: 112438 - DNA, 1046 bp, Homo sapiens
tccctaattttatccaaattgctccaaaaagaaaaaacccaaaacaaaactaaaccctgtatttttctcagatctaggcagtctacatcaaacaataacacctgtgtatgaatgttttcctgaatcaggtgatgcaggcccagtgtgtcaaaacagaaactgaattctaccgccgtagtcgcagcgagatagtggatcagcaagggcacacgatgggggcactttattggcagttgaatgacatctggcaagctccttcctgggcttctcttggtaagcatttcagcgttctttgtgcgagtgagagaaagcaacactgtggggagagggactgagaaagcacagtgctggaggggtcagattagcccaggcagaactatgaccaaaagagtcattctttaaaaagcctgcctaggaactacagccacccaactcaccttagtagcctttccatgagccttagggtcaacctaattatgggttctgtgctgtgcaaagttgcaacagcaggctaagcatgggatagattcctatacaaaagtctcagccatgtgtcttgttattacgcatagaattttgaatttatttaagagggcattccagggctaaagaagcatgaacttaagcatcccttcttctgtgttggagaattcaatcaggtagaagtttggcccgcttatgtgttaaagtttccctttctctgattcacctttaaggacaaataaagatgtcctttaaggacataatgaagatgtctcttaaggccatctttattatgccctgtttagctcttggggaaaagctagtagaggcagaatcccgaatgggaaaggtgaccagttgaaacagttcaactagcaacaggtgagatgactggcatggaacctgcagttcgaattatcccatctattctggtacattaaaaaaaattaaggaataatagtctttgcccttcactagagatgacttgaaacaaagttcagttaataatgtaaagaatagtttggggtcaaaaacgaggcaaggccacaaagtagaaaggttgg

SEQ ID NO: 112439 - DNA, 1068 bp, Homo sapiens
tttccttattcttcatatttcatataattggaataatataatgtgtggtcttttgagactgattctttgactgtgttttcagggttcatccatgttgaccatgtattagtatgttccttttttttattgctgaataacattctgttgcatggatatacactacgttttgtttatctatttatcagttgatggacatttgtgttgtttcctctgtttggctattatgaataatgctgctgggaacatttgtgtacatgttttgtgtgaatacatgttttcaattctactgaatatatatatctaggagtggaattgctgggtcatatggtagctctatctttaacattctaaggaaatgtcaaattgttttctgtagtgattgcaccattttgcatttctaccagcaagggattagggttccaatttttctacatccttgccaacacttgttattttctttttttcttcacatttccctgggaatttacatttacaggaaatttgcatatccttgatggctaatcatgttgagcatttttttttcacgtgcttactggccatttgtatatcttcctttgagaaatgtctgttcaaatcctttagccattttgttttttaaatagagacagggtcttgctttgttgcccaggctggtgtgcagtggagtggtcacggctcactgcagatttgacctctcaggctgaagcaatcctcctgcctcagcatccccaagaagctgggactacaagtgtgtgccaccacacccagctaatttttgtattttttatagagacggagtttcaccaaatcatccaggctggtctggaactcctgagctcaagtgatcttcctacctcgggctcccaaagtgctgggcttacaggtgtgagccactatgcatggcctgatcattttaaaattatttgtctttattttattgaattatgaaaattaaaaaaatatattctggctataagattttatcaggtatatgatttgcaaatattttctcccagtctgtgggttgtcaccttattcactttgatggtatcacttacagcacaaaaa

SEQ ID NO: 112440 - DNA, 1016 bp, Homo sapiens
tttgctttgcttcatttatttcttcacacagaactccaatttgtccaatttgctcttaagaaccaatccccaaaatataatgtctcctgccttttgtatttcctgaaagttttctttgtggcaatccacagagtgaagagtttattcattccccttttctttctctttctaaaaaagggattatattatcttcagtttttatatagcagagaagagaaaccctatgtatcagtgtttataaaatctagttaaaaagaatctcagagatttcttaaaatgtattcctgcagctaacatgactagccattttcaaattaggtttttggcacataagaatttatgtgcagaaatgcaagggctttaattttatgagtaattatagctctgaattttttatgttaactctttgaaaatcattttatgttttcttaattttcagatcaagagactgaaatctcatccttctatcatcatatggagtggcaataatgaaaatgaggaggcgctgatgatgaattggtatcatatcagtttcactgaccggccaatctacatcaaggactatgtgacactctatgtgaaaaacatcagagagctcgtactggcagtaagtaatgatttttaatgcagtagaatttaagaatgtatctttagggctgggcgtggtggctcacgcctgtaatcccagcactttgggaggctgaggcgggcggatcacaaggtcaggagatcgagaccacggtgaaaccccgtctctactaaaaatacaaaaaaaattagctgggcgcggtggcgggcgcctgtagtcccagctactcgggaggctgaggcaggagcatggcgtgaacccggaaggtagagcttgcagtgagccgagatcgcgccactgcactccagcctgggcgacagggcgagactccgtctcaaaaaaaaaaaaaagaatgtatgtttaaagtggataagtttgaatactggtatagtatgttttatgcccctttttagggctgtcttcaaca

SEQ ID NO: 112441 - DNA, 1049 bp, Homo sapiens
aattttttctaattttttatttttaatttgttaaaaattaaaaatgttgcccaggctggagtgcaatggtgcaatctcagcttactgcaccctcctccaccccaggttcaagcgattctcctgcctcaacctccggagcagctgggattacaggcatgtgctaaattttgtatttttagtaaattagcatccagctaatttttgtatttttagtagagatggggtttcaccgtgttgtccaggctggccttgaactcctgacctcaggtgatccacctgcctctgcctcccaaagtggtgagattacaggtgtgagccactgtacctggccctaatattgttattaagtacttttaatgtgttttgcaattgtgaggataaagcaaagaaaatatattctgttagttctattattgttgttctaaaatataaagagtgccaccgaagactaggaattattctaataatgataatgctgatggtcattgtgacgatgacaatattctataatattctctgagtgccaggcattgttctaagtgctctacatattttatcttcatgcccattcaatgatgtagttactattctctatccccatttacagataaggaaactgacacatgaagaggttatatattttatccaaactctaacaactcatttatggtggaatgaaattccgactcagacaggctgctttggggctatgatctttttttttttttttttttttttgatatggagtctggctctgttgcctaggctggaatgcagtggtgcgatcttggttcactgcagccttcacctcctgggttcaagcgattctcctgcctcagcctaccaagtagctgggattacagatgtgtgtcaccacgcccggctaatttttatatttctttcttttttttttgagacggagtcttgctctgtcacccaggctggagtgcagtggcacaatcttggctcactgcaagctctgcctcctgggttcacgccattctcctgcctcagcctcccgagtagctgggaccacaggcgctcaccac

SEQ ID NO: 112442 - DNA, 1073 bp, Homo sapiens
taaattacccattaaacaaagtgattttatggtaatgtgttattaagattgcaaagttgttaagttataacatttgattctaagatgcatgtttggctaccttttaacaacactgaaatgagaatgtgtttttcaaagacagcatttttttctatttttttgaaatagcatgtttttgttttaatttagagatgttatcttcaaattgtcttttttgatgttatcacaaatgcctatttcatgtggaagactacagtagctctttagtggtttctatatttctcttttaaaagagaaataacggatgctagcaataatttatatgtgtatattcctgaaatgtgcatttccacattatgtgcttcatagtaaataggaaaattagcattaaactactgaatgtagtttttcaaaaaggtctgctttttttaaaaaaactattttgcttatgtttaaatttgatattcatcatttaattctgttcattgcaggtttattttaggacagtggaacttatagaagagcctataaaagggtctcctggtttgagtttctatttcaaaattaatggatttcccatatttctaaaaggctcaaactggatcccagcagattcattccaggaccgagtaacctctgagttgtaagttattgtctttcttttcttgttcttcttttaattagcagtcccgcaaagcttgaggtttactcatttttactttctttagtctctgggcaaggaactaagaggtagtatagaattctagacgatggaaacttcagaatggacaggattttaaaaattatatattccattctcctgggttacaggtggtcttacagctaaactatttgagactgttgaagccattcgatttttagaaaactattatatgtttattctggagaaataagaaaatgagtaatttatattttgaatagtctccgaaaaaaatattacattcaactattttcagcttttcaaatgatacgttaaatgttttgagcatggttttgaaagataagaacacatatttaccttttttttttttttgagatggagtcttgctctg

SEQ ID NO: 112443 - DNA, 1032 bp, Homo sapiens
gttctctgttacattaaaattcatttgtctatcttgcactttgtgtgaattctttacccatattatgtgatattgtaatataatgcattggttattggaaaatgtttgtttcttgagagttacagatcttccaaatgttgaaacatttccttttataatatcacatttgttaatatcaccactgatgtcatctaaaaagtttttaagtatttaagtagtatctactaccgtgaggtagtagatacaagttttccctaatcccaatttttacttgaaagtttgaattttatccttggccacaaatactgctagttgtttttcttgaaatgataggctcactccattcattttctagagaatgtctgccaggtatccaagtctgaataaccatcgtttgtctgtcagtccttctttctatcaagtaaaaatggagtgtcgtgaacaaggccaattcagcttacatacaactctattaatggcccagaggcttttcctccagctatctattgtgaatggtgctttatggatattgctcatttcataatgcaggatattaaaatgatgcatactgagggttgggatttaatgaaattaatgtttactgctttatcaaggacagtcttaagtgaaactgtttttttttcattttcctgctgctaatgcatgaaggtgaaagatgtaatgactactagcagtttggagctactgccttgattcctgctaaggcaccagcagtgttaacccaccactgcttttgtaacgtcagtgcaaatgttaacacagtaattacaggatattattcaaaaaattatttagtactttgaatatttcagcacctcttgtatattgttgccaaaaattcacagaaaagaagttttttgatgatttatcgtgctgataacagacaaatacaggcaaactggcaagtccatctatatctggagattcactcatttgtaaagcaaaagtatgattatttcagatgagatatcaggccagtcttcatattgcagtcaaatctcttaattggac

SEQ ID NO: 112444 - DNA, 1776 bp, Homo sapiens
cttattacataactttaaaacccatttacattataaagtaaaatactattactttttactttataaagtatttttacttaattaaaaaggaacaaatgtgtattattcttggaaaatttattttatctttccatttgtcattttctgtttatgctccataaagtttttatgacttacaatcataacatttttagagtggaagtctatgtaaaatataccatttttgttattcttcttcagaatgaaggattaaactgaagattaaaagaaaatttccacgaagttttgattatgacagcattgtggagcacatactgggtttgaagctgctttagtcttaccttcaatgaatcctgagaaatgcagtgataatgcttagcatattatatatatatatatatatttctttttctttttatattttagataagagtgcccaggagtggaatctggaaatagagtctacatttgatgttgtcagctcaaagccagttggtggtcaagtgatcgtagccatccctaagttgcaaacacaacagacatacagcattgaacttcaacctgggaaaaggattgttgagctatttgtgaacattagcaaggtaaatgatggtacttcctgagaagcactggatgaaaagcaatacctgtgctaaagaaatgattagaaaggagggactaagtatgaaagaaaattctactttctctgcttatatttgtcattttcttctctattttagtctctcatatattttctgtgagtatgagctaaagaatgattttcccaaactttaagattaagaaaatagagaatatattattaatttggcaattctttctctcattttatttttatcattgtattttaattttctgtagtatttgtagtatcctaaagccaaaatacattctatggattatatttaaatagcagtggttatttttgatacttgtcaattattttgattattgatacttattctacatgcacaattttaattctaaactcatgatctttcatatatcaaggtagaacggattatttttatcttttctttttcttttttctattcctctaattgataattgtgtactgaaaaaggtggagcaaaataacattcagtagctgttgagataaagtaagaactcaaaatgatttttagtttttggcttgaaagaagagtcaacttcagagtcccattttaagtgttaagaatgtggaataaatgtaagctcggtgttagggatagggagagttgtttttctgaacactcatgttattctgttctttccttttgcttttgatgtattgatccatgctagattcccagcatgctgatttttaaatattatcaatgaattggtctgattgggcataatataggtggggagacttacattgttttagaacctagagttttgtacttgactatttgagaaattgatgtaatgctttgagccttttttgctgaaaatatgacatattagagtgacttttaaattttcttaaaagaatattactgtagaaacttggtggcctcatggacatggaaaccagactgggtacaacatgactgttctttttgaactggatggaggcttaaatattgaaaaatcagctaaggtaagtaagtaatttaaaatattttgtgaaataattttatttcttttaaaaatagtaatacagatcttcatgggaaaagaagaaaccgtcaaaactcttgtgtccccacccatcagagatcatctttagtaacagcattcaaaagcttctct

SEQ ID NO: 112445 - DNA, 3514 bp, Homo sapiens
ccttctgcctctacctaagtcccaaagccattttttcttgtaatatccaggaccaagtaatttcccaaactctaggattcagataaaattgttctagtaaaagcctagttctggccttggtggaaatttctgtggatagatagaatgtgtatactattttaacatttgtccataatgaactgtaaaaatttcttcacgttaaaattagagcatgagctcggtggtagagaaagaaagggtcttttgatttttgttagcctcccaattttcagtgctgctttcttagttgtttttaaaatactactttcagagcatcaggctctcatttcccacattgctttgagtaccagtgctatttctcccttgttggcttttattctaatcatagtcattagagatgacttcatgatgagtctggagatgataaaatggaaatctttcccttccatttaaagtattaggaattctttattttaacttttaaaaataacatctttatttacaggtacaacagaatatctcgggaatggactcagaagtatgccatgtgatgctaccttaaagtcagaataacctgcattatagctggaataaactttaaattactgttccttttttgattttcttatccggctgctcccctatcagacctcatcttttttaattttattttttgtttacctccctccattcattcacatgctcatctgagaagacttaagttcttccagctttggacaataactgcttttagaaactgtaaagtagttacaagagaacagttgcccaagactcagaatttttaaaaaaaaaaatggagcatgtgtattatgtggccaatgtcttcactctaacttggttatgagactaaaaccattcctcactgctctaacatgctgaagaaatcatctgagggggagggagatggatgctcagttgtcacatcaaaggatacagcattattctagcagcatccattcttgtttaagccttccactgttagagatttgaggttacatgatatgctttatgctcataactgatgtggctggagaattggtattgaatttatagcatcagcagaacagaaaatgtgatgtattttatgcatgtcaataaaggaatgacctgttcttgttctacagagaatggaaattggaagtcaaacaccctttgtattccaaaatagggtctcaaacattttgtaattttcatttaaattgttaggaggcttggagctattagttaatctatcttccaatacactgtttaatatagcactgaataaatgatgcaagttgtcaatggatgagtgatcaactaatagctctgctagtaattgatttatttttcttcaataaagttgcataaaccaatgagttagctgcctggattaatcagtatgggaaacaatcttttgtaaatgcaaagctgttttttgtatatactgttgggatttgcttcattgtttgacatcaaatgatgatgtaaagttcgaaagagtgaatattttgccatgttcagttaaagtgcacagtctgttacaggttgacacattgcttgacctgatttatgcagaattaataagctatttggatagtgtagctttaatgtgctgcacatgatactggcagccctagagttcatagatggacttttgggacccagcagttttgaaatgtgtttatggagtttaagaaatttattttccaggtgcagcccctgtctaactgaaatttctcttcaccttgtacacttgacagctgaaaaaaaacaacatgggagtaataatgggtcaaaatttgcaaaataaagtactgttttggtgtgggagttgtcatgaggctgtgttgaagtgacttatctatgtgggatattgagtatccattgaaatggatttgttcagccatttacattaatgagcatttaaatgcaacagatatcatttcaggtgacttaacatgaatgaataaaagtcaatgctattggattgttttttgtttgacaagtgctatctgtgccactgatttaacttctgtagtaacaagggcattaccattcttcacctttcctaattctgatcccatagttttacatttttcctgtttattttgattttgttcactgctttatttcttaaagttctagcacatctgtgactcctccacttccacatttttgcactgcttacacttacgtgcaatcttattccttgtctgcacacacatgtggaaagctagaaataaatgttaaaacttactttttataaacattttaatatgtagtttggacatgatttattgacttaaggttcttctctaaactggaagtgaaatgcatgccttctgaagatgttctggctttgttaattctgtaatcatttcattggggaaaaaaccagctacgcagtttttccaatgagtgaattttttcattttgtgttttgcttaaaacggctccttcagggtagatgtcatactgcataacttttttggattcaaattatgaatgagaaattagttaacattctgctccacaaggtaagaaaaactgctctttggctctattttcaaaattacttctgagatgcatatagtctcaaaataacagctttagtaggcatatcacttcttgaaagccaaacatgagtgtaagacacttttatgaaacacggtggatccctaactggctttcaaattgacctttatagccttagacaacccttaggtatttacggagatgacttctttgattgtcataacaattagtggatgtgtccagttctctgtatctttgacttgatgctttatacatcatttcatttgttgcttctaagggaataagccatagaggcttctccaggtttaaaagaacagtaaagtacctggaaaaccaacatttttgaatgtatggacactggacatgagatatgtacaatgaaatcttaaaagaatctaagaatttgccctctttgccccactccacccagtaatttgacattactagtgccatgtataggacccaactgagtattagaatcagttttgactatgtctttgtatttcctaaatcttttaatgcataaaccgaattagggtccagttggcctgttaatggtaaatttacattttaaatgactcagtttgtttttcctgggcgagtttgcaatgtgataatcagattttttaaaactgattaatttgctttcttgtgtgggtgtactcacattttaaagtatgaaccacagttaactagtggtctcaggggtagtgaaacactcacttttttttttgtttgtttttttttgtttgttgaaatggcttagttgaagtatacttaaggtactgatcatgctgtgttagtaatttgggcggggaggggggtaactcagccatgttttgtgttggcataacaaaactgttaatgattgttgattacacttttaagtgaatttgtcttttatgaggaacccagtgcaagtcactaaatattgtctaatagtgacatctgcata

SEQ ID NO: 112446 - DNA, 1740 bp, Homo sapiens
accatatatggtgactggcacatagcaggcactcaaagtgaatgcgatctatgttccttaatgcttgacatcttatacatcagtatgttgaactggttaaggtaaaaactagagctgatgactcacttagtactaaagagattttggcattgtatttaactagtactcttgggaatatggtttcttgcttacaagttcaaggagacatttagtggagcacttgagggtttttctcagaaattgccaagacaacggctaagaatggatttttcatcatgcctaatggctatgaatatggcatgagtgttacctgcatattcttgctaaagtccccccccccccagccactgagtaccaagaaactcaagttctaatatcatttatgcctatttaaaatatatatattaatatggcatcagttgcctatcttagaaactatttttatggctagtctgcagtgaatttcatgccacaaaaccctgtttttagcacttcttacttaccaggagcttgtcttctgtgaaacaaaatctctgtaaaactgtgtctcattgagataaagatacaaactaataaaagtcttttgaggattgagttttgtaatacacggtttagaaaaatttatttatccaaactcctgaaactgggtaacagatgtttttgttttcttgcagttcttttatccatttgttcactgctatgtgatccaaacccagatgaccccctagtgccagagattgcacggatctataaaacagacagagataagtaagtatgttaaaaagttattataaaagtggttttacttaatgagttaggcttatactttgcttgtgacagtgccaagaagacttgatatttagtaagataatagttaaaatatggagaaagctattgaaatgtggttatttaaaaaaacttaactaggctttagcttatgtgacagtgaatgctcccctctaaaatgttttattgttgttttttttttcctagcgtgttaaacagtatcactttattctcaacttttggggaagaaagcaaatttttctttaccccaagcatgtttttccaaaaatgttagtactattgtaaaaatttggtctaaatttctcaaatatttgaattatatttatgttcaacttaaccattataactttcatatgttataattaatgctaagtgtacttgttcaattaggtacaataggttagcaagagagtggacagagaaatacgctatgttgtagggtaagaggatctgcactctatggtgcgcttattatggtactgccagcacttgagtgctgcatgcgttaaggcactgtattaactaacaaaaggtaacaaatatggcagtcttctgaaaactgtacatttaactgcttggtctctgtttaacgtgaaagtaaatatctggtagccgttattgcttgaaagtactgcatggcaaagcagttacaatagcactagtaagaaatgggaatttatgtagtatcttttttttttttcaaactatcatggtgtttaaattttagcttgagactttgtaccaatcctatacagaatgtggtggtttagttcaaattttgccgggagatagtaatgtaagggaaaaacacttttaagcctaagcatctaaactaaatgttcattactgacaagcatgcattagcgtcagctgtactttgtggctccctgtatgctaaataaagcctttgttttaaagtgctggctttttgag

SEQ ID NO: 112447 - DNA, 1050 bp, Homo sapiens
agaccatgtggaagcttccgccctcatctgtattattgttacacagattctgatttttgggcttttgttgtcttgtaagcatcaaatgtccaacttcaatttatatttgcacgtattgttacagcatatgcttattatgcttatagttttgtatacgtaagtgtaaatttgtgaaaacttagagttgcttagtgcactggtttataggtattaaaagcatattatccttcacttttcagtcattaacataaattcaacctgtatgaataactagaaaaggtaatatacaaaggtcataaacatgtcactataacaatctctagtaatgttataggtgcaatgtgatggtttccatttttgtgattcaagtttatgttttatgtacggtggaaatgcagactcaggtgtacctgtgtaacttaatgaaactttaaatgagatggtctacaaattttggttacatccaaaagttagggcttttataaatgaatgtgttaaatacctttaaattgccctttgattcatgatatggtagggccacagtaacctttagaactttacatcatatgagtaatgaaatttttatccaaaagtttaggtttctgttgtaaaaagaggaggcagggggttgtggtcagattgtaaaaatcagtttctataatatttagaacttctatgctaatagatgacatttttaacattgtggcttgattattttaagttttgctttaaaagatgtttgtttttatttgaataaaatacttaaaagtttttgttttaggttgcatttacaacaagaatttatcatccaaatattaacagtaatggcagcatttgtctcgatattctaagatcacagtggtcgcctgctttaacaatttctaaaggtaaatatttctagtgaaataagctgttctcattgtctaataaagcttcattcttagatctacttatctgagtatttttattatggcagctttttggtaagagatggggaagcaataaagttacttttataatttttgttcttttagtggtgttgattaaaga

SEQ ID NO: 112448 - DNA, 1817 bp, Homo sapiens
aatgttgagctctctctggtctaagctcttaaactatgagaatatctaattatagctatttcggtttgtaagagattggcttttatgtaaataaaaaattttgtatcaatgtgtttgcatatatatttttacgaactctagctaagatgattgtctcagcatatgttcaggcatgttctctctcctaatggaatatattatttatgtgaattgtgatggagtgtgcctttaaaaatagggtgaaagtaactgaaagcagtggactcatttgcttgttttcttaaattaagcttatgtgactcacccattttctgtcttggtgtaggaacttagtgatttggcccgtgaccctccagcacaatgttctgcaggtccagttggggatgatagtaagtaacttgcaagttgatttttatgcctaatttttttttaagcttgtgcatttttagataaccagagttttttttctttttctagtgtttcattggcaagccacaattatgggacctgtaagtattaagaatttttaaatttagttttaagtgaaaatccagcattgatttggttgtaatttttaacttggtctgtaggtttattttatcatatagttaattctattttggatattccatagttgtactgcatttgaaagaaaaaacataatgagttagtcatttgttacgtgtactttgtgtctatccctgtgttcacgttctagagtatagccatctctatgacctaccaaacatctctgtatctcagttcagtttttctacatagcactgtgtaaagcattgtcatggaacttcctgttatttatagagacaaagttactggctctgatatgccatgcgttgtgttactcagagatcttattctgttactgcagctgccaataatctagcttaattgtattttgatatttgattctttatagaacttcagtttatgcaaaatttgaatatatttaggcagaaagtgatattttgaatatagcaaaattcctttctatcctgggtagataagcaactatatgctggataattgaatattcagaattatggataccatctaagaatttcagagaattagagcgcactaaaacatcctggggtaagactgtatcttacacaaatatttaactttttttttttttttaacttgctaaggcgcttaaggatttgttttctaagttacatgtgtatcttcctgaaaactgtcttccctttttggtggttttataagcaacataaagagcaataatgtactaggtgagataatggtcagtaagtaatatttagaattctaaaggaaaaaatgctcttagagttagtagatgagtcgaatcaacaagtatttatttagtaattctgattctaactttagtcatttttctgtctcaaatgtgagtacatactgtgtgccaggtaataaggatacaaattgaacataataaacatccctgtcgatcttatagggaacttacactgtattagaggagacagatacctaaaacaagtgctgaagtgtgacaagatggaaaataagtgattggtgaatgaagtgctgagtaggataaattaatgggaaattgaagcagggaggattaatttagagtaattaaaatgttagtgccctaaaggtagaaaaactaaatcaaagtaagacatggcaggggtgcaaatattaagtttaatactttgaaacgtcctggatcattttaaaacaaagtaacatttaaaacagtaaaaatagtcctgtaataacgaaatgcacaatcctggctttgtagttattaaaagtacttacttttatct

SEQ ID NO: 112449 - DNA, 1160 bp, Homo sapiens
aaattctgtggttagtcatgtccaaataattggttaatgatggctgacccaggactacagtcacatgatttggagtaagggaaaaggaattcatgagtaagatggtttattgagtagacaaaatgtctgctagctacaaagagcatctgctatgacttactcttttctcacttttttttcctacgatactgtcttgctcattctgtgggcatataatgttacaaaaattatttggtagctcaaaggtaagtgcttgtgcatggttttgttactattgggtactaagtggtactttaaatagtaatattagatactatttaaatggcaagaaagaaagtggtgaaataagaacagcatttttatctttaaaaaagacctttgttttgattgttaaaatacttaggtcatttttctatattgaatttaaagtaggtaagtgtattgggctgattttatctctttgattattactaaagagatgtcttggtgatggagaacttcgaaagtaaggcatttagaaatgttaggagagtaacaagaacctgaaattacaggagtgaagagctgaaacccagtgttaactagctgaaattataccttcactctaaaaggatgataatgctagcatttaaaggcttagtgatggataaatatcagtgtgccgaaaactcatttattctataagaaatactttcttactttctttgtaattgaaatgtgtaatgttgaagtagtatggtgtttatattctaggtcaacttcatagttttctgacctttagttttatttataatgaagtattccaacattattgggtattgtgtttagaacaaccatgattacattgatttttattttaaaattaaaatattttatcttaatatttattctggccaggcacggtggctcacgcctgtaatcccagcactttgggaggccaaggtgatcacctgaggtcaggagtttgagaccagtgtggccaacatggtgaaaccccgtctctactaaaaatacaaaaaattagccgggtgtggtggcgcacatctctagttccagttactcggaaggctgaggcaggagaatcacttgaacccaggaggcagaggttgcagtgagccaagattgtgccattgtactccaccatgggcgacaagagtgaa

SEQ ID NO: 112450 - DNA, 1973 bp, Homo sapiens
taaacaggaagttaataccttgtcagtgatgcagtgagatactgtgcagtgcctactgttaaaccttaagataaaaaaggatttctcagaagaaatttcaaattaaaatgtgttttaaagggactatttggagttttgtgaaattgttcatatctttttgccaagcatccttctcttgaaataaccatgtttctgaagtttgttgttccctgccttgatattcgcatctacatattttatacagacatttcataacattaaagttaataaaactttatagtaaaccagatctttatatgaacagttacagtagttactgtctgcctgatggacagctaattgcactgcacttcgacctctattgttggttcgcacctttgtatttttctaggttggttgtaaagtcttcttgaggatgattcttaaaatttcttaaggcacttactccctttgtttcccacctcattttatcatctcttccagtccccaaagcagtgttttgtgttgctcagtataggtttttgaggcaagggctgtttttataatgctgattcacagtcatacaaatcttgtcttttgagtcatgtaaatcttgtctttagttctgaaagaaatagactctcaaatagaatacaagaaattaacctttagtaatggcataagcttttagttttccggaaagtgctgagaggaaatgtatctatactactgcgttctgtcctctgtatgacctttgtgtgatgacgtgcaaaatagatggtagagattgggataacaaatgatttgtggaacatcgtggtgataattttactgtcttaaaggtagaatccatgaacttggccttgccactatataggcttttgaattttgacaagccttggggggatgaaacctagaataagttatttatggcgttacgctttaatagggttgacacttaaaaccttgttttcataaatgctaccttttggttatgttgatctgatgaacagatactggctgtcattgaaagaaagttaaccgaatgttcagatacttattgggctcctggaacatggctgctctgtagcttcatgaatattcataatattcataaatatttgtgaataaatatttttagtatttccaatttataagctctttgaaaggagggaatttttttttttttttttgaggcggagtcttggtcagctgcccaggctagagtgcagtggcgcaactgcggcttactgcaaccaccgtctcctgggttcaagcaattctcctgtctcagcctctcgagtagctgggattacaggcacccgccatcatgcccggctaatttttatattttagtagagatgggatttcacgatgttggccaggctggtcttgaattcctgacctcaggtgatccgcctgccttggcttcccaaagtgctaggattacaagcgtgagccaccacgcccagcaagggaggggacattcttatgtttctcctagcatcctttcaggtctttaatgttttcaataccttggcctactgttctttgtagcctgtggttggtcaccactgctagtaccacttatcattgaatgaggaagatagagaatagagaagcagaaagcatagtttaacatctccaacaatcaactgttaaatcccatatcccatagtgactacagtaaaggtcttcctcaagataaaccatttgcaggctttgtattaaaaatctcatgtaaggaatgtttcagaataaaaaaaaaaatagtgaccaaacccattactgcttaaatcatgtacttccagatgagaacactcaccagtggcttaagctgtacctgttggttgccttttagagagatttttttggtgaaaaaaatcctgccctattttctaccatggtgcccaccaggtcttcaggaaataggcaaacaactcagttgtgtaaagtctgttgctgtctcaaatttctttgtagtgttttaacta

SEQ ID NO: 112451 - DNA, 6737 bp, Homo sapiens
tgagccccgtagggccggggaggcaccagctgccgcgcggggaggaggccgaggccgcagcttgagggaggccccggcccctctgtacgcgtgggtgtggacggctagggcagggaagggaggccggcccagtggccggccgggtaagaggggcagtgcgggacctgggcggcttgagcggccagcctattgggtgcggtgggttagggtgggaaggttggggaagccgcggcctctcctgctggaggaggagggggaatgggcgcgtcctcgcgcctaagccggagcctcagggacagcgcgggcgcgtggtggaggtggctgggcgggcgcgcgcgggagcgcgctggaaggcggagtgagtgtacggtggcgtcaggggtgacacagaatagctcgctgcgaggatagcaatacacatcaagtctcccttcctttatttccttccttttcccggccgcacctttggacagaaaccgaaagcagcccggcgtccgtccggagtcttatgcttccccctccccccttgcctttctttgccctagtgacgccggtatagcgccgactaggccccggctcctcctctgctgggctccggaccctgccccgcacccacccctttctcctacgcctcttcctctcccacccgggtctcttcctttctagaggccgggaagttaaacttgtagccaccacctccgctcttcccgtcaccctcgcccccacttcgggccgaaagcacggtacagaggctgttggtggctttgccacgccaccccacccaccccggatcgcggctgtcttaagggacctggattcatcaggggctcttcggggcctgtgcgagtgctgatctgctccgtttttgcaaaaggcgcctgtgtctggcagagctggtgtgagacgagacaatcctgccccgccgccgggataatcaagagttttggccggacctttgagcatacaccgagagagtgaggagccagacgacaagcacacactatggcgctgaaacggattaataaggtaacccgcggggacaagggcatggggtggtaggagaaaaggaaggctcgggccaagaggaaagcgtgggggtgggaaggaagcataattctgaaaatacctcttggatcacttcttccatggggggatggagaacgcagatatacttcttgaagaaatgaagtttaaagctaggaaacggagaacacttgtggcaagtgaggtgttatcctgagtgcttcagtggaatcggtgcaaattaggggtggaggagagtgacttaaggcgcctttattattttatttttttgctgcttaagaaggagtttttttgggggtccgaattgcggagagacgctccagcagatgtcatggcgcttcctattcttggtgcttgaaaacttagtttagttgtgagatcaaggttatctaggccttctaggggtaagaaagaaaactcggaggagagaaaaaaaatctggcgagtcccgaacttgactgagggtcgggtagaagaagtcttgcgtattgaaggtcagtcagtgagtctagtagaaactcttagtcgactctgggcaggttacaccgaataagtgggtttgggaggagatggaatgacacagtgttgccacttcctgtattttgtagttgcagcttttcacccgaagctatttatccgagggacaccgggaactgatgtaaaaggcattctggaagctcccttttccttttggctggagagtgggggtggataaggggtgcgatggcagtaagggaaagctaatgtacctatttttgcctcattctatttaataacacccttgtttcgttacttgaaatgtggtttgatagtatattatcgatttaagttgaaaaaaaactaggatttttcggagctctgggagtgagcggaacctccacctccggtggtttagtctcattttcttgctctaacttctatcccgcattttaagatggcggctgctttaactggttcaggctctttccggcatctcctttcgtaataatgtgaattaatatgatttgttaaatgttaacttttatatcgcgttgtgcactgctctaagatcctctgctcaaaacttacctaaattcaaactcttaaactgtatttcccttttttgtgacttgtatttgtgtgatgtgtttggttgttgcacaatcgaagagggtggagtgtttacagctaacttgaaaaaaatgtcatggaataaattcagccttactagaaaaattgtggagtgtcggtgagtgttagaaactttggttttaatagattacttttttaaaaagagttctgagaggaatggcaagaatttgcctttactaaaatagacctgatactacatttgcctgtatttaattatgactggagtttatttggcaagattggtgtttcatgaaagaggaaggtttaaatcttcactcttagtatgtattgatatgaaatcgtgaattttgttttgggccttcataacatcgtcattttgggttatgcgaaatacaaatttaaatctttgtgaaatgaaagaaaagaggaagaaacgctttttaggagttaaggattaaagtaaaaattattttgaaataattacctctttttgtgaccactttaaaggccaggaacatattggagaagcctagttgtatgttacagtgtggtttacacaaagagcataacattcagtacaaataaaaatcttttctgttggaattagttcaggccactaaaatgtggaatagtaccagatccatagctttttgtgcatgtggaacagaacacgttaaaggaaggcctctgattttttttctcttacaggtcatacccagctgctgtgacaccacttaaatgatttaaaagctttagagagacaatataacagtggttaagagtgtaaacattggagcagaaatgctccagttagaattctagctctgggcaagtttatgtgcctctataagaagggtatctgttgtaatatgaacaataaatgactgtgtgcctaatatgtaccaggcactgttttagacattggggtggcagcagtgaacaaaacaaattttaagttcctagatttgttttgacgattaaatggattaatgtgcaaatttgaacaggctcttggcacatgacactcctagttattactgctattttaatatcacaatttataatttttaaaaatcgtttttgtttaagaactttgatttctagtttagtactcttagttaaccaggttgtctccttttgtaaatattttgaagatttatgtaatatagacacaacataaaaacttggcatattggaaaaaccagtgtttatgtgaacattattgattcaacttacagaaactttgacgtgtgcatgtggtttggtttttcagctgttaatgttaaaatcacatgaggcaactttcaaacattccacatccaacaattttagtgagtggacagctctgaactggaatgctcttcggtttaggcacctcttctagaaatatggggtcaagtagccattgatgtcagtatggtatgcttgtgttacgtacctatttcgaatttattcttgtctgaaggtcccacatttcaagtattatgatatatctgtattcctcgttaatattttactgaaatgattattggaatagttttaacctttagtccatttgatcgagcttttgaatttatactttgcttcagctgtgttcttggagtaagttttttgactgttagaccaatcaacttttttcctgtattctttatttgaacgagctgtaatatggtcttaaatagggctattaaacaacaggagttaaaagtggcactccaagttgattggtattgagagctgtagacaattttaccactcccattaaacagggactacaatatatgtgttttagggacgtttgaagataaatatgtgaaccaagcctaaaagaatagctcatgttttcattgtatacaccctgttaagttttcgtaagggtttttatttctggaagtatgactttagtgtttatatatgattataagcaagcggctagcagggaaaccatgggtaaagggttaaaaaactctcatttgatcttcgtttccctcctaccaccacttccactgagataatttcaagattatctccatctcgaaattgaaaaacttaggcatagaggttaagaagatgacccaggttcatgttgtgacagttgggattagaacctaggcagcctggtccagagtatgtgctcttaacaactacagtttgatatcatcctttagtttttttttgtcattcagaacggtttacttttgcatatagtattatctattacagtagttaagacaatgcagtctcatctaaaccctaactcatttaatcctcaagacaaccatgtgggatagatgtgagaattttatagatgaagtaacaggctcagagaaatagtcgtctagtcacacaactagtaagtgactgggattcaaatcagataggcaccaaaagctcaagctcttttttgaaccatttcaattcctttttttgttgttgttggagacggagtctcactgtgttacccaggctggagtgcagtggcgcgatctcagctcactgcaagctctgccttctgggttcacgccattctcctgcctcagcctcctgagtagctgggactacaggcgcccaccaccacccccggctaatttttttgtttttttagtagaggcagggtttcaccgtgttaaccaggatggtcttgatctcctgacctcgtgatccacccgcctcagcctcccaaagtgctgggattacaggcgtgagccaccacgtggcctggcccttcaattcctgttttataatgtatgtgattttagtttgttacctgaaataagctgctttgctctcccacttatacatctaagtaattgggagttagctttactcttaggttatagctaatttgtgagttaagattttggctaataatattttgaaagtagaagtggatttaattcttttggggtagtctcttcaagcactgaaaactaacatgtgccagttaactgcttaggatgtcttagagtgaacaaaatatatttattgtccccaactagtatataggctgggtaaactgtcttgcatgtgtttcatatatggtcctcaaagcttgttgatagccagctcactttctgtgtaggatagttgtgactgaaggatgctgataataataggacctcagtatttgtttaatttgaaaaaggatgcattactgacactgcatacttttctttcatcatgctcatctgcagtgttgattctagtttttgttatttatacaaataaaaagttgaatgctccatcactgggatgaactactgtgtcactagattgctctgtcaaactttgcccctgagtttaggtgaccctttttatccaagacaggcaatctttgaggattctccacagcatgttgctataatctatctattaaaaaagaaactaggttcgtaacactgagataaaaaaatgtttcagattaaaatctcaaacctaggttggtttttgcattctttttttaaatagcagttttcttgtatctgttagcgtatagaagagcttactgaatattatatattgttgggtgtgacatgaattacatttatattccagaacatttggagtttttaaaaaaattttgtgggtacatagttggtgtatatatttatgggttgcatgaaatattttgatacaggtatgcaatgcataatcacatcagggtaaatggggtatatacctcgagcatttatcctttgtgttacaatccagttatacttgtttacttatttttaaatgtcagattgtttagaatttaaaaaaaaaaatacagctgcatgggggtcttagacttactaaatcattttccctggaaacacataattttgaaaattttctaggtgattctgaagctcctctctgattaagaaccacagatacaagggagtaaaggtcctaatctgcattagacgtagtattctagtcccagggaataaatgaggaagatggtccttatctatggtaatctctgcgttcagtggtgaaaataagcatgtaaacacatgaatagttgtttgtcactttgtaatttacctttcaagaatattagatctagtaggggaggtatttaaaataaattttctatactgtattttttgtactagtattattacaatgtgatttgtcttttattataatgacttaattccccttgccaaaaccagtattttgaaattaatgaaataaaactctccattcttggaaatgttgtggtcttgagcttgctaccatagcagtgttatttcataattaaaaatgaatgcattcaccaaatatcttactgcccagtttctcttattagataagatttattcagaattgtatcctcaaccttgttatgtagggaagggaaaagtttagggaagtatttttatactttgttgaaacatctgatttttatctcctaatgatactttcaacataatctattgtaaaagagaccttcaacttttcatagctgaatttgtcgtatttaaatgtttgtcaattgtgaatcatgatttcttgtacctttttcagtatgaaatacttacattaatcctaaccttgctgtaatttcatggctaatgtgtaattgaatgttttctactactgggcagctg

SEQ ID NO: 112452 - DNA, 1480 bp, Homo sapiens
aagagcagttttgtgcgcttttcctgacggggttccgcctccaaaatgcataagttctcgcgagacgcagtaaggcaccggctcgaactggggcgggccactgccaggaaagcaacgcccctgaatgcttatgccggtggttggtagaggaaatggaattccccagactggtaagagcgcgcgcagacacagccttgtctcacgcgcccaatcaggagcgtgtggtgggaggtgccaaggattaattaccagatacctttagtctagctcgggccgggattttgaggtttccggtggagcaggtgagcagtatttactcgcctgccctcctgggctggttatgctgtgggaggaggcgcccctcgagatgggaatagtagttttaaatagacccaggttggccgctcatcagcgctcccacgtgctgaagtctagtgcacgtctgaccctaagggagcaatactgagaacagcagggagcaggctgagtcaagctcaattgagtggatggggctaggacagagagagttaggggcagggttttcactggtctccgtaatcagtcgctgccgtccgccaaggtgtagatgtgggaacaagcttaaattctcaaactttagcttctgttgctgtgtttcagttcttgagccagaaagtgttgagactaattagttaattaggtagagtttagagtcagaaaaacaatacaatacttcctgaaatatccaagttgggaggtgggatttacctcagtaggattggcctgttttagtcaagggtttaaagtatggagacggcagttatgctctctagtgtatccttcaggcaaaagaaagaccttaatttttatgaggaatttaaaagtgggtaagcactgaccagcttaaggttttttaacattccttaatgaccccagttaccgaagtggagatcttcaattacttggaaaaataaacttgttttaaaaatacacttaatttgaaaactgttgcagaaagttttacctaataaaaacttaacacgtcaacaatgatgaatataagtagtctaatgtatactgttcaagtgaccatgtagtgtcactagtgaagcagtgcttctcaaactagtgtccataggaaccacctggggttttgttgaaaatgcgactttgatttggtagggcagtggtggagcctgagagcctacatttctaactagctcccaggtgatacagatttttctcgtctgaaccaccccgtgagtagcaaagcactgaagtgcttacctcatggcctaactgctcatgaggctcacctcagtaacacctctggcccctccctcctccctgaataatctgtgttctctctcatagctagccagatatactaaaagcacaggactaggcatgaagatggagggaggaacccagattagttattgcttcccatttgcttgatattggcctggttagttatcttctaaccccgtttcttcaccgc

SEQ ID NO: 112453 - DNA, 1061 bp, Homo sapiens
tatatcgcccaggctggatagttgtttttattaatatctctaaaagatttgaagggtaagaggagaaaatttcactcccttgaaataactttcttgctatgactttgtttcatattttggctgaagtcaaaatgtccgaagttgtgcacttgctgattggataatgtgtgtgatatcttaataatatgcctcattatttacagttctacacttaacaacatataataacgaactgctaatggtccagtatttcattgtgtatgacagtgtaacagccagttataataaatactttccatttttccccttggtatttttattttacagtgagaaaaggaaggaattttttaaagcaatctttcattctctggactgtataaatttagtgtttgtgattgtccttcactaaaaaagaatatcagtaatagagttgaccaaaatctagattaaataattttctatcattataattgttcaaaattgttaaagtaaaacttacaatggaaattctacaaacacgtttagatacaggttcatgtttttgagctagggcagtatagaagatggtgtatacaaagtgatgtttaaaaggttgatgggatttcctttagagagagtttggaggtaaaccctggagcttttttatcctgaagatgatggaacttgaatatccttgtcctctggactattctgttaactgttatctttaatctctgtggatctaatgtagaagcacccttgggtacaactagataccctagttgaggtaggggtaggttggaagtggggtacattaggaaaagaaaatctggaaaaggccattacctattcgtttcttctcttagaggatctgtcatcttgacaagggcaagacgtgctgtgttgagtttaatttttccccttggtattttaaagtgagaaaaggaaagaatttttttaaagcaactttacattctctggactgtataaatttaatgtttgtgattgttgtgcattaagaataagacctccaagcagtttttctttaaagaattaaaaaatacatacctcaatttaaagat

SEQ ID NO: 112454 - DNA, 1035 bp, Homo sapiens
cattacttttgtatttctgtaatttccatccaaatttagctgtaacatattgaccaaagagatattcaaatattttttaagaattcattggatatgttatatgaaactggagattttatgggtctcttttcttcttcacttatagtaatactttaaccatattactgatactagtatcagagatatggcagaagatgaaacgtgactaattgcaaattttgttacttggtagtaagtctgctaaaatatatggtgagaaagaaaatcaaaattttagacatttaatataacatttaaagacataatatcagagggtcaaaaatatataatagataatgtcaaatcttatattatatatttaatataaactaatttctaaatatctatctaattctagaaaaaacttacattgaagagaggattccttgttttgactatgtgtgtttctgccgtcttaggcagccaacgtattggtttacatggatctggaggattatgcacactagtgttgagtttcattgcagggacaaaatggtcccaagaaaaggtgaatatttttaatatgctatattttaaaagctaaaacaactgaattttttacatatatttaggaaatcccctcattctggttggaaaatgttccaaaaggttttctgtcctcaagaaagtgtatgaatcaatcgaggaaagaaaatatttaggaaaagcacctggaaatatactaatatggaatcagaagttgagttaatcacatcaggcttctctttttcccaagttttatataatattattatattacctttatcaatctaattattttattcattgaaattttaattatacaattaatccatgaaaaatgtttgtaaaaggccggggacggtggctcatgcctgtaatcccagaactttgggaggtggaggcggacagatcgcgtggggtcaggagtttgagaccagtgtggccaacatggtgaaaccccatctctactaaaaatacaaaaattagctgggcatggtggtgtggtggtgggca

SEQ ID NO: 112455 - DNA, 1585 bp, Homo sapiens
taaaattggttttgttatataccattttactcaaagttgccatttccaataacctattgatgatgttaagtgagaacttactgtattcaaatatatctaaatattcagtacagtgggccaggcacggtggctcatgcccataatcccagcactttgggaggccaaggcaggaggaccacctgagcccaggagttcaaaaccagcctgggcaatatagcagaccttgtctttacaaaatattaaaaatttttctgggtctcagctactcaggaggctaaggcaagaggatcacttgagctcaggaggttaagcctacagtgagccatgtttgcatcactgcactcaccttggacaacagaatgagaccctgtcctcaaaaataaatatatattcagtacactgtcagtagagataatctctacatcttatctctgctgtcccttctgtatccacaattttcttacagcaccttctaagtatttattgaatcattttcctcctctccaaactttctcttttgctctagcttaggctatttgtttccaacttttgcgtggactgtggcagagccttcaatttggtctctgtctccagttttatcccaaactaattcaccaagaccctcacataaaaaacgcaagactcattatgttacttcctgcctaaaaccttcccatggtgccttactttgccaaagtggggggagacctttctatgatctggcccacccaagctcattctcctccctcctttccttgccctgtatgttccagcaacactaacttacttgttgaaccccatttaggtgtattgtttcttatcgccattcctttattcatgctgccttctctacttgcttgtaacctgccctttaccaaaataatgagagacatagtgcattagaaaagaaagtaaacatttccgttttctttctcagaaaaatgaactgtcatgtatctttattttctttcttttaagggatgttactggctggttttacgattaggaatgttccattcatcaatgaacatgtccatgttcctaacacatggtcttcaattttaagaagcattgcccttaccattattctaataagagctgggcttggactcgatccacaggtagatttacaattacaaatcgagtaaggttatttcaaatattagaggacggtgagaaagaaaaagaagcaaaaattttattttcctgttccaaatagagtctgtaaacaaacctaagataaagaaaaaaaggccgggcatggcggctcatgcctgtaatctacaaaaattagccgggctggtggcatttacctagtaatcccagctactcgggaggctgaggcaagagaattgcttgaacctgagagacggaggttgcagtgagctgagatagtgccactgcactccagcctgggggacagagcgagactccgtctcaaaaaacaaaacaaaacaaacaaacagaagaaaaaaacagaagaaaaaaagactgtatagaaatattggcaccctaatttctatgtctagccatcattatcactgatatgaagagaattgactgtgttgtaaggtctttattagcg

SEQ ID NO: 112456 - DNA, 1086 bp, Homo sapiens
ggcacgcaccaccacgcctggctaatttttgtatttttagtagagacgggatttcactgtgttggccaggctggcctcaaactcctgaacctcatgtgatccagcctgcctcagcctcccaaagtgctgggattaaggtgtgagccactgcacctggcccacatataggttttaaatatttttaaagtaaaaacactttgtttgaaacctacttcataaattgacaggttatttggaatatatgttaagcagatatctctttcaccaaactagtaagcaatgttgatctataccatgtatcattttataaaactggctattagtatatatgataaaagagaattgatcctttgtttgtatacatctatgtgtatgtagatatatagctgtacacttttttgtatttcaggagttatactgtttgtgatatggtgtatgacctggtcaatcttaggctctgaagctctccctggtggaaatttatttgggttgttcattattttttatagtgccattattgggggaaaaattttacaactcattagaatacctttagtgcctccacttccacctcttcttggtaagtatataattagctctcttttctttattattgactatatgcaaatgttgaacattttcttgttgaattagttataattcagaaatatttcaatgtagtatgttttatatagtttcttcatgtatgtatttactgtatgtgtgtgtgtgtgtacagctcctttatagatgcatttatttctctgtctacatatatacacacaagttttatccaaaatttatttttaaaataaatttaatatccttagtacattattcctgttgctttattgtttaatagaatctttaaaaattttagattcacggggtacatatgcaggtttggtacatggatatattgcataatggtgacatttgggctctagtgaacccatcaccaaatagtgaatactatacccaataggtaatttttcaaccttaaccctccaaccctctctccttttggactccccagtgtctattatttccatctttaggtccatatgtacccattgtttagtgccc

SEQ ID NO: 112457 - DNA, 1080 bp, Homo sapiens
gcccaaactgtaggcacctttattcagtatacacaaatgattgaaaatagtggggacccaagtctataaaaggttcaatcaaggtaccttgcaaaatacactgctgttacatccccaaacagctactgatatggagcatgaatcttcttttgtatctgtgattcctcgcattgacagtaataatataaatttaattctaaaatttggtggtttatttcattcataaaattatacagaaagtatggttccttaaagattttcttgttttactacagagtctcattgatcctaataatactgcacaggaagaaactaaaactgtcttatcagatacagaagaaataaaaccacagacaaaaaaggagacatacatttcttgtcctctaagaggagtattgaatgtaattattacaaatggtatgtgaaacaaaaaatgtaaatgaagagaagatgagaaatatgtttgataaatattaaaacatgagacaacaaagacactacttaatcaatatactccagatcagatgatcagctttgttacaagcaatatgtgaacaaagaggaaatattttcttgaatctttcaaagataaaaacaaaaacaaaatattgcctaggaggtgtatgttttaatatttgtcatacttttttatgttaaatttttgggattagaaacatcattgattaaaggattttatttaaaacctactttgacatttagttttaagttagctagaaagaacattataattttggaaataattatgtttcttattaaaattgggccctaagttttaaaacagcagcaaccttgtaaaaagttgtataacacttgctttcccactacaattttaaagcatagtgttgttgtcagcaaatacttataaagagattttcttgtgtatgtttttctaaatattctgtttgattaaacctatgagagaaagagattttggcttccagaagtatatagaattttgttccctatagagaacaaaaaattgattaaaaatgatgaagcacaagtaattgaagttttaaatttttattttcttatttgctgcttgctaactttaaactt

SEQ ID NO: 112458 - DNA, 1061 bp, Homo sapiens
atgttggacctacagatccttcaaatgggccacataaaaagatagtatgtatcagtaacttatagatgtaggtattaatgtagttggtcatatttcatttaaaatttttctggagtgttttatgtaagagcatgacagaagatagattaaatcaacagtggatattaactcaaacacaccagttcagtgcataaaataaatttctgcattttctgatacatgattctatgatatgggccagcattatgaactgttgagaaatattacatttctgtatgataatggtttttaaaacttatgcatatggctttggttaataatgttaaagatgaatatttggatctatgttgactataaagatatctgacttgactgtgatacaactttagaacaaaaaatcctttaaaaaattaatcccacttaaccatgtttgttttcatatggatttatagtcttgtttcttcttttaaagtatttttcttttaaatcttagcatgcataccacagaatcaaaaaatgaacatttggaggatgaaaacttccaaacatctacaactcctcaggtaaaaacttaaaagtatactgtaatatatgatataaaatcaacctgatcttaaaatttattcctaatttacttattagataggtttcttttatatatctggttaaaaatgaaaagtggtaaattttaaaatagctagttgtaatgggtcctaggaaatgagcagaaataatgaaacaaatggaaaggtgtgactatagagcattttggagctaaagagcacagattttaggaataagaagaaatgtcgcttattatttctcaccacattcagggaaaactcagtaacttaaactaacagaggtaaagataagtctagattaattaaaatgttgtgctgtgtgttttgaagagacccaagttttttatttttatagatatatagagcaagtcgttagaccttttgttgatctagttttacttagtaataattgctcataattagaattgtaaatttcgtatttttttaaaatagagatttctacagttcttaagggtc

SEQ ID NO: 112459 - DNA, 1076 bp, Homo sapiens
aggtaattttatttagataagaagaatgattgccataataacaagagaccacagaaaccagttagtacatttttcttaggacagtctgtgaagaagtgctttatgtgtggagaaactttaatataattttctgcacaatgtgctaacaaaaaattttttttaattaaagtttcctaaatcctatatgctatgggggaaaatgtaggttccacttacatatttaagaatatggaaagcagaaactgtctttaaaatgtttcttctttgtaattagatgcttcatgttgatgattgtggaataaaacctgtgtatttgttggatttagagctctaagtttttttaatatatttttcaggctctactgtctttaatgtcctcagaggagttttggaggtggtaattggtgtggcaactggatctgttcttggatttttcattcagtactttccaagccgtgaccaggtgaaagaaataatatgtgggaaagttgtgctctgaaatatcattgggaaaacattctagaacacttccttcaaagacagatgtgaaggacatgtttgagcaaatggttcctcattttaaaattgcttactgctatccatgagatttatgaagtgggctcaatatagaagattttaatgcagtcctgtaatgggttcccgtattatattctgtacatttcaaattccactgtaaaacaaataatatcgttccaaagtaataggatatgcaagttttttaagtgttcataatactcaactaaacccagatatataatagcttttttgtgcccttttttagtatcaaaataccttagattctagccaggcctggtagtcccagccactcaggaggctgaggcaaaaggatccctctgggagtttgagtccagtctgggcaacacagcaagagcccatatctaatacatacatgcatacacacatacataaatcagtcaatcatcatctagtgccactttgttcagtacagtagccactagctacacgtggctatagcagatacagaacatttccatcatcactaaacattctattggaaaacactgctctagtac

SEQ ID NO: 112460 - DNA, 1031 bp, Homo sapiens
tattacctctcagtttaactatggtttgtctaatagttcattttaggacaaaatggggagtaaacttctccaactctgaggtgaaatacaccatcttcatgaccaaacacggtgaatcacgttgccatttttcattcttcacatctctcctgtcttaacctcctttccacttccagctgtgcttggtttttgtgtatttttgtaataggatgaatgttgttttcattttctttctcagaggtgcaaaatgcaggagcagagagtgtggattctcagccaggtccttggcacgcctcctcaggcaaggatgtgcctgagtgcaaaactcagtagactcctctttgtcacttctctggagatccagcattccttatttggaaatgactttgtttatgtgtctatccctggtaatgatgttgtagtgcagcttaatttcaattcagtctttactttgccactagagttgaaagataagggaacaggaaatgaatgcattgtggtaatttagaatggtgatagcaataccttcttcttgcatatggtaatacttttaaaagttgaattgttttatttatttgtatattttgtaaagaataaagttattgaaagaaatgtaaagttatctacatgacttagcatattccaaagcataatacatacattaatataaaacatcattttattaacaaaattgtaaatgtttttaataccttacacattcaataaatgtttagtagttctgaatcaccgctcttctatataatgttaatggtttcttggtgaggtagtctctcttgttgactcagtattttgctatgaaaatatacacaagttttctggatctggatttaaattcttaaaggatagcagaggctatgtcctcttaactttccagttctaatattccttttactgtaataaccacagaagttctttctcacatttctggtaacctacctatcccaatccctatacaaactctctaaattggttggtttattatagactttgtttttcattgcccctcactc

SEQ ID NO: 112461 - DNA, 1047 bp, Homo sapiens
ttacagtaagaaaggtacatcaaagattcatctatccaggagactaatttgtcaaattattgtggcaaagcatcaatagataagccactctggattatatcattgattcatttgaaaacctaatgttgtacttagagctttcttttcaagactccatgatcatggaaacttactatattattcaatttatatagatccattttgttttctgaactttgaaaatagtcaaaacaggaagcatgaggttgaaattaaaatgtaaatgtgataaaatgtacattttatgttatatatatttcatcacaatttatttttaatttttaaatataaatgtgaatacatcttaagaatcaagaagtcttacagtctctcttttcttcccccacatttaagcaataatcagcatctttccaatgaggtcaaaacttggaaggaaagaacccttaaaagagaggctcacaaacaagtaacttgtgagaattctccaaagtctcctaaagtgactggaacagcttctaaaaagaaacaaattacaccctctcaatgcaaggaacggaatttacaagatcctgtgccaaaggaatcaccaaaatcttgtttttttgatagccgatcaaagtctttaccatcacctcatccagttcgctattttgataactcaagtttaggcctttgtccaggtaagtaaatatactggttacttggaaatcagagggtaacagttggaacttatcattaatatgtgatcccaaagggcaagtttagataagagatgatttagttgagtaagctacaatgacaggcttcatttgctgactctgtaagaaagttgatttctccaaggcaccccacacagtgaagtgcaattcacttttaccccaagtgaagtctttagtctaccctttaagcctttagtttcgtccaaagagagacaagcaactttctcaaggacatgaagatactaccctaaaaagcaacttttactgaaaagtcttatcaattcaatggaccaaaatatccaatagcattatatttactttacccaag

SEQ ID NO: 112462 - DNA, 4575 bp, Homo sapiens
atgcgtaaactaacaactcataaaatgtctctttctactggagaacagtgatcagaatttgacctttgtagcaccttagaccagagctgcagtcagggtttgctttcctgaccatacagaaataaagctgcactttctctttcatgctccttataccttcaaatatttctaggaccccatggtaaaaaataattaggtaattataattttgttcaatatacaatgaattaggcctccagaagctttaaaagaactggggtttctcaatataagaaaatcggactgtccctgcacccaagcagaatgcttctagtttgatggcattaatgccataaggcacatggcaccagagaggtatcacgagggcttatctactgccacttacaggcattatgtcaatgtgatgtgttagaaaatccttcacagcagttctgtttattctcctgtaaaaaatcagttgctgagctttttacatatttttattgtttttgttagaatcagtgctacaaaagccactgtagaatatcaaaaggaagttataaggctattgagagaaaatctcagaagaagtcaacaggcccaagatacctcaggtaagtagaaaatgcagatattttcagatgaaattttacttctcaacacacaacagactttgaagactaatattatgtagtatgtgacagtcgagagtaaacagaagttggccactaatctatttttaaatgaatttattggaaccatatttccagatatcttgtgacatcgtttgttgtaatcttagatgcttatccattatagattcttgaaaaatacgaactctgcttttgtattgtcaaatctttacctattagtgaagataccttcaggcaataaaggaatgacttatactatatcaacatggaattatgcttcccaataaaacgaaacacatgtcttcgtagattttaattgtatgcatctaataagttataattggtgtacagtaaaaataaatactattctgtttgttcttgaaactaaaaataccaagttaatatttacttgcaaaggtctttgaaatttatctgagatactttttagatctgttggtcaaatttctcaatatacatgcattcctcaaactacctttattcatattctgtctgtcatgttccatttgaaaagaaagaatgcttgaacagtacttgagatagctttacgcagtagaacaagtactgaactaagatgcagatctcaatggctatatgaaatcgtggggttagcacctgaccttctaacttataagcatatatgtatgcttatatatatacttattataagtatatatacacttataagtatatatacacttattatacatatataagtatacataataaatatataagtatatatagtataagtgtataatatataagtaatatatctattacttctttattacttacatgagtaatatataagtaatataaaatatatattacttatatattatatattatatataagttatatattatatataatatatattataatatatataagtataacatatataagtaatatataagttatatattatatataagtaatatgtaagtaatatatataagtaatatataagtatatatagtaaatacttatataattagaagtattatacttataagtctatagaagtatatatacgagtatatgtacttatatactcatacatacttttttacaggagaataaacagaactgctgtgaaggattttctaatatatacatatatatgtatacacttatatatacttataagtatatatacacatatacttaaaagtatatatatacacttatatacttataagtatatatacacttatatacttataagtatatatacacttatatacttataagtatatatacacatatacttataagtatatatatacacttatatatacacttatatacttataagtatatatatacacttatatacttataagtatatatatacacttatatacttataagtatatatatacacttatatacttataagtatatatatacacttatatacttataagtatatatatacacttatatacttataagtatatatgtacacttatatacttataagtatatatgtacacttatatacttataagtatatatgtacacttatatacttataagtatatatatacacttatatacttataagtatatatatacacttatatacttataagtatatatatacacttatatacttataagtatatatatacacttatatacttataagtatatatatacacttatatacttataagtatatatatacacttatatatacttacaagtatatatgcagacttatatatacttataagtatatatccacttatatatacttacaagtatatatacagacttatatatacttataagtatgtatacatttataagtatatatacatacatacacatatatacttataagtgtatatatgtatatgtatatgtgtatatatacatgtatacataagtatacttagtatatataagtatatatgtatagatatgtatatataagtatatgtatgtataagtatataagtatatacatatatatgtaagtgtatatttgtgcgtgcacatgtatatatgtgtatatacttacatatatatacttatatataagtgtatatatatatacacttataagtatatagtacaagcaaatatcttatgttttgcttagtatttggaattttcaatatgcaatatatattatatataatacttatatatttacagaatatatagaattctgtatattatatgttacaggatacatataagtgtatacacatatatatgcatgtgcacacatatatatagttatgctcacacatatatatggacatggtatatgcacatattttttgcaggtagtaacacttcagtcatggggaaagtaatttttagagctcatgtaataagtgtcttttttaaaaaagtgtatatacatatacacttatttatatacatgcacacgcacacacacgtacataaagatcaaaccgaaagttgtgggtaaaaacacattgaaaattccaaatactaagcaaaacataagatgatatttgcttgtattatagtccacttgtttccaaaaatagatggtgctaaaggtgttaaggtgttacctagtacctgttgtagcttaaacttccctagtgtctgttacaggataaccacagcacctaccgagaaaacttaaaggggtaaaaatagaagtgaggattctttgtttcagaaggttgaggatatttattcttgatttgtagatgactttcaggtacatagtgtagatgaattcaaaataaaatagacatcaagaatcacccccaacacacacactatccctcttttgtgaattcccagtgacctaatggattaatccacttcataactatctcacattttgtgcaactttgcctacaatttacaaaacacagtctctttacacacatagtgtagaatatttaatatgtgctttaatattattgtaacatatatttagttaataatatgtattgaatacatataatgcactgaatgacggggtggccctcccaccctacctcacctccccgccacacacgcagtgtgttgtaacaagcccttcaggggaaaactgatgtagaaaatatagatcaataaaggacagcagtaagtggagaggattgctattgctgcagtcagggtgaaagagcttggtgatcaggatcaggatatgttagtggaattggttgagggggattctagaggcatagaattaatggttggtcaaataagcagagggagtaaggtagaaggcagaagtcaagggtgacttccagggaaataagacttgagctgtttgggtctctataatggcttattgtacttggtagtatttcctttattttgaactttggagacaattaaaattatcacctatttgtatattttcctcccacagtgatatcagaacatactgatcctcagccttcaaataaacccttaacttgtggaggtggcagcggcattgtacaaaacacaaaagctcttattttgaaaagtgaacatataaggctagaaaaagaaatttctaagttaaagcagcaaaatgaacagctaataaaacaaaagaatgaattgttaaggtaagatctgcttacatgatacggatattatgcttacggctattacatatatgtagggacatggtatatgcacgtattttttgcaggtggtaacacttcagtcattatggggaaagtaatttttagagctcaggtaataagtatcttttttaaaaaatgagaatatggtagcactattccaatgtttgctgtctatcaactgaccaattcttaaccaaggcaagaaataggaaagaaacaaagacctttgagggggcagctgaaatacaccacaagtccatatacccaagccagtgaggctttacttagagaggaactccttacgtccattattgtaggctttttactttataaa

SEQ ID NO: 112463 - DNA, 1032 bp, Homo sapiens
cctcaatatatgattttttttcttattaagttgagaacttttaccttctcacttacaagaagcacttgacagcttcacggtggcatatctaaattgccagcattactactcttgtgctttggggccattattaattaaaataagggttacttggacacaagtactgcaatacagcagcaatcggataatcagggtggctatcaagtgaacaagtagtgtatgctggacaagaggatgatttacatcccaggcaggactgagcaggatgactcaaaatttcactgtgctactcagaatgatgtgcaattcaaaacctgtgaattgtttatttctggaatttcccatttaatattttcagaccacttttgactgagggtaactgaaaccatggaaaataaaattgcaggtaagtggggactactataaatcgttttagagctataatggtattttactgttcaataggccataatgaatgaatcaacagagtttgaggaaagaagtgctaccatatccaaagagtgggaacaggacctgaaatcactgaaagagaaaaatgaaaaactatttaaaaactaccaaacattgaagacttccttggcatctggtgcccaggttaatcctaccacacaagacaataagaatcctcatgttacatcaagagctacacagttaaccacagaggtatataatttcttataaaatgttcttcagtttgcagcttcatcacagagtttagagcaaaattatagtatttacttattactgaacatgaacacatttatttttgtaagtgatgggcttgatttttactagtagttctactatggctatcgttcaactaaactaattataaagctagacattatgtaagatattattataaaacataaattgtagcttcatttgattattacattcataaactatagtttaagttactaccagttaacgtacaattaccacaaaagttttccaaattatgtgactttctgttgaactgtgatctatgtccgtatgcagaacaaatat

SEQ ID NO: 112464 - DNA, 1227 bp, Homo sapiens
aaaacagattgtaggcagatagtaggattgtgtgaagtatctgtaccaagctgacaaataggtggtttgattcttaatcacttgttttatctgctaactcagactgcctactataaacataaaccagcactcaaccatgaactacaatacatacttaattgaatttactcaaatttctcatcagactttgtcaatgttgattcatatcatggatattcaaaaaactaaaagaaaatgcatcaaaatgttaagaatggttggtcctggctttctttgttatatttgcttaaattttttaaattgccataataattatctattatttctgttatccaaaatgacaacaagagtttccttttgtttttagacacaaaggtctttatttctctcctacagaaaatgttaaagcataagttttgttacaattctagagttgtaactacttattgtgatattagaatgaattgttataaattgagtgaattctcatttcctttaggagcttttgaagagatactcagagatggatgatcattatgagtgcttgaatagattgtctcttgacttggagaaggaaattgaattccaaaaagagctttcaatgagagttaaagcaaacctctcacttccctatttacaaaccaaacacattgaaaaactttttactgcaaaccagagatgctccatggaattccacagaatcatgaagaaactgaaggtaccatcttttttagtaatatccttttaaatatttcagttataaacatcaatgtatttaagtcctgcttcaggtgccggcatatttgctatttagtattcttactaccaaattaaagattatgtgggtctgagcatagtaatatgtaggatatcagcaacacctgaactctgcctgtgggcctagacattatgtcaggatgttcaggaggcagatgtgagttaacatctcaaagatctcatagtctggggtgagacagacatataaacaagtattaagtgcaatgatagaagtgtatgcaagttatatgacgtactaaataaaattacagaagatgaaactgtagtagaagccagactcaataacaaagcttggagttctttttgtagatggggaatcattagactattgttttaagtggtggtggtaacaggatctgattaccacttaggtactaaactaaagaatacagaagaaatgagtttgagggagataagcctagtagcaga

SEQ ID NO: 112465 - DNA, 1558 bp, Homo sapiens
gctcttattggtgaagttaaaaggaaaaaagggaagataaatataaaaattaagttcctctggtatgactatttatagatattcagaatcatatatcttaaaatatctaattaaatcctctttttgaaagtaacagagttcagacaagtttattaaaatctgtaaaaatcttttttattctcatatttctttatgtgggcctgaactaaatttatagagagatttaattcattcatcaaatattcttctaggtactgtagtgaacaagataagtgggagaaaatgtttttgtttcactttatactttttaatcagaaatgcaaaatgtacacaggatatgaacttttccaaggtgctgggaagaatatatgactagggtttgaaacaccatagacagtacaggtggttttgccagtatatttggttggcgccaataaagtgcattaggataaaagcaagtgccactgttaaaactacaagtgaataatgcagagatttggaagagtaggaatcagaaattaaaatctaatttatttgttttcctggttgtttatttatttatttatttatttttatagagacagggtctcactatgttgctgaggctggttttgagctcctgagctcaagtgatcctcctgcctcgatctcctaaagtgctaggattacaggcgtgagctaccatgcctggccctaaaacctaatttgtagctatgaaaaacaaatcctgtctccaaaaattagatgatttttctacttttttaccaatgagttaaggtcactccctataaaacttactgatactattattcattttctgatcattttaacattgcttttgagtgacaagtataatatttaattccattattgaaatgtcatgtaatttagaagtgtgcgattagacattatatgtgaatatagtcatgacaaaagccctgtttattttctttttaccaaagcaggaccgacagaaccaccaagtaaaacctgaaaaaaggttactaagtgatggacaacagcaccttacggaaagcctgagagaaaagtgctctagaataaaagtaagtaccccctgttaaaactacaaatgattattggttgtcttccaaaggcttaccgaaacctgaagtgggattgaaggaacctctggaataaatagatagtgctcagtatttttctaaacattgtaatctagtacaggtgtgtgggtataatgcatatatacacacatacacaaacaacaatgggagcttgtgaatttaagtcctcaccagaaaagtgatacttgagcaaatacctgaacgaggtaaagggtcaggccatacagatgtctgaaaagaccattataggcaaagggaacagcgagtacaaagttcctgaggcagaagactctgtggtggttcaaggaatatcgaaaagagggcaagctgctaatgaatgagatcagagagttagcagggaagaggcaagctgtgggacatgaaaaaagactgagttttattaagtgaggtggagatccattggggaatttttaccgcaagagaaacataatctg

SEQ ID NO: 112466 - DNA, 2530 bp, Homo sapiens
cctacatatatactgttaaaggagtgtgtgtgtatatacaaacacaacgtatacatatgccacaggttatttattgtagtgattttaattaaaaatctgaaacaatctaaatgttcctcagaaggaaacagtaaatatgaacaatatatcgaaatactatgcaacacttaaaaaaagtaatatatgtgtaatgtgtttgcctctggaaagcagaagtagagtgtgaagagaggaggacagggaagagaaagcctgtaccttaaaaacaacagcaaagatatagagtaacagtgttattatttttactaagaaaatatatcactttattttttaaaaactaatattaagatatgtcactgtttttaaaatttctctaatggtaaaggatctgaaaatacaagaggaactaagaattgctcacatgcatctgaaagagcagcaggaaactattgacaaactcagaggaattgtttctgagaagacagataaactatcaaatatgcaaaaagatttagaaaattcaaatgctaaattacaagaaaaggtatttttatggggggattgtttgattggatatctaatttgtttgtgcctaaaattgttggggatataaaatggttcaaccacactggaaaacaccttggcagtatttactaatgctggatgtagcctgcctgaggcccaacatttccacttcttgggtatgtacataagagaaaagagtacgtacatacttctataaaaagacacaagaatgtttatagcagccttattcaaaataacaaaaaactgaaaactcaaatgtctatcagcaggaaaatggatacatacattgtgatatataggttcaaaagcaggcaaaactgaaccaggatgataaaggtcagaatagtggctgtctctaggaaggagcacacagaaactttatgaagtgctagaaatattctctgttttaatctgggttgtagtttcatagatttacacctgtgtcaagaataattaagttatacattgaagatgagcatgctttatatatattatacctcaaaagaaagtaaaattctgtgtggaattgtgcaggatatcagtgagagtaacatgggtagacagttgtcttaatcaatttagaaactattatttatctgtccctaaaaagccacctaacatattattttatgattatcttaagattcaagaacttaaggcaaatgaacatcaacttattacgttaaaaaaagatgtcaatgagacacagaaaaaagtgtctgaaatggagcaactaaagaaacaaataaaagaccaaagcttaactctgagtaaattagaaatagagaatttaaatttggctcagaaacttcatgaaaaccttgaagaaatgaaatctgtaatgaaagaaagagataatctaagaagagtagaggagacactcaaactggagagagaccaactcaaggaaagcctgcaagaaaccaaagctagagtgagttgtgttctctctttaccctaccattatattcacatatttgggcaaaaatacagtgttcactgcagcgttgtgtctggtgactaaaacctagaaataatctaagtgtccaccaataataaggcactatctgtataatggaaaactaagcataagaatggggtattctttttgtgatattgatttagaaagatgtccaagtggtatgaaaggagaaggctatgggtgaggctaccagcagaaaattttactttactcttctaatttaggaggttgtataatggttgtttttaactgtgagtgtataatttttaagattttgtttaaactcaatcattaagtaaaggtaacgtgcctttatatcattacatttcttgatttcttctaaccataaaggatctggaaatacaacaggaactaaaaactgctcgtatgctatcaaaagaacacaaagaaactgttgataaacttagagaaaaaatttcagaaaagacaattcaaatttcagacattcaaaaggatttagataaatcaaaagatgaattacagaaaaaggtatgtgttgttttgttcttcttttggaagtaactgtgcccaaaattatttgtggaattaaaaagatatagatacagatatgtagatagatatgtgcatatagaacacaagtagacactatttgccttccttgaagaaactgcttacattctaacttgttttacaattatctcaagatccaagaacttcagaaaaaagaacttcaactgcttagagtgaaagaagatgtcaatatgagtcataaaaaaattaatgaaatggaacagttgaagaagcaatttgaggcccaaaacttatctatgcaaagtgtgagaatggataacttccagttgactaagaaacttcatgaaagccttgaagaaataagaattgtagctaaagaaagagatgagctaaggaggataaaagaatctctcaaaatggaaagggaccaattcatagcaaccttaagggaaatgatagctagagtgagttcagagtcttcctttgtgt

SEQ ID NO: 112467 - DNA, 1026 bp, Homo sapiens
gcacaactgtataaagatatttgtaggatattctttgcaacaagttgcaataatgaaataacacaaacaaaaacagggaaaattctaaccatccattggtaagggactggttaaataagtgcagcacattcacgtcatggaattctatgccacaaataaaaaatgtggtagagctatagtgctgatttgaagggtgaagtgtcctgttagggaacagggtaagttcaggaatagtgtatctagaatgtattgacatctaaaagtagcttagagggtgagaactaggaggcctcagaagagggtggaagatttttacctcctgccctatacctttctatagcatgtggatggtactactctcaatgtattatttttatttttctattgataaaggacctagaaaaacaagaggagctaaaaattgttcacatgcatctgaaggagcaccaagaaactattgataaactaagagggattgtttcagagaaaacaaatgaaatatcaaatatgcaaaaggacttagaacactcaaatgatgccttaaaagcacaggtattttatttttaagttatctcagttactgagagtttgaatcaaactttttgtgtaatgaaacaagatatgaattaccctaaaattgaaggcaagtgaagacttacttgcctactcaatttagaaactatcattgatctttttatatctactgataatcctaacttattgtatgattatctcaagatccaagaacttcaggagaaagaacatcaacttcttttttttttttttttttttttttgagacagagtctcgctctgtcgcctggagtgcaacggcatgatctcggctcactgcaatgtctgcctcccgggttcaagcgattctcctgcctcaagtctcccaagtaactaggattacagatgcatgtcatcacacccagctaatttttgtatttttagtagagaggaggtttcaccgtgttgaccagggtggtctcgatctcctgacctcatgatccacccgcctcgg

SEQ ID NO: 112468 - DNA, 2211 bp, Homo sapiens
aagaacagtccttaaatatgaaagaaaaagacaatgaaactaccaaaatcgtgagtgagatggagcaattcaaacccaaagattcagcactactaaggatagaaatagaaatgctcggattgtccaaaagacttcaagaaagtcatgatgaaatgaaatctgtagctaaggagaaagatgacctacagaggctgcaagaagttcttcaatctgaaagtgaccagctcaaagaaaacataaaagaaattgtagctaaagtaggtttcatctttcaccatgtttttaaaaaatattttgtaaccaaatattattataaaccctaaatatttggaaaggggagttaattacaacaaaatagttataatgtttctataaatttattggaatttcctctaataataaagcacctggaaactgaagaggaacttaaagttgctcattgttgcctgaaagaacaagaggaaactattaatgagttaagagtgaatctttcagagaaggaaactgaaatatcaaccattcaaaagcagttagaagcaatcaatgataaattacagaacaaggtaaattggggatgaagaaacagtgggaggaaatgggtgggtttggagtagctaactgaattatgaagactactatttggcatgcttaattgttttgggaagcaaccttttcctcttaagttgtgtatgtgtgtgtgtgtgtttacatatttttatgactattaacttattttataattatgtttaagatccaagagatttatgagaaagaggaacaatttaatataaaacaaattagtgaggttcaggaaaaagtgaatgaactgaaacaattcaaggagcatcgcaaagccaaggattcagcactacaaagtatagaaagtaagatgctcgagttgaccaacagacttcaagaaagtcaagaagaaatacaaattatgattaaggaaaaagaggaaatgaaaagagtacaggaggcccttcagatagagagagaccaactgaaagaaaacactaaagaaattgtagctaaagtaagttcccatcttattttttttttttttggatacagaaatagtgttaaggtgataatgacggtgttcatgttaagttttattaattttcctctaatcataaagggaccggaaataaaagaggaatcaaaaactgcttatattcaactgagtaccagtaaactgttagtagacagaatatttcagagaagacagctcaagtagcaaatattcattgggatttaggaaattctgatggtgaattacaggaaaaagtgggacttgttaaattggaaaatgacatctaattattgttactcatatcccttatgaaagaaagtactacatacattagattacaatgtaaaaatgattgccttattttaggaacagttcttccttttcctaaaaaaattctgcctatgttgtaacttactttataattttctcagatgaaagaatctcaagaaaaagaatatcagtttcttaagatgacagctgtcaatgagactcaggagaaaatgtgtgaaatagaacacttgaaggagcaatttgagacccagaagttaaacctggaaaacatagaaacggagaatataaggttgactcagatactacatgaaaaccttgaagaaatgagatctgtaacaaaagaaagagatgaccttaggagtgtggaggagactctcaaagtagagagagaccagctcaaggaaaaccttagagaaactataactagagtgagttaccatctctctacacctctagtaactatgacattgagtcctaagagaaaaatctgccatagggttggtgggagtataaaattggtccaggccgggcgcggtggctcgagccggtaatcccagcactttgggaggccagggcgggcagatcacgaggtcaggagatcaagaccatcctggctaacatggtgaaacgccatctctactaaaaacataaaaaattaggcaggcgtggtggtgggcgcctgtagtcccagctacttgggaggctgagacaggagaatggcgtgaacccaggaggcggaggttgcagtgagccaagatcgcaccactgcactccagcctgggcgacagagcaagactccatctcaaaaagtaaaataaaataaaaaataataaaataagataaaattggtccaatattgaggaaagttggtgagggtatatttg

SEQ ID NO: 112469 - DNA, 3527 bp, Homo sapiens
tatctccttaatcagtttatctccttaatcagcctgtatcagtttcctagggctgccatagcaaattgctgtaaacttgatggcttacaatagagacatattctgtcacagttctgagtcctagaagtccaaatttaagtgtcagcaataccatattccctctgaaggctctaaggaagaatcattccttacttcttcctagcttccagtgtctcccagctacccttcgcattccttggcttgtaactgcttcacatgacctccttctctgtgcctctctatgtgcttttatgtctcttataaatacactcattggaatgaagacctactccagtaggatcacgtctcaatcctaatccaattacatctgcaaagactctatttccaaataagttcacattctgaggttcctgggagacatgaattttgggtgggacaatattcaaaccactgcagacatttatgcctgtgagtttcatttacttttaatgctacttacctatttatatgctgataggaggcaaggctgttaatgattttgtgtaagaattttgagaatataagtaaaatggtaattataaaaattgtgcattttaagagccagcaactccaagaaaaacagcaacaacttcttaatgtacaagaagagatgagtgagatgcagaaaaagattaatgaaatagagaatttaaagaatgaattaaagaacaaagaattgacattggaacatatggaaacagagaggcttgagttggctcagaaacttaatgaaaattatgaggaagtgaaatctataaccaaagaaagaaaagttctaaaggaattacagaagtcatttgaaacagagagagaccaccttagaggatatataagagaaattgaagctacagtaagttatacccttttccttcatctattaagtgtttcttttaaaatctgagccacttggaaagaggggagcaatgttggaagaatattacaatattctttaaatttcactcgccaagggcctacaaaccaaagaagaactaaaaattgctcatattcacctaaaagaacaccaagaaactattgatgaactaagaagaagcgtatctgagaagacagctcaaataataaatactcaggacttagaaaaatcccataccaaattacaagaagaggtatgtcttttattcctttcatcctttgtcacttcttccttcctttctcctttgaaggaaagataagcagtaagaagtagctaggatgtggttcattaattgactgggtaagtatttgtcgagtgtttaatgtggcaggcacactcctaggttatagaaatgcaatgagaacaaggtggacaaaacccctaaaatccctctgatccatttgtagtgaaagaaagtagctgataaataagcaatcaaatgaacaagaaaacattaaatagtggtaaatgctatggagaaagtgaaacattgggattactgggccaacctgtattaaaagcctactccatgccagacattgagactgtagatataaataagacattgttctttccccccattataaactagaaagaaaatcccttaattccaatatggtaaatgcagaaatacgcaaaattacatggtaccactaatttatcatggaaagagaaatcaatctatacacatagaaaaattgagacatagcattggagcccatctgaaaatggagatcatacatttattgggatatagtttgctcagctatggtttttctcttatagcttggaaactagtggagaaataagtatgaaacagactgctagcaaagtataattggttcactttgggtctaagctacaaagaaagaaaagtatgacagaatgtgacccagaaaagtcatgaatagctttagcaggaattgagggaaaatgaataatgagcagtttgtgatccaaggtaggcctgagggttcaagatgactttccttgctgtgaaaagtatcctgatcttttccctttaaaaatttatgataatggccagtgggatgcggtggctcacacctgtaatcccagcactttgggaggccaaggcaggcagatcacctgaggtcaggagtttgagaccagcctggccaacatggtgaaaccccgtctctactaaaaatacaaaaattagccaggcatggtagcacacacctgtaatcccagctactcaggagactgagacaggagaatctcttgaacccaggaggcagaagttgcagtgaactgagattgcgccactgcactcccacctgggcaacagagtgagatgccgtctcaaaaaaaaaaaaattatgatcataatctcctgatagtaaccttggtattttatgaatgtcctaagatcccagtgcttcatgaggaacaagagttactgcctaatgtgaaagaagtcagtgagactcaggaaacaatgaatgaactggagttattaacagaacagtccacaaccaaggactcaacaacactggcaagaatagaaatggaaaggctcaggttgaatgaaaaatttcaagaaagtcaggaagagataaaatctctaaccaaggaaagagacaaccttaaaacgataaaagaagcccttgaagttaaacatgaccagctgaaagaacatattagagaaactttggctaaagtaagtttcgtattttcctcccattttaacaagtgtcttataagaatcaaggcttgtgtttgtgttatagttataatgtttgtattataattatgttaccagtttttttaatgtctcttaatcatgaaatgactagaaacagaacaattaaaaattgctcttgaataccaagaaggtattgaaacagagagaagatgtttcagagaaaagaactgttttcttaaatattcaaaaaataatttagaaaaaataattctaaattacaagaaagggtgaaaccaaatatgagattgttttattttcttttttaaacctgttcctttaatgtttcataaagcactactgtgctttctcattgttttagtcagaaatctgggagctatccctactaatatgcctccttctctgcttattctgtaatccagtcaccaaatcttattgatttgagtgtgtattttaaaagtcatcctgcttttctctccacactgccaccaccctaatccaagtcaacatcatttctttccctggctatctgcagtagtctcctaactggtcttcccacactcattcttagacttctctaatccagtttctatactaagcctaagttatcctttcttacattcttttaatatcttattgctactttttaaataaagaccaggatcctttatgtggcctatgaggccctaggtgcagatcttgccggtcttatttcaattcattcttcttcctattctttgttctccagcaactctcttccgcagctcatggctttcagattctcaggtctctctacctgcagtacctccatactcctttttgcctaactaatgctcttatccttcagatctcagttaaagctttctcctctag

SEQ ID NO: 112470 - DNA, 1050 bp, Homo sapiens
ctggcttgttatgtttttgtggtcttgatacgtgagaatgtcactgtgtgagcctaataaccaggatcagcccaagtcatgctagcagagggtggctgccattttgagctcgctggcagtgatctgtgctaaaaccaaagccatcccagtgtttgaaaaaactatagctgtagtctcattattactcagtgatagctcagaaaaagtctcttttgacttaaaggtagaaataagctaagctctcatgatagaatgttaaatgcaattctaattctcatggtaggaatgtaaattgagcagtaaagaaacagtataaaaagcagattcttggcatcttatattattaaaataaggactttcttttttgaaatttgtcttttcctatatagttttccctgatttcttcatttgcagactgagagaaatgctgatgttttacctgatttcataaatgttagctaatatttactttaatctcaactttttttttctttctagaccattgaaaaccaggaagaattaagacttcttggggatgaacttaaaaagcaacaagagatagttgcacaagaaaagaaccatgccataaagaaagaaggagagctttctaggacctgtgacagactggcagaagttgaagaaaaactaaaggaaaaggtgaatttttaaagttatttccctggccattttttctaactaaactttttttttggtaatttttatttctgtagacctaaatccagaaatagcacatacctcccaaatgaacatatttcaatgctagtattttggacaattttaacttacactgagatctaaactaacataccttatgaggattatattattccagagtctttaggtgagagagggctttgtatcatttaaacaaatcatatgatgtattcattcatcaaatatttattgagcactgtcatgggccacgcactgttttgggcacttgagatatattagtcaacaaaacaaagattctttccttgcagagatgcattagtcattttgaaatgtaagatttatcactattaccat

SEQ ID NO: 112471 - DNA, 1055 bp, Homo sapiens
aaataagtaaacatgcagaatcatgttaacctatcatacgtgaagacaattattaatatttgtagttgtccatattgttctgattagtgaacagacgtaagagcacaaactttggagccagatcacttggattcaaaacctagctaaacctctgagtgaccttgggcaagtgactttacctctctccagttcagtttcctcatctgtcaaatgaagattatggtaatacctacctcataaagttactgtcaagattaaatgtgttaagatatgagaatagtacctggcacataatagatgtgttggctatttttattattttttaaagttgttgttaactacttaagaaattcttctgtaatgtgtttatgttttagatggttggcatagataaaaaacaggatttggaagctaaaaatacccaaacactaactgcagatgttaaggataatgagataattgagcaacaaaggaagatattttctttaatacaggagaaaaatgaactccaacaaatgttagagagtgttatagcagaaaaggaacaattgaagactgacctaaaggaaaatattgaaatggtaggatttagcactgtatacttggcattacctttttgtcttcatttgtttcagatttttatcaactttattgaggtataatttatatacaataaatgtatctggtggaagtgtatggtctgacgacttttaacaaatgtctctacccatttcctcttcaccccagtcaagatagaagatgtttccatcacccccagaaagtttcctcacacctctatcacagaccctcatcacctcctccccgccagattatcagtcctgatatgttcaccttaaatcatttgtctcttctagagctttatacaaatagaatcatacagtatgtagtctcttatgtttgactttctacactcccttttactgccaaggaatagttcattgtattaatacgccataatttttttattctttttcctattgatggaaatttgggttccgttcagtatttggctattttgaataaaactgctgtaa

SEQ ID NO: 112472 - DNA, 1955 bp, Homo sapiens
attgtagctacacgctgtattgcccgtctttactttgtccctcctttatctcttctttttttctcatctctctctgcccttatctttcacagtgattaaactgttaatatacaagatatgggttatttaaattatgtaattatttaaatattacttaagtggtacttctatttttatttttttcatggaccataccacttaagatacttcttaaataacaattttaaatgattaaacattacttaaattattcattgattaagtttttggaaacctgagaggcattcaaagcctttagggaaaaaaatgtcaaattctgagaaatgcctgccacatgataaagttagaaaacactttaaaatgataggtaaggaaataaagacaatctgattatgtgcctttactattttccatgcagaccttactttctagaatacaaagagattagaaaataaaacatcaaaggtagagttaaacaagctgagttagggaaaagtgacaataagagtactactatattgcctttccacagtcaaatttttgctgaatgtaaataacttctctttttgcagagaaagctttttttcctaaaaattgcttcagtgaatcatatgttgctaacatccctaaattttatttcttttccatagatacaagacaaatctgaagagctccatataataacatcagaaaaagataaattgttttctgaagtagttcataaggagagtagagttcaaggtttacttgaagaaattgggaaaacaaaagatgacctagcaactacacagtcgaattataaaagcactgatcaagaattccaaaatttcaaaacccttcatatggactttgagcaaaagtataagatggtccttgaggagaatgagagaatgaatcaggaaatagttaatctctctaaagaagcccaaaaatttgattcgagtttgggtgctttgaagaccgaggttggtacaagatgctattttgagaaatgctccttagtcttctggggttttggtttctgtatatatgtatgcctcagactgctctgcttttactgtgtgacatttactttttcttttttaaagctttcttacaagacccaagaacttcaggagaaaacacgtgaggttcaagaaagactaaatgagatggaacagctgaaggaacaattagaaaatagagattctacgctgcaaactgtagaaagggagaaaacactgattactgagaaactgcagcaaactttagaagaagtaaaaactttaactcaagaaaaagatgatctaaaacaactccaagaaagcttgcaaattgagagggaccaactcaaaagtgatattcacgatactgttaacatggtaaggttttgattgattaaactttgaaaaattggagactcttaaaaacattgcagaggccatcatttattatttatgattatgttatgtagtagctacaaaataattttgtttcatattctaatggaaattgtttttatatttttctaacaaagaatatagatactcaagaacaattacgaaatgctcttgagtctctgaaacaacatcaagaaacaattaatacactaaaatcgaaaatttctgaggaagtttccaggaatttgcatatggaggaaaatacaggagaaactaaagatgaatttcagcaaaaggtaaagggtgtttattttcagagttttcatatgcttgtatatatactctttaacctcaaatacttaaatgcataatattctcaatttcatttgttactcacaatggtaataactaacaataattttacaagcttatccctaatgcctttgaaataacttatgatagaatatgtttataatcaattagaaagggaaagggcccaaaaatgtattagtccaaattttgcatagctgatacttattttatgtcaaatttactatactaaacttgcttagagtt

SEQ ID NO: 112473 - DNA, 1799 bp, Homo sapiens
tttagaaatgaggttgtagatttttttcatgtatttttcatttgcattttctcatctgtaagtttcttgttcatatcatttctctatttttctattagatcatttgtctttttccttttcaatttgtgggttaatatctttaatttaactgttagccacttacctatcatgtgctgaagagaataactcaaaataaaaatacatagaaaacttcatcagccttgccgaacaacagttgttttaacctttaaacaaaacagatctaaattatgatacattgcttatataatttgatatattgcttatataatttgaaaaatatgaccagaatttttaaaaattatttttattaggaaaacattatttctttttatatatttggtaactagcatatttgtacgctttttgattagctagagttaacatttatatacatgttctcttaagaattttccaactctgtgaaaattagatttcagtgaaccccttttgtcatctgtctaggaaagcattgaagacccaaaacaaatgaagcagactctgtttgatgctgaaactgtagcccttgatgccaagagagaatcagcctttcttagaagtgaaaatctggagctgaaggagaaaatggtaagtattttttgtaatatttataataaagtagttgtaatgatcagtgtatttttgtgcatttgcaatgtttttctcaatagaaagaacttgcaactacatacaagcaaatggaaaatgatattcagttatatcaaagccagttggaggcaaaaaagaaaatgcaagttgatctggagaaagaattacaatctgcttttaatgagataacaaaactcacctcccttatagatggcaaagttccaaaaggtattttgtaattttaaacatcttttttcaaatctgacttcttctagaaatgtacctaaacaatttgacaagcatatttcaatgattaaaaattcattatactctgactttttaaaaactcaatattacgttttagtttcatttggtattaatatttataaagatttccatgggtttcaaatcataagggattatttttcaaataaactttacctgatcctgaaaaaggtgattcaaggacaattaaaaattaaattacctgtttggcaacattggatctttatacaatttaccaaaactttctagatttgctctgtaatttggaattggaaggaaagattactgatcttcagaaagaactaaataaagaagttgaagaaaatgaagctttgcgggaagaagtcattttgctttcagaattgaaatctttaccttctgaagtagaaaggctgaggaaagaggtaaacacatttataagcacttatcccttattttgaaataaaaacctttgcgataatagtgccttaaatattttggtatagtttattttaaactagcagacaagagagatactgtaaacgttttgactagttagaaatagaaatgaatatagttcatcttctaatttgttcttatgctactagattaaaaaatatattttttcaaggtgtatttaacagaatacttagtaatataatccatgtagcagccatttctgtagtcctcaaatgttgcatttatacagtattacggcccacccttagtctttaccattttttttggtagtagtagtatcattatgttgaataaaagacagtaatgagggaaaagaggttgcactgataaagttttagaggttaatgcaaaccttgcaggctggtgaatgtttctgtaaatccatggcctgccagtttttctttcta

SEQ ID NO: 112474 - DNA, 1038 bp, Homo sapiens
gtatttttaaataatgaggtgctttgttgcgatagcttgaacaattgatctcagtcctttctaactgttgggtgattctgaagcagtgaaccagtgcccttttttttctttttctttttttttttttttttgctttgctttattaactattggtttgctctgttacctgttcacatgctcttacagatgcaactaattcatgaaatttcgaacttaaagaatttagttaagcatgcagaagtatataatcaagatcttgaggtgagcattcatgttggtatttctattgataagcaattagaactataaaacatgcaacatatgtaactgaacatgatgtcagaaataagggaattatgtttttaaaatattagtgactttgaattttactatgaatttaaactaatatatataagttctgttttaatcccttagacttcaaatcagattctaaattgttactctctcctttgattcttttagaatgaactcagttcaaaagtagagctgcttagagaaaaggaagaccagattaagaagctacaggaatacatagactctcaaaagctagaaaatataaaaatggacttgtcatactcattggtaaaaatcaggcgtattttgttgtgtaatcacataaatatatatagcataccatcatcttagcaaatgcttatactggacctactttgtgctgtgtattgttgtaataaatttatatatatttcattaaatctgtcaataaccctatgagatagggactgttagtatatttgccattttagagataaagtcacatttgtggaaagttgatcatgtcatcctttgagtaaatataaggaagttaaggacaggctcccattaaaaatcagtaagttttaggccagggcacagtggctcatccctgtgatgccagtactttgggaggccgaagtgggagatcacttgagcccaggagttcaagaccagcctgggcaacatagtgagacctggtctgtacaaaatatacaaaaataagcctggcaggtactgccagct

SEQ ID NO: 112475 - DNA, 1118 bp, Homo sapiens
tgtaaaaaagtatttttttaactcatggtttatctcttctcttataataatatagaaaatagaaataggcctctttatagtaaaacacagttgtcattagctttagaagtcaataaataatatctctgtttccattcttgaattcagaaccatctgagacataaaataagagttagttagattggggaattcaattatcagttttattactgaggagcttgaggacttatggtcaaaattccctgtcaggcacaggcaaacatacactttattgatatatttttaaaattctccttctttcaaaataatctattctaagttagctagtttgccaaaatgtagaactttagaaagatatcaaatcaaagttaaagtagttatttaaataattcaaattttattaaggaaacaaaaaatatttgaattttctgattggaaaatctgttcttgtttataataggagaatatagaaagtgagttgaactcacttcgtgctgactatgataatctggtattagactatgaacaactacgaacagaaaaagaagaaatggaattgaaattaaaagaaaagaatgatttggatgaatttgaggctctagaaagaaaaactaaaaaagatcaagaggtaagagagacagaaatgtaaaactaaactaaaagcatacttttaaaagaagtattctcttttttctataatgtaagcttttttaattttttttaaatgtacagataacattttatgtgtttattgtatacaacatgatgtatgatgttttgaagtatatatacattgtggaatggttaaatctagctaacaaatgtactacctcacatagttattgtttttgtggtgatagcacatagtatccacaaattttatgttttttaagaatacaataaattgtcattaactatagtcaccttgctgtacaatagagctgttgaaatttattcctgctatctaactgtcattatgtcatctgaccaagatttccccattttcttctccctgaaaaacaccccagcctccaataaccaccattatactttgtacttctaagagatcagctttttaagattctgcatgtgagtgagatcatgcagtatttgtcttt

SEQ ID NO: 112476 - DNA, 1063 bp, Homo sapiens
tccctggcttaacagaattaatgaattctgtgacaaggcacataacacttgtcttgcaacataattgcctttgattagtagttaagtggttaataactagtatagagtttaaaggaaggagagatatttttggctagaagcaaaacttcagagtagaggaggcgttagcactggaccttgaggggtaaatgagattccaataagctgatgtttttaagttctctcaatatatcttttttattctcccgaagactatcacccaggataagttacagagcattgttataaggacatagaatgttccctttgttcaaaagtattaagccaactagaaagagtattgatttttttaatcttgaatataagaaagctaaatattattaattaaattcgaatttttttaagtgttgaacacttagcactttcgtattttttttccagtttgccagtactgctaaatatatgaagaatactccttatgttaatgaggtatcaactgatgaagctctcctgaaaaggtatagaaaagaaataatggatcttaaaaaacaattagaggaggtatgtatgaatcatttatttcattaaattgaaagaaccaatttagaatggagacctgcccaaatgctcagagactcttcattcctgaatatctgagttgctacaacttaggtttttaatcacttttaaagaagaagaaatccactcataaaaattttagtttaatttactataaattgtaagatttggttcttgaaattattttagattttgttttttattttcaacgggcaaaatctgagattatcaaatgggccaagtagagacatttcttaaaatttttcacaaatacatatgaattcgattaaaaagagaaactacagagttacttagaaccaccttctgtgttttcatgttatcctgaattcctcttctaacccttagatagcaatctaataatatagcataattacttatcattttagtttgttttaaccatcatggtcccatattttgtaaaaaatcacgcattaaggatcttttttaaaatgagctaaaatat

SEQ ID NO: 112477 - DNA, 1033 bp, Homo sapiens
ggaagggagctttttcaaagtgtactttttttttaaactttttgaaccgtgtgagcatattaacaatttaaaaataagaaattagaggctaatttggttgtaagttcatagttgcctatatttagatgttggaaaaaaattgatttgaactgaagagctagagaagctctttcaggaaacaggttttttttccctgcattcttccctccctcttcatttttttctttttactatttttctcaggtaataacctttctgattcacttgaagtgggaccaatagggagagagctctttctaccactgatattaaagatgggctcatgtctaaaccagagcatagactttagcatctgccctctaatttctctcattaacttagtgataaataagtttatcatctagaaaaggagtcaagtttagttttcatatttgtttaataaattcaggtgtgcggctcaaggaaggctgtaatataaatcgaagcttatttattttgggacaagtgatcaagaaacttagtgatggacaagttgggtaagtttatcccgttgtgcacttacctactgattcttatatttttcattaggttgaacattgcaacatttcgatgacactcaaatgtactgatttcttccatatattcaaaaacttatacatatgattataatctactgaatttactttctgttttaaatattttttagtagttttaatctgcctcatataacttgtaaactaatttttgaaactctggctgatttaagagttctgcattaaaaaccaactactttattatataaacgttctcaatctttttctcctgtaaacttattccttgctaagtggtttcataaattatcgagatagcaagttaacacgaattctccagaattccttgggaggaaatgcaaagacacgtattatctgcacaattactccagtatcttttgatgaaacacttactgctctccaggtgagtttgatttttatctcagcttaatataggggaagatcagcttgaagaagaaaac

SEQ ID NO: 112478 - DNA, 1008 bp, Homo sapiens
tgcctggttcttgaataaagaataaggacagaatagaacattagaactaactgaataaaggaaatagcaaaaagctggtgcttggaggtgtagaagtacatggggtgtttggggaatagtgagtagttcagctagaggtaagaataagggatggataaatacaaagttggagcagtgcaagtgccagcttataaagaattatatttgccatagtaagtttttggaccttgtataggaaacagaacctatactggtggcattatggaagatataaagaaaggaacagatagagaacagtttgactcagagaaaaaagggaatgcctaaacagtagcatgggagacatggatacagatcgaatattcagatataccatgtattaaaaatgttctttcagtagtttgaattttattatttcaaattatctgccctaaggatttatttttatctatcttacagaatttggttgatcttgcaggcagtgaaagagctgctcaaacaggcgctgcaggtaattaaaactcatgaaatatgttagtcttaatgtcttcctattttacaggtttaaaaagtactaccaggcatttttagaaattgataaagtaattatattcattattaataataatgaatcattaattgtgattttctgataaaagtttaacatagaaatcagcatctgtatctgcttaatttttattttagtctacaatagcatcaattaaaaaatgaaaattatacaattgatgggattgtacagcaggaaagcccatgagaattccataaaaaccatttaaactttcaaaataaggaaattaagaaagataatgtggtacaaaattaatatgcagatattaatttttaaaagttaaaatattaataaaaacaagttaaaatatttagtagacaaaaagactccatttataataacctaaaagatgtgatatctaggaagaaactcaacaaagatttgtacaagactgatataaagaaaactttttttttttt

SEQ ID NO: 112479 - DNA, 1847 bp, Homo sapiens
tcttgaaagaacatagaaaagttgacttgtagtgtattttttgtgtgtgaaaatgaactcattttaccttagggaagggtattttcagagaaccaaaaagttgaaaaaaatactgtgtcttaaatagttgatcatcctacattctgacagttttacttttgggaataattactaatttggaatgaaaacacagtggactcatttgatttaacttctgtgttgttgttgttgttgttgttgtttagatcgtgtctttcatggtaatgaaactaccaaaaatgtgtatgaagaaatagcagcaccaatcatcgattctgccatacaaggctacaatggtttgtattcactcaatgctgcagaaacattttagtcttgggcgtctgtgcaacaagcatgcatagttttacccattataggtttgtttttaatctttgcgtatgtgtgttttgttttttgcaggtactatatttgcctatggacagactgcttcaggaaaaacatataccatgatgggttcagaagatcatttgggagttatacccagggcaattcatgacattttccaaaaaattaagaaggtaagtaacttaactggatttctagtacgtacaggtaaaactagtaaaaactgggtaccagtcttagtgtatttctcttgtaaagatgaaaggaagtagatttacagttattgtttgattatccatggggaaagaagaaaggcatagcatagattcacttttatctccacaacttactttataaagcttaaagttcttttattctttctcttgaattctgcaacaataatactctcaacaaaaagtaggcattaaggaacaagaaaatgttatcagaatggttagctccacctaaccatttaactatcagtgattataaaggaacagtagaaagtggatgtaggtaaaaaaagaagggaagcagaaagccagaataggcaaccgagttagttggtttcaaattagcatttttattaaaataagaacatcttttgagagggttttattttgagcctagagtttgagcctagagttggtgttctcccagctttatggtacttcacttttcattatttctgtaacgatgcttttatatttttgtgttcattattttgtcaacagtagaaccaaggggtttcttagtttgttttacatacattttacctctttaagcacatgagcatttagcattaggttttcacaattggatgcttcctggtgtttttatataattttttttcttctagtttcctgatagggaatttctcttacgtgtatcttacatggaaatatacaatgaaaccattacagatttactctgtggcactcaaaaaatgaaacctttaattattcgagaagatgtcaatgtgagtagcagacttaagggagctttaaaattgactgacttattgagattattgttcttgaatgtttacctttaatttctatagtttttaaagtgtctcctatttctatagtatgtgagggtttttttgaagtatttatattcatcttttaaacaatatgaatagttttaaaatactgacagctctaatattttggtttaagtgtaaaaatagcaagttggaagtatcaggttagaatttgttgtgctttggtatgtgaaataaattgtgggtattcatagaattatttgttacattcctacagaattatggttccatttgccacttttaactttcacaaatgaattctataatagtttgcaccttcttttgaaaagcaaacttgtgacttctatttctctaatctttccataattaaacttgtttcagaggaatgtgtatgttgctgatctcacagaagaag

SEQ ID NO: 112480 - DNA, 1164 bp, Homo sapiens
gcactgctgccagagattccgaccaggcaggagggaatttgcattgctcttgcagtgcctgtgttggtgtagattagaaattgatctctgtgagcagaagcataatgtgatttataaacacaagcacaactgttggtatcaccaccattgctgcagtaggctgtgtttgagagtgccgcatccccaggtgttttccctttatgatggagcctgacttgccctcaaggcaggactcctcagtgggcagtaaacagatctccttcttgtggtgtcttatatatgctctactgctgccaggagtgaaacagtcccagctggctgcactcatcaacagaaatccatttccctaccaaaggcagcaaatgccaccacctcccaccttcagtccttgaccctgtgcattttacacatctcttcatttcttagttgtagtagtgaagaaggattaataaatagggaagccagtagcaaaataacttctgtgagtgacccttctacgaagttaataaacaggatttgtcatagggaaggacggggtgcatagatgatctgcaggggccctaggagctggcatagacttgacatggggcaaatgagcaagtgagaaggtggccatcctccagtaggcgtttgtccagtgcaaggatgagtttgtcccatttagtctattaaatcgtgatggtgatgacacaagagaggaactaacttgaagtagtggtatgccatgctttgcctgtatttcacatagtgcttcccaagaccaacgacccagagattattatcatctcctatgaataaagtgatgtatgaggaacattatattctcacaggtgtaactgctaaaactgagacttaggctcagccaggacctggccaaggtctttaaccccatgtctatctatctgaccttaccttcctggtagtaccctcctaaccatagcctcggggtcctccctacccagccttgacctgggaatcatacttagctggttttacccacctggcctcaatctcctggccctacccgtgtggccctgcccaccttgtatgaatcacatagctttattcggtagaccgttaccttaccccttggccacattaaccacctggccgtatcactcagtcttaacttcctggccttaaccacctggccacacatacttg

SEQ ID NO: 112481 - DNA, 1050 bp, Homo sapiens
cctgctgtaaaatcatgtatctttgcaaagtacatatctatacttcattttcaaatatatgtgtttcagtactgtaaactgtacagatagcagcttgtattttgtgtgtttagacacaaggagacaatcatgtctgagcatctatggagattaacagtttgtacacaacagtatggttctgcaagttaaatctggagcaataaattttagctttaactattttttgccagtggtttagaagcagcaacagcactggcaccattttgccatgcatctttccatagagacttgatgccaagttttacaagactaaaagattatgatgcatccaccaattaccttcagttttattgttataagaggggaagatgttatgaaagtttcaattaatcttttgagcactatattagagtagtggttatgcacttgcattgcttacaaacgagctgtacagaagggtatacctcccaaatacttagtgtagttgacttgtcttgggttgcactgtaaggcagagtactcagagtagttggaaaatgcagaatcagttgtataatttttttttataaaaacggtgttttttaggctaaagaataaagtatcatatcttaggaggggaaaatttataactgacattttttccccagcccaatatgggctgtatacgttttattgtttcttaatttttttcttattttttctgtaggaaaaaatcttaataaaaactaccccaatgttttaacttcatgtatgatattaaatgggtagttttaacacttgaatatgttgagggcttctgccttgaggcagggcttgatatatttttaatttacaaagaattaaacatattcataaaagtgaggcattttatctctttttattttcttttctcatagccacccagttggactagtggtcttcccctggtccttcagtaaaatgctccattgctgccatttccattgttgttacttgatgctttcattcctgagaaggcagggctacagtctctggaatttcataaatgcatgacatacccctccccccaca

SEQ ID NO: 112482 - DNA, 1046 bp, Homo sapiens
caccacccgcaccagctgcacttcacgtgacaccgcccttctgatagagagagtgccctcctttttatccctgggggaaaaataatgtaattgaagaatcagaagtttcacattcaatatgctcaatattttcccttggtggtttaaaatgccccctcctcctcattaaaaagggtggggcatcttgcccaaaggactggacacatcacatcctatacaagtttactggctaagttagtggcccatttataacagtgaggacacagtttgtggtacacaagcctgttctcattaaaaaaccggtaacaaaccacacagcagtattcaatgaagttgaaacacctggattcagaaggggatttcctacccttttctagaatcatttttctactcatcaaggcagaatgttttctattttattttctgcgtatctgatatttttggagaaagctgaaactgtgtaggaagcggatttctacctgcaaattttgaggagatgtgacttagaataaagggatacaattagttaatttcagggcagataagagtgattttgtttaaaaattattttatgtggttttagaatgaataatttctaaaactcagttacaaaaaaagtatttcccctgggctctgcattggacaaagtaaccattttgtggttacaaagttggtgtatacaccaagcacagttttggttgataccttatatggtcaataatagtttcttttacctataggtctttaaaacagatattgtacagatgctcactaaagtaattgttaaattaggttatgaattatgctaaatacagagattgatacctttgataaaaattttgtattgtgtcctgatcaaaacaaaaatggggaaaaatgaaaaatcacaggtaaatgactttggtggtatattaaacaaagaaatctggacaagtacttatagttagtctcgataaaatttacagggtagataattagatgttcatatatacatgagactgtaggtggtgggtttagcattctgtgctttaacattttaatattct

SEQ ID NO: 112483 - DNA, 1013 bp, Homo sapiens
tccgcgctggtccgggcgcaccactccccccgcgccactgcacggcgtgagggcagcccaggtctccactgcgcgccccgctgtacggccccaggtgccgccggcctttgtgctggacgcccggtgcggggggctaattccctgggagccggggctgagggccccagggcggcggcgcaggccggggcggagcgggaggaggccggggcggagcaggaggaggcccgggcggaggaggagagccggcggtagcggcagtggcagcggcgagagcttgggcggccgccgccgcctcctcgcgagcgccgcgcgcccgggtcccgctcgcatgcaagtcacgtccgccccctcggcgcggccgccccgagacgccggccccgctgagtgatgagaacagacgtcaaactgccttatgaatattgatgcggaggctaggctgctttcgtagagaagcagaaggaagcaagatggctgccctttaggatttgttagaaaggagacccgactgcaactgctggattgctgcaaggctgagggacgagaacgaggtcagagcgcttctcttatgccgcgaaactctccctttcttctccccttcgctttttctcgggcttccagggactggggagcaaaccctgtagtgtcacccacaaataccaagagggaagagggaagcttcacaaattactggagcctcttcaacatggctgacaaatatagttttaattccctctaccccttttaaacctgtagttctgtgttctcttctctcctcctaatgctcgtcccctcatctcccagaaaacttacctttgtgcctccgacgagccggtttcccggccttttttaatcctcagaaaagtgatttttaaatttgctttcctttctaaaatagttcagctttgggggcactacttttccctttaatcctcttcccctgtttctttcgtgtaagtgaaacgagtctcccgtttatcctgaacaacctcagagagaacactgatagggtgttt

SEQ ID NO: 112484 - DNA, 2546 bp, Homo sapiens
caagactgcaaggtcaggggcgcctaaagaaatgaaacccaatcccagcaaagaagtgaagagcagatttataacagtcccatccaaatttctctttggcttctctctttggtctttcatctctctgcctttctctctgtgtctcctctctactctttcttctctctctctcatacacatacacacacacacacacacacacacctcactcgcatcttgctgaatcttttcactgggactgcttgtctagttttattaagctaatagggtttgtatggagagttttctacctatgacataatgaagtgtggcctggatagactcctggaaaggccgaaaatgaaatataagtgttatttgctggttattcccctcatgatatacttttaattacattgagggagttctcccttcttcatctaatgtttaagaattgagaaaaggcttattttccagcggtaaaatttagtgcataaaatttagtgaaatatttatatatttacgtgtctagggagtggaatacattcatgaatttaatatctcaaatcacacattgtgctttttccccttcagtcagggattataatgggaaacccaaattcaaagatattcatcaacaaatgatccatcataggaataagattgtatcttaagggaagttgggattcacagagaaaagacattggtttggtttggtgtgatactgtgggtattgttgcctggctaatgaaatcattacatttgcattttaatggaaagttgaaatactaaggggagttatgttcttttacatgtttgtatgtgtgcttaataatgtttggaatagaatataaatttaaacacaataaatattgatttttttaaatgttaataagcagagaacggttaatgaagtgttggataatcaaactgaagtttagaagacaatttataggattaaaaaatggatagaaggaaaaacacaataatagatatttctccataagtcgaatttccaaaactatttgtcctcgatagttcactttgtaactttctattttgatctttgttaatttaatgtagtttgctttaatcattgatacgtggggttctttcacatgattacaagggagaagcattactcatctctgtggaatagaaacggttcattggttagttcttatttgccctaaaattaaaacaaaaattaggattttaccattaatgctgttcatggtaaactatcgagaaaactatggttaattattccagcaattcagaattaaaaacaattccttttgctaacaaactaatatttactttttggggacaacttttcaaatgttgtggtatatactgtcttcaggctactcaactaataatagatacaacattttccactcaataaataagaataactacattggttaataattttgaatacaactatgaaggcttgttttttcctgtcatcaaatttagattcttgttattttgtgcatcctacttttatactgaaaatagctgctaattaatactgtataaagtatttcagtgattataaggaagagatgtgtatgttagtcactttatcctttgttggaaaagagaaattattttaataagtatggggtagtttacaataaaagacataacctcagttctttctttaccatatatgtgatcatactacctaggtgctccaaaaattccataggactgtcttgggttattgaattttaggaacatgataatggacaataacaagatagatagcttttcttaactatgacattgttttgcttattttcttattgaactaatcatcaatgagaaattaagttgcagtgagagaaatcccttgctttgtttaaattgtcatatttgccaaactcttcttaaggctttaattaggtctgatgtgccagtttatgccagaagccggaggaattgatatgattttgaggcagtggcacatggtcctactagacattggcaagtgaatatcacttccagaacaagtgaagtgcacctgccaaggagttgttatgaaagaattccaaagtccttattgggcactggtcttgtattaggtaacaacaactggagttaatgttttagtttcacttgttgaagttaaaagttccctatcaattcttctaagactccacccccaaacaatgttgtaagtcaaatgtcactattgaaatgtatttccttaattactgacctcattaagaagcccttcttatgattcataggcacacctcacagaaactctattttccatcctgcccaaagtctgagtaggtaaattcttatgaattcttatgaaattaccttgaaataaaatatcttcaaaagttacggatgctagacattgtataatgtcaatattttagaatatctaatatttagaaaatcttagatctactttttatgctttaattgcttctaatgcaagttaaattgtttttgttgttattgttttaatagaatttcatagtcttatctagcaatttcaaatcgctggaaagagtcatctttgttatataaataaccatgta

SEQ ID NO: 112485 - DNA, 1051 bp, Homo sapiens
ttttttttttgagacggtatcttgctctgtcacctaggctggagtgcagtggtgtgatctcggctcactgcaacctctgccttccaggttcaagtgattctctttctcagcccccagagtagctgggactaggagcgtgccccaccacacctggctaatttttctatttttattagagacagggtttcaccatgttggccaggctgatctcgtactcctggtctcaggtgatctgcctgcccgggtctcccaaagtgctgggattacaggcatgagccactgcacctggtctaatctattttcaatgtataagagaaaaatagtgttaagtgtcttggtgatggtgatgatggtaggagtaatggtgtgttttccttacatttaatttctacaggctatggcaattgccctataaaagccacccattttaagcacaaaagtgaatggtttttagtaaacttatatgggatcatatatttttaattgaaatattttttgagttaattatagattcatatgccattgtatgaaataatacagagagattccacgtatacttgctcaatttcccccagtggcaacactttgcaaaactataatatcatatcacatcacatgcaaaactataatatcatatcacaaccatgatactgacattgatgtggcctactaatcttattcagatgtcctcagtttaacttgtactcatttgtgtgtgttttgttttataccatttagtcacatgatcacatatttttaaacctttttttctcaaaacagagaagtttagcacaaaagtttagcaatttatcaatcttgtgattgtgctgttatgccatattaaaatgtgtgtcagaatgtaagtttttgttttcttaaaagtcctttttttgatagaatggcctttatgttaaaaatattttaagttgttttgtgacagtgtaagtcgatgtcatttaattctcatcacaaccctagagataggtattattcttatccctatttatgagtgaggaaactgaagcccagtgaggttaaataacttccttaa

SEQ ID NO: 112486 - DNA, 1036 bp, Homo sapiens
atttgttgtttatttttagctttgctttttataagtaatttatacagaaggtacaccatattcaaaagaagaaaaatgggctgtgaatttttgctgatgtactactctcttcaaagggaattgcctatgttcaggcatagaaatgcaggcagtctgacatttaggtatgccatacagagtattgatatttttaatttgctacttttaacattttgagatttgtcacagtttgttctgtgggtgggtaaaagtaatggtaattttaattacagttgtcgtgcctcattagccattgctaaaacctgccttaccaaatcacttattttcttgatgcagtgttaaatctagcttctatgtccaggttatacattaatgagaacattcacccatctctcaaatgggttattatagtattttctcctgaaatagatgatgcataaaaaaaagtaaaaaagcttcaatagggataatgaaagccagataacatagcatggtatatgagttattcctcccgtttttcttacctgtctgcactaagaagggcacccattaaataccataattattagttgtgctgcctctgaagtagagcaccagaatgtgagagtaatacaatgagaccacacccagattctatccataacatactgtcctggtcttattaatttttttaacctgtttgttcttttagcacttttcctgcttttgtttgaagtctcttgctttgaagttatagaatttttatatttgccattggctgtaaagttatctcagctcttttataacttttcattatatttgcattaaaaggatcactttgagcaccctgtaattaattcagatgattattagcttttttgtttgttctactgtgcactctcctatatacattataacagaagaaaaaaccatttctacaaatacagtgtctgatagttcatcaaatcagaatgagcatcttaaaaagtgaattattaaaatattaattcatttacattcctattttaatgtaccaaatgtaactgatgaaaagaag

SEQ ID NO: 112487 - DNA, 1006 bp, Homo sapiens
gatcatcctggccaacacggtgaaaacccgtctctgctaaaaatacaaaaattagctgggcgtggtggcgggcgcctgtaatcccagctacttgggagactgtggcaggagaatcgcttgaccccgggaggcggaggttgcagtgagccgagatcgcgccactgcactccagcctggcgacagaacgagactccgtctcagaaaaaaaaaaaatcttgatatttgtatgcatcttaaaaagcaagagaattcatgattgacttcccaaactaaacggtctgaccagaaaacactcaagaaaactcttggttaatcatgctccttagtataccattatacctgcctctcccctttccccatcctctgtaaattctctcaaccttctctcatttttaatttcataccaagacctagagctaaaacaacaacaacaaagctttaagtctctatatttagggaatgtgcctcctatcccaaattgatttttagagcttttcatttatttttatcaatacaaagcaagttgaaataaaaaaaaaggcatcaaaaatttaaatgtctaaccacgtatatttggtatatgtatactggtgctatgtattagctgtaagcagactggtttgaatatttaaaatatgaacagaatttgagttctttttgtattgcatctaaggatcatttgagatggatgtcatcatttatcatccaaaatagaagccttcttgcctaacaaagaattgtaattagatcatcaaagatgaaatttatagtaattgaaaagttagctcatttgactgcttctttcatagactgtgtttttgtaattacactacctttctaaagataggaaaaatcagagtctctgaaatgtaatactataagtgaaatatgtattttttaaaataaaggatcttttcccaagagctaaaccaagcaccaaatctgttttttgggggttttttggtttgttggtttgtttgtttgtttgtttttgacagagtctccc

SEQ ID NO: 112488 - DNA, 1051 bp, Homo sapiens
tttttatttcttttatcaaattttccctatcatttgttctctggctacaaccaaagttaatagttacatttttttccagtgacaaatggtaatttgcaaagacttgtaacagttgcttaatacttttttatcccttatttaagaatcatgcaaacaaccagagctgataggcagcaggtgcacatgagtgtggctgtgctgatggttactgaaagatttccaaggtagctagtaattctgctaccctaagccactatagctccttccccattactccctgggtctacccaccatcctgcagctagaataataaatggcatgtaggttcctctaggatcctcctccagcactatgtctcatgcctggacatatgagctgttaaatattttgattatcactcctgtgtggtaagggagacgtctacttgtcgtaacttgatgtttactaaactacttttaagattaccttatgataaaagtagacacttgcaattttgcagaatgcatagtttgtttttaacaaaccaggtaaacataactgcagagttttcctatacgttttgaaatctttaaaaaagtattttttatttgcctttctattagaaatagattagataaaaatttccttgtttcaatttttagaatgaacattagagaatattgttactgaaggaatttttttaaaaatagtgactgatcaaatgtcagcagctttatactatagtgtaaaattttattttgtagtttgccatcccattaagcattagaatttttataattgatcctttgatgtttatattcatgatattaatgtaatgtctttaaaccttagctcatataggtcatatgacttaaagcatccttagatgaagatatttgggctataaataatttatgacataagtgatttaaaaattcattctttccatccattttgaagaaattgtaaggtagggttcatgtatacctaatacttatccccccaaaatacgaaaaataaaatcatttttaaaatatctgggttaatgctatagattggaagcagtttttaa

SEQ ID NO: 112489 - DNA, 1035 bp, Homo sapiens
gcggggatctctaaaatgcctggatgttaggaatggtaagtctattgtagagaattatattttctattttagtggatgaaaaataaaccatacccttaagaggcttttcaaagttaagattttgagcacatccttcattggcccagtctctgaccagtgaggtcaagtattagccagtgtcagaatgtcgtgaaaagtttgtgtttcagatgcagaatttttttttgcattttctgtgtgatgtttatagggtattttcttctgaaatgttttccatcttggtttttaaaaatatctattattttaaaaaatattccctcataacttctttttattttcggaaactatataaattgatctgataatctatacacaatgccttgtgaatttatacctgtacctctcatgttccagtgtttggttcttaaataatcactttgtataatggaaatactatgttaaattgtttataactggtggttgatatttcagccttgtttggctatcgtagttatataaagactgttaattagaaacaacctcatatggtgtatgcttgtttttatcttcatggaatttgttctgcaaacactgagttctttactgggagtcaccactttgtctatgttaggaggagcaggaagtgaatacatttaaggtctttaattttcttcttaaaactttgactactgtagtggttttttaaagcattaacaggagaatagccatcactgccaagtagctgacattctgaaatagcacttccctttaggcactgtacagttggaatcatttacttgcagagaggtgtgtgtgtgtgtgtgtgtatttatgtgtgtactcatgtgtataagaataggagaaacactttgtgggcatatcctgctgaggtgagtaacgtgctgattagtgaactccagtctcatcccatttaaacctggaggagaaccacatcaagcacagaagcagccaaagcagcatttcaacaggaaggaaacatctattactggggctttgaagaaacatgccatgaag

SEQ ID NO: 112490 - DNA, 1030 bp, Homo sapiens
gattctcaatcctgacttcatcttacagtcacctggagaataaagtttcctcttagctcaacaagtcagaatctctgagcaaaatcctcaacttcttacctaggtgatactcttgtaagccacactgtgaaccactggattcaacagatgaagtaatataagccactggctcttaagcctcattgattattgcggtgaagatgtgaagactaaagatgctttgggcatggcaaagtgttctacagatattagaattgttattatggtacatttgagagtgtcattgctttgagaaagattctctaagttttttaacagccacactgtaatggaaatatccaattataggtatccaaaaccttttaaactctttatatcaggtgtatataccctgttcctttttgctaacttaaaaatgttcaaactctgtcttctctaggctggcaaacattcagcagcacaccctctcaagattgtttacttgcctttgctcctgttgagttacaacgcttggaagcaggagatgggctcagcagcagccaataggacatgatccaggaagagcagtaagggactgagctgctggtaagacagtggagacagttgacacttgtttgtcaagtatgaatttattcctaatgtaatggtaatctctctcccaaacttcaacttcaagttaccctgcaccctctcaaatacttttctttattgtctatgcttaggacacatggattagattgttaagatttgtgaatttactaaagttgtgtactgacttatgtatagctgtatttttctggagaaagatagatttttatcaattctcaatgtctatggagtttttaaaaagaggtaaggattattcaaatgtaactataaacataagaaaatgtgatatctataaccagttgttagagtatttatcgcctccattttgcttcacttgtagccacttcgtctcaatcttgttaaggaccaaataaatggtatttgtggttacttgctgatctgaaaagtgagtacctcctgc

SEQ ID NO: 112491 - DNA, 1582 bp, Homo sapiens
aatcactttctcccacctttagtcattgttgaagtttcctgatttacaatgttatctttttatcttttcagtagtataaggaggaatgatatttctactgttgtactatttttctgtttatctttcagaagaaaaatagcttttcttattggcccaaaaaaccatcaccctacaggaaataaatcacactctttgcttgattttcctgatctggctactgatttctcttcaaatttaagccaatacttagactttaagacttcattgttacttccttacaggtcattcttatgaactaaaatccatagtcattgttctagcaagcctgagcagtttattctttgagtcacaggattataaaagaaaaaatagaccttagagatcataatacagtgctcttcaaactgtactcttcaatttttctactacttatcagttgttttttattctaataaaatataattacctagcaagtgagcagacatgtatttacagtagctttacaattctttatacacttctttactctctccattacacatgccacatggtatgatacaagtcataactcaactatgtgaaagcaaaaccactcttatacatggtgtcttgcatatatattaaggcccagagtggtatcagtagtctctgtgtcccaagagactgaattaaacaagactgttgaccttcttgtggcatttatctgacaaccttggcaatccctaaattcacaaatagctgtatagcattttttgcatttaatgcatatccacatatgatgtgtcctttgattttagaacaagtaaagcatgctaaaatagactgcaccttatgaaagtcattttcactattcttgtgtttcagtttcctcatcaaaaggtgaaatatcagctgcctctgttgatctcaggatcttttaagtagaaatggaagagtcttagtgaaaacagtttgtattctgaaagaaaattgcaatgtaaatacaggcactaaaaacgtttattcatctttacagatgttaatctgaccagacatttttctcaaaatgtgaaaatagtatggattttcttagctcatttaatattgaaagactagaaaaacaagtaatgatgttctagaagaatctatgatcatataattacagttgtccttcagtatctgtgggagattggttccaggaccccccatggatatcaaaatctgtggatcctcaagtctcttatataaaatagtgcagtatttgcacatgatttacatataccctcccatatacttcgaatcatctctcgattatttataatactacaatgtccatgctatgtaagtagttattacactgtattgtttagggaatagtgacaagaaaattaatctgtacatgttcattacaaacacagcaatccattttttttctgagtattttgatctgtgattgattgaatccacagatgctggaatccatgaatacccatggggggctgactataatgttgtctatgtgcgtagcaattttgtaattctcaaccaaggacacgtatagtccttgaatcttggtaggagtcttggggacttttcttaaaat

SEQ ID NO: 112492 - DNA, 1050 bp, Homo sapiens
ctgaagtatttaccctcagtaatctgaatgtataaataaacaggattcatgatggtagagtaatttatatatacttgtagtattaggacatgcaaaacttattttatggaaaaaaataatttactaccttatagtatggcaactatacaaatctataaattgactcttttgtccccttgaaaaaaagctgacataaaatttaaatgatgtgtattttttcttagagcaataaaagatatacccccacctagaaaagcaataaaccaaaaaataaaacaaaaacaaaatcaagccctcttcacaaatttgagcatatctacagctttatgtggtgagagatacagctaccattcttgagtaatccgaagagtcaaatggtatggagcaaaattacagtcctaaatgcatattggtgaaatgagatgctgatccatttgcacactaatgtgctatttttaagtcatgcatcatagcatcttcaaagaggcctgtcataattatgatggattagactgcagagtcagtcctagatgcagtaattgtttcacagatgctgccaatgcgactagaatttataataaattattttcagagaggcgggagaaggaacaaaatcaaaggaaaactgctgtggctaaaacctgttttggtcttaggaaaccaaaatgttagctagtagtcaaaaggccagtattttcaactgagataaacatgcttcattaatacatgcctctgacatagaagataaaggttaacataattgacatatcagccagtctctctctctctctctctctctctctctctctctctctctctgtctcgtagcttatgaaaatttattctggggcattagctgaaattattgagtggccatataattgttgcatgtttctatttatgttaaattgcctggttataatttgacctttagaatttctgaaaaaaatggtggtatttatagtaaatagaaatattctttttggttccttggaagcccatgcattacaaagaacattagattattggaataaaaggatagacatacat

SEQ ID NO: 112493 - DNA, 2790 bp, Homo sapiens
gggaaccacaaagctagcgtctggtgaagaattctgttcaggttccagcagcaatttgcaagctcctggtggcagctctgaacggtatttaaaacaaaatgaaatgaatggtgcttacttcaagcaaagctcagtgttcactaaggattccttttctgccactaccacaccaccaccaccatcacaattgcttctttctccccctcctcctcttccacaggttcctcagcttccttcagaaggaaaaagcactctgaatggtggagttttagaagaacaccaccactaccccaaccaaagtaacacaacacttttaagggaagtgaaaatagagggtaaacctgaggcaccaccttcccagagtcctaatccatctacacatgtatgcagcccttctccgatgctttctgaaaggcctcagaataattgtgtgaacaggaatgacatacagactgcagggacaatgactgttccattgtgttctgagaaaacaagaccaatgtcagaacacctcaagcataacccaccaatttttggtagcagtggagagctacaggacaactgccagcagttgatgagaaacaaagagcaagagattctgaagggtcgagacaaggagcaaacacgagatcttgtgcccccaacacagcactatctgaaaccaggatggattgaattgaaggcccctcgttttcaccaagcggaatcccatctaaaacgtaatgaggcatcactgccatcaattcttcagtatcaacccaatctctccaatcaaatgacctccaaacaatacactggaaattccaacatgcctggggggctcccaaggcaagcttacacccagaaaacaacacagctggagcacaagtcacaaatgtaccaagttgaaatgaatcaagggcagtcccaaggtacagtggaccaacatctccagttccaaaaaccctcacaccaggtgcacttctccaaaacagaccatttaccaaaagctcatgtgcagtcactgtgtggcactagatttcattttcaacaaagagcagattcccaaactgaaaaacttatgtccccagtgttgaaacagcacttgaatcaacaggcttcagagactgagccattttcaaactcacaccttttgcaacataagcctcataaacaggcagcacaaacacaaccatcccagagttcacatctccctcaaaaccagcaacagcagcaaaaattacaaataaagaataaagaggaaatactccagacttttcctcacccccaaagcaacaatgatcagcaaagagaaggatcattctttggccagactaaagtggaagaatgttttcatggtgaaaatcagtattcaaaatcaagcgagttcgagactcataatgtccaaatgggactggaggaagtacagaatataaatcgtagaaattccccttatagtcagaccatgaaatcaagtgcatgcaaaatacaggtttcttgttcaaacaatacacacctagtttcagagaataaagaacagactacacatcctgaactttttgcaggaaacaagacccaaaacttgcatcacatgcaatattttccaaataatgtgatcccaaagcaagatcttcttcacaggtgctttcaagaacaggagcagaagtcacaacaagcttcagttctacagggatataaaaatagaaaccaagatatgtctggtcaacaagctgcgcaacttgctcagcaaaggtacttgatacataaccatgcaaatgtttttcctgtgcctgaccagggaggaagtcacactcagacccctccccagaaggacactcaaaagcatgctgctctaaggtggcatctcttacagaagcaagaacagcagcaaacacagcaaccccaaactgagtcttgccatagtcagatgcacaggccaattaaggtggaacctggatgcaagccacatgcctgtatgcacacagcaccaccagaaaacaaaacatggaaaaaggtaactaagcaagagaatccacctgcaagctgtgataatgtgcagcaaaagagcatcattgagaccatggagcagcatctgaagcagtttcacgccaagtcgttatttgaccataaggctcttactctcaaatcacagaagcaagtaaaagttgaaatgtcagggccagtcacagttttgactagacaaaccactgctgcagaacttgatagccacaccccagctttagagcagcaaacaacttcttcagaaaagacaccaaccaaaagaacagctgcttctgttctcaataattttatagagtcaccttccaaattactagatactcctataaaaaatttattggatacacctgtcaagactcaatatgatttcccatcttgcagatgtgtaggtaagtgccagaaatgtactgagacacatggcgtttatccagaattagcaaatttatcttcagatatgggattttccttctttttttaaatcttgagtctggcagcaatttgtaaaggctcataaaaatctgaagcttacattttttgtcaagttaccgatgcttgtgtcttgtgaaagagaacttcacttacatgcagtttttccaaaagaattaaataatcgtgcatgtttatttttccctctcttcagatcctgtaaaatttgaatgtatctgttttagatcaattcgcctatttagctctttgtatattatctcctggagagacagctaggcagcaaaaaaacaatctattaaaatgagaaaataacgaccataggcagtctaatgtacgaactttaaa

SEQ ID NO: 112494 - DNA, 4096 bp, Homo sapiens
cttttccatctttgttggtttgcaacagccccttctttttgcctgactctccaggattttctctcatcataaattgttctaaagtacatactaatatgggtctggattgactattcttatttgcaaaacagcaattaaatgttatagggaagtaggaagaaaaaggggtatccttgacaataaaccaagcaatattctgggggtgggatagagcaggaaattttatttttaatcttttaaaatccaagtaataggtaggcttccagttagctttaaatgttttttttttccagctcaaaaaattggattgtagttgatactacatataatacattctaattccctcactgtattctttgtttagtttcatttatttggtttaaaataattttttatcccatatctgaaatgtaatatatttttatccaacaaccagcatgtacatatacttaattatgtggcacattttctaatagatcagtccatcaatctactcattttaaagaaaaaaaaattttaaagtcacttttagagcccttaatgtgtagttgggggttaagctttgtggatgtagcctttatatttagtataattgaggtctaaaataataatcttctattatctcaacagagcaaattattgaaaaagatgaaggtcctttttatacccatctaggagcaggtcctaatgtggcagctattagagaaatcatggaagaaaggtaattaacgcaaaggcacagggcagattaacgtttatccttttgtatatgtcagaatttttccagccttcacacacaaagcagtaaacaattgtaaattgagtaattattagtaggcttagctattctagggttgccaacactacacactgtgctattcaccagagagtcacaatatttgacaggactaatagtctgctagctggcacaggctgcccactttgcgatggatgccagaaaacccaggcatgaacaggaatcggccagccaggctgccagccacaaggtactggcacaggctccaacgagaggtcccactctggctttcccacctgataataaagtgtcaaagcagaaagactggtaaagtgtggtataagaaaagaaccactgaattaaattcacctagtgttgcaaatgagtacttatctctaagttttcttttaccataaaaagagagcaagtgtgatatgttgaatagaaagagaaacatactatttacagctgcctttttttttttttttcgctatcaatcacaggtatacaagtacttgcctttactcctgcatgtagaagactcttatgagcgagataatgcagagaaggcctttcatataaatttatacagctctgagctgttcttcttctagggtgccttttcattaagaggtaggcagtattattattaaagtacttaggatacattggggcagctaggacatattcagtatcattcttgctccatttccaaattattcatttctaaattagcatgtagaagttcactaaataatcatctagtggcctggcagaaatagtgaatttccctaagtgccttttttttgttgtttttttgttttgttttttaaacaagcagtaggtggtgctttggtcataagggaagatatagtctatttctaggactattccatattttccatgtggctggatactaactatttgccagcctccttttctaaattgtgagacattcttggaggaacagttctaactaaaatctattatgactccccaagttttaaaatagctaaatttagtaagggaaaaaatagtttatgttttagaagactgaacttagcaaactaacctgaattttgtgctttgtgaaattttatatcgaaatgagctttcccattttcacccacatgtaatttacaaaatagttcattacaattatctgtacattttgatattgaggaaaaacaaggcttaaaaaccattatccagtttgcttggcgtagacctgtttaaaaaataataaaccgttcatttctcaggatgtggtcatagaataaagttatgctcaaatgttcaaatattttgattgcctcttgaattcatttgctaattgtatgtgtgtgtgtttctgtgggtttctttaaggtttggacagaagggtaaagctattaggattgaaagagtcatctatactggtaaagaaggcaaaagttctcagggatgtcctattgctaagtgggtaagtgtgacttgataaagcctttggtcttaaatcttgggcattttgatttgtaaatctgaccctgagaattgggttacccagatcaaagactcatgccagttaaaaagaacattacctgtattttttatcatgtgttatctcttaagaagaggcagattagttctaaaatcaacaaattgtatttaattgaaataatttagtgatgaggaagaggtccattctagtgcctgctaaatgtataatccttcttagaatgtgaagttgtccttaaacttttaaataccttcagttaatctttatattgtcatttatgaaaaccttgaactaagacttatgtatctttcatctagctctggttttaatgcaggtagcatttaattgtccccactgtactgggtatagtctgctaaacattaaggagtagttttgcatctctccttgttctgatactagggtcaaagcccactttttatagatgggcagcaaaaggcacattggacatgctgataaatgttgccctaattgtgatctaaacatgataaaatatacatacataagtgcccttatctgctgcaagtgacccttgttttgttttggttggggtggggggtgtttgggatggaatggtgatccacgcaggtggttcgcagaagcagcagtgaagagaagctactgtgtttggtgcgggagcgagctggccacacctgtgaggctgcagtgattgtgattctcatcctggtgtgggaaggaatcccgctgtctctggctgacaaactctactcggagcttaccgagacgctgaggaaatacggcacgctcaccaatcgccggtgtgccttgaatgaagagtaagtgaagcccagggcctctcccctctttgcggccactgataggaaagcccaatctttggttgaaaggaagagagttcagcgtgcacttttacatttataaaatgggcatcaaaatgcctgtttggcagtcatgcgataagaagttgtatttgctaatgtgaataacttgagatgatttcattatctgaattgtacagtttagccattaattaggagcagtcagagtgtctgtaaccacatggcctcagttataccataaacttgaaattgtttatgtgctcacatgctacaagtgacggctcctgtgtgcctggccactatattagtatgtattgactccacttccatgttgcagtatctgaaacagaaagtaagtctaatgagaaactttgggattcccaggtcaaataccttccatatgtatgtagcaaaaacaaaatacaaagcctagaagttctgtagaaatagaactgatttttactttcattcaaactattcattatttccacaatagtaatcaaaactgcttctacttttactgctgctaaatgatcagcaaattactggatatggatatatattattttccaggaatataagaatttagaatagaactgcaagagtatgcacttaaatatatttagtgcatccagttgctaatgttttgttttaaacaccatccactttgcatgaagtctaaaccttcagttggaaaaagcctcatttttaatattcctctactgtgctgataatcctgtataacactaaaagaatagatgaatgttcacggtgctacacagaaatgttttttttttttttttttttttttttgagatggagtttcgctcttgttgcccaggctggagtgcaatggcgcgatcttggttcaccgcgacctccacctcccaggttcaagagattctcctgcctcagcctccctagtagctgggattacaggcatgtgccaccacacccggctaattttgtatttttagtagagacagggtttctccatgttggtca

SEQ ID NO: 112495 - DNA, 1409 bp, Homo sapiens
aactcccgacctcaggtgattgcccacctcggcctcccaaagtgccttacaggcatgagccgccgcgcctggccagaaatcttacaagttattttgcccacgattggttttaaaataattttaattttgcactatttcctttagtgtctttttctctgcatccaccaaactatagaatcatttgctgagcttataagaaatgctcatactgctcattgcaacagctagccaaatttgtcctttgctgtttaaaactctaactagcatggttttactaaatttatgttaacacagtttctctctctgggttgtggggagacaaatcaattataaataatctctttagaaaagttactctttctatatgaaagtgtgacttgactttctatgataattatgatccaaaaattttatggtgtgtacctgaccacttttacaaatgattaattggaaggtagaaattgctgattcataacatgtaacttataaacttatgatggactactttaagcataaattttttttttttttttaagacagagtttcactctgtcacccaggctggagtgcaatggtgcgatctcggctcactgcaacctccatctcctgggttcaagcaattctcctgcctcagcctcccgaatagctgggattacaggcatgcactaccacacccagctaattttgtatttttagtagagacagggtttctccatgttgatcaggctggtctggaactcctgacctcgggtgatccgcccgcctcggcctcccagagtgctgggattacaggcatgagccactgtgcccagcctgaaatatttttttaatctaccctgactcctcttgctctttctgaagaaaaatttttaaaaatgtatgtaggtgcctttaattagaaaaaaaattaaaaattaaggcaacttgtgctcatattggtaatagcatttctttcaagaactcagtaatactgcattgtctttaaagcataatatctcttagacttgacggtttgagattctaaatcactgaagaacctcttgtgaaaatgatagttttaaaatttcttttcaaaaatagtcctattgcaaaatgtttgattttcttgaagtttcctggaaactatatttcattcattgtaatgaatttaattttcattaacatagatctctaatatttttctcagctcaccacaacctccacctcccgggttcaagtgattctcatgccacagcctcccgagtagctagaattacaggcacccacccggctcatttttgtatttttagtagagacagggtttcaccatgttggccagattgatctcgaactcctggcttcaggtaacccacccaccctggcctcccaaagtgctgggattacaggtgtaggccaccatgcccagccag

SEQ ID NO: 112496 - DNA, 1003 bp, Homo sapiens
gtgataaatgtttatcactttcacgaggtttcatgtaaaccaaatccagaggataccaagtaacttattgcctctgttgggtaggagagctctgttcagaaacctcctcaccttctaaaatttacatctctgccaggtggttatgtctcacaactttttttttttagagaaatatcaatctgaaatgaagacttctaagtataaatggagcagctaaatatgatcacctaccattttttaacagtatattacttggaaaatctgttcttcatgagcagggcaggtgggggtgtaactgagcatttcccctttcaagtaaattctgcaaaggttttcatgtatcctgcattctagttctgaagcattttatccatatttgaagtgtccagtaaattttagttgctctatggagagatcattccaaattatttaaatactatctttataaacataaaatgtaaagattagaaatagacaaattaagctaaagaagttcttttaatagttcatcttccttggtagctaaaaaatgtgacctctttaagaccatacggcttaattcccctaaccctactcctggcacaggcttgtgtgtataaaatgcaaaatatctgcatgcagttagaaaatcaatcttatgaaaaaaacaaatagctagatatttactagcacatatgaaattaaatgatagtcatgttttaaagatgctttatttagtaataaaggcaccatatattgtgtttgggattcaaaatgtaaggggaataatctaactgatagtctcttttacatagagaaaatggacttagaatttaatatgtagaattattcactttatacaggaagagaaactggagtctcatttgcaaaacctgtccactcttatggcaccaacatataagaaacttgcacctgatgcatataataatcaggtaagtttaaataatcattggcagcaattgtaacaacttacttgttactaatgacctatgtccaaaaatat

SEQ ID NO: 112497 - DNA, 2065 bp, Homo sapiens
tatatttttacttcagttatcttatggaaatttcttaaacagagagagttaggtgtcaggtatgtgaaaagacatgaaatttgtgttcagaagtatgagatgaggcaaatgtgatactaccaaaaacagaggaagtcatttcgtagaaaaaacttttagcctgtttttgaagaggcttcacatctagcacatctatttttgaagtgtgaaaagcaagagagtgcttcattttgggggagtgttgcttcttcccatagacagaaacatatgtgaagaacaagggtcaccacagctaactgttcctgatagactcagagaaagggtgggtgggcaatgtcaatttgtcttatctccctgtaccattttgttgctattttcattaataacaggtaggatggttttatggtaatatatatgtcactgatctggatcaactaggccaccaacacaaatctgaatactgagaggagaaagatacacacacacacacacgttttctttgggacctgtagttgaggctgtaatgtcttacttccctaccaggtatgcactctcactagagaagacaatcgagaatttggaggaaaacctgaggatgagcagcttcacgttctgcctttatacaaagtctctgacgtggatgagtttgggagtgtggaagctcaggaggagaaaaaacggagtggtgccattcaggtactgagttcttttcggcgaaaagtcaggatgttagcagagccagtcaagacttgccgacaaaggaaactagaagccaagaaagctgcagctgaaaagctttcctccctggagaacagctcaaataaaaatgaaaaggaaaagtcagccccatcacgtacaaaacaaactgaaaacgcaagccaggctaaacagttggcaggtaaatttaatgtaaagcatttgtagataaatgtgttgtgtggtatattaaaaatgaaaattattttggttttgcccccatcaacttgtaagttctggggtacacatgcaggatgtgcaggtttgttatacaggtaaacatgtgccatggtgatttgctgcacagatcaacccattacctaggtattaagcccagcatcttcctgatgcacccctaccaataggcgccagtgtgtgttgtccccactcccccaccatgtgtccatgtgctcttattgtaaaatgaacattgttaattttggaaagttatatcaatcatggtcttagttctgtgccagagtcttctctaaagtagcaagggccaggctttgttctcagagatggtaatgagatattgcaccatcaacatggaaaacatggaaaagtctggattttattctataataaacagcaactttttttaacaggtaagtgatacgatgaaattcattgtaatttggcagtaggccaaattagtagaggagctaatagtttggagataaacacagtaaaccagaactgaggtaacaagaccttgaattttgttggttagtagcaaagatatagcaaaatgatgcaaatgagctcttccaaaatgggaaaaagaaaatacattggtgacaaaacactggaatgaaagagaagaaaagtttaaagatgaccccaaagttttaaacctaaacttaacctactgttttaggtttctaaaacagtactatttattgaaataagtaagtttgaaaatatgattgagagagagagaggggagaatgaaacatttttccttagacatgttgagtctgtggtttaggaggggttctacatgtagattatgctacaaaacttttacccatcaaaatagattacagctgtagtaataacaatagaacattattcatgaatactaagttattgtctttccatagcctcctgctttatgtctgcagtttgtaaaaagaaaaaaaatccaaaatttgggatggtattggcctggccattaacaaaagcaaaccagtttgcttaaaactagccatctttgctgcttcatgaagtcaaatttctctactgattcatttccaagctcagaggaactaagttaaataatttagaatatgctaaagatgcttga

SEQ ID NO: 112498 - DNA, 2876 bp, Homo sapiens
tcttacctacatttaagtatcctcactagccttcataaaataatcatcaacatcaaagatacctgtttctgttctctcttaccctgtccacagaacttttgcgactttcaggaccagtcatgcagcagtcccagcagccccagcctctacagaagcagccaccacagccccagcagcagcagagaccccagcagcagcagccacatcaccctcagacagagtctgtcaactcttattctgcttctggatccaccaatccatacatgagacggcccaatccagttagtccttatccaaactcttcacacacttcagatatctatggaagcaccagccctatgaacttctattccacctcatctcaagctgcaggttcatatttgaattcttctaatcccatgaacccttaccctgggcttttgaatcagaatacccaatatccatcatatcaatgcaatggaaacctatcagtggacaactgctccccatatctgggttcctattctccccagtctcagccgatggatctgtataggtatccaagccaagaccctctgtctaagctcagtctaccacccatccatacactttaccagccaaggtttggaaatagccagagttttacatctaaatacttaggttatggaaaccaaaatatgcagggagatggtttcagcagttgtaccattagaccaaatgtacatcatgtagggaaattgcctccttatcccactcatgagatggatggccacttcatgggagccacctctagattaccacccaatctgagcaatccaaacatggactataaaaatggtgaacatcattcaccttctcacataatccataactacagtgcagctccgggcatgttcaacagctctcttcatgccctgcatctccaaaacaaggagaatgacatgctttcccacacagctaatgggttatcaaagatgcttccagctcttaaccatgatagaactgcttgtgtccaaggaggcttacacaaattaagtgatgctaatggtcaggaaaagcagccattggcactagtccagggtgtggcttctggtgcagaggacaacgatgaggtctggtcagacagcgagcagagctttctggatcctgacattgggggagtggccgtggctccaactcatgggtcaattctcattgagtgtgcaaagcgtgagctgcatgccacaacccctttaaagaatcccaataggaatcaccccaccaggatctccctcgtcttttaccagcataagagcatgaatgagccaaaacatggcttggctctttgggaagccaaaatggctgaaaaagcccgtgagaaagaggaagagtgtgaaaagtatggcccagactatgtgcctcagaaatcccatggcaaaaaagtgaaacgggagcctgctgagccacatgaaacttcagagcccacttacctgcgtttcatcaagtctcttgccgaaaggaccatgtccgtgaccacagactccacagtaactacatctccatatgccttcactcgggtcacagggccttacaacagatatatatgatatcacccccttttgttggttacctcacttgaaaagaccacaaccaacctgtcagtagtatagttctcatgacgtgggcagtggggaaaggtcacagtattcatgacaaatgtggtgggaaaaacctcagctcaccagcaacaaaagaggttatcttaccatagcacttaattttcactggctcccaagtggtcacagatggcatctaggaaaagaccaaagcattctatgcaaaaagaaggtggggaagaaagtgttccgcaatttacatttttaaacactggttctattattggacgagatgatatgtaaatgtgatcccccccccccgcttacaactctacacatctgtgaccacttttaataatatcaagtttgcatagtcatggaacacaaatcaaacaagtactgtagtattacagtgacaggaatcttaaaataccatctggtgctgaatatatgatgtactgaaatactggaattatggctttttgaaatgcagtttttactgtaatcttaacttttatttatcaaaatagctacaggaaacatgaatagcaggaaaacactgaatttgtttggatgttctaagaaatggtgctaagaaaatggtgtctttaatagctaaaaatttaatgcctttatatcatcaagatgctatcagtgtactccagtgcccttgaataataggggtaccttttcattcaagtttttatcataattacctattcttacacaagcttagtttttaaaatgtggacattttaaaggcctctggattttgctcatccagtgaagtccttgtaggacaataaacgtatatatgtacatatatacacaaacatgtatatgtgcacacacatgtatatgtataaatattttaaatggtgttttagaagcactttgtctacctaagctttgacaacttgaacaatgctaaggtactgagatgtttaaaaaacaagtttactttcattttagaatgcaaagttgatttttttaaggaaacaaagaaagcttttaaaatatttttgcttttagccatgcatctgctgatgagcaattgtgtccatttttaacacagccagttaaatccaccatggggcttactggattcaagggaatacgttagtccacaaaacatgttttctggtgctcatctcacatgctatactgtaaaacagttttatacaaaattgtatgacaagttcattgctcaaaaatgtacagttttaagaattttctattaactgcaggtaataattagctgcatgctgcagactcaacaaagctagttcactgaagcctatg

SEQ ID NO: 112499 - DNA, 1872 bp, Homo sapiens
cattgtgtaccatcatttttttccaagtccttttttttattgttaaaaaaaaaagcataccttttttcaatacttgatttcttagcaagtataacttgaacttcaacctttttgttctaaaaattcagggatatttcagctcatgctctccctatgccaacatgtcacctgtgtttatgtaaaattgttgtaggttaataaatatattctttgtcagggatttaacccttttattttgaatcccttctattttacttgtacatgtgctgatgtaactaaaactaattttgtaaatctgttggctctttttattgtaaagaaaagcattttaaaagtttgaggaatcttttgactgtttcaagcaggaaaaaaaaattacatgaaaatagaatgcactgagttgataaagggaaaaattgtaaggcaggagtttggcaagtggctgttggccagagacttacttgtaactctctaaatgaagtttttttgatcctgtaatcactgaaggtacatactccatgtggacttcccttaaacaggcaaacacctacaggtatggtgtgcaacagattgtacaattacattttggcctaaatacatttttgcttactagtatttaaaataaattcttaatcagaggaggcctttgggttttattggtcaaatctttgtaagctggcttttgtctttttaaaaaatttcttgaatttgtggttgtgtccaatttgcaaacatttccaaaaatgtttgctttgcttacaaaccacatgattttaatgttttttgtataccataatatctagccccaaacatttgattactacatgtgcattggtgattttgatcatccattcttaatatttgatttctgtgtcacctactgtcatttgttaaactgctggccaacaagaacaggaagtatagtttggggggttggggagagtttacataaggaagagaagaaattgagtggcatattgtaaatatcagatctataattgtaaatataaaacctgcctcagttagaatgaatggaaagcagatctacaatttgctaatataggaatatcaggttgactatatagccatacttgaaaatgcttctgagtggtgtcaactttacttgaatgaatttttcatcttgattgacgcacagtgatgtacagttcacttctgaagctagtggttaacttgtgtaggaaacttttgcagtttgacactaagataacttctgtgtgcatttttctatgcttttttaaaaactagtttcatttcattttcatgagatgtttggtttataagatctgaggatggttataaatactgtaagtattgtaatgttatgaatgcaggttatttgaaagctgtttattattatatcattcctgataatgctatgtgagtgtttttaataaaatttatatttatttaatgcactctaagtgttgtcttcctgaagtttttttagtgcttgaatgactgccacctcaatgaagaaaagggaataaaaaataatttttaaagacacttttaagatagatagttagtcttatgttaaactatatctaagataatacccaaataattaaggccgaagtatttctctggttaaatggtgtagatattcactcacttttccttccaactaacttgttagtgtattcactttgcatgtgtagacagtgtaaatcagatagagagtaaagcacctctaatcttagattgccccctccagtgttttgtgaagggtttcagtgatatagcaggtgcactaaggttgaattcatattgcttagaactaaggccaactctgttttcagactctcaccttccacttcttgcctactcttcttaagggaagatacttcttcc

SEQ ID NO: 112500 - DNA, 1024 bp, Homo sapiens
agaaatatgagaactatttactgtgagtcaagtatgacatgtttagaaaggagtaaatccatagacatgatttcatgggaaagcaaactgtattccttatatggtaagctaacaaattgtttctttgcgatactatcccatttggggcattttttgtgtagtcaaattttacaatacaagctttatctaaacctttcatattatagcacttctatgttgtctgctagagactaaaatgacccagaaagatacaagaaataaagtaggaaggctctagaatttttaatgtagctttatataaggcttgggccaaatgagagaacttgggacgaaagtttgaagggaaatagctttaaatagagaaatgcaactttagatagcttatgactgtttgtatctgcctaaatacttcctaaaagtcgaaattaaatttgattaatcactcccttctccctcctcttatcccttccctaataccctctttccccattttaaatgcagagcaagtgtggcacttccttggcaagtgattgaaacatctgaaattctgctgtcaagattcccatctctaaggactccaagtgctagagacaagggggtctatgagcatttactgacttcctgttaaaacttcattttttcaaactttttgagctatgcaatatataaataaacagtaagaattttaaattactctcctttggacatttattgatataaaaagaagattttggccaggcacggtggctcatgcctgtaatttcagcactttgggaggccgaggtgggcagatcacaaggtcaggagttcaagaccagcctggccagtatgttgaaaccccatctctattaaaaatacaaaaattagccaggcgtggtggtgcatgcctgtagacccagctactcaggaggctgaggcagaagaactgcttgagcccaggaggcagaggttgcagtgagcagagattgtgccactgcactccagcctaggcgacagagagagactccgtctcaaaaaaaaaaaa

SEQ ID NO: 112501 - DNA, 1023 bp, Homo sapiens
tgtttcttcaaacttgtctgttctcagaatcttggcccagccatcagaataaatagaaacaataatttaaagttctagaagacagataaattttttagcaagtgtgtgttttatagcaagcatgaacaaacatatatttaaatatgtgtgtgtgtgtgcttgattttaactttcaagacattagctgcggaagccattgaaagaaaacctctcttctcattcctagctgcaagaccttcagtggattccatgggttaagataaaaaatattttcaagtatttttattttactctaagtctgttgtttgtttatctgaaagaatgaacaatgataatgaaaagcaaaggggaatatttacctttttcaggttagagatccattgtgtgtaaactttcttctataatttcgtgaaaaaacttctggatgcgctttccacatataaatatttattgtaacagagattctttctctgtttttatttccaggtatcatcttcaccaaataaagaaagtaatgaagaaggtatagtatattttgattcattaagagtaacatgtataaatttatttgtttacagtagtggaagccaaaaactaaaactaaaaataaaatagataaattgaaaagctgtataagctaagtgaaatatttttaaaatagtcgctaaaatttcagatgaaatattttctaactcagaaaataaggagaatgcatttaactacttttctaggttagaaaatgatttgattgtacggtgactttttttttcgctgaagtactgagatattccagccagttctgatacatttaattttaaaagatttaattaaaaaaaaactcttacatttagatatttatctttttttaatgaatcacttattttagctgaagatcttaaaatctatagttatagaattaaaaataaatataatatttttattaccattatttgaagctgttttaataaacaagtaaaaatgctctgtagtgaattttcagaatttaagcatgtgcacacatca

SEQ ID NO: 112502 - DNA, 1073 bp, Homo sapiens
tctggaattttccatttaatatttctggattcagttgactgtaggtaactgaaactgcagaaaacaaaaccgtggataaagggagattgctgtgtatatgatcctcagtgactggcttttcctaggtgtctcctccctctcccctgcctcctaacagtgatgttctatccatgcagaaccatctttgtatattctaaaatatagtcccttgcttttatgtgtgctgttccttctaccttttcccctcttgtccagttagtgatgtacttctcacttttataatgctttcttttactccctcttctatgacattaccattgcttctgtttatctctgttaaaacctcattgcattttaattgcagtttatctatttgtctctttccctgagttaaaaactgagtatcttgatgaaaagaactttgttgtatccatccatttattccccatacatagcacattgtctgaagatgctttgtaaatgtttgtagagtgcaggaatagtattatacatatgaaaacacaaaagtctgaaggtgatatacatatcaatgatgatgctgctctaggtatcacaatcaattgtgcttctggttagactgggccccatgtttcctggctccctcagtccaatgctctgccactaaagggaattaattttggttcttaacaaaacatctttttgtttttttctttacagatattgatgatgttaagaagttcaaaccgggttacctggaagctactcttaattggtttagattatataaggtaccagatggaaaaccagaaaaccagtttgcttttaatggagaattcaaaaacaaggtgaagatgagaatctttattttaaaatgtacctcctgatacctgtacaatattcgtttcacttgggaagtttcttatgtgaatatgtatatatagcatggttaaaaaagtgctttttactaacttacatatttaaaaacattattttattatttaaattctgtttcagaagatctaagtgaatcaacaaggctgaaaaatatatatttccatctatgtgtctatagctcctacgtcttggaaaat

SEQ ID NO: 112503 - DNA, 1079 bp, Homo sapiens
tcttactgggttcctttctctctgctgtggtttggaatgtgtattgagcagaaaaccagggcaatcacatctcttctcatttgtttacttctctctgggatcacagtcctgtactgcctgttgtttaatgtctgaaacgagtgatttcatatattttgtccagttttttagttgtttgcaatgggagggcaagttgtttatctgtaaaataattcagtcattggtgaaagtggaaattttgagaaagttaactctaaagggacattgcaaggcagactttggctattttcatattatttttaattattgaggctttgttacatttcagtctgtagttcttttaatcttttatatggattttgtgatatgtgagtaaactctccaaagccttgcaaatagtgaatttcttttttctttaaagattctttcttgtggagaagttattcatgtgaagatccttggaattttggctcttattgatgaaggtgaaacagattggaaattaattgctatcaatgcgaatgatcctgaagcctcaaagtttcatggtaagactgttactttccagaaagtgaaagcaaattagtgtgtcattggaattctgagaacttaaaagaagttcacataggggagttaaatgtactttttaaaaaagagagaggaaaagatgtagatagacaaattatattttaaatgaagaaagtacattctactggtttccctctattccctttttcttccctctcctgtcacctctctttcactttcttcctcttcctttcactccttccttccctcctttcttctttccttacttccatgattttgatggtccaactgctgttgggaactgttttgaaagcatcctttgactaggaataaaagcatacgatactggcatttttaccctgaaatctcttttgttcatatgactaacaagaagaaactaaggaaggagtgttcatcgatgacaaaagctatttctgcacctagtttttgtctcttcttgtacaaatgaagggaaaagtaactgccctctaacgaaattttgatgtcctagaaattttaagttctggaaa

SEQ ID NO: 112504 - DNA, 1460 bp, Homo sapiens
tttcatgcctggctatgagatgagtggttgaatcagctgtaagaaacatagtggtaggaagtcacttttaacaccgcattgttaatgggcagagggaaagaagcagagtcctggaagttggtaacagacttagaaccacagatatagaaaacttgaatgttctaagtcccttgagggattttgtattgttcatttggtgtctaagaaaactaaatgttatactttcagcacagatttgttgaattgatttagattgaattgaagcgtggtggttttgtaagaattctaccatttattcctaagcatctagtttttggtttgattgagttttcctttccagtttttaacggtgttacagcaaaacactgctttgtttgaaataaaactgtgcctttctgttgcatgtgaagtcaaagagtgtgtctcattctgaggcaacttggtaatctgggcatgcttccttgcttgctttataacctatacatgtcttatctgttcttatgttgtttgaaattttaaaataaattttgtgaataaaaatagataaaacaatttagaatgtgctttttaaaagctatatgtgatttccaggaattcttataccctgctgccagagtcatctacaggatttcttaactttgacactattgatattacagatggataattctttatgagagaggactgtcttctgcagcatcctttgccttttcctactagatgctagtaatacctcctccccagttgtggcaacccaaaatgtcttaggatattgccaaatatcccctagagggcaaaattgcctttggttgagaaactctcatttagtgtatccagtgtgaattaaccagtatagccaactttaaactggcaattatgtgataacttcaaatttgaacatttttgttttataaaggatcttacacatcttttggtccaatgtgccataccctcctgaagacttctgttctcaaggctttttattctagttgttccttatctgacagtttctagattattttccactctggttccttttcactagatcatctctgttaatgcccatgttagaatggagcagtctgggtgcagtggctcatgcctgtaatcccagcactttgggaggcgagctaagaggatctcctgaacccaagagttcaagaccagcctgggcaacatggtaagactgagtctcaaaaaaataataataaataaatagaataccatactaccacagctaaacgcccttctctaaatatgatccagcctgtataagttagcaattacatatgcagttgtaaaatttttctatggagtactttagttttgatgtatattcagagctgcaaatatcatccatatctttataatcacttgtcatatgttccttttgggcttgagaatctagaatttaagcaaccagagtccaaacttgaggacatgtatcagaaatactttgt

SEQ ID NO: 112505 - DNA, 2551 bp, Homo sapiens
taataattcttattacctttattgcatttgtcacaaatgccataccatttattaacatgacactctccatggtattgactgtttcctataaatctctgttactggcccaaagtaggtactcaataaatgttttactgtatgaatgaatgcctgttaatagaaaaaaagaagcagtaacgggaagactgggaaagaacagaacctctctaggaaagttacttaggagattgctcagagtaagagaaggtatttgaaagaagagaaccgtgaagtagatggggttatatttgaaaataaatgccattcaattgttatcataatttgcacataaaaaatgattagtagcatgagttctaatacaatctttaccatatagaaaccatgagtttgtgcaagtttaaactctgtgtttcaatttacttatctataaaatggaattcgttatggtatattattcatgtggtatgtatgtatatatgtgtatgttgtgtgtgtatatattagctagaaagtgtttgtcacctatgaccagtatgtaagattaacaattgtggttattcttatattttcttagtagtattagtatttggggcagtgaaatgttgttggacttcatttattgatttttttttttaagataaagttaggccaggttatttctgaataaactaattagtactagaaggaaaatattggaatttctctaatgcttagctgtaaataagtttgtttgtaattatctatataaaattaaaggaaataagcttagataacctgaaatcttagataataatgataatctgattcttgggatgacggtctctgtatcccttttagtttgaatttaaagcaaataattttagggaacttctacagttccatttagaatcaggcaattctgaggctttttgggagagatagtgcctaagggatctttaatcttactagcaaatttctattacagtcttcatttataaaaattcctatgtgtatattttgtaaccaacagggtataatcttgccagtaaactaaagaattgatgtcttttcatgtttttatcaaggtccttgagatttgacaggtagaggattttttaatggaatgaataagacaaaataggtttttattttctttagtagtgttttgtcctttcatttataaagggaaaactggattccttttagtaatttagatccatgtgctgttaccgggtcaaaggaagcggtgaatgacggaagccacagttgaggcagtcagcggaaacacagaaacaagggcacagacagtgggaacatccactgaaactctaaaagtgaatgtgaatttattccctgactgaacttggaagatgagtatgtctgcatataccacccacttgcagatgcaattataccagcaactgagagatggaggaaatactataaatctgttttaaatattatgatccttagggacatactggcctgttggccttgggcctatgtaatttctgataatgttttctttggattattgttatctataaaactttgtgattatgtggaaagattaaagtacattatagtattaacttacatttctgcttttttttaaaaaaaaaattttagacttgggaagatccccatgaaaaagataagagcacgaactgctttggagataatgatcctattgatgtttgcgaaataggctcaaaggtttgttttatagactgtattaattctaacgtgagttttggtttattcatgccataaaatttcattttagcctctagttcttcaactcttcagagttcaagcctattgatttctctgttatcagtccctccttttatcttcactttcttgtcttaaaccaggggttggtaaattatagccctgtaacaagtcaaagccagcctaacacctgtttttataaataacgcaggtatgcccattcatgtacatactgtctatgactgcttttacactacgacggtagagttgaggacttgtagcagagattgtatagtctacaaagccttttattattattttattattttatgtctaccatctgaccctttatggaaaaatttgccaagtcctgtcttcaccttccttgcctattatttagataaaaacttcaattctcatgaaagtcatctgatactttttcattttttgtgtgcctgcttccaggttgccacatcctactgaataaaaacaaaatccacaatttcagagattgatgctccccatcaattcttctatatgtctttggtcagttctttcttctattttctactacgtttattgttactatttcttgttctctgcagacattcaactcttctcccttttttctcactcctagaagaacatcttacctttaattttgtagagctcagaaaccagcacataaaaactttcaatgtggtttaaatttgtatttctctgatgattagtgatgtagagcatttttcatgtgtttcttggccacttatatttctttttttgagaaatgttggttcgtggcctttgcgcactttttaatgtttttcttgttgagttg

SEQ ID NO: 112506 - DNA, 1017 bp, Homo sapiens
aaataactaaattgaatgatgtttttaagaatgctgaaatcatgccaattgcttatgggatagcttatggaatagctctacctgattttttttttttttttttttctgcttgatggttgatgttcagacatgaccctgttaaaatgaaagccagcccctggtcccatttatctttttaatctcatctccaactctccttctgccttctgcttcttcacttccacactggcactctggtgctcaaagcacactgatgtctcaagccctcaccttcactgtgtcctttcctgggaacactcctttccaggtatgcacatggcttccttaggttgcctttaactcatcttcttcatagtatctgccaatcatcctttaaaacttttaaccctactcccattccccctctcatactttatttcccttttctataacacctgccaaattgtaacctgctgtataatttatttattatgtttattgttaatttctcccagctagaatgcagacttcatgagggcaggtattctgtctcttttgttcactgatacattctgactacccagcttaatgcctgccatggagtaggtgatcaataactgtgaaatgaataaattaatgcattgtgtatgtgtgtcacatttgtttcataggcgtgtgtggatactttagctgttctatgattcgtcttgtaacagcaagaaacttgttcagagcagttactgagccaactgtgtacttagaagaacatttaagcagcagaatactgtttaagtagtagtctatccacttagcttgtgattcatcagtataccatcattattcagaccttcagctgtctagaccgttagcctgaatagcatctcccgcactcctaataatgccttcctcaaagtttgagcttccctgggcaaaaattcatctcgtcttcccaccagtttattcatattgcccacatgtaatgggttatttcagtgttacatctcattgagtgaatatttagaatacctgtctggaaaa

SEQ ID NO: 112507 - DNA, 1051 bp, Homo sapiens
ctttttcaaaagtgatgtttttttttttaatatgtattttgggttttagtctattgtagatattttctgctttggatattttaagccacagggataagtaaattatttcagcaacccaaatatggtttagccggtatatatttcttttcggtccttagatggtggcaagttttaaaagttgaattaactttaagttgggagttaaagttagctttgtaaaaaatgcgtaagtttaaaagtggataaggatgtttattattgctgtatagaacaatgtgtctattgctttaattctgttttgttttgtttgtttgtgtctttgcagagaatgtaactggtcactacatttccccctttcatgatattcctctgaaggtgaactctaaagaggtattgttttgacttgttttgggaatgaaaacgtgtactgccagtatcaccattagatgctttttggaagcaccttgaaaggaaaaagtgttgttggaagtcaggaggacaaacaggagttactataacagggtcataagcctcctatatgaattaaaagttgtatgagaataggattcttccatgaggaattgggagaaaggggtgttactggtacataaaacttagaattcggtaggaaataaagatttaagggtagtaatttaggaaattaccaagaggtttatttacaataatcagctaacgtttgtggattattttttatttgctagccactatgtgaacatgatgttatttaattgttatgagttgctatttttctttccaaggacactgaggctcaaggcatttttatagacttgtctaagatctggtaagtgccagagctagttttggaattagcttctgaccacaaagcttatgctctttaaccactctatgaaacaggtgttagagaaataaagcaggggtaaaaatggtggtgtttgaatagctgttctcttagaactgaaaatcacttgacagttgtcagggtgtgaaagatgccaggagaactgatgctatcaaatcaaaattgttggggtgtttcgagatctctcat

SEQ ID NO: 112508 - DNA, 1049 bp, Homo sapiens
cttcgtgactcattgttccgtgtaccccattgtttcactgtgtacgttaaccgtaacagaaaatagcgatgtcggtcgcttgccttcactccccactgactgcagagccttggagtggtagtatcaaagtgggccttgcattatcgctccccttttcggagcactggctctggaggctttcagttctaagcaggccctcgagttcttcacgtcttaactctgtgaccccggacgagtttaagttgctaagccttgttttttctcatccgtaaaatagggctgcaagtattacatgacattatatatgtaaactgattagtcacagggcctaaaatataaattactattgttaataccgataatcattatagatatttgtaatttatgagagatttgcagttatgctacatgagtttagggtcgaggattattttgtgggaaagaagagtttgcctaaagtcgtgtgattataatgcaactagtactagaatttctattttcttcaaaattggttgcagttttcaccctatgccacatattttcttctatctttggttaagactgatcaggtgaacaggaagtctcaaatttctgaatggattatgttctaaaaggttaccatgtgatgattaatgggaatagtcagaaaaaattatgaagtggcagttcgctttttaagcagattgaaaaaaggcctgtctactgcaagtattctagatttgcaataagtacggtaattaatagatacccaaataataaatatttatgaagtgtgctagacactgttaggcatagtacagagattcacaatattactataattatggaaaaagtaaatacactggttgagcaaaaacaggcttgagaagccaggagcgcacagagtagttgacccagtaccggatttggaatggggagtcctaggccataatcttggctctgccgttaactcgctgtgtgctgttgggtgggtggttacttcagttctttctcacagagccagtttcttcagctgtaaaatgaagcttttgaccttgaaacgatgatcc

SEQ ID NO: 112509 - DNA, 1048 bp, Homo sapiens
tacttgcctcgggtaaggtctgacttctgctgtataagcagtaaactattctaaatccttacacactagtacatatcctcatagagggcagttaataccaattaggcccaaatcttcccattctggttcttataggaatatatagatgtatgtttgatacaaaacatattcaaaatttttttaaaaagacagaagtaacagatgcatcatcccaatttcttggaaaaaaaaactgcactctagaattcctaaataagaatgttaacagaaatggttaatggagacagcatgcgctggcatttaaaatgcttactgtttaggaggagaaaacatcctaaatacagtgcttctccatcagctcaatgttttttgtttcttcagactgataggctggatgtggatagcttgtttagcaacattgagtccgtgcatcagatatcagccaagctgctgtcattgttggaagaggccacaacagacgtggaaccggccatgcaagtaattggtatgtttattctcttctcgagttctacaatacaacaggaaataattttttaataacctccctttgctttggttttttgttcctgactcaccatgcttcccaggagatatataaatgctaaacccatctttgggctcattgtgattatgcagactctgtgtttattttcaaatgggtttatatccatttgctgaagtccctcagtagcacaaaacataccatttgctttttaatttccaatctttcaatctctttgctttccagatgttctgtaattttttttaatggctaacacttacttgatccttaaagaattaattatttaaatattctaatagctttactgatttctcattacaatgttttttagatcttatgcccatcaatcaatttttttagattataaacttcttacctgaggaatgtaaaactattaaaggaatgtaagttattaaaaatttacacaagttctactttttttcatgctctctttttttctgtattatttaccttccaaatatgtttttactgtcaatcagatat

SEQ ID NO: 112510 - DNA, 1031 bp, Homo sapiens
ttttcagagtatgtggacaaatatctggattccttctcttataaatcgaatatctcagaactctatttttgttacttttcacattgattaaaaatgtatgcatgcagacaatattgaaggctaccttgatttcaagagctaaaaatgttttatcaactatttcagagtaaagttctaaattataactggatatattttaggtataataactaccattttttaagtaggatgttattttgtaaaattttatcttttacctatatgtgaatgtaatgcttttgtgaatcttcttaagagtataaaggtagaaaaggtgtcaataagaagttcaattcaaaattaatttgaatacgtacatttgtgcctaatatgaaagtgaaaaaatatattcttgtgtgaacaagagcaatatgtatttatatagtggcattggtaccattgtgagcttctgattagccaggaaagttaatcagagaagttgaagtgttatacccttatgaaatatatcagagaatgagatcagtcctacccaaaatgtcactgtgcagcctaatgaggcaattgataaaatccttattaaaggagcaggagactcttacatgatagtttaaccggaatcatgggcaaattgtgaaactaaaatcatgagaactttttaacacatcataaaaattgtacacttccaagtaattaactttgcatatattttgtactcctgtaactgttgctcaaaatttaggaggacatttttttttaatgggtttagaatctatacagctgtcttctttctctcacacagtcactcagtaaataaatattgactgaatctcttcatcttggatatgttctcctgaatattctgggtatgggcatttttgctattaagagtgaattaaatttttgaaatgatccctagttatttggagaaaagtctaaaagaattagatgtttaactaaggtcgataatactttgttgggtaaaaactatgttaaagcactaaatctggttttcagatatagcttagaattga

SEQ ID NO: 112511 - DNA, 1115 bp, Homo sapiens
taatctctaccaccgagattgtcataaaccccaggtgacagacaaggaagcgaatgaccctcgcctggtgtggtattgtgcccgatgtaccagacaaatgaaaagaatggtaggaatcatatttttctttattttaaacagtctgtcaatgtttttgttggtatgtgctttcaaaacaaagatttgaatatttaagatattgaaaaaataaataatataagctgattatttatttatatgtatagtatgtacatgtgattaatatttctattgctaaagaccagaccatgttatgtgcatttttctctttttagttttatctaattctaatatagataaaacaagattggtgacacacaaattatgaatattccttactagtctgtcaatgtattgacaaacattttaaaataccatgcagcactgagaagtggtgagatacaaagccccactctttgttgagatctggtaaggaaatatagaaaatttctgagtgagcttaaaccaccgcatggataagatgtgtacagaggcgatatttatatgtgcatatctgtctttccagctgcatttctctgttgcttagtctttccttctcattgtcctcaagtgaccattacctcattcttcctatgtactttctctttttactgttgactaacatacctgcctttaatatcatagtgaaatatcttttcatttgttatattggatagttttctaacttttattcacttataaaatagataaatgataaatgaatttcataatttttcttttaaagaaaacaagaaattgccataatgtcttattctccacctctccctcccacttccatctctcttcccctgccttaaattagtgattctcaattgcagagttctcatgtctgttaatcaaatgaatttctatataaatttgtctaaccaatatatcttttaaaggtcagaagtacttagttaaaagtaaaaactcgggatacccattttactttttaatcagttaaatcagaaataggaagtgtttttatttattcctatgaaataaaaagtagtaaatgaaaagtgtgtatatcaatagtgtgtatatttcttacttgtaacaggaaatttcta

SEQ ID NO: 112512 - DNA, 1097 bp, Homo sapiens
ttacaccacatagaaaaatcagctgggggtgcaggatattctgttctactactttatgtgtatatgaattcacttgtttacgacttactttaatttccgattctttgtgatcagaattttttttaagctgctgaatgtaaccacaacttacttctaattattgcctaatattttaaggattaaaaaaaatcaagtaaaaggacagatctttcaacaaaataaattgaatatgggtaggataatttaagagaaaaggaggtatggatgaactctgagaactgtgtagctcctgtcttgataataacaaagcagccaatggcagctttatgtgaaaagaatatatgttttgataccaaacacacctgttttaaatcccacttaaatcttataattgtgtgatgataatagacaacgtatcttgatgtcccaggcacttttctgagtagtttatgtgaataattaattttaattatgataatgatcctttaagatagataactgttttcttcattttacataaggaaactgaggtacatagaaacttcatttcacttagtctgtttattggtaaaatggggataataagaactactttgcagagttgtaaaaattgaaggagatccagtaaatgagttacctagtgtagtacctgcctggtacataataggctgtcactgaatgacaactcttattatattccctaatacctactaagacattctatcaaatccttctaagctctgaccctcaaactccaaatcactcaggtctgtggacttagatcccaaactgagaaggagaaaatagaacatgactagctcaagtctaaccagaatctgaagctcaagagaggatctagtcccaggctcagagcccaagtaaacactggcattttgtccccagccttctttcaatactaggtctagtactccgaagcctttttattgtattttgaatagcagaaccattgtgacttcatttcttctatccattctcattgcagtaggttcagtgagttcagatcgaccaaatcaatatggctctacaaaacatactaccaaattcattccactgtgggtgttggtattgtccagata

SEQ ID NO: 112513 - DNA, 1052 bp, Homo sapiens
tggagaagtatgcttgtttttaatatgtttactgtttatctctcattctctgtgttttatcaaggctaagatatattcattagaatgaaagtgaaaaaaaaaaaccagatctgaatgcctaaatattaaacctatgactaattccaccatttaaaaatatattagaacattcctgagtaatgaaatcaaagacataatcttttctttttacccatttattcattcggcaagattcccaagcaaattggcacgtccaggaaagagatgcacactctatttaatatcctgaagtttgtggttttgtctgctactttctcactccctctctgcagagtggcacctgtcaaagctgagaaagagtaaattactctatttctgtgcttggcaggaatgtaatatggagtaacaagagctgtgccgcagaagccctggagacagaagttgattctatagtacctaccttcttaaagctcgtgacagaaaattagcgaactaaggcattctgaagctagaaaagaaaaaagaggaaggatttttttttttttgcctgtgatatttgcatacttggagcaaatactggttctactctctaaaaaggcacagtgcaagccaaaaacatcacatttgtacaggtttacaaatatttaatatttattttaaaaattatattagtacataatagggagacattattcaaggagagtaatttttttttttattctaagatcattaagtaacatttttaatctcccagggggaaaaccaacatctatattaaaaaaaatacgttaagaatcaacagtactttgttgcattttctctcaggcatctcattaatttttagatatcaccatgggcaggttattgctattctgttttgctgacatttagcattttattaagtgctaacagtgagaagagtttatagaatatgtctaaaatcctattttcatattcttatgtgccttacaacgtggcaaatataggcatactttttaaaagaatatttctacatatcttaaaagctattaaatagcatggctttgtttcca

SEQ ID NO: 112514 - DNA, 1030 bp, Homo sapiens
gggtttgctcattttaaaggagctgggtgtaatatttcctctaatgctagttaattgcacagggtggaatttttttcttttggaagtcatttagtcagtcttcagaaacaaaccttatagcattattatctactgcaaatttttactgatttctagaacaggcttttgaaacattcatcttttattttagcttctaaatgattatattctaagaccataatcacttcaatttatactttaggtgacccaatgaaagaagaaaatgaaagccataaagaaaagtcttacagaagaagaatacctgtacctggacttttctcaccaaacagaaggatgcatctttcctcttcatacatctgtaactttatttctgttatcttactgtgactgtaaaatctttaaaatttgcttagttgtcaccaaagaggtgagtagagatagttcactactaagagatgacctgatccaggatgttgaaatacagattatttcaaggcaggagctcccaccaatagtccaaaattgctgtttgcctgcagtagtagaacgatcagacaatttttgtagagcaggacttgctgttgtattgagacacataatccagaaatcctatgaagcagaccccttaaagaaggaacttttggaacttctgggctttaaaaagacttgcttgaaagcctgtgctgaagtaagtataatgtcttttttctgttatttgaagctacacagtgataacataattacctgaccatttaatattttaacttcctattaggaataaaagtttatttattttaaaaaaccccagtaaccaatgaaataaagtagccctttgatatagtttgaatatttatcccctccaaatttcatgttgaaatgtgatccccaatgttgttggaggtgggacctggtaggaggtgtttgggtcgtgggggcagatgcctcgtaaatggcttggtgctctcactggggtaatgagtgagttcttgctctattagttcatgagagatctagctgttgaaaagcgcct

SEQ ID NO: 112515 - DNA, 1057 bp, Homo sapiens
tgtctcctgatacaacataaaagcctagcccagggatgattgagctcaaaacttatttcccaataagacagttattttttctaaagttatattgaaattaaaaaatcttttcatttcttgttttgtttttgttttgtaggttagtcagtggaccaggctatgtgaactcaccatccctttggctattgagaattttctcagagaatcttctgaccagcccccaactatacctgtagaaatactacagctagagaaaaagcttagtgagcctgttagagtgcataatgatgataaactccgcaggcagaagctcaagcaacagaaggctgatggagttgggcctccccttactaagggaaaggcaaagagcaaggtccacacacaggaaacatctgaagggttggattcttcatccaagagtctggaactgaaagtggcattctcaaagctcacagtacaggaagaaccagctactaccaacagagagccttctcacatcagaaaagcaaaagcctccgaccttccacctctggagcatgtgtttgcagaagggctttacttcactctggcagatattgtgctcttgccctgtatccatcatttcttggtaaggtttcatctggactgtacacattactatgagtttcagtctatgaaattgcctaggtttgaatttctgttttactttttattgtcaatatgctgctaggaaagttattaatatctttctccattttcttatctgtaaaatggtgataataatagtacctatctaaaaggaaaaatgtaaggaacaaattaaagtttgtgtgaagtatggagaacagtgcttggcacatagtaagctctcaatcaaagttagtaattactatgacttttaatgtgaagttgctaaaatgttaacaattgttattattaatttcaagtttctgttgtgattactttctaatagtagaaggtccaagtcggctctgtggtgcaatggatactccgttggacgtctactattagagggtgcagttaaaaaaaaaaaaactaaaaatcttgtcagctaaat

SEQ ID NO: 112516 - DNA, 1008 bp, Homo sapiens
ctctcaaagaagcaagaacactctaaattttcaagaaaatagaatttggtggtagtgctagggagaaagcatctgaccaagagaaaacaaaaatatatgagtttgtatcaggaagaacaatttaaaatttttctaatttgaaaaaataaaagtcttactttaagtgctgctttataaaaaaaaaattctatagtgctagttatcttttttagttttaaatatttacaattttctcttttatctttttactattttctttagtaaaatgttctccttacctcattgtgtaatttttaaaaatatggttctgaaagatgcttcttacattattggtaaggaatatcatttagattatgcctaatagttcacacatacagagaaggtagtttcacaaacacaaaaaaatggaactttagatcattattaatagtacaagctctccatttttacacttctgcagtgagctacaaaatttctatgagacccctcaaaatacatcaatgattgcagactacagatattaaattgtgataatttaaacgtgttacattatttgtgttgaggaatttaatacttattttaattctttccccattaaacagttaaactaatttgcataagtatatattaaggattttaggtttttgatataatgttgtccaattaactctctatatgcagtgtgttaagaacttatcaagtatatagagggtcaggaacagaggaatgtgttcatggccatgaattatagatgaaagggtttccagattggaatgcagttgattatagaggagttcttagagaggggtaaaaacatactaccaatgaaagatgtagacaattgaatataagatgtaaagttttccaaaatgattttcagttgtactgtttatagacatttgcaaatgccattgttatttatattgattctttttggaattattgtattcttctttttctattgatggttgttttccattgtatagctgtaccacagtttatccattc

SEQ ID NO: 112517 - DNA, 1008 bp, Homo sapiens
ataatggaaagtaatctcataaactgatacaaagcattcgatgctagagtctcacagatttttatttgaataggttattcctaaagataaaaataacagagccatggagatatctagatatagatatatagatatagatatagatatagatatagatatagactgtgtacctggaatgtgattggaaggggtctgtgaatccatgtgtatgccatgccactgtacgtagatcaaataaacaaatgtacagcttctaagatggagaaggatcctgaaaatgttttaatatattgaaaagtggtcctaattcttgaaaatattgggaaccatttggttacaccagaggaatttttctctagtgacattaaaggcacttataaaagactagtatgagtggtattttggggtatgtgttaaagtggtagcttttaggctgtggcgattttcatatatgtaaagggagactttgatggacatatgcagagttctttttttattatttctatgtggattgtttttgataacattttcatcctcagctgaactttctctttgatatccaatatatttctaggtagcttattgcttctatggattttctagtaataattttaaaatagcattactttttattatcacaatattaaaaaataggaaagtaattgtgatgtcaaaatactcaacacatggtatttttatttaattaaaatatgtattttggggaatagctgatgattattactatttatcctcctccttaccaatatacaaatataattttttagccttcaataatataataagactatattaattccttaatttagaaagaggctatttccttttctaggaaaagggcattgaagtgatgttttctccccacccttgccctacttggactcttgattggaatgttctccctgcagcagtcagcccaaaggaaggtgagttttcttttttctttaagttttattcatactttggatactgtcttcagatatgtcttct

SEQ ID NO: 112518 - DNA, 1019 bp, Homo sapiens
atttcaaaggctgaaataattgagattttttagtttgaagaaaagagaactgaggatttaatgtacattattattatatttttaatggactgtttgggagtaagttgcagacattgttcactttcactcctaaatacttaaatatttcctaaaaacaggacattcttttttttttttttttttttttttttatggagtctggctctgtcgtccaggctggagtgcggtggcacgatcttggcttactgcaagctccccctcccagattcacgctgttctcctgcctcagcctctcgagtagctgggactacaggcgcccgccaccacgcccggctaattttttttgtatttttagtagagatggggtttcaccgtgctagccaggatggtctcaatctcctgacctcgtgatcgcccgccttggcctcccaaagtgttgggattacaggcgtgagccaccatgcctcgccaaaacaggacattcttttacatcgttatagtatagttatcaaacaggatatttaatttagtacacattattatgtaacctatagtctggcagattttggcacatttagttgcattaaggtgaaacagtttacagcctttgtctttcataacatggtcatttttggaatagttcaggccatatttttatagaatgtctctcaatttggatttgtctgatgttccctcatgagtagattccagttatgcattttgggcaggaatatcacagatgcgatgttttatccttttcagtgcagcctatcaggaggcacattatgtcagattgcacacagtgctatttggttaagctttattgaattaataagtaatttgtagagagatactttcagactgtgtaataccttgtttcttttcaaccttgcactcactagtttatattcattggatgcttcttgcctatgatagttacaaaatggtgattttcaagtctgtcatccttctatatttattagttgccactcttctgtaagaaagttttttcttctctt

SEQ ID NO: 112519 - DNA, 2993 bp, Homo sapiens
tatgttcatggagaaggagaagtaggggaaattctttcatactgaaagcttaatagtatccaatttcaattatacatctccattcaaaataactgaaaactgaaactaagtatcttattttgagtgtaaaaaatgactgagtgaatgagatcattttgaactttaaatttagcttagatatgtgaaaggcacagttgtataacatactattacctaaatcccgtgggactactttgctgtaagcaaggcctgaaagagtagcaagattaaattcaagttttatactttagagtcctcaacaaaaataagcacatgccctgtatctaacatagagacagcagttctttagctaggacagctttggtaaaatgggctcacagctttagtgcctcattgccacataatgtatggcttactgggtttctctctctctttttctgtttgtgagccgtgaaaccagattgtcttcttaggaaaatacaatgccttttttaaaactgtactaactgtagcatgtgattaaaagagaaaggttaaaagtcttttttcttcttggaattagatttgctgtaattcttctcattattatgttatgctttgttctcctctgtagggttagacttcaagaaccctatttatagaccatgtttttaagtactttacaaacagagaccataatgactgattatcaataaaggttttaatggccaatatcaagggtgtattatatacaatcttctagaagtattgctttttaaaacaaaatgcaattatttgatgcgaggaaacatctatgtgatcatacaaatttatctgaggtttattttatttaggtcatatgtagggtataaaaattgtctgggtttttttgtgtctataggaaatgaatgaattgaatgtttattgaataatcaaggagatttgggtttggttttgacttcactaagttgtttgtcatagcactaggcaagtttgaaaattaccatggtttattttagaaatattatgagtttactagtaagaaacttcaaattatccattcaaaggtatacttaagtattaataatactatttttaagtattaatatgtttcagagatcattttgcttcaaaggctaaaacaggatttatgtgaataatgaaatactggtttctgaaaacctttaccagccaagggttcaattctctcgtcaattagtattgaaatgtagttgtgtggggccattttaatttagcaagacttcctggtgaatttttctggagcacttcccagttccactatatttctagcagcatctgcattatcttagggtagaaatatgtacccatttcaagataagacttttcctaagcactttatatttttttctttatgagtttttccattgatcacaaatcctggataccataataaaaggctgtgatgttttagaatgaggcagctttacatgaaaatttgtaaatatttgacataaattattaatgggtaaatttttagcaagaaaccactttaagtagaacaaaacttactgttgagagtcatccagaagcaatgagggacaggaaaaaataatgttttctctgaaacaaagatagttgcaataaagcatttagttccagctttcagcatgatttctaataaagataaaagaatgaacaatggaaaacattcacagagttatttgtagttatatataaattatatatacagttggatgtattcatgaaccaccctaggattaaaaatatttgaaaaaaatttgcatctgtactgtacatgtacagacttttttcttgtcatgatgccctaaacaacacagtagaacagctatttacatagcatttacattgtattaggtattacaaataatctagagatgacagtatatgggaggatgtgcatagattatgtacaaatattatgccatttgtatcagggacttgagcattcgtagattttagtatctgtgggaggtcatagaatcaatccttcactgatactaagggatgactgtagtttatacataaactatacatacctgctgtgaaagccctgaagttgatttctgtttatagttaatgcaaaactagctctttattaattccattttgtacatctgcaaaaaggcattttcttgaataatttatctcttggattacctttccagacttcttttaaatatctcacggtaagtaatattgtttttaagcttaaaaatcctcgacgttgctaaactttcaagattttttttttttaatcttaaatgcttataggagttggagggaaaactaatgatgtagatccctgtttttctgctaatgggaattaattagtactattcattacgattgaaattggcattctctgtgctattccagacagttatgataaaaatcagctcaactatacaaggaactattttattccatgctttgaaccagctcctcttagcacccaagcccattcattatttttatctaattaggccaacttacattggagagatacctgaagcaaggaaatttccttaatagctatgcaataacaatagctcacaggcacttaaacaatacagttgtctaagattgaatcatcagaagaaggggaaaaaaagttatccttaaccatagggtaaaaatgtagtcataaatagacaaccatcattatttaaatggcataaatatacaatattagttatcaatagtataatgtttatagatgtgaattttgtatgcttatttgtggaaaattgttaaatttatttttatgttgaaatttgtagtcacatttgaaagttgactgtattctgtacacaaaaatgcaaacatgcttcctaggaaaaaatagaaattttgcatatgattacacagcaaatattttctaaaactagggcaaagtcttaattcccaggacaactccttatcttaaaaacaaattattttatatgacacttttactctcacttgtctgttgaaatgagaaaataaaagta

SEQ ID NO: 112520 - DNA, 1048 bp, Homo sapiens
cagctagtaatggtacaatcagaaatctcagaatttgtttagaaaagtctttttaaaatgtcagcctctctacattgtgctaacggaattcccaagaatatttattattattattattattaaaagaataacctacatctaggaggcagcatgaaggtggtgatgatagttcaagtgaacccagtttgagagatgaagctcaagggactaagaggaggctgttggtccatttgtctcttactcctggagggttaaatgttagttgtgtttagtttcaacaaaggagatgcccttaccaactggatcctccttaaacagactgagctacttgagggcatcaactgttcatgtttgtaacttttatgcctagctgagtcaccagcaaaaagaaggcagagatttaatgaatactgaaatgaaataatgaatgaattgtagggaaaaatagtatgggaggtaactggagttataaactataatattgaatgtgaccaccatgagtcatcaaaggaggaaaataatttaaaatttttaattatccctaagatctgatttttacaaatttttaccaaaattagaatatctgtaaatatccatgtggacttaaacaaaaaattgacttttttgattaatataatacaatgatactcattttttaatggaatagctagtgaaatacaatacagtaccttagttcctcaaagccaatgtttcaagataattcagtcttatataattgtgacctaaagcaataaaacattggtagttatttcgcagtcctctttagtaggctggctcactggatctgagaaacagtgcaaagacaggaaacctatgtgttctctaccttcgcaatgtttagaagaccagtccaaaaaactgtgtcttatgcagcttagtaatttggtcagttaatgacatgaacatttggctaagatttgagaaaaaaaaaataggcaaaaaaaaaaaaaaaaaaagagagaattcaagtataaaatacagtgaattccaagttagtaagggctgcctcaaggacaagagagaaagc

SEQ ID NO: 112521 - DNA, 2213 bp, Homo sapiens
cccagcctcccgggttcaagtaattctgctgcttcagcctcccaagtagctgggattataggagcccgccaccatatctggctaatttttgtatttttagtaaatatgaagtttcaccatattggccaggctggtctcgaactcctgacctcaagtgatccagccgcctcagcctcccaaagtgccaggattataggcttcagccaccactcggactcaatatgcttttaaatgtaattttctaaaaacagcttttggagagaacagaggcatcaatactgttacagtctattagttatctggccctatggacattagtaagtaacattctagagtatgagtgtcagagaccagtggtttgtctattaaaatagtagaattatcttacttgataattcttgagaaggctgtgactcagtttactaaatttactatatttattaaatataaagcaatgtttggctccttgattctgcacacctttatttgactctgcctgttttctttcacataaggactacagcattttttactgactcctccttgaccatcatttttttcataatataataaaaacctggcatttccgtgaagttgacttactggcttgtattgctatttacttctgggatgtagtaatatagggatatactatggaaagaaacttaacaaaaaacagagaaaattatctgtagttgtcaagggctcattaacctttctgtgccttaaatcgaagccacatttttgtgtctgtgtagcttgtcatcctcaataaaatctgcttgaatttgaaaattctatttctagagctgctttttatttgctcattactgacatccctcatttactcttctcagggagggactggatattggtgggtctccccacctcaactctcccgaagggagaaaattccctaggtgttttgagtgacacagcaacacattctttggctttgttgtcaaattggaagtgtgtgaatcctcagtccctcaggccagatttcaagtgttttcccaaaggaacttctcatatggaaaatagtcagtcttcctttgcataatttttatacctaataaatgattcagattggggctgtcagccgtatggtgggcaccctaactgaaggaggcatatgagtggcagattataataataggttatatattttggtcatcagcctgaaatcctaaatgaatatattctaactcatttagtttctccccaaagctttgtaaggatattcttagcatttaattatatcaaacaaaactatagtttatttggagtcagttatttgttctgggttaattaacacatctgatttaaaagtgataaacacttaaaataaatggaaaatgattcctgggtagataggtctaagtggatgcagttttgtacctgacctggttcatgtgtctgacctattactacttcaaggaatgtagtagcaggtgttgatatttttccaaacggcagattggtcatgtttggtgggatatgcttagtgcagtgtgaaattgacatttcagagctccaggttgctatttacagtgactggtttctattgatgaactttttgcttcttttatttacagacccacataagcttttaaaagttgattctcagttttaaattgattcatgcttttctttcagataaggtagtttgaatttccctgaatagttttattcttgagtataatatcttttgggggatggtgttcatttcactctttcctacatgtttctgaataaaataaatttagattttgaaaggtcagttagtccagctgctttcaatttgaagagacttaattctccccagacaagcacaatgtatctcacttaaaaaatatattttagagataagtagcttaagaataactgtacctattgaatacctagcatgatatctccctcatttacctaataaacaagacacacattaggaaccaacatcaaaatgtttttgtaccatatgaaagctgtcacagtttctctttttattgtaaatggctcatcaacttggaaatttcacataagtagatcagaatttaagagtgcagaggatattagtatcctcctagaaatttgtctgttatgaacccctttattatttcatatttccaccatgaaagatatctctataaggatgaagcaaagcagaaataagtaaaaaggcaaaggaaataactatacttaaggatatg

SEQ ID NO: 112522 - DNA, 1017 bp, Homo sapiens
tctcatgaagcattttgatccttattaatcttacataataatgttttcttattcatgtacttgaaatataacagtaaaagcacatcttaactgtataagtctgaaaaaggcaaaactatggagacagtgaaaagatcagtggttgccggactactgggaggaggtagagatgaacaggtggagcacagaggatatttagggcaatgaacatccccgtacgatactacaatggtagatatatgtcattatatatttgtccaaacccatagaatgtataccactaagaatgaaccctaatataaactctggactttgagttatgatgtgtcaatgtaggttcatcactattaacaaaggtaccactgtggttcatgatgctgacaatgagaaaggctgtcaaggggaggggagcaagagttaggtggatatatagcaaatttctacagcttctgcttaattttattatgaacctaaaactgctctaaaaaataaagtctataacacactcacatgttttaatatttttggtgttttttttttctgaactgcccaagggtttaacaactctgtggcctataaaatgtcttctattcaacatatcctcaccaagaaagtatattcatatatgaaataaacttactggagtcttttgcatttccaaaatttgagctggatttttctttttatttctaccacgtttgtttttactttttattatttctgcttttatctatctatctatttatctatctatctatctatctatctatctatctatctatctatctatctatctatgagacagagtctcactctgtcgcccaggctggagtgcagtggcgggctcagctcactgcaacctccgcctcccgggttcaagtgattttcctgcctcagcctcctgagtagctgggattacaggcacccgccaccacacccagctaattttttgtatttttggtagagtcagggtttcaccatgttggccaggctggtctcaaactcctgacctcaggt

SEQ ID NO: 112523 - DNA, 1042 bp, Homo sapiens
ctctataacctgagggcattattataatgctatattatttataattgatactcataaatatgacacagtcattaagaaaagatgaaattatgttcaagttttttaaagaaggctaggaaacatgtaactgacaagaaatttcaaagttgtaaaaaatgttttgggttatttgtaatagcagaaaaaattgaaatatcccaaatgactatccacaggagaatggacaaattatatcatagctctaaaatggaatactaagagtagtgaaaaaaaaaatgcaactccatgtgtcaacatggatgcaacttgaaaacataatgttgtatgaaaaatgcaagaattatacatataattccatttatatgaagtttaggaaacttcaaatctgaatgatatattattagaaatacatatctatgtggtaaaactcaaaagaaaaccaacagaatggtaaacacaaaattcagtatagtggttatttcagggctgggaaaggtgagggagatacagttggttagggatatgtacataggacttcaaaaatactactaattttttgtttttgtaaagctggataatggatacttcagtagtttttatcatcaccattattatttataactcatgtagtttaaaatgtatttctatttatgaaccaaaaaaactggttcttaagagtatattttagttatctggtagtatttagttatcagaaattttccaaaaatgtcagattggtgattcattattgttattattacaatgtaaaacataaacagatggctatatcaggaagcttgcttttaaaataatattcatttatttaaataaagaaacttttctattaaatagagtttggataacagtatttattagatagtttttatgaaaaggaattattcaaaatagaataatcccctaaattatagtatgtcttctaaaaattctggtgctttgggttagtgaagagtaaatttcagtaacaaaacattgtgttaaattttagagaaagcgtcacctaattcagaggatttatatgtca

SEQ ID NO: 112524 - DNA, 1049 bp, Homo sapiens
tgcattataacccataattaataatctaatgcagattgacatccatgaataagaaaaaatctattacttttcatttcttgtttatgaataaaaggattcagcttcccttttattaaaactcgagaaggcacatctattttgaaaggttttctaatatatttttcattgagaattttttaatacacaattatttttaatttcatctgtcattttgggagggaatagaatgtaagattctgtttggtttttattgttttttaacaggtggtttgggaacagagtatactctgatgccttgtatcaggatcgctcttttatgcaaaatgctttacttttcctggaaactaatctccttaaaagctaatacccaaatcaaacaatgtacccttttcagtgctgaataaaaatgggtcaggaagggattaaaaaactggcattgcactaaagtgaggcaatgaaagttttacttttcaagctccccttgttatatgagaatttataaattaccagtaatttagcctccattcttctgcctcttcttctttccctccccctatgtaagccattattgttattacatgtatgaaacactgtttttttaagaaattttcccattacatctgttagaaatttagaatgtcaatcagcattgaatccagtttgcatcatctgtatatttaatcagtgaaaaaacttaggctgattttgcattatatttactacttcagtttctgcctgtgtccctttttcattcatctcctttttccttagtgtctgatgatcaacactgtgtccttaataggtgtcaagtttactgaagtgtttgattcaataaacatatctgaaaatctaggtacaaagacttgtaacagttggtatagagttgaataaatataagagtttgcagtcttattgaaaatccctcaaaataagactaacttagatatctccagtacaaatgaaaataggtatctgactgtggagagagtatctaaactttttgagcttcttttattcatatggaaaatggaggacaaatgcagaccttt

SEQ ID NO: 112525 - DNA, 1828 bp, Homo sapiens
caataattttgtgattgagtaggaggaagagagctcacagagtaaaattctgagaagcagagtcagggatgtaatattttttcttcccttattaatatttctggaagtttagaaaggttgaaaccaaaaatgagtaatcttgtctagaataaagtcaggaaagcctttcacaccaagtatagtctaacaggtttttcaaacggattttttcttacagacaagcataagaacaaaataagaactaggaatgatagtgatgaaagtgacttaattcttttcatttttttccattcaaaccatcttctctgcctagattatcactggagtctcctaactggtttctctgccctctggccttgttgccaccaatccataccatacattacagactactaaaacttcttttatcataattgcatgatctggtttcagtttacctctccagcctcattttcaccctttacaccctgtccccccatcactactatcaccatgacacacattgtgccctggaaattgcgtaccaattttctcagttcttcaaacatgccatattctttctcatcttgggccttcatgtgtttctctccctaaaatacccttccattccccccaaaccgatttgtattcattttttaggcctcagttaatatgttacttccccatgaaaatagtcatcaagtttgaatgctcccattaacattgtttgtctttcatttaacgcttatcacactgtattattattatttttgatgttttgtttttggtttttttgtttgcttggttggttgattggttggttggttggttggttggttggttggtttgtttgtttgtttgagacagattctccctgcgatgcccaggctggagtacagtggtgcgatctcagctcactataacctctgcttcctgggttcaagggattctcctgcctctgcctcccgaataactgggactacagatgcacactactatgcccggctaatttttgtatttttagtagagacggggtttcaccatattggccaggctaatctcgagttcctgacctcaagtgatccgcttgcctcggcctcccaaagtgttgggattacaggcgtgagccaccacgcccggcccacgctgtattattattgcttgtttcacttatatcactatgcttcaaagctatatcactatagttcaaagacctttcatttttcctttctgtaccagattatgtgacatacttcctgccacagaatagaggctcaatataatacgttctacattattaaagctatgaaatatagtgataatgctttgcctaatgtctgaattatgttactaaatatactattgttttctgggtaaaatctaggttacattaatagaaaacaaggaattatcattaattcgtgctaagaagagaagtgatgaactgggtttaagcaacatttggttcattcaagcaaatatggaatattttactgggatgtttaatattggagtaagtaatcaagtaatttcaatttctttaattagctaaataagaaaaattacatgccttagagtaaataaaaaagataattttgtgttctttgccaaacaaatttataattttgtatacttatattatctatgaaatatagcatattaatgaatattattatattcatagcacttcatcattacataacagagataacattggctcctctatcagaccagaactttattttcttcactacagaatccccagtagcaagtgctgaaaactggttaataattgaataattgattctgatgaacatgacttgccttggtttattctgcatttttagaa

SEQ ID NO: 112526 - DNA, 1003 bp, Homo sapiens
aaattgttattatttgatattatgaaaaatccctaagatatgtaattctgcctgatcattaaaccccagggttttattattttttgtagactttgagttttatgaacatgttagtgttgctgctatttcttatatttgctttaaataattttttttctgattttgataggaatatacattttgatagtaatacagaaaaatacatagtaatataaagaagaaataacctatatgcctactatcaagtgataaatactatcaaaaatctttagttttttatatttatgcacgcatataaatgcatattttacacatatgtgaacattgttaagaccatactacatagatcctgcattgactgaatactgttaaaaatcttttacctactttttaatcatacttttttttctcattgttataatgcaattattactatgatggatattttatgcatcctttaagaattttgatgcatttgccaaaccactttccaggaaggttcttactgacatcctttctaattacatatgttcatataaacatgtggttgtctaggtagaacttttatcaacttaactaattcagaccttttatagtatttctgatttttacccagtgaaatttatttcttaaatattgactactgcaaatttgggggtttattgtaatttttttccaacctaaaaaatatgctattcgtttcctttgcagacacgatctacagtttacttctctttttataagcctggctgttaataaggaaattcaggaaaatgtagacatgtaatctagaaaattcaaattaaaaaatacctgtgcagctttaactttacataaatgttgaggtaaagtttagcgcttctcccatgaaacaagccattaaaccagtccagatattaccagtacaccagacagaatggtagcaagtaaatgtggactgctacccatttatttacctcacaaagcatggaatttccagcctatgtctgttccatccgtctct

SEQ ID NO: 112527 - DNA, 1702 bp, Homo sapiens
ccagcctggccaacatggtgaaaccccgtttctattgaaaaaaaaatacaaaaaatacaaaaaattagccagatgtggtggcatgtgcctgtagtcccaactacacggaggctgaggcatgagaatcactgggagtctgggagacgaaggttgcagtgagccaagattgcgccactgcactccagcctgggcgacggcgagactgtctcaaaacaaaacaaaaaaatacagtgtacttgaagggaagaaattattaagtaccatcttctgaaagtttacttttttcaaaaatactatttgtgcagtactttattcagttaaacaatgttgaactccagaaaaatgaggtagtttttttggtggttgtttttataactttgaagcagaagataaaaataaacccacattctattgctttttcttttaggaacacatgattctgtgcagatttgcagaccagacagctgtccagctcccaccccaacgaaggctcataggtatgtgttttcacagagcagctgttgagtgtattatgcacaatatgactgggaatgattggaccaagtctatatgggaaaaatttagcaacatgaagtctatttttcaatgagaaactaaatatgttcttcccaaaaaaacttaattcatattgaaaagggtattgtaactataacattttatcctattttggttaactttaatacttttaaatgtattttgaatgtttgtacattgagtagaattcttacattaaatctcttactgttatgaacaaactgcaagatctatcaaaagccataaaagaaaataataaagattaaaaagtcaactatatataccaaaattgatgcattataaaatgtatacacagggatgataatgttttctttctcaggaaaaaggatacttgtgtattatttatcatagatgaatttgtttgacaatattaaatattacctaaattggaagaccacagaaacatttcaagtttaataagtaattgatttattgaagacatcactttagaaaaaacaatcacatttaaaagaataatagcagttaatagttatacatttaagcactgagctaaatgctcttgactgttatcttggtaaattcttacaaatatacatatggggtaggtactattatttacattttaatgataagaaaactgagacaaaagctttcctggggtccctcatctggtagatgatggagctatactatgaacccaacttatttgattctggacatgaagttcttgtccaccttagttactgcttcccagcatactggtgtcatatcagggtttaagataagtgggttcagtcaaaactaatcttaaaattattcagagaaacccaacattggacaccattatattttttctctaaatttacaatgtagccccttttcctccatgatatactagaaaacagattgttgtttctttggctgagcaccagatgaagctgttagcttacattcagagaccaagtcgtatgagaaatccttatctttaaactctaaaatcaaaggcagcatagcaagatgctcacacttggagacctgagacctgagactcaaggagtaagtgattccttctctttctcactctctgcagcataaacatttggaaagaactcattctctcttgcctgcaacctctttgtctttcaatgcctttccttcttgctcc

SEQ ID NO: 112528 - DNA, 1017 bp, Homo sapiens
agcaatccaatgaagacataattagtatggtggatggatgggtacatggtagatgtgtgttttaggtatcaaactaaaggggagtatctggcagggaagttgctagagtggtgggggtgggggtgggcatttggcaatgggaagaacggggggaatcacattgagagaaagctgtcacgtctacatctctgctttacacaggccattcctccccaggcccacaaaggtagactatcagcagctaaatttcagttgtagagacacttcaacatgtgaaaacatgaaattcttctacataatggaaaaggaaaaattaactggactgggatcaaagccaagggtagatgagctcaatgtaaaccctgggtgggtacttaaggaatgtagagcatcccattctgacacagaatgtttcattttaagctaaaaagtagatgggagaaacatttacagatgtcttaaaggaaagacaatattttaagggaaaaaaaagaatgtcggccataaggctgttaatgaagaagggatgattttgcctaaatggaattctggacatctctttttatatcatttctaacccagtttattctttgtgggatgggctcttttaaggaaaatgtacaaaataaacattttaaatgtgagtctctcattgctaattcttacctactgatttcaccttccactgtttttttctgtgaggattctgttgttcatagaacttttctattttggtgatctgtcttcatttctgaagttgttttagtttatcagtttccactgtcattcaatgtttagccattattataattgtttaggaaaaatataatgaagttctgcatagtcagtaatctttttccagggggttgaagaagcttatatattgaatttaaagcaattgaaagtataaaagtaaatcatggctttgaatatattcagccccaaatcatttttcccaagctacttttgaagtttgtgtttgccaaaggaaaacaaattaactgcttttcttgccag

SEQ ID NO: 112529 - DNA, 1054 bp, Homo sapiens
tatcccatagaaggtgtgtttgtaggtagggaaaggtggtggtaccctcattatattatttaacagaccttatgccttagtgcagtgaccctttggtgagtgtttattccgtttggttgagcatttgtgagatgtttgacttaatattcatgtgagtcaaatgtacgtatctgtacaaaacatgctgcccttcattttcacttgctatcttcctatccatggtcttgtttggagaaaccgactaatgttgcaggatgctaaagctggtagacctctccttctggctcactatgtctaagcagagccagatatagctgggaaactttatatccttccctctaggactcaggaaggaaggatcagagatgctactcaaatgggcatagaacctgtcctgctgcttcctgcctgtaccacccaacattctatcccaacattcctgcctgctagggaaagcatgacccgttccagaaataggcaggttgtgttttcatagttcttttgtaggtcatacccttggttgttttttttttttttttttttgattctttgttttgtgttcttgactcttaaacagatctctagcatattgaaaattcaacatttgattttctaactgtcatgggctttacttttattgactattgatgtggctgtttattgtcaggtgaaaattttttaatatgttcacacactgatgattgcatatttgcagcacacagcatcttaaaccactcagaggtttgtcacaaaatgtgtgtttcttgctctgtaatttttttgtcattttgatggcatattttaattatgcttttatttctctccttctaccaagtggagacctctgtaacaaagatttttcagggttgcatatttcatctttaaaagctgtgtacactgtggaaacaattgttaaccaaaagcactagataatttaggataactgagttcaagttctgacttttgtacctgaataggtgtctaacatttctcagctacagttttcttattacacaagcatatttccaaggtatgttgaagctctaaactgcaa

SEQ ID NO: 112530 - DNA, 1048 bp, Homo sapiens
acaacttattatacagtggtggcagcaatcataacattaaattaattttgtctttcaaattctgagaaaaaacatgaggttggagatgtcttctgtatatcctctaaaaattttgcctctttttttttccagtttgcagctcaccttgtgaagatgaaatatccaagaatctgtattctagatggtggcattaataaaataaagccaacaggcctcctcaccatcccatctcctcaaatatgaagaaccaagagtgtgactgccaaaacttagtgtggcatcagcaccaacagcacagttcttcatatccacgccactctcagacaaaactagatgtccagattgttgcatttccgtaaagtttgtcacgagacattttttaaaatctcataacccacatgttcagttatccatgcaagaaacttgactctacatgtattgctgaaagaattttcttaacagtgaaatctgatcatatatttttaccacactgccacataaagcccaagaaattcagctgacaagacagatttagcattatcaagaaatcccatttgccctgaaaaagctgtcctccattgtactgaacagacagtcctgtcgattgtgttatttagaaacatacactgaatgtgggctgaaatcatcatctttccataatgaaaactgagaaactattcacaatgcattccttataaataaatgctacatttagtaactcatttcacccaaacaagggggatgtgtgtgtgtgtgtgtgtataggaagtggagtttatcccattgcagaaagtggtaatacttactcccagaaaaatgaaatttagaaaccatttatatttgatagaatatttggtcagttcctgtagcaaagacgaatggcttaaacaaattttctagtttctttatcacatgaaagtctgtacagtcagtccagggctagtctactggtttcctgatcattaagaactcattaccttctctcattgctttacaaacctcaatatgtggcatccatctcatggatgaaaatggctcctcagcttct

SEQ ID NO: 112531 - DNA, 1002 bp, Homo sapiens
attcagcatatgtgttgtccctgtattaaacttctctagctccagatagtatctatctagttcttcagattaatatgatacttctagaacttctaaacgtgtcatgggtctttttacctgttctaaaatttattagacctctttataccttaagcatttagttaaagaatgagaagtgaatatcctttatcagcttcaagtatgcaaggaattctttcttgatcttgttatacctataagcactggctatggttaaacttggctttcttcctgacatttttcttgccttgctcgtcagcaaatgttttagtctgtaggtttatattagattataagaaaatagtttatatattaatgcaccttgaacatgctggacatcatataaaagttgggagtaacagtggaaactcttctacataactctgatttgttaagtgataaaagattacttcgaaagactcatgaactaaaaactcctgttgagtccttattcttatagcttttcataagttttgtgtagtaaaaagcaaagtagtagtgaagagggccttaatacacctaatccagacattggttttcttggttttttaacatgtttactagaaatattatatggtaaaatataagcagtttttaaaaagagagagcaagcttttttccaatttccaggaaaaactgcaaagtcatcatcttaatcttgtgatctttggcactcacatttgtgacctgacacaggatgaaagttatcttgtctcaatatgtgttattctacatacccaccctgtactccacagcccaccatttaattactccttaccacaggaatgtctgtggctgaataagaaactaaccatagttgccctcccatttgacccacagaggttggaacttggctgtgatccatcatagtcctaactgttttttgaatctcagtttttattgtatacattcttttcagggcatagcgtactttgtgtaatatgaccagtggcttgaacacag

SEQ ID NO: 112532 - DNA, 1441 bp, Homo sapiens
ccatatatcagtaatgtattgcatttcctatttatttctcatttcattgtaggtattaaacaacagaaatgatagatgcttaggaaaatgtgccagtaattgcatgcacatataccagagttgaaaggctgggtgaattatatctggagcccggtaacatattgtaccatccttttctccttagacattaactaagaagattgtgttttaaaattatattcatttatttaaatatctgttgacttctaggagtgggtgtatctatatatataaaacacatgtatctctatatatgtatacgactagtcttattggtggtttattatttctttgtaccagaacagaatattcatgcataattatttaaagatgatccagtggtaatctgtaagtgtgactgatacttctaacttgggttatcttaattattaatacatagggtattactcccttgtcctggtaagtcacttgactgccttgtgtattagttctctaatattttcagttagataattcaacttcccttttagaatttctctatagaatctccagtggaatgtttagtgtatggaagtattccttatattttaatcaaggtgggtaatgggaacatattaggaaatgagtgagcatggtactgacaaagatagtgagttaagttttagatacatgcttaagatattacggggcagctagatttagaagctgaggcactgttagagatttttagtgacaaaatgacaagtataatttcaagatcttacttgtcagagtctaaagtttcctgtagtcagttaggctttggtgaagccctagtaagttaggctgtcataaaaatatttcacttattagggagaattataatgctcttggcatatttagaatggctctttttttcctcaatacctgctaggagcataaagggattttttgtgatcttgatgatgtttgaagcatgaatcagctaaatacatgagaaggatcataacaaggacaaataatgcaaaaatgttgtatagattactaatggtgtcagtgagactaaactgcagtaagtgggacttgtgaaaaatactatgtttggaacaaaaaagcaaagcaagattgtaattacttttggaaaacatccaataatgtttagcaataagaaaactcaccaactttctttagtgtttttgagatgtgaagcatacaaattgtgtgaactgctggtcaggaaattgtgtccactttctatgagacctatgtaagtttactcactgattacatgtttaataaatactatatgacaggcacagtattatgcactggggccataaaaataaataagacatagtgtagctctgtagtaggatggagagaaagcattggcagcttagaaaatagtataaggataacacagatatgtgaggctcatggctgtcttattgtaaataggatg

SEQ ID NO: 112533 - DNA, 1048 bp, Homo sapiens
ggggaaaatttaaaaacagatattacaatacatcacctccaagctaataaatggtcatgaaaatagcagccaggagcatgactgatgaagactctgaaattgtaacgtgattctaggaagctgaaagaattcacataacactaacctaattgttgctcttgaagcatacaactaattttgcaacatgtaaatactttataaagtttaaaagaaatatttcgtacgtattgggaactgtaatgaaaaataatgttagaggtgatcagaatttttacttatcttgaaaatttagagtagatctgagttcttatacatcttaaacctggtcccaaattgtcaagaatctgataggaaggcctttctctatagcagagctgcttgttttatggttgataagggtttctggtttgtgaaaggattcctgctttctgaattttttgagcagtccaaaaattatcttatagtttagatcagtgttattaagcatattttgtttcaagataccaatgatggcattaggtttatatttgctttactattgaatgtttatatgtgccttagatttgcaaaacaaaatatatagagcatttttcacttttgaagtagattaaaagtaattaacctcaaaaacctttaaaagtcagaaactgtttaaaatatccctacatatactgctgatagatattgcaataagaatgtaaggaccaaaatgtattaaatttaagagagagatttaaggcatcaaaagaatataccttgaaataataagagccatctgtgagaaaccaacagccagcatgaggctgaatgggcaaaaactggatgcatattccccttgagaatttaaacaagacaagtatgcccactctcaccactcctattccacatagtactggaagtcctagttacaacagtcaggcaagataaagaaattaaaggcatccgaataggaagaaaagaaatcaaactgtctcttttcacaagtggtatgattttatgcctagaaatccccatagcctctgctcaagagctcctagatttgatgaaa

SEQ ID NO: 112534 - DNA, 1033 bp, Homo sapiens
aaaggaagttacaaaaaataggaagttgctcataggatttttggtgggaatttattaaaacagttgtttagagaatataatagatacgttattttactgtacctaaaacaacactaaagttcatctagataaatctgtgagaataatataactggaaagttctgggaagaaatattatgaatggttaatagggttaaaaatattatctgtttgattatcaattttttaagatgccttaggaagctataaattttcaaagccaaataaacatttcataaaaagagtttggtagtattagctctgaagtaatagttttgaccataaggtaataattatagaactagtaaagtaagttgttattgttttaattgttattttggttttttaatttatttgtatttttatcgttttacagatgtatttccactacacaaaattttccacctctgggataccttactacttgggaattcctctttcccattctgtattggagtagcaattcttcagcagctgcgggaccggcttttggctaatggctttaatgagtgtattcttctcttctccgatttaccaggtatagatctaaataaatggagccattaaatgaaatttgactatgaaataatgacacattcttaagccattggcaaaaataaccatccaggccttcagcatctcttctgtttgggcctcatcatcctctctggattctttctctcatatactgcttcttctgctgacccagcattgtaaatacaaatctgggtcatacccgctcactgtgatttacttccatcttggtaatgctactaaatgggtaaaatgccaggaagttgggggcaatatcatatttgctcttttgcttaggacaggggctgtttctcttcagtgatggaaagtatagaaaggccacttgggaaggtgtttaagaatctgtgtttataaaaagatacaattcacaaaactttgttgcctcccagccaaagctgcttgctaacaattttacgatttgacaaaaggaaatactgcc

SEQ ID NO: 112535 - DNA, 1054 bp, Homo sapiens
tgacctcatattctagagtaaatagacaataatgaagataaatatattatatggtaggtagtggtaagttctaatttaaaaaaaaaagctaaagcagaggtatggatgttatgtgctcaggtaaagaagagattgaattttcattatttatttctgagacagggtcttgctctgtcacctaggctggagtgcagtggtgtgattatggctcattgcagtctcaacctcttgggctcaagtaatcctccctcctcagcctcccaagtagctgggaccacaggcatgcgccaccagacccatctactttttaaattttttgtagacatgaggtctccctatgttacccaggctggtcttggattcttggctcaagcagtcctcccgctttggcctcccaaagtgctgagattgtgggaatgagccactgcacctggccatgaattttgaaataagtaaggtaaccaagaaaacctcacagaaaagttgacttatgaataaatgctttaagaaagcaaaggaaagagcaaaccaagcgaaagcagcagcagttgctacagccctgatgtggaagcatatcagagatgtggaggagcagccagtagaccattgtaactagagcacagtgaacaagaagataaggtcaaataggtaatagagggccatattacatagttttgttgatcatcattaggactttggcttttattgttagaggtggaaagccactgatgcttttgagcagaggagtgatgtctcatgtaaagattttaacaaggtcattctggctgctatgctgagaaaaatcgaaggatgggcaagaatggaatctaggaaactagtcatggactattgcaatagtctaggcaagagataatgttggctcgaatcaagatattagcagtggaagtagtgggaagtttttatatgctgcatatcttttgaaggtagagccagcaggactactggtgacaaatatacagtgtgtgaggaagagaggagtcaagtacctgagcaattgaaaggggatagagttgcttctaactgagatttggaa

SEQ ID NO: 112536 - DNA, 1046 bp, Homo sapiens
tgtcaataatttagtactatttgttcaaatattaaaagctaaaaactttaaaaatttaacaaataacaaggcagacattattttttgaagattattttcaccaaataatcggttttaaaaatagatgttactttactgtaggagaaagttgtgattatgaagggaaaagttttatgatgttattgtcatttcaatttcaaaaaaatgaggttgtcacctgtaatctcagcactttgggtggccaatacaggaggattgcttgagcccaggagtttgagaccagcctagacaacatagcaaaacccagtctatatttaaaaaaaaaaaagttgagctcattgaaatatgtattaatcttggttttttaattagtaaaaatataatagttacttgcccttgagtagattgttagcactatcttgtttagattagtgcatagtgagtaaactggcaagaatagtaactttggaagaatgaaaaaaatgaacatattcctcatatttcaactgaactctatgaattctaatagaattagaatcaacaaaatatatttttaattgcctaccgtatctctactttctgattaaacatggtattcttatgtctttttttatacttttaatttttatttttatttattttttatttttttatttttttattattatactttaagttttagggtacatgtgcacattgtgcgggttagttacatacgtatacatgtgccatgctggtgtgctgcacccactaactcgtcatctagcattaggtatatctcccagtgctatccctcccccctccccccaccccacaacaggccccagagtgtgatgttccccttcctgtgtccatgtgatctcattgttcaattcccacctatgagtgagaatatgcggtgtttggttttttgttcttgtgatagtttactgagaatgatgatttccaatttcatccatgtccctacaaaggacatgaactcatcattatttatggctgcatagtattccatggtgtatatgtgccacattttcttaatccagtct

SEQ ID NO: 112537 - DNA, 1002 bp, Homo sapiens
ggggcagaggtgatgggtggacaaagttatatatacataaatatgtatggatgacaggggtgtagagataggagttttacttttcaatttgtatcttttttatagcattaacattcttactactaaaaataaatacttttttaaaagataaaatgcactttaaatattaattcagcgttaagggaagataggcaataagaaggaaggaaaaacacttggaagcctagaggactgtgttaaaaacacagagagaagcaaataaaggagctaatgctggagggagacatgaaggttttaaaactatttcagacttgtgtatattttctcttgattccttgacattaaagttctgtattatgatggttagtttagaatgctttctagcaacagttgttaatttaattgcatgagacttttacatagatcttaccacattgattgtaaaaatgtactatcgcttctttccctgttgtaatttttcattattttaatgtatcattacaggtatccctcgtacttggcccctgaggtaattgcacagggaattttcaaaaccactgatcacatgccaagtaaaaaaccattgccttctggccccaaatcagatgtatggtctcttggaatcattttatttgagctttgtgtggtatgtataaagaaatattaatataataaaaggaaattgtgcatttattggaataatcttttggagaggaaagttaataatagtatgtttttgctgtacaaattaattacatatgaggagaaaaggcttaatttgacttaatcatgtttgataatttcacatattttttggcatctctggaaacatacttttactaagtgtgaatgtaaatgttaccagatatatattattttgatatctctataatgtgtatatttttacaaagttaagatgtttatattaagttatataagatatatggagtaccattaaaagtttaacaagatattgaaatgaaaactacgtttttagaagat

SEQ ID NO: 112538 - DNA, 1036 bp, Homo sapiens
tgttttatgtttaattcccttttctctaagatatatattaagattcaagttgagtcattgtggatattagagatagagataaattccatacctgaaagtctatgtttaagttcagaaaggtttatttaatcacttctgttatggaattgcagatgtatgttgccctccacaaaagaaatggaaggttgtttcatgcatattcaagtagatgtttttgatacggatttctgtgttatatttgtgtggttgcttttagacattttcattattattttcttttctgaagattaagttgagattgttttagataaaatagttacaaaaatagtataaagaattcctctctacccttcatcagtttctccaaatgttaacatttcactacatttgctttttctctgttttttctccgagcatatatgtgtgtatgtgtataatgattgttttttataatcacttaagagtaattaattacataatagcactttaacctgtaagtacttcagtttgtattttctaaaagaaggactttgtttttttacatgacctcagaacagttgtcaaaacaaggaaactaaacttgatgcagtattattatctaacctagagacattaatcatattttttcaattgtaatgtgactgtttttgatagtatccatttgtgttttcctctttgggcttcctaaaatcagttctatcacaccgttactgagaattgtgatatggagtcatggagtgtgtttttcaaacagaatgttactcaaaaacttaatttgattttttttttaaagccagcctcatatataacttgcccttttttctttataactcaaattacaggtttcttaactaaattttttaagtttatgactgtgtcttattattaagacatagataataatcttaaactttattcagtgaggaaacatttattgagcaatttctcttatgcctgttggttttacaaaaataaataagatagctttctgtcctcaagaagctcattgtttagtgggagaattttctgttttgat

SEQ ID NO: 112539 - DNA, 1194 bp, Homo sapiens
gtgtaataataaaaattaaaacatgttccaaatcctacttactactgctaagtagcagtatttacccaaatacagtacctgtttcctgataatttgcatgagtagacttgcaaattggaaaaaaaattagggagatggttggtgagagagacaaggagggaaaaggagaaggaaactggaggatatctgtgtgaaggatggcttgtagaggataggataagaattaaagagaaaagtttgctaaatcataaatgaccagagattgctttataggttgaatatggaaaataagctagtgtttgtataccataaaatatattgttactacttttttcgggggcttaggtattttgtattgagcaaaatagtttttagtgacttagttctgccatatacttgaaacttaacctgataatttggcgaagccaaacctgctataggttagttgcactcaccaccaaaattaaagccctttcgtggaagaaccaaatactgctattacagtagcctttaggaaactgtaggatctttgtcagattaattctgttataatcagaaaacctaaaatatgtagaggtagatattttagaaaatatatagattctattttctcagaataaaagaggagcaataaaaatataactttttgaatattttcactaggtcacatttcacttgttaaaacaagttatttatttgctttgtaattgatctttgactttttgttttctttgtagctgttcaacggttttgtgtatagcatttgaggttcttcagggcttgcagtatatgaacaaacatggtatagtacacagggcattgtctcctcataatatcctgttggaccgaaaggtaattgttaaatcatgtaataaatatttatatatcatttgaaattggaagcaactgggatcagggctactcagtcagaggaacaatagaatcagaatatgttttaagaatattcataatgaaaagtctatatgaaagtgatgtaactgtggtttttgaatttaaggattaaataatccttaaattatttaatctgtatatctttcacatggattatttttcccacaagacccattttctaactttatggtttttttattttactcttatttctaaagccttgtggcgtcccagtatactcctcctcttaatttattttcatttttaagaaaatggctcttt

SEQ ID NO: 112540 - DNA, 1050 bp, Homo sapiens
acctaagtgaatacacagtagaaggatccagtatacagaaatataaaaggaatgaaatcagcaactctttactttggaacacagatgtaatactcattagcatagttacggttattgttattcttatctcttagtgtacctgaagctttctttgaaagctttcaaccttaaatgtggctaaatagcctgttttctgcatttaagaacaaactatatttcctcttctaagtagattcaggaattagtctacttaacatttctgctatttgtttggcttgttgctctccataggaaaactatttttctaagatatttatctattacagtagaaaatgtttttcctttcagactgctttttcatagtggcctatagtataaatttattcctttcacagtgtaatttatcacttttatttttcctataggattttctgccgtctcttggcaaaaatggcaaataatgatgctgttctgaagagactggagcagaagggtgcagaggcagatcaaatcattgaatatcttaagcagcaagtttctctacttaaggagaaagcaagtaagaaaatttaaaattttttgaggagatacttaaaatgaattcatacattgatggagaaaaaataatgtttaccgctttaagttatttaagttttacttagaagtttctgttatatgtagaaaaatatcaaacctgaatttctaccttcaggacttcagttggctttggttttgtttgtttaaatgtattttattttcagtagtcaatgtcagaatagaaatttcaaaatcttttgctgtcactagtagaaataaatgctttcctacgttttgtaagctaatggcttacaaaaacctgtatttactctccagaaactttatcaatttttttctaattttaacataccactttgtttctttttttatagtgtttctcgagattttaaaattatttttcttaaaaattcttactctctttttattaaaaagatgaagagattggacatagtcattgctcatatgatataatatatgttgtaaaccaaattt

SEQ ID NO: 112541 - DNA, 1006 bp, Homo sapiens
aagtaaagttcaactttcatgagctaggataaaattaggaacaatatgatattggaacataaaagctgggtcctaaatggtgtgtgaatattgaccagattaacggggtaaaaatgtggcattttaggcagagggactggcataagttaaaacagactgtaaaggttaagtgtagaaacccatatgtagtttggtatggctgaattttggtatctatttgtggtatagtttgagagaagtcacagataggaaactagcttaggaccagttgtgaagataggaaaagaacattccaccagtcaaaacagactgtctgaactaagatttcaagaatccatgagaactaaagtagatagaaatgtcaccatccacttaggcaacaacccttgaaatttagtcatcaaccttaacctgtccctattccctgttcttcatatctaattaaccaacaaattctattattcctgtccccaaaacatacatagaccccagctctgctctttcttttcattaggtcctacctcagttcaggttttcaacgatctttcatctgaattaatattaaagcctcatcttttctagtttatttttagccttgctgctaaagctatttattctaattgtaaatctgacttcctttccccagatatgtctaaaaagttgcctttataaataattatgaatatttctcattatacttaaacttatttactttttttttttttttttggaaaatataacatgcagagggatttatgaactaacccaagccaatttagcctctaaagcacttgccagttcctttggcaaacatcagtaacctctgttagttaaaagtaggtaggggctgtacagcctctgctatacaacttcaccactaggtggtatgattacaatgaaagcaagtcagactaactcttctagtttataaagtacgttaagaagtagacacaaaacaactatataacctgttcttgcaaatttggtggaatccatattctattct

SEQ ID NO: 112542 - DNA, 3452 bp, Homo sapiens
atgaaacttctaactacaggtgctatgtagtttttagagccatgcatatgaccaaggtcataaattacaaactgctgggccaaggaaagaatgcaatcccaaaaagtttcagtttatctttcatagtatttcataaaatacttacacatggaattttacatgaaaatcctgatgtcttgtttcttaaaaattcagaactaagccccacccctacccttcccaaccccctgctattttcttaaggcagaaattggttaacacttagtaatggatagcccctttaggtggaagttagactctttaacacagtttcaaccattccatagttgaggtggaaggtcacttgtgattatttggtatttatctttacttttctgctagtgttatatttacggaaggttaagaagagactcgagtatctttttttaccatgtctcaaaaaaacaagggtgttacttgttttttctgtctaggattccttactcatttcctttacttatttggtagacagttgtatcataattgcatcaaattgcacttttgatccctagcctgggcttttgttttggctctctaatttcagcgttgctggaacacagtacgggtaatggatcaatattgacctatcatcaagagtacaaggaagtgatttcttctacttcctacttaacaagctcatttcttttaggtctccaatgattaattatccgagccagtgaagtttgggttttaagtgtttcataaaagaaattgataggaggttagagtatctccacttttcctttcttctggtgagtttagcaccagggactgtgctttgtgtagcttcagaaaacaaaccatggttacagtttatataatattattccctatttaaaatttaattctttctatagtgaaattagagctgggtatttggaatatgtgaaaagtattgatggtatattttatgaaggataaccttgcatgataaccgttttaaaagcaaattgatactccatgatgatacccttcagagcagtggtttctaactgttgctttttttcttataagctttcaaacctccttctcaacaaaagtttactttcttcctttttctttacttttgaataccatatttactttcttgaagaaatatggtttttaaaaaatctagtaacagtggaaagaatcgaagacagtagcagttttaaatgtcctctttctagatgtcttctatggtggtttgaatcatctacctatttcctctgtcccatggtgcttcagagatattgcaaagaatatggacttcaacattacgatagttctgcctttgtttattgctactctgctgcttgttggttttgtgaacttgaacaaatccctgtgttcattcaattatatttatagctgcaagtatttattaagcaccaagcacctaagtaaaggatacagcaacaaattaaaatacagagatagataaatttcttttttctttttttttttttttggagactcacccaggctggagtgcagtggggcagtctcggctcactgcaaccactgcctgcctcccggattcaagcaattctcctgcctcagcctgccgagtagccaggattacaggcaccaccaccaagcccagctaattttttgtatttttattagagacagggtttcactatgtgggccaggctggtctcaaactcctgacctcaggtgatccgcctgccttggcctcccaaaatgctgatattacaggtgtgagccaccacacacaagcaacaaacatatttttaaaaatagccctgcctttatgaagctcacatttgtataagggagtcagaaatattaccaaggtgtaagtaaatatttagtatgttaaatagtgataagtgccaagagaaaaatagggaaagaatctagtaagtattgaggccaggatgatattgacattttatataaagtgcccagggaagacctcaaaaagaaagtgacatttgagtaaaggtctaagaaaatgaaagcaagtcatgtgtttatctggctgaagagcatttcaggcagtcctgggagaaatggatggctgggatgttcaaggaacagcaggaggccgatatgaatagagcagggttaataactgagaaagtcatgggagatgaaatcagagataagggtgccaaatgtcttatagatcattgtaaagtttggcattttttctgagtaagatgaaagccattgtaggattttagagcaaaagaataacattggtcagcctgacattttaataggatcattctggctgctctgttgatgggaggaagatggaattaaggagatcagtgaagtttctcttatctaggaaaaaagaagtagacttggcatatgcatgtgctttttttactttttaatatttatgttatataggaccagaactgattcataactccttatgaagttaggagccctggagaaaagaaccaactgatcttcagccagcttaaattggaaaaactcctcatttgggcttcatcttttctgttcttataagttgtagactattttttctcttccagcagccatcattcacaaccataagcaaagctatttttataaacatctgtatctaacccatcaagatacaacctaaaataaaagttaaaaaaaaaaagatagtactagtaaacattctataaagtagggacacttagaattcaaaattatatactctgttttgtaggtggtacatttttctagggaaaagtttcatagctatcgtcagatccttaaaggattgcatcttactaatcctgttgctactcttaaacacttttgctgtaacttttaagttctcatatacgtgacattgtcaagttatttgaagcattcgaagagaaatattatttatgaagaccccctaattcatttcgaatttgactcttaggctcatttttttaaatcatagtatttcagagtaaatttgcatataacatttatttataaaaccatcttttatctagaatgcatctttttttctcctttgagcaatagttctcttgtatgattcattttaaacttgttgaaagaatttaaataactatatttcttacttttgctagttggagaaaaaaattaagacacttcaaatatgaagattaaagaaatttccgtttgcttccataaaaaatttgtagaactagccctacatgttagttgcatgatgcatgatgctgaaattgttaaatgatctttttttttttttttttttttttttttttgagacagggtctcactcttgcccaagctggagttcagtggcataatcaaggctcattgcagcctccaggctcaagcgatccttccacctcagcctcccaagtagctgggactatagccacatgccaccatgcccagcgaatttttttattttttgtagagactgggttttgccattttgcccatgctggtctcga

SEQ ID NO: 112543 - DNA, 1085 bp, Homo sapiens
tctcgtttctgaggagaaaatccaaaatgaccataatattcaagaggagcaggttgtaaatctctcttcaaagcaaaaaacaaacaaacaataaaaacaactaaaaaccaccaccaacaaaaaataacattttaaatacctggtagctactagtagttactgaaaggtagcagattgcaaaaccaggacttaaagatagttggcaggaaattcagctccccaaattgcaagagtgttagtttatacttttttagatgtcagttttagtaggaaaaaagataggcagttactactaattattcaatagagttcgtattgtccactgtgtttcctttgaccagattttcaatgattaggacaaggtatgggtcaaatattgcaccatgttttagaagggctaggaaagagagatattcccttcttggtctgattgtcacaaacccagcaacccatagagcatttttggaatgtgcacatgtttaacacctggaattatagtcatacttcatccgtcaccagaatgaaaagccaacggctgactaaaggagaatttctgaggcaattcttctggagctagcaatataccctacttgtcatctctcagatatgagcctttaatcccctcttcctaaaattgtttattttaaaataagagaaaggctagggatgttacaaccgagttctgagctttctcttttaagaatctaatccttcaaacccatcttcagcaaagaaactggcatttcatgtgctgagcagatgatgttctgcagctctggccagcccacatgtacagctgggccggtctgacacacaggtgttctaatttggaccttcttaaaattctgacaccatactctcctccattgggaagtatgacttggctatgctatttgctagtgacaacagttatactgacttaacaaaaacagctccagctaaggtgataacataatcctctggctcagactgagctcagatcgagggtgtgtggtgtgttctaagagtctgggccaacgttttgattttgatttcctcttttatattgtgtattgtcattcatgtttcctcccttcacctctcag

SEQ ID NO: 112544 - DNA, 1028 bp, Homo sapiens
cagttcagtctcagtggaggctttaattgagtccatggagagctctggaaaggcccttcagagatgtccaaagttgcatgggaaataggcattatacctccgtgtttccaggggttggctgcccatgggagggggcatacctttgggtgctgctgctcctttcaacagaagcagtttctgagcggggcgacagctgctggagagcccgctcccttcttgcaggaggcctgagtattgcatcacagcattaaatccagctggtttttagtatttctgtaattcagatcataccgcatatactctttcgtgtctggcttctttcactttacattgtgcttgtgaaactcacctttattgttatgtaattagtggcagattgttcattcttggtgctgtgtggtgtttcgctgtgtgattttacccaatattgttgatggatgtttgggcactttacagatttttgctcttaagaatagcgctggcgtgaaggttttagtgcatgtctttttgtggacattcctgttggctataccagggaggagaattgctaggtccttggatatgtatttgttgagcattagtagattcgaccagtcagttttttgatgtggttgtaccattttacactcccatcagcagtgtattgcctcaccagtacttgagtgtccttttcattttagccattttggtcctttagtgctgattacttagccaagcactctgtaatacttttcctatttcttaaccagcctcaaaaaatctcctcattgaaccagtttcactgaaatggagtcttagtaaatgagttgtagttataaagcattgagaaatagaatataatagtccatattttattgatttcttactgtatttttcagacaatattctgaatgctttacatatgttaactaaatccttataaagattgctagttaatgtataacttatgttataagttatttgttgtaagttttatgttaggttttataacttatgttataaggattaatccttataatactaagagg

SEQ ID NO: 112545 - DNA, 1039 bp, Homo sapiens
ttctgattttcaaaccacagtggtggaagtaaagctgacattctagaataccgtgttgcttgggtaaaaggtggctttcctgacagtggtgataaaggtatatataaaagctggaataaaatggtttcgtgatatggtaaagataataaggatgatggttcaggtggtttttgtttgcttgtttccaaattctttttgttgttacctcttatttgaggccacctctcatttgtagttgcctgactttgacatatgtagtatattttaggaatttattctttcccactagataatgggacattgggcttaattacttcttggatgtgggatactatctgcttgagagtattggttgaggggaacatagcactcacagccttcttttatgctactttttggttttattttgagagattttcttcattaagataccctttggtgaactctaaattcttgaatcaaacatttaaattgtactcctgttgttatataggatattgtacctgtggatgcatcttatgaagtaaaagaactatatgtgccagaaaataaacttcatttggcaaaaacagatgcggaaacattaccagcactgaaaattaataaagtaagttcttcgttgcttttcacactaagtgatacagccttatatacagtagtttgttaaatttgtgacttatagcagtatttgaggccaggggtggtattagctgggggggcaaagatgttgtggtatatgtcacaatttctaaggatggggaatgtgtttaatttgtgcaaccatgttcccaagttaccatggctttgatttgctttgagtaataatacttatttattttgaactatcaaagaacaaatattacatgagatccttaggcttatcagaaataatgggttctaaaaggtcaaggaatactaatccatagtaattaagtaaacattctccccttcagacatgttttctaatcccttgccaaaacttgactctctctgtcttatattgttaagaataattttattgtgtatcttagctctgatg

SEQ ID NO: 112546 - DNA, 1051 bp, Homo sapiens
aaagtgcctgcctcaggattgtgcagaggattctatgagttgatacatgcagagtgcttaaacagttcctggcatgtagcaagcatactctaattactgagtattctttttatgttaagtccattgaaagacagtattgcagggatttgggtcaagttgttgacctctcttaggcctcgatttcctctgtaaagaagggatagcagtagtttcttctgccttcattagtaggactgtgtgaagattaatggactaaaattcacatgaagctcttagaacaatgagtggtgttatagtcagttctcactaatattatcctccactcttcaggtactttaagtcactagtttgtcaaaacagccctgtaacatatatgtgtgtatcttttttgtacttttttttaaacaactggggagacacgttgtaagatgctcaagattgcactgttagaattggaactcagatcttaaatataaaaagactttgccctctttttttacttcatattcttagtgataagaacattggaaataactgacctatagactcctgttgctttttgtatctcgttggttttgaagatgttatgcccctaaagctttgtgattatgtaaatatttaattttaagtgtctcgtgaaagtgtatcatactcttcctcacagaagtcctaatgagtgcctgactttttgtgtaacttgttatgtttagtgttttctccccctagcatagaagatttcaattctttactttgtagctgcaaagaatctgtatgcctcaaggcatctttggaggctttacatatcgaagaagctaattgaacatacaaaatgtatgtgtagttcacttaatgcacatcgtattgtccttccaggaaaaattgactctgaacttttattttctacttgatgaagtaataggctttgcacagactgctaaactatcatttgtcgtgtaatgtacctatggatggagaccagatcaaagggaagacagaaaaatgacagtgataaccatatctgggatacagggtgatttggttttctcataaa

SEQ ID NO: 112547 - DNA, 1011 bp, Homo sapiens
ggttttatgctacacataaaagccagactttgcagctcagttttaaagtgttgccggaatgtcgtttggtgttcatgctttggatgcatgtagtttagataacagaaatttaatagttacataaaaatatgaatgtgcccttgtgttcaaatctgttgagcagatttggctcaagaaaaaagtacagaaagtatttaaaggaaaacttaaaatgtggaatcattgtattaacatgttcagagttctttaggaagattaaaatgagaggcgagagctaccactttcatgtagcgcatgttgtttgccctgcctgccagtgtccaggtaaaaacaaaaacagttgtctgtttttggatacaacatatgttagatgttagactgtcaaagtcaaacaacgttctgggtaccccgtgttacattttaaaattaaattaatacttataaatttataatatctctagacttacaggttacggaattcacctctcattaatagtagagtgtgggtcatttactgatcccctgctcaggaggactcctagggcctccctgagccccctttacccttcagtgctgggtgactggagcctttcagattggaggtgagatgtccaggtgtgtgcagactttttcctggcctggcttgtgatctctttgtgttttaaaggacatttcatgaagcaaagggttttatatgtacaaattgaagaagagcacgttgtttctaatagctgtgtctgtggaaatcctaatgaatcccaaataaagtggatagctcatgtggcagggaccaactttctgttgtccagatatcttgtgtcactttgaggtggttttgctcctttcagatgtttagtagtggttttggaaactgagatttgtcactggaatgtgctagaagctggcagcatctgcatgtttaagattctttttatattcctgtaagagactgagtccttttgtctttacacatagaatctgtgtataactcatttccacagactgagcaga

SEQ ID NO: 112548 - DNA, 1984 bp, Homo sapiens
tccttccaggagcgcggaggtgggttccggggctgcggcgcctcccggctggggccgtgggtggttgcgaggcagaggggcgcggcgcagggtggggatctcgccctagcttggcgcagcgtgcggtccgagccaccgttcgtgggaagaacgccccccctccccagcgcctccgctcaggtaagacccccaggaaaatccttcacccgtgaactggcgcttgctgaaacctccgggtgctgaaacctgcggctgcagaaacaggagcttcctgcataccttggagtggcctgaagatgtgcagagaaggcggaggcgggcgccttcgacgcgttcttggtttttcttggctctgccagtgcggttggcccaggtttgggtccatctccgtgtctttccatttctgagtttcagtgtgaaaggagagtacccaacaatgtggtcattcatgagttgagactgccctgaactgaggttctttgtgtctctgtgttaaatcggaatgtttaacaagtaggagtttggaagactccattcctggtgacagtcaggtatgggaccagtcctttataacgtttagtaatgactgccagttgactttgtaaagtgctgtgtcctcataacgttgcttacttccttaatttctctgtgatgagaaagagccttatcttcctttgtaagtgtgcagcagggaagggcccatctttggagtctggaaaggcactggtttaagtttagacggaaacgttatttcacagtccaatggaataataaggtttaaatgcaatgtctcccaaaacgttacttgccctagatgaatcaaagaaaaaaaaaacaagcaatttcaggcaaatgttctttggaagtcattaatttaccacatctgttgttattgttatcatgagttgtttactgattcctctctccttttatttaactctatagatggtaaggaggggaaggagatttaaaagatgaattagaacagtggaaagagcgctggactcctggcctggtctctcatcccagctttgccatttactagctgtgtgatcttgaggagagtcactttactttttcgaacctcagttgacttaagggtataatagtatgtacttcacgggattgttttgatgaacaaagaagacagatcatgaatttgaatgtgcggtgaaaccactgccttgaaactcagactcagtttcgcttctcttaccttaaggtgtttcacggttagggaaataaggttggcttacttggggtatttacagatgatttctgttacattgtccatttatgtactcatttatttattaacatttgccacatggtgcgtattctatgtagagacttgtgctagacatggtggtgaaaaatgtgggacttactgcttgccttctggtagttcatggtttgtgttggggttgtgacatttgccaagtggtgaatatgtctttgtggtccagagtgagtggcgtaagacagaagttttattgcaatttagaggagagattagtttcgcctgggcgttttgggagggtttatggaggatttcagatttctgagtcagaggggaactgcatggataagtgttgggaataaaaattactattttttttactccagaaacattgacgaaacttgtttgactgccctggagagtttttgttgggaagtggaggtaaggttcaatagggaggctggggctccgtgatgctcttgtgtttggctgcagagaagacttgattctatgggggatttttgatggggctagaattttaaattttctgatccttgtaaatttttctctccctcatggaacacccgtcatctcttcctctctcatatttaaatcatcttaataggcacaagtgtgaagaacccatatacctttaaaattcctatcacaggataaaattggtaatccaggaagaatgttccgctgaagaaatgtagaccctggtaggacccagatggggaagcc

SEQ ID NO: 112549 - DNA, 1026 bp, Homo sapiens
tgtagaaacaggagaaataggatcatacacatatcattgttttatacccatgaatatataatgcacctcttatcattccccactaactgtgataggagcatttcattattccattgtacctacccaccatgttgtttttaacatgtctcttattattggacacttgtttctcattttttttttttactgttactggcaatgtcttggttaataggctcagaactaatctttgttgatgttcttaggaggtttatagaatatatgaaatatattttacaatagccctggaaagcagtgtaataattttatgttggtattttaaagagtcaatttaatatgtagaaaaatggtatctcacttctttgagtttcttttctcactggtaaggttaaacactttctcactttaaatgttaaagtataagagtttattttcttttattgtgaaggtttgaaggcatttgtttaaaattatttaatttttactgttatgatattatatgaccttcttgtcatcgctcatgactttaaccttaggaggttaatcatttggatataacaactttgtgtcatgaaagaaagaacaagattgccaattgtctgggccatggaagacctaacagaaactgtagaaagcagagcttatgagacagaactttttaataggtgtgtcaggctttctgggcttaaaaaaaaagtcctgtttcttggatattttaattcagtctgcattgggcagagagaagtacagagttgcctttcaatatattttaaatttaacagtctataattagaaaacactatttgagctcttataataaactttcactctgaaagtacccatctaaattagtgggtcattcctccccactccttttctccctccccctcagtcacatctgccatagccatatccatggactctgcttctgtaagttcaaacttgtgggtcactgtttcataatattaaatgatattagtggggcttactccctccccttataagattacttcagtgacttcctta

SEQ ID NO: 112550 - DNA, 1060 bp, Homo sapiens
tgtaagggtgtgcttaaatgttactcctaatcttagtgggacagtcctgagttctagatttattaaatgtttatgaacaggaggatacaaaagttgtttagaaaattttattttttcttcctttcatccaataatattcatccttaccttggggtttcagtatcctgatatttgtaagaactattaaaaatcaaatagatatgaattacttcacttttttaacaactataaaatgggtatatgagtttacttagcaaagattttcaacttaaacatgttaatcctttatctcctccaaaatatttttctttttgaaaggcatatttaaggaaaaaaatctttccatattaaaaaattcttgaattccaccaaagtccataacagatttaagaaaagagtaccctcattatctagaactggctaactgtaggctgcaattactagtggcaagaaataagggggttgaatcactctccaaactatttcaaagtccttaaccacatctctcaagcaagttttctaatttggggttcgtagttgataggtggacctcctgaagccctgtaaaatgttttggctcatgcatataaccagaagtagaaagcttatttcttcagattctcaaaatcgaatttaggtcttgggaaatcaaattgccagcagataactgaggatttaacctcatgaatttgttgctgactacctgcttaatataaattgcagtaacataaaagaagaatgtttgttcccatgctgaaactgaagatttctaataattaaatagcagtagagccccatctatgacagcaagccagtttactgcatttgtataccctgagagctaaattaccactaattgtctcatctttcgaaaatgtatttaaacttcattagatatgtgaatgtctgttatggccaggcgaaagagaccgacctagtccctggcctcacaaagcttgcagtctggttggagaaacaaacaaatcattatcacacagggagataaatgtttagataattgaaagttcaggatgctataagaacacattgccaaggcacg

SEQ ID NO: 112551 - DNA, 1054 bp, Homo sapiens
ttatcctttttttgatcaagattgaatgaaataatcagcttacacattcactattaaatgtaattaactgtatgagaacactttggacattttcaagatagagttttttgaaaatctagtcatagagaaaatagttcatgcccgtattgtcaaaataccttcagatggtcctcaaataaaccctgcttatataccgtgggctaaatgtgttgtcacatttccctatgtgtctaattatgtaatgtcaccttggctcattagttaattcctctgttactgtggcttgcttattcctttcatatgttctcaagaaagggttttaatgcagtgagttgactgaaaatacagacaggttcattctctggcaaagagtgcttttgaggagaggtgactatgtagactcttcgtctactttagttcccccaccccacacacacacatcctttggaagccaaaccacctagatttattgcagtatgtgaatcttcatttctgaaaactgtggtgcaaatctctccatgaaactgtagggatgggcaactcaaaagtaagcctttaaactctgtgaaactgtggtttgtttgttaatgccattctgtactgattattctttatcctgttaaacattgttttatttttcattaggagtaaaaccaaccagtaaacttgtttttccccatccctattttttcttttaggtcaatagtgggacgcagattctgttttattattggaactttatacctgtatcgctgcattacaatgtatgttactactctacctgtgcctggaatgcatttccagtgtgctccaaaggtcagtacctccaaactgccacttagaagaaatcaggcaaacagttattgatcacttaccctgtattatacattcttctagacacttccctatgtgttagctgaaatctagcatcttttctattttctatttagatttgaggggaagaaattaaaatgtatttataaaatatataccttttgtgctaaaaaaatgtattttctgttaactgaaaattaccattgggggtttgactctg

SEQ ID NO: 112552 - DNA, 1032 bp, Homo sapiens
tccattaccaacacagccaagcagcacatatttcttcagagcctagatatgcacatgtcatcaaaggatagcattttacagagtcaacaccactcacttcatagaacaaggggccagtggcttttcagaagaagggtctgttctcggccccacaccagaacgccagccgccaggtcccgctgctcagcaggtctcaagcccgcgctcactcgggctccggctgctgacagctgcgagcccgcgcgtgtatacccgctcaacgctgggacgttacagccagggccaatgggcagagcgggactcgaggccccgcccccgccttgtggcgtcacggggacgccgggggcgcgcgggctgcagggccgcgtaggtccccgcccccagagtctggctttccgcggctgcccgcctcgcgcgtcttccctgcccgggtctcctcgctgtcgccgccgctgccacaccatggccttcgtcaccaggcagttcatgcgttccgtgtcctcctcgtccaccgcctcggcctcggccaagaagataatcgtcaagcacgtgacggtcatcggcggcgggctgatgggcgccggcattgcccaggtgagcggccctccctgcagcgtgcccacgcgcttggccgcccaccctgaggtggaagctctggcgcgaccggccgcgaggggcctgcacccgcccgacaccagggagttttcaccccgcgcctcccgggtgtagttgaaatatctcgcgtctgggcctgtgagggcccaagtctcactcccctcaaaattcagggttctgggccgatcctcagcttcctcgtttggaaaattctggctgcccccagggcccgctgaaggttccatggagagtggcggtgaatgcattttggaagcgggccgtgcaagagaagaaagaattgtatgtgcacaaggttcaggcataacgcgtttgttcctgctcggctcaaacgggagtttgctgccaaagacatgaactgcgatcagttttaattctatcagttatttttgattttta

SEQ ID NO: 112553 - DNA, 1037 bp, Homo sapiens
gtcttcaatatgcattcttatggaaaaaggtgttcatggctaaaacatttgagagccgccacactgaatgatctctgggttgtcttcctcctctcaaaattgatgatcctgattatctgtagctaataagcctgaacaataaatgctttcgccaatctcttaaagtagttgagaagctaggtgtgttagtttcccttctgtgatagagaagaaacctgtgttggagagcagtgagcttatgtgtctgtggccatctctgacctgattcacacatgtgcccctcacagacaggcacagacacagggttggcatgcctctagccttacagcctcttggatgaaaggtataagacacattcacatgttggagtgaattaagcacacatccattttgaaatcacagggctggataccacttaaagaatattgatcttgcattgggcaacgcatagcaactgccctacatttccccttttacctagcgtcacaaccaccagtactagaaagcagttaatctgctcaccaaaataacagagagagactttagtggcattttttccacttggtaattgactagactctggctattagctccttttttttccttactatccttttcaaactaataacgtgacttctcataattttaaagtaacttgatgcttacacaaagtttatcataaaggtttctagcaacaaaaccagtcatgacttcttgagaacttatttctaaaataatttacaaattgagacttatgaaaaaatagctctgtcattcaagtgttcatttcatgagtatgaaatatctcccttgtgctagacatcaggccaggtaaaaagtaagatgtgattgctgctcttgagaaacctactgtctagtggaagaaatacaggtatgaacaactaattgtaatgaaggcacagacagcctacctgtcatatctgggatttgatctgaaacagatgaaagttataatagtttacataccttaccttaaagtatggtttttaaatacttaagatgtgatatgacatata

SEQ ID NO: 112554 - DNA, 1020 bp, Homo sapiens
atgtgtgtgtgtatgtgtgtgtgtgtgtgtgtgtgtatagttgaatgaatgagtgaataaacacgcatctctcctgtttaaaaatatatatatatatacttcatctggttctttccatttaccattacacatgagttctctaactgcttactgagggctgactgtgccgggcatcgtgcttggtgccatcccctacagatgccagtagggcagcccttgtgcccttgcctgtacctcacagaggtcaggagggctgctggagcaggtggcaggccccgcttgctgtaaatgaaagccttccccagaaggatgagtctgttctgaagccaaggggccgctggcctctagagcatctgtgtggcagagggtggagtcatgggagaaatactcaggaatccaggagaactgtcacttgggcaaattactcactttcctggggctcctcctcctctataatagaagatcaggtcccacgtagaagactttaagggcaaccatcatatacttccagacttctaataattaaataatggaagtcagcatttattgagcatttgtgcttaggctttgtgctttactcccaatgtaatttcattctcacctcaacttcctgaggtgaacagagtgatttcagtgtcatttcagtttcaagaaacatactcagggtcacacagccagtaagtggtgcaactgaacccaggcttgtctcaacaacaaagcctgtaaaactgtcctatacacacacgtacacacatacacttgtattttaagccgtgattttgtacattctacagtacactgttgtctttttttttttttttttgagacggtgtcttgctctgtcacccaggctggagtgcagtggcatgatctcggctcactgcaacctccacctcccaggttcaagcaattcttctgcctgggcctcccaagtagctgggactacaggcacatgccaccatgcccaactaatttttgtatttttagtagagatagggtttcaccatgttagccaggatg

SEQ ID NO: 112555 - DNA, 1164 bp, Homo sapiens
ctttgaaaatcttgggccacacactgtggcttacacctgtaatcttagcactttgggaagctgagacgggaggatcacttgaggttgggagtttgagcccagactggccaaatggtgaaaccctatctctactaaaaatataaatattagccttgtgtgggggcgcacacctgtagtctcagccactagggaggctgaggcaggagaatcacttgaacccaggaggcggaggttgcagcgagccaagattgtgccattgcacttcagcttgggtgacagagcaagactctgtctcaaaaaaaacaaagtcttatgacctctttggcatgtactttagagaggaaatcttacccaagccagaaagtctcagtctaggcattttttttattgtgcaagcatataaaattctagtaattctggggctaatcctgtgatagggagaattcaaggaaaggtggtggtgacccagtgctgccgttttctccttaggtgacgcatccaaagaagacattgacactgctatgaaattaggagccggttaccccatgggcccatttgagcttctagattatgtcggactggatactacgaagttcatcgtggatggtaggaattggaattttttgttgtctttaattgaggtagtttttctgaactgtaaattataatgcctttttaaaaaaagttagcaggggtcttaataaagaccttccaaaatcctgcctcaccaggttgagaattcatgaacagatgtcaggagaaggaagaatgtgactgtctagtgtctctttaacagggtgaccttgaagaaaaaaaaacctttatggattcacaggaagttacaaatatagcacagacaggtcttgtgtgtgtgcccttcacccagtttccaccagtggttatatagccatagtacaatattaaatcccaggaaattgacactggtacactgtgttatcacatcaatagatttgtgtaacctccattgcaagcaagatacacatccattttaaaaaatatatccattgtaatgtaaaagctctgaagacagggtaaaaataataattaaaactggactactgaagttgaatgtagctatctgttcccaagtttcacagaatgctagttgaagaattaaattttgaatcttatgtggatgcaaaa

SEQ ID NO: 112556 - DNA, 1360 bp, Homo sapiens
gaaatgccaagatgtaaaaataaacccagcacttcatcctgagttctcttccctccgctcaatagggtggcatgaaatggatgcagagaacccattacatcagcccagcccatccttaaataagctggtagcagagaacaagttcggcaagaagactggagaaggattttacaaatacaagtgatgtgcagcttctccggctctgagaagaacacctgagagcgctttccagccagtgccccgagtgcctgtgggaatgctctttggtcagacattccctcacacagtacagtttaataaatgtgcattttgattgtaatctatcgaagtgattattacaccagttacagcagtaatagattctccattaagaaataattcccttttttagtctgttcatttctgtgtattttctaaacagctttacacccttggtgccttggagcaaacatgttttttgaaccttgtcatttttgtgaagaattgcctagattccttctctcatcaacgggaaagtacttcctctgagagtgcgagtgcaccatgctcactgttgctgcgtgggagagtcacaagccactggcaagcaagtggtatagtctgtgaagcactgcagcgagcagcacctggatcttgcctttataagaacattttactacctgcagctttgagtcttgccctacattttgggcatgacataagatgtgtctttattcagctcgtcgtgaagatgctgctgctgaatgggtcagcatatctctgtttgcatggtttgcaggaggtcggttttcatggtcattcagttccacagatctgaatgattactgtctgtctgtgtcttttttccatgagaaatcactgttgcaaattgcctataaattgactctactaaaataacaatgtttcagtctgaaaatttgaattgaaaaaaatgtataatataaaattgtaatacactcaaatgattataaaagtaaaagttggtaatttaggcagaagctatttctcctcttctttgacctgctgttaatttttaaagtgggagtgacggggagggaatggcaggacaaggcatttgtgtaaaacctgcctggggccgtcgctgccagatttcttaccaggaaagcagtaataagggcacagagaacaatttttaaggaacatctgtttcttctttgccaacaaagtgaagtagtgtaacgtaagcttcttttaatcattggcttaagaaagtgtcttccaagatagaattttggagttggaaagacatcagaaatcctgaggtccaatagcctcattagcagaaagcttaagggatgtgcccaaagtcactagatattttgtcacatagcctagacta

SEQ ID NO: 112557 - DNA, 1099 bp, Homo sapiens
ggtgaagttgaaagaaacgggttgtttggaccctcagccagttccttccacaaacttggtcccctcctagtttcctgtatttcttccacaataatttttcccaaataactttgatgtcactgcacagagctcattctgggctcattctgcccaaatcctgctttctgtaggcagcagttctgggggagagtcaacagtccccctagagatagggatcaaagcaggtgtctgcggggagagggacactcctctggccacttcttctgtttgtttgatcttgaagggatttggcctccttccctgcagcgaactcagagctgaactgtgtgccaagaagaggctaggtcagccttctttctgggagctgagccttctctgaggtcacagctggcatgcgggtctgtatgaaggggtgttttcctcctggttctagtttggttgctagggctgctggcaactacctgtttagctggaaggtgactttgaactgtttcatgactacagttgtcttaagtattttacacaataattttttcctctagtttggtctatggctgcaacaatatggaaactctaataaagggcttatgaacaataacaagatgtctgtgtggctgtgcttttaaagaagaagagtcatgagcgagtaatgtaccgttctgacagaaaagaggcccctaacatccgcacgatgtagtagttgttgaaaaatcgcatttaccatttctgccacagaatgtgatcttccagatgtggaagatgagaactttaagagctgccctgtgaaacctaacctctaaagatacacacacaagaaaatgtggactgctttttaatagaaactgtaaaatttgatggcaattaagtatcttaatactaatagaaggatgtgattctatacaccgtttatactgatttattgtgggaaaaaataagattggttttcttggcaataattcagtggatatcattctggaagtggctcttctaaatttcttcaactcttttctgggaaaacttttattatctttactctgcagccaggcgtgactcagggagcgtgtaccaaggtgactcagatacacctacctctacacag

SEQ ID NO: 112558 - DNA, 1014 bp, Homo sapiens
ggagcggtttgtatcctctgggctgtgagtgtgagcggacagagcacatagcgtcacgggagttggcagtgcgttgggtaatgtgattatgtctgtcctatgtagaatcatacagtggcttcccacagtggaccaaaaacaccaaacactgcagaatgacacatctttccctgatctggctgttgcccgccttccctattcatgtttgcctgtttcctactggtgtttttcaaactttttttttgttctgtttaccatgacccagagtattcactacacttcacatcataactctgggcatacgtatacatggaaccaaagtaaaaatgtcactatattaactctgtagtgtactctcaggatttttgactgatagggcaattcattttagccatccccaaattaacaaaatggattaattaaatgcagaggttgtaagacatatatggtatggaatagaggttataatcttaaggcctacggcaaattcatattaatagcatttcatttgttccttcttgaggtggaaaacgaagctcattcccaacgtgcaaagccaaggcagcgaccccaggacctcttctggagatggaagcttgttgaaaacccagactgtctccacggcctgcccagtcgaccccaaaggaacactgacatcaattttaccctgaggtcactgctagagacgctgatccataaagacaatcactgccaacccctctttcgtctactgcaagagccaagttccaaaataaagcataaaaaggttttttaaaaggaaatgtaaaagcacatgagaatgctagcaggctgtggggcagctgagcagcttttctcccctcatatctgcgtgcacttcccagagcatcttgcatccaaacctgtaacctttcggcaaggacggtaacttggctgcatttgcctgtcatgcgcaactggagccagcaaccagcacatccatcagcaccccagtggaggagttcatggaagagttccctctttgtttctgcttca

SEQ ID NO: 112559 - DNA, 1077 bp, Homo sapiens
aattctgaataaggaagtgatattacatgatggggcaggggtgcattttgttcctggacaccagctttgctgcccttgccttggcctggacagcttaaactgactggccagtgagccctgagtggcaccctgacagggctggcccttgcctgctcctgaccctccactccaccacctcagagctcacccatagacttgtctccttggccctttcttccagaggacagcctggggaggaacccccaggacatgagctggccaagcgctctgcttttggtaggattttacatttatttgggcttagagagaaggagtttccccctttccctttcttcactcctgagtcagggtctgtaaagccctattggcccagggtcggtgctgttgacctcccagaaacaggcccactcttgaaatctttagattcacctttattgcttgggcttttagtaaggaactctacccatttgggttcatggttccatttggttgatgggatattttgtcaagattggaatttggtccaggagagcatcaggggggttcggttatatggggtggggtggggtcttgtgccgcctttgcatccccagtacaaatgcgtggtgactcctggtggagggagcccaagtctgaacatatgtaagatgggccttgcctcactccctttgaagcccagccgcagccggagagcagtaattgctggctttgattgcgcagacttcactggtgggttgggctgtgccggggctcgcctggcctggcccagcttcagccgcagccccccagtgaagccttagatgtgggaaagctccagcccctggagcctcatgcctgtggtttcttgaaaataatctggactggacctgttttatatctgtaaagcaacactacaaggcccccgtttctcccacttggaagtaagacttggtctcccctgacatccctgtattttaaaagagccaccagggacaaactgcctcatttcatagtgaaggaatttctttgctcttttttttttttaagcactagtccctgaaagggattagttgctttttggtaagcaactgtacagag

SEQ ID NO: 112560 - DNA, 1060 bp, Homo sapiens
ataattttttatttatttccacatgaccactagcccaaggaacctgacattgtaaattaaggcttggtctttattaagctttaaattagcagggtgtgtacctcttctcctggtaacagttctcaaaggagctgcctttggttatcctctctaagaacccacatccagtcaatcaccaatccctgtctttggggtctgtcttgagccttttctctcacacttaccactgccatagccctagttcaggtgctcagactttccatctggagtactgtaatacacgttaataatttttctgcctccaggctttctttctaccagttcatccttcacgttgctcctggagggatttcctacaactcagattgtgcatcacttcccgacctggaaacttagccagtacttcccgttggctaaaagataaagcacccgccactgagtgtgtgggtctgcccagtcctgcccttgtagctttgcccccagtcactcttgctctctgcctcccctcactttcaccctagcccttctgagtcctatgatcagtccaaacaaaattattagcagttccccacatggcaagagggcaccgcacatgctgtccctgggcttcgaaagcccatttcctctacagaggactggatagacgtgtgcagtgtttcttaggagaagagtgtttactgcagctcatttggcttttgactaaaccaggtggcccttacctaaacttttagaacttaattttggtgctgaggtttcaaacaacttgcccaaaaggggccagcagagattttggtaccaaatagatctgaattttaaatcagttgattccctgagcaatctacttcagctttttaatcttcattttccttacctggaaaaggggaatatcgatacctaccccctgtggtggttgatgtgcaggatctgcccagcggccagcacacagttggagctcagactcactccttcctcctactgagacctaagtcaattgccctctcctctgtgaaactttcttcatctttattcagattccccaggtttttccaaatcccatcac

SEQ ID NO: 112561 - DNA, 1879 bp, Homo sapiens
cactctgtcgcccaggctggagtgcggtggcatgatcttggctcactgcaacctctgcctcctgggttcaagcgattcttctgcctcagcctctcaagcagttgggattacaggcatgcacccccacacatggctaattttttgtatttttagtagagacagggtttcaccatgttggccaggctggtcttgaatgcctgacctcagctgatctgtctgcttctgcctcccaaagtgctgggattacaggcatgagccactgccccggctattttaaatttcttcatacatattgtcacattgctttccaaaggactgtattattttacacttcttataaacagtgtattcaggtgactgttttgccacagactacttaaaactgggtaaaaaaatcttttttcatgttatcgtaccccagcatctatcacatattctattcagtgtaggtatatcatgtttaagtcatactaattttatcagcaggaaatacctcacttatagtgccaattgttttattactgtagaatttgagcatctcacttatgtagtcttgatagggcaaagacttttattttatagaggggaataattttcactatttaagctcttaagttaatttaatattttgcagttattatgtctgagttcatgcagcctgctataataaaataccatggacatggtgagttataaacaacaggtttatttctcacacttctggagcctgtgaagtccaggattaaggtgcaggcaggtttggtgtctggtgagggcctggtcccagtcttctggctgtatctttgcaaggtagaagaagggggaagagagtgctctggggtctcttttataaggacattaatccccttcatgagagctccttgcttaggctatgatcacctcccaaagactctccctcattataccatcacattgggggttagaatttcagcatatgtatttgggagaacacaacattcagtctatagtaattctcagggtctacgtgagacaagcattagaaatgccagccaggtcagtcttaataaaagtgaaattatttctttttaaaagagcaagagtgaagccgttaattaatatacaatttaatatgtagccattgctttaggtgctgctgtggggctcaagttctcacaagagatgatgacaaggatgcatatctgaggtcatgcacacatggaaacttatttctggaaatgggttgcacaatttatttcctataatatgctccacagaaaaagtcactttactggtcaaggtttggagctcagacattggatataagtttgacacaggaagtaagagtctgtctgttacttatgggaaacagcatagtcagctcttctgagttattttggttgccttaataactaccatatgctgatggttaggaactgtcttaaattcttgacagcaacccagtggtggaatgaatactattacatgaatattattactccatttttcaggtgaggaaattgagaggctgaagagtttaggtaatttatgcaaggccttgtagtaggtggctaagctgaagttttcacccaggtcactctgacttcaaaatctacgtggttttcctcctcctgagtggattagctcagtcttccagtaccttctttttgttttgttttgttttgttttgttttgttttgagacagagattcgctcttgttgcccaggctggaatgcaatggcatgatctcggctcaccacaacctctgtctcccaggtttaagcgattctccagcctcagccttccgagtaactgggattacaggcatgcaccaccacacccagctaattttgtatttttagtagagacggggtttctccatgttggtcaggctggtct

SEQ ID NO: 112562 - DNA, 1155 bp, Homo sapiens
gagttaagggccccctggccctccagtgggaattactttcctgctgaatacagagagtgaggatatgatatgaaggtatgcttcctattcttaatgcacatttccaacaattgctactttctcagctcccttaacaatccccagatccgagcatgtgtcctaaaggatggttcttatttggggtctctgtctgtctctgatttagacacctgtttctatttataggtctctgagatctttgattaagatcaggttttctatcctttcataactcccctctggcagggcagcccttgctagctctttaaagtctctggcatcaaaatcatgacgttttacactgggataatttgagttcttaaaagtggatcttaaatccatcccagaacattttatcttttgatttttattcatctttactatatctctaaaatagtgttcatatgaattaatcaaagttttatttttaatccatattataaataataatatcacaaattttattttaaaataagccttttctcttcagaccttcctggctattaaaggaaatccatttatcacaaatttgtcatgagaatgttttatcttggaactgtacaagtttattcaaattaaatggatattttccccacaacttggtgaaatcttgacaatgagatttgatttttaaaaagtttgactctttattttgcagtaaatagagatagagaagcatttttagtcaattgtgtttcagaaattcctgtaaagaaagaccatctttcaggtctgtactagactttgtttttgttttcaatgcaaaactttaattacatcattttatctactgttcattttggtaagtgatcttctatttgtgagtcatttttgtacattagaaatatcagagaacttcctggctaacacggtgaaaccccatatctactaaaaatacaaaaaagtagccgggcgtggtgggacgcacctgtcgtcccagctactagggaggctgaggcaggagaatcacttgaacctgggaggcggagcttgcagtgagccgagatcgcgccactgcactccagcctgggcaacagagcgagactctgtctcaaaaaaaaaaggggggggggttatcagaggacttaaagcaatggaacatgtaaataaatagtt

SEQ ID NO: 112563 - DNA, 2184 bp, Homo sapiens
aactggggcgctcgaggacaagttgctcttctcgtgcttgcatcctgtgcgcctctgcttgccttttggttggctaggagggtgcatacctcagccatgtgtctgtctgtgcagtgtgcctggctcccacactaggtgtcagagagagtcccgggtaggagctctgcgctgtgccccggccggaccagccacaccatcgggcgatggactcagcctccttggaaagcgttgcctccaaacaaattcatggccgcctgactgtgggatgggaactgtccggaaagcggacattacaagaagagtttgtttgattcaaaatatgccgggggtggggtaagggaggaggataaaactggtttggtctcagctctataatttgcttcctttgtggaaagttgtatcagtttgatgcggcagtgtttgaaaatgcccagatagtctagagccttcctggatggaggctgtcagaagagacagaacagtgcggacaggctggcaggccatacagggtgtgcgtcctagtgtgtgaatcaggccctgtgtggacatggtcatgccagcggagctcgggaggcctgccgcgccgcaccgagaagctgctgtgtgtgatgcttttgcttctggagaggatggcactgtgccctgtgcttgatgtacacacacatttggggtgcatcatctgtgtgttcgatgtggctttgtcaagggagctagcattattgtgccggaagtcaaactggtgggttattaactggttgtgaatatgtcttttttatatgggtatagtattcaaagtttctgtggtgaattacagctttaaaaaaactttttttttcagtgagttgtaaatgtagctgattgtgggaggaggtggaattaatatccttccccttaaaacatatttttatactttttaacattgtaagaactatctgatgatagaactctcacaggcaaataactatcatcatgtatttttgcaagtaatacatttagcaaagcatcattatttggtcaaatatttgtatttttaccatgcttccttcatattttaaaatttgtttttgaaaaatatatatcctagcagagttcctttcaagaaaaggaaattaattgtgtaggctgtgatgaaagacctgagaatgttgttcttgctgaattaaatgtttactttaaaaagtttgaaaagcaaaaatttctaaaacatatccaaatttatctagagagcttattgaaaatactgtctttattttatttttcttgcctggcagtttccctcctttgtgttggctggtggtggatattttaagattttttttaatgctgttcaagcgtacttgggaaaaagcctttggcaagtgtagtttttaaccttgatgcagaactttatccttcctttaaattcttctccttatttctgttaccagttttccataagatgagatctctgaaacattagtgtatttctgcacagaaaatcattttggatgatgttaatggaaaccttattaaatgggagactgattcctatccgttttctcagttgttccctcctaatatggatgaggaagccaataatatgagaaaattcccattgtgatggtttgcttaggaatataggcagagattttaaaacatgatgtgttttgctttcatttaaaaatcatttaaaaagtcaagtcttaaataaagtgttatatttccaataattacttttcgtgaaattcctatttcaaaattgctttgcaagaaaaatgattcacttttttttttccacccgaatatagaaagaaaaaaataattatcggcccactctaatttatagttaatgcttctgtgcgtaaagatgtgtttttactcttagccagtagcagttagtggattgctttgaaattccatctagcttttgctgcaacagccagtagtacattgttttcttctctttcctcctttcaggttttcccatcatatgattcccggtcctcctggtccccacacaactggcatccctcatccagctattgtaacacctcaggtcaaacaggaacatccccacactgacagtgacctaatgcacgtgtaagtatccacccgggctctgctgtgattgccttaggatactgaggatttctacactgttgctcctttgcaacagtgatccttcacccctttgtgttgctgtga

SEQ ID NO: 112564 - DNA, 1008 bp, Homo sapiens
catctttactcctgtaggagttccttaagataatactctctgaaggcccagttttcccagatgttgaaatcttgagaaaagctaacaaatggactcctgttccttggatctggtgaataaatattgtttcattctgaaccttaagtatgaatggtataaaacatgtagttgcatttctggttaaatatcctgtgaatctgtaaatgatacctctctgttctgtttaacaggcatgtccagacatcctccagctcctgatatccctactttttatcccttgtctccgggtggtgttggacagatcaccccacctcttggctggtaagaaccttgctgcacccttcagccaggcatttgaacacatgttcctccactttccattcatggaaattagatttatgaatggtaacacttgtggagttgaagaaatttcacatcaacaagcaaggtgctaactttattcatttcaatttaaaagattaaaaaacatacagactttgaaatggattgatccgtttgctaatatgggtagaaaatgactgtagcatttgctttgaagcttatagttttatggattccctttgtggctttgggcatttgctatgcctgtacaaagttagtgctcagtgtggttcttcttttctaggttttttaatgaacaacttatatttttcaaaaatgaatttagacgcattgaatatctacctttacttgtaagtgggcaagtgaggtaaatgacaaaaataactagagagaaattcaacaatataagagcattttttggatgttaatgaagtaagcatccaatttgagttcagagtagtaaaaaactgatttgggggccttctttttttctgaatatgaacgctagtgctctttattttgttgtttatttctaaaaatatgcttactgctgcctccaaaatcttttcaattatgaaggtgaaggaaatatattttgggaagaaagaataacatggtatagcctatttttattattttatgatt

SEQ ID NO: 112565 - DNA, 1087 bp, Homo sapiens
gttaaaattcccctggattcagttattaccagaagattattgattaaatgcacagccagttgaaactccagacctttatgcacagccagatcccgcactttgggtttagtttagttagaacctggagatgtggaaaatgaggactagctaccaggacagcaggtttctcccccagttactcctctatccaggaggccccaggccttagccagtagggagttgaaccacctttttagttcttcccagaaccacatcctctgaggctaacagctttcatgacaccttcaattcctgccagtggtgagtgggtcatttctgggaatgctgctttgggggtggctctcaggatccctaagtggcacccacttcgtgtccacaggaggtatgggttttattggctgtgatgccaaagaggtccttacctgcagggaccagcctgggtggcagccaaccaagcttccttggcatgttttccagtcctggagagaaaggctgcagttgagtctccgtagctttacccacttctgctgaggtgcttctttgtctcaagtgattcctgtgcctgggacagagaccacacagccatttcatagatgtcacatgctctcaggtgtggcccaaatggtcacctcagtgtccaagattttatgaacttggctttcaggaaggccacatgatgtacaggtaatgagcttggcctctagagccagacttctgcatttgaatcctggcttggctgcttgctagagcacatacccttcaagaatattttcttctccatgcctgtttcctcatctgtaaaagggggataataatagtacctgcctcaaagctgttgtgaggataaagtgcttagcacacagtaagcagttggtaagtgttaattgctgtaattactatgtattatgtgggtaggttggcctgatggtgatttgcaaatttaagaaagggtttcaagcttctccctaaacagccatccttgatattttctcccttttctttctttcttttttttcttttttaagtatctactctttttgtcttttcctttgctcacccaccaatcacctgcctgagattaaagaat

SEQ ID NO: 112566 - DNA, 1135 bp, Homo sapiens
gagtctagtgctggctctaccactttgcagcccgatgacctcatacaagtcactttataacttgtgttgcatgaaacgacaacaaaagtaccctaatgtgtgtacatcagtgcaccatattgtcgctggcttgcttccactggacactgaaaatgaagcccatcatctttcctcatcctgcctgcctgccccatcctagtccgtaaaggcagcctcaatcttgaaaacctggaagcctctttctcctggcctttccccttcacccggcacacccaggctgttactgtcttcttcccttccttattacctcctgcctggagtttcatctcctaatggctggttttgttcttaacattacacattataggtgtttgcatatatgtcttacctccttgagtagatactaagtttcttgggaatagtgatgagattttacttatctttgtctccttgtcatgcttccttgggatagcaccttaacatggtaggcatttatttacttaagtactttttgagttggataggtgaaattgactgatcagaccgttgatctccctgagccatatctgggctcacctctgagcatttgtgactgggtctggtagtagctttgtatcccaggtggggcactggattcggggtggcaacatttggagcccgactgcagacccagctgcctgacttgtctgaatatcactttcgtcattgactgactgagggtggttagaatttattgaacgcttaggctccttcagctctggaattctacattaataaactgctttgcacttgattactttgaagtggaagtttcccccctttctttataaggtaaatgaatatttcatctcaagcccaggagtcactttgcacatatcctgtgatgggaggctaatgaaagctttgatagagaccttaaattgggagagatgggatcatatccattgctctatcataagaatttcaccaggtctatagagaaacgagatagaagacttaaaattttcattcatagctgtacaactcatgatttgaaacattattaaaattaattttgaaaacacttgggaaaatggagatgtttgaggtaaaaacaatttttgaaattcaaagagtggcttttaaccttttcatt

SEQ ID NO: 112567 - DNA, 1018 bp, Homo sapiens
gagggtaagagtatgaaggaggagagagaaacttgcagctcaacaggaagagctcgtttgcttgttttctgtttattttttatcctaatatttaactgctaatcctaacgcagtgcatgtgtatcttataaataaagaaactgagaagttagtgatttgtattggtttcttgagtgatcctgtttaccacatggaaaagtctggtgagatgaacaagtgggactgcagcacttgcatgtttctcctgacagtgtggctgctcttattttgatggaagtatccccagttccaagaccactggacatctcccacattttaatataatttattttatacatacagaaggagaacagcatctttatgtcatgctttaggttggataggaaaaatcaagtccagaaaaatattattagcgctgcatctcttaaccaggtcaggttgcaaggagaaagggtatactacgagtgagtcaaatctagaagaagctgaaagtaagaaagaggtgctatgacaaactgattgcagataagatgatgataatctaagacctttttttattaccagcacaatgttaggcttgttacaaaacagtcatctcttgcaaagcacctgaaggttgatgtggaaagtctgagcaactggaaaggaaacctcaaagtcgaagcacactgttaaaagctgtgtatcaaggttgaggtcctttgtaactatacactttccagagtgattgaatagatggttgggtctcatcgaaacttgcatctctctcttgaattaaagcgaagaccagcctcactttgtagcttgctttgcttttccctgtccctgcccaggagacctgtccctttctagcccgctttagcactgtggatgtctgactctgaattgaattgtgagagctgtgctttctggggatctcctagctgtaagcatctagaagatcagtataagcatcttcatgtggtaattgtccttttgagttatgtgcctgtagtaggttttctgtctgttgttcttt

SEQ ID NO: 112568 - DNA, 1106 bp, Homo sapiens
aattgactaggctggtcttgaactcctgacctcaagtgatttgcctgccttagcctcacaaagtgctaggattgcaggcatgagccaccacgcctggcctggaaggtcttttgatgagccataaacagttaataatatcatcttaggctgatagtgcagcatcataggactggcaagtaacataagagagcattcttgtgcctttaaggatctcatcaaaattatccaggtagatagttatctgtcaaactcttaatggtctcatttaaggagaatcatataagcagtcttaaataactggttctggtcaccagtgttatcatctgtcctcctctttttttagccttaattccaattgctgctctgcatgtccttgtatgaagggagtgatttgaagggctattttagctcaccctaaaactcaaagggaagtatatgaagtagtattttcctctaggtgattattggaattgatcttatggaagaaaagaaatgaaaaatgggatcactattgaataccttggttgtcattcaccctgtaaatagtatcgttactcataacacagcttaagaggaccatgtttctttcctaaatagacaccatttgttattggtacttgagaaacactaagaaaattgttcaaagcatacacagtgtgattcctatgtgtaatcacaatgtgattataccctactaagtacccaaatttgtatcacattttttgtgcctaggatttgcagccaccttttactaacataaactaagcatgtttctaactttattcaacaattagaatgccaaggtatgacctttttattaatgaggaatattttgttattgaaaagacttacagagaatgagcagaacaaccttagtttcgttgtttatgaagtggaacatgctggcaaggtttttgttctctatctggaattttctcagaatccagaaaagtgttgttttacttggattgttctctctctcctttgcttctccattattcatgaaggaccatgtttttatagaacaaagcattcaaaatttatgcaatccatacatgttttgagtttctaactattacaggaaaaattattaccctgaggcttag

SEQ ID NO: 112569 - DNA, 1054 bp, Homo sapiens
tattaacgtccctaaaggtctctcacaaaatggcagcacatatttcattcttgtccttccctttgcttcctctttgttttccttaccgagagagtcatgttcctgagctaatgccagcagggccagcagggccagggtggaggtccaggctctgcatccacctccctaaccactgtggagcccggcctgcaccttgccctgtgatctgtgctggacatagtcacatttaacagcccttcaagtttccaggttttaagggagaaaaggatagttagcttggcattgtagatgtagatgccatgctatttaaagatgcatgttctatatataaactctagttaatcatttgactaaaaccatcataactttcctttgcatagttcagatgattcattgttttgaaaactatgtaaactcaaatggaaaacaaccacgcactgatggttgcaacttatatttcccagtatagagttaatgagcagaaaaatggcagagccgcttccacacatctaaggctgaacatttcttggaactattaatgaatgtactttactgtaaacattgaagcttagcagtatgttctataggccctgagaagaggggaatgaagattctttctagtttcttacaattataccatggcagggaatctcagtctgtatttttaggtatttgtcctccaactctccttcaggcctggttcagctagcatttccagtccagtctctaccatttcctatccgtaatccatccttgttatccttccaggctacttagaggatgttgctacgagtggcttcatgtttacatgcaaggaagggaaggcagaggaggaaaatggggcatggtggcacatgtaggtcacataggcatcatgcgtcagcaagctccgttctgtcccccatggaagcatctttgaattcctgatgttctcagccctaaattctcagctcttctattctcatataggcagtggcaacttcaaggcgtttggaggagttggggctagcccccataatctccagcaatacccttcaccaccccaaataaacac

SEQ ID NO: 112570 - DNA, 1050 bp, Homo sapiens
aatttttgctgagggcagtctgagaaatgtgtggagcccacagctccgggggctactgagattccatatgcttttagtttgtctctgcttagccactggagtgcctctctcaaggttggtggctgagcaagtggtgctgtgttctctcacatgctgttcaggtgactaaaattctaagtacaggtttctctgaggagggccttgaagaaggcgggggcaggggattgagggggcgccgtatattgactttttcctttggtttgaatgggaagcctgggatgcttccagtgactgttttgcttgttactttgcaagagaaggctaatgatagaatcacaaaagaaatgtttttttgcctgataatctgaaattagaagggggccttgggatatggaaaatgtgataagcttattaagaatgcaacctacagaaaaatatttgataacactggaacttatttccggcattttccgaaaatggtaaaattaaggaaagatggcacttttccaagagaaaaatatacagattttgagatgttattattcaggttttcttgctgattttgcttttgcaattctgaattcatgtagtttgtaccctttcctctaaagcaaaacaaaccccaaatgaaacaaacataaaaactgtaacccagtaaactgaagtaggcaggttgttaaaagaaagagttttccagttctgcacagttacagacaaattttcaaagaaaatttacagttgggtaccttacagccaggtctgttgattcaaaatcctttcaaacaaagatggcttttgttcgccaattacttggtgtttcagaactaagaagttttgtgcagaatgaaaggaagcagttatttcatagtcatttctcctatgtcaataagttttagaactttgtagacttggaaaagttaaagactgatggttcattgactactatctacataaacaatattaaatctttgtgaaaaggggactttgttaaacgagatgcattttattttataaattctcttaagattctactttcctgctctctccatc

SEQ ID NO: 112571 - DNA, 1026 bp, Homo sapiens
tagaatctttttggcaaatgatgttgcctccttattacataagaactgagcatttacaggcaaaagtctgccaaagagcattctttgcacagcaagcaattaaaatgtggtatgtgcttcatttttaggagcagttagtggtgatttttgtggtatcatgatgttggtttaaataagagaaattagtttagaattaactggaattgtgatcattcctgagaagttgcaacagtgagtttcctttaaaaagtgaagaaacttttctttctaaggagacattaggaacagtcttttcttctttttctcaaaaggaaatatctttttttttttttggttaacagtaatatataaaaacgggggaaaacccatgaaagaacagaaaaaataaataaaaagtacctatatttctgtcattctgatataatggtttcattttgatgaattgtttcatttcagacattctttctgtatctatacctgtaatacaaacgtttttgtaaatgagcttataagattattattctattataatcttttgtcattaaaaatgtattacgtgtgctcatctttatgtgaatgtaggtctgtgtcatcagttgtaatggctggatagtatccagttatatatatatatacacatgtacatatatgtacatatatatacacatgtatatatatgtacatatatacacacaaatatatacacactttaatttattggatttatcctcagttatggatgttaaagtttttttgttgttattttaaataccactacaatgaaaccgtgttaaaaatatatttataatctattttttttttttttttttgagacggagtctcgctctgtcgcccaggctggagtgcagtggcacgacctcggctcactgcaagctccgcctcccgggttcacgccattctcctgcctcagcctcccgagtagccgggaccacaggcgcccgccaccacgcccggctaattttttgtatttttagtagaggcggggtttcaccgcgttagccagga

SEQ ID NO: 112572 - DNA, 1259 bp, Homo sapiens
ttaaagagaaaacatgccagcactgtctgtagcaagcagaaaaacatatatgttttattcccaggtaaaagtagagctcagcattatgtaggtgctgctgtcctgggactaaaggttgcgcgctctctctctctctctctttttttaagggaatgttcatttaaaacttgtcctctttgaagctgttgcttaagtgtttgtgctgagctgagccaatctgtaggaagctaatactgtagtaatcaagacacttagtactcttctgtgctatccttacatgtccttacttatttagaaaaggcagccattggattttattcagataatttaaaaattatactttaggttcatgattactttttaaatattatgatcttgaattacctgcctaggaactgtggactctgctataaactcttttagggatataaatcatccagtatctcagatagagaagatgaaagccttaaaatatcctagagaacaacaacaaagactgggggtggaggtggggggagttgggagttaatctgtaccaaagtgaagagcggggagttgagcagaggactggacagggagcaggaggcattgctaactcagaaattctgataatctagctgggactatttgcagactgttagcagaggctgtgtagaggattataaagtctctgtaaaagagtgcatttgtataatacccactgtagctaaacctgtaaacctgctgcaattatccacttgttatctctagatcacttacaaagctcactgagcgatggtactcacatgccttcaatctgtatagggaaaattgcaagggcagtgcagagcaagcaagagttttgttgccaaccccatttttccatttgtaggagaaataggactagcagagaaggttgcatcacagagtgtctagaaatacagtttatttttgcagctagctagggacaagtagaatctttaaaaagctggatttgttgaccgttgtgtctacctatgctcacacataaccctatgtggaacttgatgacagttttgcagatgaaattttgatcttcatcatagtaatttattgtcattgttatgttcacctgtaaaaagttgcctattgctcgaggcaggtggatcacctgaggtcaggagtttgagaccagcctgaccaacatggtgaaaccccatctctactaaaaaatacaaaaattagctgggcttggtggcaggtgccaagctactcaggaggctgaggcaggagaatctctt

SEQ ID NO: 112573 - DNA, 1067 bp, Homo sapiens
cttccatttgtcccgcatgcaacccaaatgtttaacaccttagaaaagaaacatctcatttctcttcagatgcttggggagggaaaagcaacacagtgcaggaagctgcagcaaacgttgcagctcagtcacatcaaaccacaataacacctggtcagtgtagcgctgcaaacttcattgtttttggttctttgtgatctttctaagagtcaatttttaggtgggaaaggaaagatatgggtgttctcatttcagctatcttttaaaatgtttatttttttaaagtagaaattgctatgaaaatgttccatgagttcttttctaattaccttgtataacttagttctgttgtgacttttaccttaagggaatcaacactttggtttctattaaacagaattatacctattataactttgtcttacctaccctgcatatttgtacttgcttataaacagctaaaatctgattttgtcattgttcacatctggaattaaggaactaagttggacttgtctaatcagtaagcttctgaatgtaccactgtacgtgacattgttggatacctttgaaaataatcacataaataatattcaaggatagatggagactaaggcttatatctcatgcaagatttttaaggtagagtatcttttcactttattgcaagaagctattgaatttgacttaacctataaataattttcacttttctattttaagttgtgcactttttgaagctaaacacattgagttttccccttcaagtggagaataagttttagaaagtgtattattctaactcaaatgtatatatagatgtcaggagaatgtgtgggaaaattcctcagagcccccaaagtttcctgtttgatccctccttcatggcattgctacaatttgggacaggatcatagtcagaataattggaagcgcttgccattcccccatcaaataccttatggccagtttgcttatttaagtgtgccaggaagccatactacatgtaacccttgcagagctaatattgcatttacatgcctggttcttactcagatagttttttt

SEQ ID NO: 112574 - DNA, 1115 bp, Homo sapiens
tgaacaaaacatacaaatatatagatatctctttaatatttgggcaggtttttttgctgtttttggagggggtggagaagggaaggagaatatgttttagataaggaatatttgaagattcctgttaaatcattttcagaataacaaataatctttccaaatcaaagtagtgttggtgacaatagaaaatagccacaaaacagccttacgtttttcagctgtgagtatacagcatttgtggaatttatttcttaaaaagatcagctacttctcctttcaaaatggtaattttaaaaaatcaatataatgaaaatttattggtatttataagcaatccctaagaatattgaaaattaagctgatcttcctctttatgccagcattctgccttgtgtttccacagtcttttctcccaatctaccagtatactagtcattttgaaattttgatagaaaatatcttttgatagaaggtatttattgttagtgtatgtattaaaattttgaggtcagtgaatcaaacagtcattcattgtttaggaaagatttgtggccagaataaatgttggtctgggtaaagtgtaggaaagaggtgtggtcaggaaacagttaccttaccctgttatctgttgctttgctttattctgttaaatattaggatgtatttattttaggcatgttttcttgagatattctgcagtttgcacaattccagaagcttttcagctgtaaccacaagactatgtaaattttttttttagggtccaaccgaagtgagttacaatctttggtttttaatacctaacagctgtttttaatgtgtcggagatcaaaaacactaaccggaagacagcctctcttcttcacccctaaccacacttctgccttcttgctctttaactctgtccttagcagggctgagtgtttgtgtcactaacatccacagtgatagattttcatctagggtgtcaggagcatggtgaccatttgtgtttgggcttaggatgggagcatccccttggcatcctgcttcttgaatttccattacaaacaattgcttgtttactgcatctgcttcccaaaagtgttaggactggaaaaacacctggggtgggg

SEQ ID NO: 112575 - DNA, 1151 bp, Homo sapiens
tacttgaggcttttcatgggtggtaaagtttaacctttaaaacagtatgtaaaattttacattaagcgcacgtgtgtatttttctgagaagagggtccctggctttcatcaccttgtcaaagggattcatgacctctaaaaaagtaaagaactctttgcctgggctgtaaaagacaattctaaaaggggcctttaagtttttaatcttagatcaggctccctggaaacacacctcgaagagacttgagtgttggcttatggggagcgctcttagaatgcacctccaggaagctgagaaaggcggggtcaggtgatccacaacgtggttgctgtgaggcagctgcattgccccagaagagaggatttggataggatatcccagtacccactcaactttccttctagtatttctaatccatctagcaaaccaagaaagcaggcaagtgactgagggcatgtagtctgtcttgaactgtgaggcctattgattctatcaagcctcacatcactgccatctttgtcacaacaccagatggaaggctctggttatatccttccctctgctcactctcaaatagctgcttctcccccgaccttgtcatcagctacttccctcctttccagtcctttgatttttgtcctctgaaatccttttcgtctctgtgccaggcattgagatggaagcttgcatagagagacaaatgtggtttttgaataaatgcactaatgaatgtatttacttgcaatatgttctctatattttaagagagactttgcagagcagaagagaacaggagatgggagcccttggcacactatgctgttgtttacgtctctgtccgtgccttcccccacccaagtagataagaatagtggtctcattgttgtagttttcccttaaggtacttaacccagttccataatactatttttccctctctttaaatttgtatttgcattttttcttgatcagtcttgagagagatatggcaatcttattaaaaacttcaaagacagccaggtacagtggcccatgcctgttaatcctagcacttcgggaggctgatacagaaagatcactgagacctgtagttaaagatcagcctgggcaacatagcgagacgcccatctctacaaatttttttttttta

SEQ ID NO: 112576 - DNA, 1039 bp, Homo sapiens
aaatgacaaggaaagagaagggaaggttgaagaagggaaggttcttgaaggtccctggtccttgaaggtcccttaaccataaatgtcaagagttgggatttaaacccaggtctaacgccagagctggcgccctttagattaaaagtgcagtgtccatgacaacgaaagaagttgattttgtcccacctttgctctttgcggcttttcatttgcgtttgtttccacagcgatttccaatagatttctgcgtggccttgacacagacagctagtgtgaatccccgcccacagaggggcggcacgttggttgccgtacaacgtggtggttccctgcatctctgcccacgtcggagaggtgcgtcggcttccgtacaacacggatactctctctctgacgcaacttcctgtcctgcgcaattctatttgacctttgaactggcaaaggcttttttcttcctcttccggggacgttgtctgcaggtatggatgttgttctcttttccctgtctttatttccttaccaatcggctgccatccgaggagctgaggaagcctagagctctcagaagcagtcctttgagctggtgtaggggtaaggggcacaacagggaggttggtggtgaggaagttccttactttgatctttggaaatcccttgttcctggtggcacctccaaagccgtgagtagccacagctcaccacccgggactttgctgcattccaagtgtagcgtttggagactaacgagttgtggtttggcggtttgagtctggaaaatcgccaaacgttttcatattttacacccacgttttcacagcacgcctgtacgtgtccttagtctttgggagggcagggtccggcgagttcgggtggtttcgctatttggcttctgcgtccaaggcccatgtcaaggaagagaaaaatgtgttagaagtttctgtcttgcttttggagatgcaaacagaataatggcttcataaatcactcgcactggttttacgtgtcaagttttggtgtctggtaattctgttttagttta

SEQ ID NO: 112577 - DNA, 1203 bp, Homo sapiens
gacagaattcccatgttagagataaggaggctagctccttgccctttatattcccagtaaatggcatagctaaggattcgacttcagagctcactttttgtgctctttgtttaaagcggtgtttctccaactgggctcgtggcacttttctggacaccactccaaacaaaattagactctgagtaaggagcctggtcatcagaacgttaaggaagtgccacgtttgattaccatcaggaaagctaacattcttggcctcttgtttatcagtcacctttaaatacaagtagttttaaaatgtggaataatacatcttaatttaagggtgttacatacaaggatatgtatgtgaatgaaatagaccacatgatactgttttgagattttatttacttttacaatggaaagatttgatgttactctattcttaatttaggcactcagaatggtccagcgtttgacataccgacgtaggctttcctacaatacagcctctaacaaaactaggctgtaagtatttctgaaaattttaagtatatattgtcatttactctacaaaatgctgacctactgactgtttcactttctaggtcccgaacccctggtaatagaattgtttacctttataccaagaaggttgggaaagcaccaaaatctgcatgtggtgtgtgcccaggcagacttcgaggggtaagtgtaccttttactgtgtgcagcctaacaagtcttgaacttactgagctttcatcccttgacgatggaatgaatcaaggagaggttaccactaagagggttcagaattactaaacattcatgagccaaatctgccacgaacatagactttttaaaccaatctgagaaatgcagtgaaatgcctttcagataaatgagtacaccatttccctttgtaacctactttaaacttgcccttaacacttaacaaaatttagggaaatttctgttaaagcatcacaaaaatcttaatatttttcttatgcaggttcgtgctgtaagacctaaagttcttatgagattgtccaaaacaaagaaacatgtcagcagggcctatggtggttccatgtgtgctaaatgtgttcgtgacaggtaagttaaatgcttaaatgggctttccttagcaaattattgtgtgtgttatactgtctgctgatcagtacaatggtgaagcaactcattttaaaccag

SEQ ID NO: 112578 - DNA, 1196 bp, Homo sapiens
aaatctaataatatatacctccccaaagcctcaccatcccattggaagttagtactccaacatataaattttgagggggatgcaaacattcagtccctaacattttctaaattaaaggataagatccgcaataattctggatgaaaagatgcttttgggtttccaaaatattagctattcaataatttttaataaatcttaaatgtttctggttaacctgaaggattatgtaagtatttttgccaaacatttacattcttttataattgctttagctttcattcatttactcgataaatatttattagaaactaccatgtaccagaaactatgatgctggataattgttaatacagtagtcaacaaagcagatgagactcttcccttggcctcatggcacacaggagagacaatgttaaatggggaacatataaatacatttgttgttgtacacactgggattagactcacaaaaagaaagtccacagtgctgtgaaacgatgtggaaagggaacctcatgggggagttaagggaggctttttctgagaaagtgatgtttaagcccacaacaaagataagtaggtgttgtctgggtgacaaaaagggagaatactctggacatagaaaccaacatgtgcaaatgccgtaagtcaagaaatcgtttttatgaaaaacaaaatcaattcaggcaatccaattcactctcaatatttaaaggccaataaacctgaaaagtgtgaactaattgttaatcactaagaaggaacatccctgtcagcacatagatttactatacctgtgtggccccagggctacttttcatcctaagggacaccagcaaaagaaaagctttcctaaactgttttagttaggagcaaataaatcctcctctacattaggggatatttaaattatgcaatcccctagataatttaggcaccaaccacctaccattaaggaggaaaaggatcaaatttactgaccaaattcccttgatattcattcagcttctatattccttggcctgtgcaaatagcctgaagactttactctctcaactctctctcattctagggttgaaaataagcttacagcttgacttgcctaaagaacaaatggtcttgaagaaaattcacgtgtttattgcatcttagtgtaagtcataaaagatgtcacaggccatagggtctctctt

SEQ ID NO: 112579 - DNA, 1780 bp, Homo sapiens
ttcttattattaccacgactacatcgggaagtaaaagctcagcagcctccggcttttcctaacccttgaaaaaacctctaatataaaaggcatttatatccaaaagttcccattcatctcccgctctgggaaccgggagcgccccctgtccaatcagctttcaaatcccctgcgtcagcgagtgggcggggctcacctagattccttggcctccgcttctccggcttggccacgttagaagtcccgcaggtccttgaaggtacacaaatcacctatatatccattagaaaaatgtagagtacattatcacaatgtaagtttaattagattaaataatttacaacactttattcatatcatttatttgttttatttagtttcttattttcttctatgagtatagtaaccacctccgagctttacggatctgcgggtcctttcctcgcgcacgcgcacttgttagggagggcgggcctgtttccgggaggcgcgtggggcttgaggccgagaacggcccttgctgccaccaacatggagactttgtaccgtgtcccgttcttagtgctcgaatgtcccaacctgaagctgaagaagccgccctggttgcacatgccgtcggccatgactgtgtatgctctggtggtggtgtcttacttcctcatcaccggaggtaactcgggctgtcgggcccgagaggctgaggagcggagaactgacccgccccgggaggcgcgtctgttccgctgactctcagccccgggggaagcatagctctgctttggatcttttctgagggtggaggggagttctggggtccgaagtgttaacgtccaagtttattcgccttcacgccctgtcttaagagaattcgtgttctcactcccattgcctttcttctccttctagccctcccatcccagggatccgagtcaaatatatttttcaaggccaaattgttgctctttttgttgcttgccatacgttgtttgataaatgtcctgggaaagcctaatttggcaaactccgtttccatggttggttgtttgataaaggtcctgggaaggtctaatttggccaactccgcttccatggttggtcaagagcttgtgggacttttaaacttatctttgtcctggaatcttggaagagacttgacaatctttagttttgttggctcaaacctagggttctgtgttgccttttgcatgacctacaataaatatcaatggaattttctgaaatcacaggtttgataaatatttgagattggagatgagatttgcagacgatactgtatttcagtgggcagaagttgagaattaaaaaaataagataaatagcattactattaaacgcttctgaattgtctatcatcttattctgtccttttcaaatagaaaattgcaaaggggcgttgccttatgtactggtgagttggcaatccggctagtcttttcagagccactaccctttcaggccacagttccaagatttacttagaactgtgctactgtgtacatttagatttggggaagtggtgtacttaacttggaaattataaaattaatttagattttgggaagtggtgtacttaacctggaaattataaaattaaagctacggatttgggatagcaaaagtagttctacttttaagggagtggccatataattgttattttcatagatgttttgtgagaatagttggcactgaagggggaggattcaaactgagagagctgagttctagaaagcacctttgaatttacctccttccccca

SEQ ID NO: 112580 - DNA, 1077 bp, Homo sapiens
taattctaaaacattgagttgaatgtctgaatgatttatcagaactttagatgagttgggccacatttggttataataatacaatcaaagcattcctatttaaaagtaaatgaaacttggccgggtgcagtggctcacacctgtaatcccagcactttgggagactgaggcaggtggatcacctgaggtcaggagttcgagaccagcctgaccaatatggtgaaatcccgtctctactaaaaatacaaaaattagctgggcatggtggtgggcgcctgtagtcccagctacttgggaggctgaggcaggagaattgcttcaacttgggtggcggagtttggcagtaagccaagtggcgccactgcactctcaacctgggcgacagagtgagactctgtctcaaaaaaagtaaatgaaccttaagagacaatgaaaactataatcctgttttcaaaaattagtaatacaatctaatctgttctgttgtctttcttataggaataatttatgatgttattgttgaacctccaagtgtcggttctatgactgatgaacatgggcatcagaggccagtagctttcttggcctacaggtaaaagatacctttttgaatgatttggtggtgggaaagaaggttgctgtggtatgcccacttatttaaaaatagagtaaaacctatgggatccatgtgtatttagacaacagctgttttaaaatgctggattctgaaatggcagaaagtgagtcaaaaacaagagtatattatttatttattaagaaataaagtatttcataatgatgtatcaccaatttacagtagggtgtcagtttaaactacatttatagattgttctgggggtcagtgaactatagctgctttttttttcttttccccaaaaaagttttattggaagtaagtatgcccatgtgttttatatgatctatggctgcttttaagctagagtggctgagctgaataagtatgacacaaaccatataccccacaagcctaagatatttactatatgggtatttaagaaaatatttttggactataccctggtctataccattaaa

SEQ ID NO: 112581 - DNA, 1088 bp, Homo sapiens
aagactcaatctcaaaaaaaaaaaaaagctaagctaaagttctgggtaaagcgttcgtatacataaaatatgagtatttattttacataaacagttgtgttagttgaggttttacgacattttttgaatgtgaactccatgaagacaaagatttttgtctgttttattcattgttgtatatcccccagaacctaaaacagtgcttgctacctaatagactcaataaatatctgttgaatggacagatgaatatccagaggtatagtaaaatagttgtaaggctaagaataagaaatatagcacaaaaatgttttggcacaaaaacggaaataggaatttcaatttaagggaaacatttctatttgttatctttctatggtcattcttttcttttccagagtaaatggacaatatattatggaaggacttgcatccagcttcctatttacaatgggaggtttaggtttcataatcctggaccgatcgaatgcaccaaatatcccaaaactcaatagattccttcttctgttcattggattcgtctgtgtcctattgagttttttcatggctagagtattcatgagaatgaaactgccgtaagttatttgtgtaatcagcaccttatgttgcaaattggtaaaatgattacctggaaaatgtaaagtcataggacatttaatttaactttcatttacatgggtgaaaaatccagaaaccaaatatatttgtaacttggtcaggttacagctatagttaataaaaattgaaactaatagatcttcttagttgttatccccatgaatgttcatgagagaaaatttagttactttgtcctggcatcaatgactgaagatagtcattgtttcttttttttttttttttttttttttttttttgagacggagtttcgctcttgttgcccaggctggaaatgcaatggcacaatcttggctcactgcaacctctgcctcccgggctcaagtgatgctcctgcctcagccttctgagtagccaggattacaggcatgcaccacagcactcagctattttttgtatttttagtagaggtggggtttcacaatgttgac

SEQ ID NO: 112582 - DNA, 1075 bp, Homo sapiens
tccaaagaaccttttaatttttaatttttttttttttgtgggggacggagtctggctctgttgccaggctggagtgcggtggcatgatctcggttcactgcaatctccgcctcccaggttcaagtgattctcctgcctcggcgtcctgagtagctgggactacaggcatgcactaccacacccaggtaatttttgtatttttagtagagacggggtttcactgtgttggccaggatggtttcaatctcttgacctcgtgatccgcctgcctcagcctcccaaagtgctgggattacaggcgtgagccactgtgcccagccaaacctttttatttttaaatttttgttcagttttggatttgggaggaggtgagaagtatctggttgtcaaggtggttgtgttagatgaaagttctctttactcagagtgtgtggattggccaggctgatacagcagaaagaagagtgtgtgagttctaggttgattgcattggctgaacataagtctaatcatacagggagtcaagtgagttcagaagctgaaagggagggaagtcacatttttgagtgtttgctgtgtgccaagcactggaggagacctcagtattgtcaagtagtttttaaatcttacgttaccagtgaagaaacttgggactctaaaaatagcagctaacatttgtgaagtgcatgtaactacgagtagcaattactatatgagtagattctcttataatccttaaaaccctttgaggtaactccattttacagatgaggaaactgagtgaggtttgccaggctcatgcagtaagtggtagaagcagggtcaaaagaagaggcgttctgaagccgtcagtgagtataaggtgttgtaaaccttttttttttttttttttttgagacggattcttgcactgttgcccaggctggagcacggggtttcaccatgttagccaggatgttttgtgttttgttttgttttgttttgttttttcttttttttttttttgagatggagtttcactctgtttgcccaggctggagtgcaatggcacaatcttggctcactgcaacctcca

SEQ ID NO: 112583 - DNA, 1466 bp, Homo sapiens
aacatggtgaaaacctgtctctataaaaatacaaaagttagccaggtgtggtggcacgcgcctgtaatcccagctacttgggaggctgaggcaggagaaccacttgaacccgggaggcggaggttgcagtgagctgagatcacaccattgcactccagcctgggtgacaagagcaaaactccatctcaaaaaaaaaaaggaaaaagagggaaggatagtagaactgaggctcagtaatttatttgtatattggggtgaggggggcaaaatatgaaataaggaccataataaagaatcacgcaattatatttttggattgttatttgatatatcataaaatttgttttggcattttgaaatactatgataataagagaatataaaaacaattcttttcactttttgtgcttataattatatttctgcaggggctatctgatgggttagagtgcctttgagaagaaatcagtggatactggatttgctcctgtcaatgaagttttaaaggctgtaccaatcctctaatatgaaatgtggaaaagaatgaagagcagcagtaaaagaaatatctagtgaaaaaacaggaagcgtattgaagcttggactagaatttcttcttggtattaaagagacaagtttatcacagaattttttttcctgctggcctattgctataccaatgatgttgagtggcattttctttttagtttttcattaaaatatattccatatctacaactataatatcaaataaagtgattattttttacaaccctcttaacattttttggagatgacatttctgattttcagaaattaacataaaatccagaagcaagattccgtaagctgagaactctggacagttgatcagctttacctatggtgctttgcctttaactagagtgtgtgatggtagattatttcagatatgtatgtaaaactgtttcctgaacaataagatgtatgaacggagcagaaataaatactttttctaattaataccttttatatttgttttttaactgacagtgttaagtttttggtctattaatcattcattcccacccatcttatgactttctttagctacttttggtagcctaagatttcaaaatatggttggcaggatgccttgagagttagcatctttatatccttgtaaatattcaagcacaggctgcatatctatgtcagagttgtcaatgtgaatgtgctagatgagcacatgtagaaacatctctggggccgggcgtggtggctcacacctgtaatcccagcactttgggaggccgaggcgggcggatcatgaggtcaggagatcgagaccatcctggccaacacggtgaaaccctgtctctactaaaaatacgaacaaacaaaaacatctctggaccaatctggtcttaatttcttctatccaggccttttggttctccctggctggccatgggcttcacttctct

SEQ ID NO: 112584 - DNA, 1043 bp, Homo sapiens
ctgaacagcaaagcagacagcaggagaagaatcaaacaaggtacatgctgggatggagaggtcaccttttctcccttttctcctagatcacccttctcaccccgtggaccagggaagccctgtaagataaaaagcaaaccaaaaagatctattggtgtaatagtggcaaaatcatatagaaacaaatattttaggattttacatttctgagcttaaatataacaagaaatggctcaccagtgttaagacttagataataaagcagtgcttagaaacataagttttctaatgtctcaattatctatacacaacaggtttcttgctttttcttttaagaaatacagagtagaaagaataccagaatactagtttgaattctggcaagttcactgatttgtgcagatttgggcaaatcacttacctctctgcactttagtccgttgactgtaaaatggggttaatgatatctaccagacagctgttgtgaatgttaaatgtgatgatgtactacaaagtaccagaatgatgcctgcccataacaggtgctcataaacagtaactagtattacttttggtattctcattattcaggtaatacaggatgagcagtgattgtgtctagaggcatttacttttgacattctctattttcacagaatcatattagcataagatatatagggactaaatgttaaaaggaaaaaaatattgcataactgctttgagaaaaaaacataatatatcattctgtaaggatagcatgtgagaagtatattgattttatgcatatttttcataaataggtcatgctgatgttaagagtaccctcaatttgggaaagtattttgaagtgccactatccactaccagttattaattttatacaagataattgtgtttttttgcttttctgttttatctcatgcaaacactagtgtattttatattgctgtttacatgcacagcaatatatgttctatgcatacctatatgcacagaaaaaaaagaagtattctttttgttatcgatgatggagaccatca

SEQ ID NO: 112585 - DNA, 1095 bp, Homo sapiens
gtctaaaaggtctttagcttttatctagaaaagacaacgtgcttgagaaagttcctttagttttttgtttcagttgacattgacacactgggtcagacttgtcccaaagcaccatgtctaaatggcttcctttatgtggttctaattgggattctttctcaggaggtcaaattagagctcctgcagttggagctacagcaccggcagttgacagcatcagctcagttctgcctcttgagacatgtaagacagccacttagagtttgttcctacagtcctttgacaaatggccctactctgactgtgtacctaatagacagtttttgtttttcttatggatctgtgccaaaaacagggtttttccttaagcaccttacttctgctttgttctctttgctttgccttttgtttgctatgattcagtttgtccaaaagcattggctaattttcttgtttatgaatcatatctggcctacttacataatggtgcctggtttaaccaaattcattctatgtgagtgaacaaaacggaactttggacatctgaattgctctgttggtccgtggatgaagataatgcatgatagattagtctgtgataatttattttgaacatcatagcaataaaaattagttgattagctatgacaggatatgatctaagattcattcattcattgattactttctatgtagcaagacctctgaagagatatgtttagtgcgttacttttaacctatctctctagcattttgttatacaggctttctaggataccattttgggtagctttgaaacagggagcttttataaagattttaaattgcctcatacatctgagtttagttactggaatttaagtaccttacggtgtcctttaaaaaccctgttgttttaaagcccaagaagtaatttatgactgtaaaagtgggagtgataaattggagaccaaagtatgtattgctttttcccaacagcctgggggataacagaggaggtcagacaacttaagtctgtttctctttcttgggtctgtagcgttcttgtagaagaaggagaggaattgtttctgaatagtagaagcaacagtgcca

SEQ ID NO: 112586 - DNA, 1048 bp, Homo sapiens
gtggaataacaatgtctttgatattggtttactcgtttataaatggaagcagcctaactaatagagttgctatgagcactaaaagtctatggaaagatagaacaccgtagtcccctgacaagtttcatttgctccttttgttccttttcttcctatccaagtatttctttttagttcaagttgctttcctgatgggaactctgcctaccttaagagaagtagtcatgattttcttttgcttaccagatgttaaactgtacatgatcatctttcatagatgaatagcacagtaattatctttctgttttaagcatggaatgagttaatactctaaaaatataagataagaactacaaagagatgtaataataaactggttttatgtgaaattacatttcagattgagggtgaaaatttatcttcacattggattcttaagtgcagcatgaagacaagttgtgggaacatgatatatgaaatataaaatcttccaaaccccttacatatctagaaattttatttgtacagatgttatgaatgatataatgatcttttatgtagcaattaggctaggaatttcatttgattgaacagatactattgtgaaaagtacttatctcagcaaaatactgactcatatggaatgacacaaaccacctttttctgtagatagatgagcctagataaaattgttaaggggaacttgtcagtgtggtcaaattagttaagttcttgttaggggattagaagtgacccagagaagacttttccctgattcagttaaccttcttagattccagttacctcaaagataaaatattaaaaataatcacagaatatagactagaaggaggtttaggtatgatctagaacaaccaccttgttttacagaggaagaaactcagacctaaagatttaaaagaagttaccaagacgcctataatgacagtggcaagtcagaggtcaacttaggtctttttaatacccggtattttcactgttttgccacaaaagctccatgagtgttaacattatgtcaaccaaacac

SEQ ID NO: 112587 - DNA, 1056 bp, Homo sapiens
gatccacctgcctcagcctcccaaagtgctaggattacaggcatgagccaccatgcccacccttgatttttaactttaaaaaaatttacaaaaatgcactttataacaagttgaatgagaatttactgaaaataccacttacaataaaaacattgttagaattctgagaggaattttttcctgcaaattctttgaaaaagtttagtgtgatactataaaattatacacttttttcctcaggttcttaacccccatcttaaaatttgaagtaagaaggaaatcattggtatgaaaaatcactgtggtgttcagggttgaagtttttgatgtaaagaactccctggaaagatgctgggcaaatttctcttctgcatagttcatagcaggtgactgacactcaataacatttaatataatgaattacagaggctttgaaaatttaggcctccaaagagcaaatccaagatggtagataggattttcacattactgtgaagacagggtggatgttgacatagttggtcttctgggagtgcttcatcacctaagtgaaagaaccatattcacctaatttattttaccaagggaaagactatttattctctttattagctgcttatttaaggtcaaagagaaaagaaggccaaaggaaatatgtaatatagttttcagctaggtgaagtagaatttagtacactataaaattgggcattttctcttccagcttcctttaaccaagaaccttattttattgaccttcattaaatttacattttagttttgcttttctacattactaggaaatttgcagctaagtatttttgtgtaacaataataataaaaaagaaaaatagcattatattcaaaactgatgcaaaaagaatcttgattattttccattgaggcagcagtggtgtagccagtggaaggggctcaggctttggaaccagacagacctggccctaattctggctcagctatttacccactctctgggcttggcaaattactaaaatccttccagtctcagtttcctgatccataaaactgaaaggc

SEQ ID NO: 112588 - DNA, 1051 bp, Homo sapiens
cgggccgggaagggcgttcggggccaggcccggcccgagggacgggagcgggcgcggtgcggaggccgcggggtccgggttgggtgcgggtagggggcagggaaggcacggcgcggggcgcgcgggggtgggacgcccctggcgtgggggcgggggccggcctgggaaagctggggccgtggctgtttatgtaatgcgaccccaggcccgaaacggcctcgggcgagtaggggcgactgaaaagctgggagcccacgtagtaaaacccagttacctagcctggacgcgggcgagttgccccgagcgaccccttggctgcgagagctggccagaagccgaggccgctgagtgcgtggtccggagaaggctggtgcagccacccagcagggtggattgtgcccttcctgtctcaggaaaattgcttcggttcccgaggcccagcgaacacgctgccttgaggaaacttaagtttgcactcaagtttgtagacaaaagggtgtaaatatgctatataagtgtaactgtaaccctgacccagttcggcctcaagaactgtcattgccgctgcggctgctgctcaagcttttggagtttgcttgtagtgtttgaaagggagcagatgtaaacggatttaaacgaacatctttagatctgggtgtttttcctagctccactttcagagatgaaaaaacgtgccagagttggccctgctttgaggcagggccttcatacaggcagcagccaaatgcagcacgaaagccgctttcatattaaggtcgtgggcttttagtaggctgcaaaatgatggatatgcattccctaatgctgagatttggaatgttcgcggataggggccaagggtggaggaattctccttacagacttcttagtatgtcagatgagaaccttggaaagtaattgactgaatttagaaaaatacctctgtcctgtgttggtacgagaaccaaactgcattagtactctccagatgattgacctgttttatctaatttcctaatgaaaatctgctggactttatgaattagtttaa

SEQ ID NO: 112589 - DNA, 1193 bp, Homo sapiens
atcatagacatatgctgtagactttcaccatccagtgtggtggccactagctgtacatggctgttgagtacttgacatatggttgatcagattgagaagtgctataagtgtaaaatacataatgatttttgaagaaatagtacaaaaaagcaaaatatctcagtaatttaaaaatactgaatacatgttaaaaatgatttacatttgtctttattaactttaattactttcagatacttttttatacattgggaacatttaggtcttgatataaagtatgaaatagtaagcatccacatatgattagatatattagatattcccaccccccatgttttcctggagtaagtacctttctttgataggctagaaagtaaatagacttattctggtgggcaactcacttctgataaatttcagcagctaggacattcctgttatttttaaaagaatgacatttgaatagttgggacataatgattatttctcgtttcagatcatgtagcatggatatgccagatcagtcactaagtgggtagatatttgaacagatttctctaaatctgacttggctcttcattgataaattctactagtgtagagttttctgacactacagtgaaaggtagcagatccatcttttaatatatttaaataggagaaaggaggacaacattttacttttgtcgtgttaatgaaagatcctaacagactttatttccttaagtaaataaattctttcagatgaattattaccatctaaaataatctaagaaaagtaaattatacacctagtaaaatagcgttatcagtattttggttttctgtatacttcttggaattataggaggaatgtagatgatatttttcccttacagcttgactgtgtaagttatttttatgctggccgtagaatatatattacatgaccagaaatgaagattccattacattacttagtacaaattgaaaacaattagaaaatgtatgctttattcttatctcttttataaacaagtattttaatacattattatggcaaggagtgtagtggtacttcctttgtgtacttgtgtcagtggagctaaaacatcttgtcaattttctattaaattatcctttgatttgagatatggcacagatacctgtttccttccacaagacagaaaaattagattccaagataattaaga

SEQ ID NO: 112590 - DNA, 1345 bp, Homo sapiens
tccactgttttatcaggatcctcaggatcctcatcaacaagaacacctcccactgcaaatcacccagttgagcctgtgacctcagttacacagccatcagagctattacaacaaaaaggtatttgagatatttattattgtatatgcacacagacacacatacgtatttatagaagatatgaaaaaaagttacttataatctcaatccaaacacaacttttggaatattaacttacagtgtctcatatatgttttacataattacataccattttgtattttgcttttctttttattacacatagttcttcatatatattgagtctttattgctctttttatggctaattattcattgtgtcaatgtataatggttatttcattcctctgtcatgggacatttatttcctattttttaaaggttattatagtttcttttaggatagagaagccaaaactttattatttagtgactctccatatcctatttgattatttctgtgctttttgttattgataacagaaagtaagctttgacagaattttgcaaatgaaagggggtgaaaatgaaattgtaacccatactcttgcgtcattgaagaactatatgatttattgtttgtttaatattctccatgtgttaagtaagtaaaaggtaataaaatgtgttgttttgaccctgcttccccacattgtttcttttggcagtttttgtttttgtttttgtttttcctgtctggctaaaattccaaagtattgatgtttcaggttaatatatggcattttttatttgatcagagatgattgaactgttttcaagaatctgtagtttgtatttccagagcaaccattgtattattttagggactgtactcactatgtaatgacagctcctaacgttgagtgtgaagaaccttcttataggtctgaaactgagaaaaggaaaaaagcatgataaattcctagggtgatctcattgcttgtatctgttgagtgtctatgtgatcaacagagacctttctgtcaattgatcagatgatacattacacattttcttacttggttttttaggaaaagtaactgcagcaccaaagagtgcctgttgattctcaacaaaccagtgggtatactggaaactgaatttagttcttaaaagtatttgccttcaaagtgaaggtccagtagaagttttgtttatcacaaatcaaaaaagcttttaggatagatcaaagccctaactaaatgaatggtgtcttttcttgtttttcctctacattgatgactgccttccatttcttaaatgtttcgctttttttggcctattacattgcccctgctgcttatt

SEQ ID NO: 112591 - DNA, 1064 bp, Homo sapiens
ctatcatctttttataaataatattttgtaaatggtttgcccactaaacaattgcaattatgtttcttcttttttctattaaaatatattttgaaagtagaagaagctgccatttattgagcacatacaatatatcagatactttatatctcattaattcacatattaatcttatgacatagatattcttccttttttacagatgagaaaagtgagattgacagaggttaggtaacttgcccaagactacaagttaataagtagcaaagcaaaagattttttaactcagatctctctatcttgtattctttctataaaataaagctgaatttttgttgtcattggctgttgacaaactaactcttggtttacctaagataagtttcttgcttaagtaacagaaaatatcatactggggacatctgaattgtagtttttattgttcctttttcataagtaggagaatggcctcttagtgacttctttgtctttggagagatctgagctatacaacctaattgagtcagggctaccacatatggtggtgcgaattgtcatttgcatgaatggagcttcttcgaattgtgcagtgtatcatctgcatagggtttactgtgggcctgatatgaactactaaagtgattatacttaaaaagagattagcttttttcttccaaattcaaagacaccgttgcttagttgttctcccaagactaagcattttttttctgtttttaggggagacatcaaatttttgtttgggtagcccctaaaattttttttataaactacctacttgaacattttttagattgatatctaaaatttttcatcaaaaatttaaatacttgtagttatgcagtttttaacatatatgctggctgacttttaaaactgagatgttacattattctttcaaatgtaccctttggaatgatacctaccatcgtccttttgcaaaacacacaaataccccttctttaacatttgggaagtttacatttttcatttttctatttgatggcatatcccctttccttaatgtaataataaaatatatgctt

SEQ ID NO: 112592 - DNA, 1096 bp, Homo sapiens
tccatgtacatacatttctacagtgggtttcaggctgagctctgggaaaggatgtcatattttaccaccttatatatttgatctgtgtatctcatacatagattttggctcttaaagagaatctgaattagaggcacttcaggaagcattcacatatcctagaatagatgacttggctatcaaccccttgccggctgtagctccccatttgttgtagtctgtatgtgctatacccaacctagagcagggcgccatgcctggctaattttttttttttactttttacagagatggggtctcactatgttgcccaggctggtcttgaactcctggcttcaagtgatactcctgcctgagcctcccaaagtgctgggattatagacatgagcaattgtacttggctcaaatttttgttttaattgggctttttgtcagaagaatgtgccactctgaatttgtttttgatattgtttcttgtattacttgaacctattttacatttatttttattttctcatgaagtgctgggattatagacatgagcaattgtgcttggctcaaatattcgttttaattgggctttttgtcagaagaatgtgccactctgaatttgtttttggtattaagtttgtttcttgcattacctgaacctattttacattgattttattttattttatttacatcgatttttattttattgatttttattttatttacattgatttgaatttgggatactgctattttaccgatattaaaagatgtttcagcaaagctagcagatttttccatgactttttttagtcattgttgaaagatcaaagcttcattcatctacagtttaacctttgcttctaaactaaaattttattcttaatagtttttttcttactctagtgatgagttgtttatccatgctaatcaagtatgctagtcacctgaaaaaaaaataaagagagcattaaagcactatcgtgtgattttggtgaggcagggcttcattgtaccccaatattaggaaatgttcttaaaaatccccactatgtttctggctttcttttttctttttttttcaaagtagagccatgagatt

SEQ ID NO: 112593 - DNA, 1315 bp, Homo sapiens
tctactgttagcagagaactatgccgaatacagtttttttctttaactgtgattcttcttctgttatgggaactgagtttaccatcaaggtaacattagcagaaggaaggggtaccacgtatgtgttttgtatgctgtacaaaatcagttcactataaatgatcactgcccaccaaaaatgcacaatcccaaaggaaatataccacagggccataaggtcaaaggagataaacatgtatagagctcagtaaacttttcagacaatattattgcagcttcctaaatactaactgttttggacaatacatgatagataccttttcacacttaagccagtccatattaaagctgcttttactaaactgctttgcagagattttctaatggttctagttttgataatgaatttgctaatattaatatgcatgttgggatgttctttggaatgtcagagttctttctcacttttaatgcaatgtcaaatttttatttctcatctttcctgttggtttgactcttatgtttgtgctttccactttacaggcgtgcagtatggtgaatatgttaataaccaagctagctccgcaccaactcccttgtcatcaacttccgatgatgaggaagaggaggaggaggatgaggaagcaggtctgctttagctttacaccagttcttgatcttttcctgctcaagttttctttttgtttccacagtcttacttagccttttaaaaaagagtctttgaagatttagcatgatgaacttacgaggtttgcattatagaagatgtgtcacataaaataaggtgtttgttttgtttttcctcctttaggcatctttgccatattgtaaataatagaatcagaattcctctttcatgacagtagagtgcattcttctttcagaaatgcattttctcccatgtcacatgcaaaataatgagtactgactgaagcttttggctgatgattgctctagcatcgttttaggaataatgcttcattttctgctttgcctgctactttagtctaatcaaaataagccatgtggattttataatagggatagagaaataggacagtgtttcagtgaggtccttttggcttttcttgtcatgtatttagaaggcccagaatttgtagttattttcctgcttcatgaaatagtacatatcttgctagctgaagaagttgtgcatatggttatgtgttgcaaactgtttaatatctttttctgcctttgataggtagaacactgctaaaaaattaagcagttcagttcctccattaattctaatacaggttgaatatccctt

SEQ ID NO: 112594 - DNA, 1032 bp, Homo sapiens
gtgacttgtcatatgaggtcaggtgtggaattttccacttgtggtgtcatgtcagccctcataaaattttggattttgaagcatttaagattttggattttcacattagggactctcaacctatagtttaagactgaaccaataactgatgatctttcaagttattatatgtgaccacaattctcctgttctaaatgtgaagatctgttctgcaaacaatcattttaaccaaaaatttctatttcctgtgcatttaaaaatatttaaatcattatatgcgactcgggataaaaattgggggtgacaggtgggaaataatttttcttactctaaatacgtaagtacccatctatgtttctgaaattttttttgtaattttaaattttaacaaaatttcaaactcacagaagttaaaagaaacccgcatgtacgctttacccagataaaccatttttgccacatttgctttataattctctatcaacatatttttgctataccatttgcaagtaaattggagacatcatgaactttacccctaatactttatgtttcctaatcataaggtcagtgtcttaaataaccaaaatacagttatcaagaaatagagcattgatgcaataatatctgataacactgttcattgtcaaatatcagttgtctgaagtagatcagctataaagctgttttcatggtccaggatccaatttggatcatgcgttgaatttagttgtcatgttagactcctttagtctccaacagttcattagcctctttccttgcctttacattttcaaagagtacagaccagttattttgtaaaatgttccccagtgtgggtttatctgaggtttcctcatgattagattcagaccatgcatttttcggaggattaccactaaaacaatgttgtgttctcagtgcatcctatttgaggcacatgatgtcaatttgttctcatattgatgaggttaacttttattatttgaataaggtggtatctgccaggtttctccactataaagttactgt

SEQ ID NO: 112595 - DNA, 1051 bp, Homo sapiens
taggtgttattatgaaatctgttgttactaatgaggagcagctcagagatgtcaggtgtccattttccctcaactgttagggagtggacatggagtttgagttatagccttttcatgttttgtgcaggttatgaggaaatctcaaattatctggctaatttcaagtttagcaatactagtaagtatattgcctttgttgacccatattgcttgtcttttagagacagaaaacagcttaagcctttttttaaaggcttaattgctttctgatactcttctctagcttcaaggattctgagctattcttctgatctgttctcctcgttacttctttagatttcagctccctctctttttctctttccttttttcttctttcaagctgtaacatagagccagtagaagaatgagagaaaattatttccaagtactgcatttcatacttgacccccatttgatctcagaatacttattatcagtaattgtagtgtgaagtgactgaggcaaatcgatgctatccaaggattaagcatgggacaagtaccaaagccattgattcagtggaaaccagcttgtatgctgaaagcagtattttgcttggtatcaggattccaaagatcaatatattagcatagctctggccatcaaatacgtataatatgatagggaaacagataccatatgattacagtacaacttgaaaagtgtaagcaggcgcggtggctcacgcctgtaatcccagcactttgggaggctgagatgggcagatcacctgaggtcaggagtttgagaccagcctggctaacataacgaaaccccatatctactaaaaatacaaagattagccggccgtggtggctggcgtctgtaatcccagctgctttggaggctgaggcaggagaatcacttgaacccgggagacagaggttgcagtgagctgagatcacgccactgcactacagcctgagtgacaagagtgagactctgtctcaaaaaaaaaaaaaaaaaaagaaaagtgtattaattcaggattgagaatgtgctcctgcat

SEQ ID NO: 112596 - DNA, 1029 bp, Homo sapiens
tgtcactaacaactatgaagcttgtttctggggctattattttttgttgttataatactctttatctttttctaaaagattttcagtagcctttctcttctttccccttctttttaaagaataactactccttaaataaattttatatttctattgtcatgcttaggtctttgaatttgaattcttttcaaccagcctctgagtatagtctttgactctttgctccctcaatggcttctggctgcttctagtaggtaaatagatgctaccttcaacttgggggtaggttttggagacatcacttttaaccatatctggaaatcactttagccattacattcaagtacaggagtagatagtattgaaagaaaaaactatcatttcattttaatatactgtgatttttcttgccctcctgtctcctatcactgacaacctgacaactgtacctgatctctctctctcttttcctaatgattccaagcttcaaaactaacagaaaaagcagttttgcccttctttttatttcttatctctttgttgatgatccaggatgaagtttaattgaagttggaatgttctatacttaaaaaaaaaaaaaacccatgctatcttgctatcactattctatgaatcagtagaaaactaatcttttcagctcagtatggaattcccttgtaatattttaaaaatacttgaataaacgactcagttttttgtagttaaggatttttcccctaggaattttgtgtgtgtgtgtctgtgtgtgtaagaagttgtaaaccattccaaaaacaatctcttatcaagatcttctagaagagttgcttcatttactaaaagatgaacaaccatatagtatcccatgagctctagattaatgtgaaatgaaatgtctagtgtagtatagttgaaagattctggccctgcagtcagactttggtttctttgtattcattcagtcaacgaattctaatcttataatgaactatgtgttgagagtatttcagtaaccttggacaagttttc

SEQ ID NO: 112597 - DNA, 2266 bp, Homo sapiens
atatgtttttggaaagggctctggaaacttctttgagaaagaagagtttgatgctggagcagtttcagctcaactttgtgtatttttagcttggagtaggtcagtagtctcctctagccagtaacaaatgaccccactcctcagtgatcttagaagtctcacaggagtgaagattagtctgtggaaacatcataaatattcaccatactggtaagctgaacatccacataacttgtagctttctgttctctgaaatgctcttgacccaccttgcagactatatcttaataccctgatcagtcatccatagcagtgataatgcttcttgcttcgatgcatattctattttggcatcctgtagtatccaaagatattttaaaggcattgctaaaacaataaattacataactgaagttaacatagttggtagtacttagtaatatgcttctgtgagatgaggcatctatcttattaataaagaaagcttgacaggcagtgaaatggtaattttttctttgtattgtagcatcgacttttgaaaacagctctaacagcattttaaaagattaatgatagataaaatgtttcagtgttcataaatgtggtttttgtgtaaaattttacacattaaaatctgatttgcagtatattcaatcttttcttggaaagtacttatttgtcattctgcccttaaaatgcttaagcaagatatactattgttctaatattggaactggaagtaagttttcaccttggtcttcttctctgatatatatttgtttagatagggataatttttctgtcccctgtagaaaagcatatgtgtaattatccttggacttaaattactatttcattattttctgaaatgaaatatgttactgagcactctgaatttaaaattgtcatttttatctttaggcttcctggagattcacgaacaagaataggattcatgacctttgatagcactattcatttctacaatttacaagaaggattatcacagcctcaaatgttgattgtgtctgatatagatggtaagcagtcagtaaaataaaagcctttctaactacggactttgaaatgggggctactttattttaatatacaccttgctatatgctgtgaggataatgtcatgcactttagtatttgttcaaaataattgtttttctggaaatacttgattctaagttatgcctatgtattacacacatgtatgtataatatatacagagtgtgtatatttaataaagcaatattagctgggcgcagtggctgaagcctgtaataccagcactttgggaggctgaggtgggtggatcacctgaggtcaggagttcgagaccagcctaactaacatggagaaaccccgtctctgctaaaaatgcaaaattagctaggcgttgtggcgcatgcctgtaatcccagctactcaggaggctgaggcaggagaatcgcttgaacccgggaggtggaggttgcagtgagccgagatcatgccattgcactccagcctgggcaacaagagcaaaactccatctcaaaaaaataaataaaataaagcaaaattatagtacacattacatgtatgacctgataaaaactaagattttctaatgtattcttttgttcgatttgttgattaaaatatgtgttttccctatagatgtttttctacctacaccggatagtttacttgtgaatctatatgaaagtaaagaggtaagattgatttattttcttaaagcataaaaatatttatattgtgactggtaactaaaatatttaacatttgtttacttgatatattagtattacaaataatagacaatataaatggcatatctattgactcctcagtttccagtccccagaaatacagtgacacatgatacactatggaatgttttaaaataagattattcctttgccttctcagtaattcaatttttgatctttgttttctcagcttataaaagacttactgaatgcattaccaaacatgttcaccaatacaagagaaacacacagtgcccttggtcctgcacttcaggctgcctttaaattaatgtctccaacaggtggccgtgtgtctgtatttcagacacagttaccttccttgggtgcaggacttctgcaatccagagaagatcctaatcagagatcaagtacaaaggtattttatgtttagttttttgtcatattcaagattgtgtaattatttgtttattctatttcattaataataaaatactggcaa

SEQ ID NO: 112598 - DNA, 1062 bp, Homo sapiens
tgcctcagtttcttcgtctgaaaatgtagatgataaaaaccatatgagatgtgttatgaaaattaatttgtgtgaaacagtgctggcacataagtgttttttataaagattatctatcattattattatcatagggaatctgcaccaaatgcctagacatttagaaaactcttagtttggtagggaggcagaggatatcctttttgttataaaaatgacatgaaaatatgagcataaagattgctagctcttactatatgatctgttgacttaggtggtacaacatcttggccctgcaactgatttttataagaaacttgcattagattgctcgggacagcaaactgcagtggatttgttccttttaagttcacagtattctgatcttgcttctctaggtaaggaaagtcatcatgggtacatttgtttaaatgaacatttttaatgcataattaaatctaaactcttcagtaagcattctctatattttagggagaaaagcatgtgcattagatagacaatatctatgaaaactaccagtaaagtttaaagcactatacaaatataaaatgtcacttgtattttgtttagatagcatgattcccttaccattctgctcaacagtaaactttatcatatattttatagatattactgttttctcagatttgtatgttcttattttgatggcttaggttttctcatgacttagatttcttcataatgtagaatctgtactactgttggacaagtaaaatattattatttctatagctaatactttttgtatttctctctaaagcttgcatgtccaagtattctgcagggtgcatctattattatccatcattccactatactcacaatccttcacaagcagaaaagttacaaaaagacctaaaacggtatctcacaagaaaaattgggtttgaagctgttatgagaataaggtgtactaaaggtatgaagttgtaaaagttatattttatattaaatacttgtatcaaagtcagtgagcattccatgtattgactacctctgactgttcatgatggaagactg

SEQ ID NO: 112599 - DNA, 1363 bp, Homo sapiens
tagacttgttctgattgtcagatttatttcagaaaaaaatgtataagaagacatttgaaatgagggagctgatgaaatgcatttttccatcctaaaaacttagctgaattttgtttcttaaataatgcgtataaattttctctcttatagtgcccattggattctaatggttaaaatacctttcactttggttgctttttagctgtggatcggtccgtttcatcaagtctgtcagatgcaagagatgccttagtgaatgctgtagtggactcattgtctgcatatggctcaactgtctcaaatttacagcactctgcattgatggcgcccagctccctcaagttgtttcctctctatgttttggcccttctcaaacaggtagctttttatacattgctatatttaatattgttttttaaaattctcagatatgtacatgaagaaaggaaatctaggttgttttctaatacttaactagaggattattcactttagcattgaaagagttttgaagaatagaaaaagatcaatggggccatgcatggtggctcacgcctgtaatcccagcactttgggaggccgaggtgtgcggatcagctgatgccaggagtttgcaaccagcctggccaacatagtgaaaccccgcctctaccaaaaatacaaaaattagctggtggcacgcgcctgtaatcccagctactctgggggctgaggcaggagaattgcctgaacctgggaggtggaggttgcagtgagccaagatcatgccgctgcaccccagcctgggcaacagagcgagactccgtctcaaaaaaaaaaaaaaaaaaaaaaaaagaaaagatcagtggaaaatgaaggtatacaaatacatgatgactttagtgaaaccatattctctcttctttaatgtgtgtgagcagtttgcataatggtgcagtcatagctcactcttaatatgtcctctggaaagagactctttaaggacaggaactaatattaagcatctttccatgtctctggcaccataaaaggtgtcaatgcatcattttatttaatcctttcaacaacctaaagaggtattattttccctatttttctcatgatgacagtatagctcagaggagctaggtaacttgctccagcatcacatacctattaaatgtcagagctgagaattgaatctaggtctgtctgatttaaaggccatgctttttccatgattgacagtgtatatttgttttaatatttgtccaccatatttgtattttacttgaaaacgtttatctttttccttgtagaaagcatttagaacgggtacaagcacacggctggatgatcgtgtatatgccatgtgtcagataaa

SEQ ID NO: 112600 - DNA, 1051 bp, Homo sapiens
acaggcgtgagccaccacgcccggccaattttaaaaattttttttttttttttaagcaatggggatctttctatcttgcccaggctggtcttaaacttctgggctcaagcagtcctcccaccttagcctcttaaagtgctgagattacaggtgtgagctgccagcccagtaatttttaaaatatatactatttttagaaatatgcacttttattttatttgtataaatttacaggatacaagtgtaattttatgagctagattgcaaagtggtgaaatcagggcttttaaatacgtttagacaaatgcccttttctttcttccagagatgagagtcctgccaaagcagaattttttcagcatttgattgaagaccggacagaggctgcattttcttactatgaatttttgcttcatgttcagcagcagatttgtaagtgaagtagaataaaattgaataagaaaaagatctataacctaggtaaagcataatctgtcagagaagcgcgtgagaaatttgaaatgaaggcatttgttaatacaagatgcaacgcacagcactctgtctgaggctttggtaaaaagtaaaggggaagaaagaacttgacagatctttttcaactcaaattaatggtaacgatgatgctgtttcaccaagtatattttgaattggtttctacacatttccagtagtatggcagtacagtgctctgttcattgcaagctggcaaatttatgtagctatgtggaatgatatgtcataatgtaaaattagataaattcttttttcttataattaatataacatttctggacttgaactctggcaagagatgccaaaaggcattggtaccgtgttatttgtttatatgaattactttttaacaaggaatgtttcttattcattaaatgaattcaacattttctctgtaaaaacaatagagtttcagtacatgaactatagaaaaaaatctatatataatgtacataaatgttacatttgtaaagaaaatgtaaaaatgtaactatagcatatgaattgcttaaactgt

SEQ ID NO: 112601 - DNA, 1090 bp, Homo sapiens
cagcgctttgggaggccaaggtgggcagatgacttgaggtcaggtgttcatgacctgcctgaccaacatgatgaaaccccatctctgctaaaaataccaaaattagccaggggtgctggcgggcacctgtaatcccagctactcaggaggctgaagcagtagaatcgcttgaacctggaggctgaggttgcagtgagctaagatcacgccactgcactccagcctgggcaacagagtgagactccatcttaaaaaaaaaaaaaaagtaatatatatgaatcaatacactttcattagtctgtggacattaccaagtacttattctgtttgtattctaaaacaaatggtgctactttcaaaaatattcttaactagtaagtataatcttaaattgtctttcttatttacattagatatttttgcctgcacacttatagcaagaaaattttagtaacacatatcactatcccatttatttaattgactttaagattgccatcttgaattttgaaagtgattttcttctgatcaagaaacctctcattcactaacaacttatttactataaaaaactcttaaggatccattagattatgggacataattttattctgtacactatgaaagtccccatcaacaaactttggaaggaaaaagactctgccaggcatgatggctcatgcctataatcctagcactttgagggaccaaagcaagcggatggcttgagcccagaggttcgagaccagcctgggcaacatgggggaaaccctgtctctacaaaaatacaaaaaaattagccagggattgtgtgcacctgtagtcccacctactcaggaggctaaggtggaaggacatcctgagccgaggaggtcaaggtcgcaatgagctctgaccacaccaccgcactcagtctgggagatagagtgaagccctgtctcaaaaaaaaaaagaaaaaaaaagaaaaaggcttgctgtgtagtgggttatttttactgtttttgtgctttcatggatctcatttctttggataaaaataaaagtactctcacattccctgctggaaatgagaggttaaatgactcaccct

SEQ ID NO: 112602 - DNA, 2027 bp, Homo sapiens
ttagtgattatgtttttcaaataaaaagaaagttaaaacactgattaatcagtgctattttaaaagacttttatttgtctagtttaaacaattgggccaggcatggtggcccacgcctgtaatcccagcactttgggaagacaagtcaggaggactgcctgagtccaggagtttgagaccagcctgggcaacatagtgagacctcatatctactaaaaacaaacaaacaaacaaacaaacaaacaaaaatagctgggtgtggtgttgtgtgtctgtttaaaattaaaaattaaatttaaaaaatttaaattaaaaatgagctggccatggtaatgccagctactcaggaggctgaggtggaaggattactttagcccaggatgtggagactgcagtaagctatgactgcaccatgacactccactctgggtgtcagagtgagaccctgtctcaaaaaaaaaaaaaaaaaaaaattgggttaaacagttgaatgcaaacaaaaaataagatgcatgagactaaaactggaaatctgtagatatatatgtgtgtatgtaaatatgctacaggttgtgagagtttggtgatttcatctagcatacatttcagtgctcacgagggatatgcttgttgctgtgctgtaatgtgtaacataggtgaaaagagcaatgcagttgcccaacagtaatcccattttcttgttttgcagcatgtgaaacaacagtggagctcttgtttgacagtgttatacatttaggttgtaaaccatatctggacagccaacgagccgcatgcaggtgtcattatgaagaaaaaactgatctttaaaggagatgccgacagctagtgacagatgaagatggaagaacatacctttgacaaataactaatgtttttacaacataaaactgtcttatttttgtgaaaggattattttgagaccttaaaataatttatatcttgatgttaaaacctcaaagcaaaaaaagtgagggagatagtgaggggagggcacgcttgtcttctcaggtatcttccccagcattgctcccttacttagtatgccaaatgtcttgaccaatatcaaaaacaagtgcttgtttagcggagaattttgaaaagaggaatatataactcaattttcacaaccacatttaccaaaaaaagagatcaaatataaaattcatcataatgtctgttcaacattatcttatttggaaaatggggaaattatcacttacaagtatttgtttactatgaaattttaaatacacatttatgcctagaaggaacggactttttttttctattttaattacacataatatgtaattaaagtacaacataatatgttgtttctctgtagcccgttgagcatatgagtaagtcacatttctattaggactacttacaaggacaaggtttccatttttccagttgtaaaattggaaccatcagctgataacctcgtagggagcaaccccaggatagctaagtgttatgtaatatgcctagaaggtgatgtgaatgcgattcagaagcatagccactcccattttatgagctactcacatgacaaatgtcatcttttgctataacctttgccaagttagagaaaagatggatttaatgagataaatgaaaagatatttaacctaatatatcaaggcactatttgctgttatgctttgttatttatttcccagcacttgttccttattgtagattttttaaagactgtaaccttttactaactgtggtcttactaaaatttgtgcttgatactgcttttcaaaaagcctttaattagagccaaaaggatggaaaaggcaagatataaatgccttttatagatctcttatttacattgaaaattattaccatatgtttagagcaaatccaagaaaacttcaacagcttctgaagatgtctatgaatgttgaaaacttttcaatctcttggaatgctcagttatgttcctagaccggtctttgctgactactggttgttaacctttccctagcctg

SEQ ID NO: 112603 - DNA, 1011 bp, Homo sapiens
gaggtaggtagtgttatccccatttttcaaggaaggaaacgatggttcagaaaacagtaacttgccccaagtgagcatttagcctgactttaaaatctgtgttctgtctattatacagtattctccaaatagtctcatattatagccctgattctaatatcctaataattcatgtcaaggaagaaatctctgctgcaggtaatcttgaattcacagcctctgtatccctttgcagcttttggctaaggtaaactagctgtaaacctgaagcatagatagatttatttcctgttttctgatttaagaagaatgtgaaaccaatcatcttgtaacctcctatttaatagtcatagcctctccacttctgtggttggttgtttcttaatggcaaagtcttttggagaactttgaaaatgttaagattttgtaatgacaagtttcttccttaacatgaatattttgaaacgaaaagtatttggataactaaaagccactctgtgctatatctctgtaagtgtaacatgttaagataatctcacctggatgtttcaggtttcttagaataagaaaagtaaataaattaccttttcatagtcttcaaaaaatttaaaaacctaactggggccgggtgcggtggctcacgcctgtaatcccagcactttgggaggccttggctggtggaccacttgagcccaggagtttgagagcagcctggccaacatggtgaaaccccatctctaacaaaaaatacaaaaattagccaggcgcctatagtcccagttactcagaaggctgaggtggaagaatcacttgaacccaggaggcagaggttgcagtgaaccaagatcatgccactgcactccagcctgggtgacagagtgaggtgagaccttgtctcaaaaaaataaataaaataaataaataaataaataaataaataaaataaacctacctgactggggaaaaatacttttgatttatatgctcccatatccccaagtcaaattagga

SEQ ID NO: 112604 - DNA, 1021 bp, Homo sapiens
ttggaaggagaggccacaaacactttgagtatccaaaaatcatacttacctagcccctggagaatctttaatggacttagcctcatctttctttttttaaaacttatgttttgtgttttggacaaatggaaattttgttactgacaggtaactgtgagtgttctaacgctgcagaatagggagcagtgaggcatagctgagagagtaacatgggtgggtatgggtaagtgtaatggggagatttataacacagaaaatatttgtaggcagaaatggattttggaactatctatacagcagtcattatcatttatacctatttagtctatttgaatgcagtacttcagaggagttttgcatttcattgacagtaatccatccaaatgccttttgcagcttaacattggtatcccttccctgacaaagtgttgcaaccaacacgacaggtgctatgagacctgtggcaaaagcaagaatgactgtgatgaagaattccagtattgcctctccaagatctgccgagatgtacagaaaacactaggactaactcagcatgttcagggtaaggatgatctggtggcttggggatgagtgtactttttaaagttgtatcaaatgctctatgttttagtataggatttaccaatagaaatctttcacatatattatctattgtgacacagacttcaattttctgaggtgaggagctgatgattttataatctaaaatgatttatagtcacagaagcaaaaagcattaggaaaccttgggagagtaggggtgtctaaggctgagagagagaagaattcatctaccttgtgccctaaaatatatctccagtcatcatgtaagaacctaaagtagctaaagtttgaaactctgattccagttgtcttagtccatctggactgctaccatagactgggtgacttatagacaacagaaagttatttcctacagttctggaggctgggaagtccaagatcaaggcactagcagatttggtgtctgataaggact

SEQ ID NO: 112605 - DNA, 1058 bp, Homo sapiens
tgttagggcaaagaaaactatagataaatgtatagtttctcatgatactcctgtgagaaaaactggttactatttgatgacttcacggctgcttggagagaggactcatctgtagtggacctctgtcctgattaatatctgcatcttaagtttgtgaatatctgggagcaacaggcaacactgggtgaataactctagatttaaaaactgctcagcagtcgagaatggtgaactgaaactaacaagattgaatcttatatacaatcttatatttagactcaaaattaaattgcagaagtgctaagcctctagcagtaagtattaaaaagtccattttagaaagaactgatgatttttttttttttactactgtctatgttagcagtcaggcacagctgaaacatactgtgttaggctgttttaatacaagtactttatccagcacaaaaggttaaaaagcccatcttaccctacagtgttcagtctgaggtgctgtattttaaagagatgtgacaagctagaagtcatcagtctttggaggctggctgatgaatgctcaccaagcccaaaagagactctagggcaaacagcagggtttcttaacggataatctccatttataatgaatattccaagccttccaagtcttctgttcattaattcatcacatacttattgtaaaaattcatcacaaagttattccaggcactgttctaggcattgggaatccaaaacacaaaaatgtctgctttcgaggagtttacattttcggatggggagacataataaaataggtagattagtgatatagtatgttagaaggtcatatgtgctacaaatagtatggtcagggaagacttgctgagaaggtgaatgtcttagtctgttcaggctgctgtaacaaaatgccttaaactgggtggcttataaacaatggaaatttattcctcagttctggaggctgtgaagtccaagatctagcatttggcagattcaatgtctggtaagagtccacttccttgttcatagatggcaccttctagctgtgtcctcacatg

SEQ ID NO: 112606 - DNA, 1057 bp, Homo sapiens
cttccgtcggctgtgacaggttctgaggcgcccagatctactggacatagcgcggctcagaagcctcagagacctgtccgcacagttcctgaagttagcaacaaattagtgagtgctgttgcgggccattttgcagccagagaagcaaatgcgcaaatgcgcccagccagtcagcacggacttcaagaaccaacttcattccttgcaaggtgctttagttctggccgttagggcggcaaccaaacagaaacctgccccgcctctgggagagaaggcggatccctaacgccagctatctccaagagcaacattgccgcagcacttccgggacgtcgtgctgcaaaggacgccgctgttatacgtcacttccacggctcagcgtcaggcaagttggcctctctgttgtaaattagtggttaaggttatctattattgccacttttccagcgctaaaggctgttttggaaccagtgttgcttgttccgcgggtgattggcttttttttttggcaaaccagttattcaagtttctggtctttaaaaaactctgtggcggtacggtaaccgaggaggttccagcgcggcggaagtaccccgcgggtgggtgtgtgcgcaaggccagggccagaggggcacgtggcgccggtgagtggccgtagaagccggaggatttgaaaatgctggacgtggaacccaactgccggagggagggaggaaggaaggggatgcggtgcgaagaccttgctgtctgtagggggaggagatactaatcatggggcggcaagggtggtgtgtggtcggtcggcgctcacgagaccatggagaagtaaactcttcacccatcaggttggtggtcactggctgtctgaccgtgggtgaggtgacagggctgcttttgtctcctttatggtgttctcaccgcagctccgaggggttggagtatactcagaggctacagtgatcagaagacataggtcgtttttttttcatcagggaggagagagaatgtcttttcgaggcggaggtcgtggaggctttaatcgaggtggtggaggtgg

SEQ ID NO: 112607 - DNA, 1375 bp, Homo sapiens
tgtctgtacagaaaagaaagaaatacaaagccaagtattctgactccaaagcccatgctttctgttactactcaaaagtagataagtgagaaaacaatttgcttgagagggaaactgccagagaggaaatctagaaaaacacctatttagggtagttttagagtaattaacaatgagatgggaatggaagtcacagaaagtgaaacttactacattaaagaggagagagggtgagtagtgtctaactaagaatggcttggatgagtatgcaggatggtttgaaaggagcagtttctagaataaaaggtcccagcccacaagctgttgtaccagtccatacatgagaccttgagagcctgaatcaggatggtgacagtgaggaaaaaaaaggaagggttagataggagagagatttcaaaggaaacaaaatcggtagaacttagctaatgctgataataaagggttccaggttttgagcttgggtgataggaatgaagacttggttttgcaggaatgtggtattttagtttggggtgacagtctagttagaaataaaggtagttattttgagattccagatgtccttgaaaacaatgaatcattgttaaagaggtggtagtgggaatggaaaagttctaaggcaagagaaaaaaaaaaagaatgaaggctgattctgttaggcattgaagaaaagggagaaccaagagaatgaagcagagttttgaatcagataataagttgtaataacataactgttacaggttgaatggtgtcagtgtgccaggcactgttctaagcacttgacatttgttattccattgagtgcttacattactgtatattaggtatagctatacattatatgttattagtgcatactaaaaatgagacactgaattagagagagggtgggtaacttctcctaggtcaaatagctagtgtgttgtggagttggtataccagcccaggaagtcctaagactgtggtcttctgcctcagaggagagcagttatggtgaagtcccaggtagccaaaaagaaagcttccagaagcagttggtcagtatcgtttgaaatagttctatgttttaacattttcttgtcctgtttcagtattaggagagttcctgcatccctgtgaagatgacatagtttgtaaatgtaccacagatgaaaataaggtgccttatttcaatgctcctgtttacttagaaaacaaagaacaaattggaaaagtggatgaaatatttggacaactcagagattttgtatcctttttcattggaaggcctgataatattcaaaggttgctatttgcatttttctgaggaggcagttaagtataaattaaagttgttgcttcattaaattagaca

SEQ ID NO: 112608 - DNA, 1337 bp, Homo sapiens
gccttcaggtgacaggaaagagtttagaccttagtttcaattgtgttttatttttgaataatgggataacacagttaaatgaatgcttcaaaagaatactgggaagataaaaaggcaccttgggaagcggtcaatattgtgtgagaggggccagataggaggctataatagtagttctaaaagagatggtattttggactcggtagtgacagtggaaatggaaaaaatggatttatgaaagatacaggaagtagaatcaataggacttggtaattgactagctattgaaattgaagaagtaaaaaaatcaccatctttcagatgtctgacatcaacatctttgtgggtgatggtaccaattaatgaaatgggcaacaatgcagaggagggggattgggggaagataatgagttgggttttggacatagtgaggttgaggtacttgtgagacagtcatggtcagtttaaaggaagagtctagactggaaatagaattgggaatttgttaagtatacagacagtacatgaaacattgtaggaagaaagaatgaaaggaaaagagcacctatgaagagttttggggcacctcctaaaactaaaggtctggtagtggaaactcagaagtaattgccagttaaaaaaaaaaaggcaaaccacaagcctgtcataaaagtggtatcacaaaaattgaaagagtgtttccaggagggactgctcagctatggcaaaaggctgcaaagtgttcattggaagacagccacatagacatcagggagtcatggagccagtgcattggtgggcccgggagccagaatggattaggaaatgagagggagacaatagcttgttgtcagcatatggctactagttgtagaaaccttggcaagtactcaggggattgactgcttctggcgtgcctggagctgttgagcccagaaagaaacaatgctgaaaagggattctcatcttgtgacctgaaaaaaaaatgctggtaatagccacttaaattcatcagaatcccttaaatcacttaaatttctcagaattatttatttgggggcttattgtttagttttttgggtttttgctttttaattacagatactaacttgagtacattctacctctcccggtttccataccccctgctatgttgagattcagccctccttacccagcctgcgttattgtgaagtttgtagaccagtgctctccacttgaactttttgtagtgatgggaatccctgcccagtaaagtagctcttagccacatgtagctattgagcacgtgaagtgtggctcatgtgactcaggaactgaatttttaaacattaatt

SEQ ID NO: 112609 - DNA, 1726 bp, Homo sapiens
ggtgggggcttcagaggaggaagaggtggtggtttcagaggtgagtattttaaaaagtctttaaattgcttaatgtttaaaattgatattatctggcattttctgtttttacttaagtttaattttctctgccagcaagtatatagaacaccatggtgttctttgcttagcctaatttgtggtttcattttatatcactttttttttgccttttcttttcaattttttcacctaattctaatttgttttgctttattattaatttgaaaaataaaggtgtaatatgaatgacagttaaatttggtaaagtatgtttgctaaacattattggaactaatgctgattttaaacttgagatttaggttataatactattaaaaatccattttctgtgcccttaatactttaattttctcttaatcagggagaggacattaagtgaaacagttgacagacatcaccagttgacttctgcattaacctgcatgatctgtttctactatggattggaaacttgtttcttgaacaagtcttgaagatcttggtcattttatgacaatggatctaaaatgtcagcatcatgcaaagtgcaacggaatagtgaattttgctctaaaagagcatgaacaagtctttctaatgttttgtacagtgcctggcactctgtgggtgctcaataaatggataggagttttcatttgaagcatatttgaatttttaaaataaagtgttttattcccttaagttatttagagtgtgtttattaaatgaaacccattttttaaagtagaaaggaataactaaagcttaaacccagtgaattgcagatcgaaaaaaggatttgtttatttatattactgatcttttaaaaaatagactactgtagcagtactttaagataatttacaagttgacactgcctttcaaaaccctggccttttatgtatgagaagatagctttgtatttgccttttgtattttaatacataaatcagttaagctgtttctctaattgcaattaataattgatttaaaaattttccatattagtaatgtattaaagatgcagtagctctgttgaagtgaaaactatagcaagaaatttctaaagttaatttttctcatccaacataaatggaatattagaagttttactgaatgttattttatttttacttttttaaagggactctaaaagtttaaggtgttatttactacacgtaaatattcgtgtagtatactacacgaattcgattgcatactacatgttcagattgctgggtaaggatgttagaaatgaaattggttttggtcaccattgctagtggatgtaaagaaatgactgtggtagcaagttagaatgccatgatatggagccatttaccctgccattcatttttcacttctcaaaaggaatgatgtttctatatcgtttgttaaattttctaacatgcccatggaggaacgctcttgaatgctcatttgaggagcatacagtgttgtctttgtcagtatttggggttttatctttttctgattgatggaattgcagcaggatgaataaatacataggccattaatatatatgatgagcaaatgtgttgaaaattacagtttttacaggaataggcagttatgcttttacagcttaggacaggagattatttgatttggaattgtggtgatgaaattttcatggagtgttagggccagggcttttgctcgt

SEQ ID NO: 112610 - DNA, 1157 bp, Homo sapiens
taaaaatgtgagtactggtagctataagatttgggacagataaatcaacctgttcatcttgagtttatacacaggcaagagaactgaagcaaaaggattatcttaggtttctgctgtgccattctaggatttttataaaattaaactaagtgggtaaatatagccctctagtggttctgttttatgcttacactgttaactttggtgcatctaagcatttctctaatgtttactgattttaggaaactgaggagaatcagattttaataatgttaatggcataaagaatatgggaaaaaaggtaatagggataccttattattctaacaaaacatgctcaggttggttttcaggttgtaatgtgataatccagaatatttttattctgtactttacaatatcagtgattgaattcagatactctggcaaagtatacaatgattactatcatcagataatattaattactcatgtgcatatcaaactataggggaaattaacggatggtggagttgatcatattatatccatgctatgaaatacatagctactaataaattagactttattagattctgggtttattaacttggatattataatacagccttatgggaaaacaagttgcattatatatatacatttgtacttatttttttccctcatttttatttacaagaagaaagtggaggaaacctgaaacacttgtatgaatatgtgtataagcagagaaaagcctaagaaaggatatgcaccaaacaatactggtacctttaggagagtgagatttggaagtaggaaggagactacttctttgtcactaatatttaaattgttaagaaaaaaaaaacaacaaaaggagccgaaatggaaagacttgaatggtcaacagaaaacagggaccttaatccgaatagttttagaggactaaggctggctcctatactgatttcctgagtttgtttattgttaaatgggatgtgtgtgcttgataatctccttagatagaagactgatgcccaaataggttaaaatgtgtggtgcttggtatttctttttgttttgctaataagcttttcccttattctgggaattaaagtcctttcctctttagcccaattaaatttgttaagggagggcctctatgaaaaggccct

SEQ ID NO: 112611 - DNA, 1243 bp, Homo sapiens
tgtagaagtaactcttatattgagttcattattttttggattgacttttataaaaattttcaaacattcaaaagtagagtgaaaagtataacacaccatcctatacccagtttataattgtttacgtttcttccttataattcagcgtattacttctagtactggaaattgagttcctcagttaagttttgcgattttagtgacgttatctcgttcatttgaatacctctatgataagtactagacaagttctagtttttttgtaattgcaaaaaagactgagaaaatctcctaacaattacatggaaatactttgtatacaagtgtttggtttagttagttatttgtagatgaccaaaaaaaaaaaaaatccaaaaaacaaccaaaactatccttttttgacctggttacaaaattagcatgcagaaaatattctatttagttcttatctctgtaacagtaataataatagtaatcttactactactgctactaatgttatcatttgaatacttgctatataccaagcactgttctaaaaccttacacatacagaataattcatccttacactaatttagtaagttactcttcagttttatttctctagtttatacagatgaagagcttaagaaacttgtccagcacacacatttactaagcagctacaccaggatttgaacccaggcattttggttctagagccctcacatataaatccaagagtcagctttatcaaggtatacaatgagtgtgtgttgtttgtgtttctggtggatccactgaaggaagcatagctgaactctttatgcttttgttctgcccctgtatcaagcatctatttttctttagatcccctaactttcctcctttaacaaaactcacttaaagttgcaaatcaaaaccaaaactatgaggaaagggtgtagtgaaagcatttatttcattcgttacttttaccaagggcctatttagattttttatttaatttttaatttgatctttcatttatagtttggctcctataaactgttacaacttccagtgcaacagacattttgttaatttagtgtccttgagcactctccctttccccagttaaggctgggaggtaagaggacatggtgaatttgaggatctgaaataaatcattatgtttgaactgtaaaatgaagggtgagaggttgaaaaagatggctgagtaccagacagtgatgagccgtgtaagttttaaaggtgacag

SEQ ID NO: 112612 - DNA, 1047 bp, Homo sapiens
ttattcagattatgagaacatctattactccacattctccttaacatttgggattgtcagacttttaaattttcattttcttgagtgtgaaatgccatcttataatcagtatttctttgaatatttattgtggttgtatgtcttatgttataaacattcaaatgctaatgggcttgtgtgaataccccgttcatcatctggccatttttctattgagtttgtcttttcctcctgttgaattacccatcttctgaatactagtcttttgctggtttgtggttgttctgcactctgttcatagagtgttgtaaagaaatttcactgtaagtcttaaaattttcaaaaaagtccattttagttaatgaaattacaaattactttccataaattcttttattaaaccagttataatttgacaatgaagatgtattttaaagtagtaaagtaaaaaacctttagtatatttgagatatattctaacaatggacaaaaatttaatgtttcttgggagggtgtttagaatggtagagtcttttcaattttggttttcaggtttatgctggattgaatattttttttggaatggcaagcattggattactcacggtcgtggctgtggaccgatacctgaccatctgccttcctgacgtaggtacaacacttttctcagctttcttaatgaatccatttcttgactaatggccactcaatatatatatacgctaaaatataaacctaatggtttgtagttagggtcagttttatttctctgccaataattgttcaaatgtttcaatggcttcttattgtacttagaataaaatccaaatttcataaggctattcacactttgaggtacggtccaagcccaaagtgaggttttcatacctgctgttttgctaggtttggaaagctactcttcctgcttatcctctggctgattcttttctcatttaggtttcagcttaaatgtctttttttttttccagaatgtgaacttatgtagataggcttagtaaaagggagaatatttgtgttacttttatt

SEQ ID NO: 112613 - DNA, 1100 bp, Homo sapiens
ctagggagaggaaggggaagttactgagtagactgagtggacaggggtaaagatttggaagtctactttctttgtagatttcaaccagttctattttgagctccatgtgcacccccacatctagagttttctggtaccctttgttactagaatttctgtagctctgtagtatggattggtctgtatctggttttccctcatagttggctctttttaacgtttatttatttacttatttataaaattattctcatgtttcttacataatttgccacttatccaatggccattttttccattaaaaatatgtattatctaatctctgattctctgtccttatggttttatgtcttctttaacctctgttccataattttagcaggcaatctagggaagcaatataaaaatataatttttccatttaaacaagatgcaagagatctcctttacaaaattgtctgcattgtgtgtaacatatatccagcagaaatggcctgtgttagaattcactgagctcaagataggattgtatttgtttccagattgagtttagaaagttagaaagttacttttgttaatttagcaggtaatcccagtaagagcaaataataatgatggtgataataataataatagccatgccaggagttcatagcataatgatgtgaagtggggtggggtgggtttttatctgtctttcatcaaagtcagcttttgtactctcccctagcacgcagaaagaaagagggcattccttatgtgtgtgtaccattcttaaaagcaatgttatatattcttgatatacccatttcacaaggtcttattatcatcgaggacttcaggcacttgaaaaaagaacattgaaggcagaaaaaaaactcaactatttcctttatgtcatcaaaaacataaacatattcaaattccaacccagatagatttttacccaactttagatatattaatatttaaatattttaggtattgggcttggtgaatatttatttcttttcagatgtctgtgatcatgatctgcatgtttctggtggcatggtccccttattccatcgtgtgcttatgggcttcttttggtgacccaa

SEQ ID NO: 112614 - DNA, 1129 bp, Homo sapiens
ctgaaagagtcctatctttcttccgtactggttccttatcccccgaatcattaagtgctcagtgaaaatgagagggtgtgggatagcagggtgaggtttactaagttaccaagaccctgacagtttctctgaatcctcttactgtaagaatgagtctgaactcacaaccaatgaatagtcgtaaacataaatgaaatcaaactttttttttgaaacagaaaagctaaatttaattgcatctattgaccttcaataggtggtgaagttgatctaaagaaccaagtaacaccattggacatcttgtccaagactagagtgtcagaagataacattacagaatctcaacacatgctagtggctgaaatcatggtgtcaggtatgaataactagttctccaatatacctttggttccaacagtttccatcctaccaatgagaaattttgaattacctttctaacttaatattgcctaagttctacacaaggctaatgaaaccaaaccttggactcaagtctgtctcttctgaatgatgtgcctgagaaagatggctgcatattagtctggacataaacaggacaccttgagagtctttgggtgtgagtctttgttctgtgaagaaacaaagtaacttggaaacaaaagtaaaacacaggacaacatatttgaatgtatttccatccacccctgatatttttggtatttggtccaccttgctgtttttctattagcctgaaaagttgatagtaattgataaacaaatataggttgagcacttcaattgctgcagaaagtccacaaacagcaaatgttggaattcttttcttctgtgttgcacatttgtcactaaaatgccaaatcatgtgttcagtatgtaacaactttagggaacttaagtctttcttgttccatattcacctaggaggtcagtggtttttccagctgggttcagctcagccctagagcttctgcaaaccccatcctttcactttaggtcactgcccttcaagcagtgcaatttgactttgaaacattttatttgtttgtgttactaagtaacactttaacaagatgtatgtggcaaaaaaaaaaaaggaaaatatttcaaaactccacattaggacttttaa

SEQ ID NO: 112615 - DNA, 1049 bp, Homo sapiens
tctattagggaaaatgtaaagtatattttgacatattcattgtagcttgtattttgtttgctgtttctaatacttatgtatgattaattagccaaggcttttgaaagaaagaaaacaatttcacctgagtgtctgctatttgagcaatatatttttaatctgtcctaaagatcattcttcatgataaaactacttctagcacaaatgatgcaataaaaaatttcctcgggagacagaaatgaatatctatattgtatagcttaaatatcagtttctgcataaagcaatttggaattgctaagggtattactacaaacacaaacatctgagtttaaaatagaatggcctttatcatggtcctgatggacaagtctgtcaagatcatgtgtgtctttctatgaggtttttcagtaaaataaacttgactctcgaaacagacaattcccaaatgattagtatattcaaaccctaaaactgtggagtttacatataaaattctaagctaattaaatagtcacttgtcactcaaaagtagtgagtgaaatattactcactagaagcatcaaatgtacacctattcacttgctgtttgattatgtttaggctttgtgctccacccaaatctcatcttgaattgtaattcccaggtgttgagggacggaccaggtagaaggtgattggatcatgggagcaattttccccatgctgttctcatgatagtgagggagttctcataagatctgatggctttataagtgtttggcaagttcttccttcactagctctctctttcctgctgccctgtgaagaaggtctttgcttcccctccatcttccaccatgattgtaagtttccggagacctccccagccatgcggaactgtgagtcaattaagcctcttttctttgtatattacccagtcttgggcagttctttgcagcggtgtgaaaacgactaatacaccgataaactcacaaataaacctttaaaaatgagccgggcacggtggctcacacttgtaaccccagcactttgggaggccgaggcag

SEQ ID NO: 112616 - DNA, 6625 bp, Homo sapiens
aatttagggagctcacaaagatatatgtttgaggggtaccttttatcatgtaccaaagaaaaattatggttttactactctagagaagccttagaacattttgctgggcacttgacttccagtctgtttcctttgattgataaatgatctaagacaagtcaccagtcccctccaggtggtatttcctaaaatgtatagttgagttgggagttggcaacatagttgttaatgtcccttccagatcaatgatggataagattttgtgtgaaataccttgaaagaaacatttgctgcttgcctcctgtgtgtgaagagagccatgctgattatcctacttaatcctcaggtgattccatgctactcttttaaattatcaccatttatatagatgaggaaactagaaatagtgaggataactaacttgtccagggtcacagagctagtaagtaccagttcagggttctaatccagtctatgtaactctccagtcctagctcaggatgtctaccctcttacaaaactgtaagtcatcgttactggtggtcaaggatctcacgtaccttcttcctctttgtcttccaggagatacaatattcattattctgaggaagcagaagctgatcttcctgcactggtatcaccacatcactgtgctcctgtactcttggtactcctacaaagacatggttgccgggggaggttggttcatgactatgaactatggcgtgcacgccgtgatgtactcttactatgccttgcgggcggcaggtttccgagtctcccggaagtttgccatgttcatcaccttgtcccagatcactcagatgctgatgggctgtgtggttaactacctggtcttctgctggatgcagcatgaccagtgtcactctcactttcagaacatcttctggtcctcactcatgtacctcagctaccttgtgctcttctgccatttcttctttgaggcctacatcggcaaaatgaggaaaacaacgaaagctgaatagtgttggaactgaggaggaagccatagctcagggtcatcaagaaaaataatagacaaaagaaaatggcacaaggaatcacacgtggtgcagctaaaacaaaacaaaacatgagcaaacacaaaacccaaggcagcttagggataattaggttgatttaacccagtaagtttatgatccttttagggtgaggactcactgagtgcacctccatctccaagcactgctgctggaagaccccattccctctttatctatcaactctaggacaagggagaacaaaagcaagccagaagcagaggagactaatcaaaggcaaacaaaggctattaacacataggaaaaaatgtatttactaagtgtcacatttctctaagatgaaagatttttactctagaaactgtgcgagcacaacacacacaatcctttctaactttatggacactaaactggagccaatagaaaagacaaaaatgaaagagacacagggtgtatatctagaacgataatgcttttgcagaaactaaagcctttttaagaaatgccagctgctgtagaccccatgagaaaagatgtcttaatcatccttatgaaaacagatgtaaacaactatatttcaactaacttcatcttcactgcatagcctcaggctagtgagtttgccaaaaccaaagggggtgaatacttccccaagattcttcctgggaggatggaaacagtgcagcccaggtcccatgggggcagctccatcccagagcatttctgatagttgaactgtaatttctactcttaagtgagatatgaagcattatccttttgttcagttgccccgggcttttgaacagaagagtaaatacagaattgaaaaagataaacactcaaccaaacaatgtgaaaacgggttctgtagtatttgtaaaaaggcccggcccaggaccactgtgagctggaaaagggagaaaggcagtgggaaaagaggtgagccgaagatcaattcgacagacagatggtgtgtatgcccctccctgtttgacttcacacacactcataactttccaaatgaaaccccacagtatagcgcatattttcgatatttttgtgaattccaaaaggaaatcacagggctgttcgaaatattgggggaacactgtgtttctgcatcatctgcatttgctccccaagcaatgtagaggtgtttaaagggccctctgctggctgagtggcaatactacaacaaacttcaaggcaagtttggctgaaaacagttgacaacaaagggcccccatacacttatccctcaaattttaagtgatatgaaatacttgtcatgtctttggccaaatcagaagatattcatcctgcttcaagtcagcttcagaaatgttttaaaagggactttagctctggaactcaaaatcaatttattaagagccatattctttaaaaaaaaaaagctggataatattctctgtaatatttcagtcctttacaagccaaatacatgtgtcaatgtttctagtatttcaaagaagcaattatgtaaagttgttcaatgtgacataatagtattataattggttaagtagcttaatgattaggcaaactagatgaaaagattaggggcttccacactgcatagattacacgcacatagccacgcatacacacacagacacacagatgtggggtacactgaacttcaaagcccaaatgaatagaaacacattttctggctagcagaaaaaaacaaaacaaaactgttgtttctctttcttgctttgagagtgtacagtaaaagggattttttcgaattatttttatattattttagctttaattgtgctgtcgttcatgaaacagagctgctctgcttttctgtcagagatggcaagggctttttcagcatctcgtttatgtgtggaatttaaaaagaataaagttttattccattctgtgtgaatggtttgagcagtgaacaaagaatccatgcaaaccaagtcatgactggaagaaatggggagtgggggacagtgcaggggaggaaagctgttacatctatgttaaatgattgtgagcagtctataatgtcttgatgttggttcataggtgagacacaactgatggaggaatgtattataaattatgcaaaatctgacatgagctgaaaagacaggtccttttataagagctaatagatgcttaggatgcaaatgttattttgagcttcgcaaatacatgataccgtgcaataagccttttttccttataacagaaaatgagaataattaaaatgaggagaaggccacataacagttgacttgaatttaattgaaggacccattggaggctcatctggttgatttaattatttaattgagtgatttattgcagatctcttaatgcaggttagaaacggaagtgagcataaaccttaaaaagactctaaatgatgcttccaaagcactttcattttggtattaggttcatgtttgtttgtctttacttgtaaaataatttggaatttttgtttacagggtgaatgtcttaatagttttaaaattagctaaatatatctaaaggcatttccaatgtttatcatgggaggaaaaaagccacattttttttaaaacaaaacaaaacaaaacaaaattttggtaatataggttcaatacactgtttttaacatctcagcttagccgctttaatcatatcaagatatgaggctggatcactggcccatgacaaatctgaaacctaccagagaattgactgctgcatagataatcctgctgccagttaacattccagaaaaacttgggcaggcaagtttttatagctgccccactatgctgcaatagagtatctttctattgaagattttccactgcatcccgatcctactatggtgaaagcattgttcttgggctaaaaaaaaatcctttatttcatacacacatgatttcatacactaggtctgagcatcaagccaagtccatgagtttgcaatgaagttctagtgagaaatgctctattcataaagcagggggtttacgtggaccttctagtgttgcttatgggaaaagagtaactaccatattacatctaacgcaaggccaaagtaccaaattaaaaccatggattgaggtggttattcgaagtcacttactcccatccttctaattatgctccactacaaaagtaaggggagaagagggaatactttacatgtacattgctagagggaaaagaaaggcttgattatatcccctcgcttctccacctctctgctcatgtaaagaaactgatgagaaaagagactaatatgtctagactgagttagaaacttcatatgagtgggttttgtagaattgatgggaaagacagtgggaacctagaagaacagaaagagacccacagaatgtctttctttttttttttttttttttttttgaggtggattcttgctgttgttgcccaggctggagtgcagtggcgcgatctagactcactgcaacctccgcctcccaggttccagcaattctcctgcctcagcctcccaaatagctgaggttacaggcgcccgccaccacacccagctaatttttgtatttttagtagagacagggtttcaccatgttggccaggctggtctcgagctcctgacctcaggggatccacccgccttggtctcccaaagtgctgggattataggcgtgagccaccgtgcctggcccagaatgtttttttaaatcagatgtagcatcttcataaggtaaagcctgtcacatcagagtaacaaagctcctggagtacagtgatgctagagtagaatgttccagaagtctggccatagccccagcttctgaattacctgggagagacaagatgctcaggttactattttttctttattctgatagtacagcctctactcagagaccacggtgtgtgtcacacaaccgaggcagctagggcatattctgagggcttttttttttttttggtttccttaatgattctttaacagagtaactggattggccaaggtctgattcaagaggctgtgaggagagtagagaacaaatagactttgcctctcagagttcagagctttaagttgtataagcatggtccatgtccacctcttgtagacacttattccttaaaagtttccatcatgaaaaataatatcatgtcaaaattttataagcacccagaatgtcccagtagtcaaatgtagtgtctttctccagtctctgttttcgataataaataccttgctctcaatttaggatgatcgtaaagcctatgttcatgctgtgagtcattgtctcccacagcttttgaaacatcgttctttgtcttttctatacaacacctgattctttgtgcctcagactcattgctatcaggaagagactttgccaagatccaccaccacatttggccagtagtgtatacacattaaagtgagagctgatgaaatcacaatgctctattttgttccgacaatcagtatgaaggggtaggtcccagtttgccaatgagcaacagcctctgtatgctggtgtccaagacttacacaaaacaagtgtcagtgcagtcacagcattttcttgaatgctgttgtgacagactccagttataaacatctgcgagccatatggcacaactcatagctaaagaggccggtacagggcacatgcacagagctttgaagaacatacacaaacctgttgaatcaagttactttcctcatcctcagagactttgacaattcagagctcacagatggcagggggaattctcaggcttcccttcctcctgattgacactttttaaaggaagtgatgtggaagttgttctagaagttagatggacagtgggagcacattcgtgagtggggcttgggagagctcaaaagtggcactttgattttaggctgggcaggcagaagtctcacagtaaaatatatttcactagacgtccaaaccaacactgcattgtagtaacctcttctgaagtaactggttaaattaataactggtcccataagtcagggtcaagccacatttataacccattcgggccggccatgaagggttctgactcgacattggtatttaaatgctgttactttcccaatgcttagtagcacttgagactttatttccatcgacaaaaactaagaaggccacagaagtagcctaacagtcctccctggtcatactcgtttcaaacaggtctgcctgtctagacatattcaggcaggaggttgcttgctgctatcttgaaaaccactggaagattcagcttcttggggacctcagagcccatattcatatggaagcccacccatataagcctcacagagcaaatcacagcaatgttgaagttgttattttcaagtgcttatttcacgacattaaaaaaaatattttttcctggtgtattaaaattaaaaataaaatcataacttttgatttaaaatcaaactgtgtttctgttttctcttactctgggcaatttaaatgggacatctaggacactgagggttcctcaaatactcagaaatgccatttccacacttgacacccataggcttggggcacagagatgag

SEQ ID NO: 112617 - DNA, 1833 bp, Homo sapiens
ttcaaatactctggagctcctctgacaatggccattcagaggtaaaccgctgactcaaaacaggtccaaaatcagtgcaagtgtctccaagacaagcagatctaggtctttatgtagtcaacatgtttgcctggatgacttttttttcccatgcattttggaggttaaatttctttccagtttttgcagttggaaaatcttgtcgctactatttaattaagagagatttacccgtttggattatttagaacttttcttatttttaggtctcaaattttacctttcaatattctaagattctggactctttatgagcaccaaaaggaaaagatctagtgagaaaaaaacagttcttccatgtatagtactgaaactgtatccccccccccagctcccacaaactcaaactcttgttttaaattgcagtaaaatatacatattattcagattgttgagcaaccattactccatcaacttccagaacttttgcatcttctccaactgaaatgctactcattccacactaactcccccttcactaaactcttaataaatagcaagaagacctttctgtttcagcagaaaaccgtgagctcatttcagtgaattatggggttgtaggccactagaacaagtgagaggaaaagagccactaacctgctttgtgtgccaaatctctgagcacctactatttggattatattaaaacccgctgagattttgttttgttaaaacttggaaatatctgctctgagcccaggtccttgctcagttgagcatgtcattgtttttgaagctctgactcagcagcactctagctagctctgggaagagggactcagctgtatgtgacaaaccacacacacagagtagcctctctgtgtctcttggtggccaagaacaccctggggatttccaaatgcttgttgcttttcctgcagctgcaaaggtgtagttaagaagggacacttgggtataaggaacaacatgccctgcctgaaagctgtctcttgaatgaaaatagttggaccaaaggttagagaaatcatgatacagagaacatgagccaggaggtagctaaaatgacaggactgaaacgttcgagagtctaaagtcccattgcttgtacttggccaatgtccttcccgttatgccaacaggacatttgaacaagaaagattgactgaccaactcaaatacacagtccctctgatagttaacatttctgggtcactctatagcttctggaaagcctgaaattaccatgacttggcatgactctggctcatgacaaattaaatgtgacattatgtggtttccccagaggaaaaataatttgtacctgccagagtggcctgactgatgcatctcagctgccatatccaagaccgtgagaggacttggttagctcttctagagccccaccagtttccccctgcctgagggaaactaccactctttgggtcagcagtctgggggatagtaaccctgatagggtgttgaatggtgctactgatcagctccagagccattgctgggagatgatcaatttcattcccgcacccaccatcgtgcatatgtgttctggaaaaaactcctaagcaaatttaaattaattttgttcttgagatttcgggacatgttttcccctcctcctaccctccactccactcccctccctaaagtaactagaaacacccagtgtatctcagttaaacctgagatataccctcacctccagacaggagaaacacaaagccattcttaactccagaattgtaccttccactttccatcccacactagcccattctaatatggtttttcttaatc

SEQ ID NO: 112618 - DNA, 2936 bp, Homo sapiens
ggggagagagaggcagtgcagagaggccttgtcggtcctgataaaggagttgaggtttttattccaagtgcagagaaaaaccactgaaggattaaacaggatctatatctgtaaaatgacagtaatcctctgcaggacaatttcatacagtggaaagagtaacaccatttgatggagtctttatacctttagagaagctacttacaaagacccaacttaatagacaattgccaggaattaaacttcattattttgatactgtagaaagttgacctttagttctagttggcagatgcgtgctttctggacaggttagcctagtggaatgatttattctagagcaactctaagatattttaagtaaaaaacagtgcctctgaggagaaaagaaggctccatttcccaattcaacagttgttcattcattgatctctcagctgacttctagagtaagatgctgcccttttgggcagaaaaggctaggcaggtccatcttccccacatggtcagccagctctcctttcagtcccgggcatggttcacacactctgggacatacacttaaggggctcacttcgtaatagtggctgcttgttcctattgccaagtgctttcccatggcaggttgtgtttcttgagcctaatgtgttccagaacttcctatttccttaccagttctctgatttaaagaaattgtttattttttcttcactttttcaacaatctcactttttcaacagtctttattgagcacctgtgcctatgtggagattaaacacattgcggggcattgaagaacagtgttggggtggtattagcacaacactggttctagggagctcagggagtgagcacttatctctgcctgagtgggcttcctggaggaggtgacagagctaagcttttgaaggagtctcattctgacatctctgagaaagatggatcagacagtagaaagtgatttggagactgctggagaaatccaaggagggcacaaaaagcctgggctggcaaggcgagtccagaggtagaggaaaagtttgcctaaagaggtaaacaggttttcaggaaatagagccagtagaacttggagaatgattgggcacagggcaaatttgagataattccaagagtttgcagccacacccatctgctctccaaggaatagttcccaagctgaaactcaaaggtcaccagcattcttcatgagatcctgctctgaatctgttaccctttttcatgacctctttttggaacagtgatgaagaggaagtggtatcatatatggtttcagaataaagcccttgagtcattgtattagctcttgtttacagaacattttaagatgctttcaaggaaatacaaataatatgattcttatgcctatttcctgccagtggccaaccagtcttctaagtatggttgatgtgagaagtgaaactattttcctaaatgctgtttcttttctcttttcattatgaagtatattcggtgctcttcgaactggtgcttatatggtgtacattttgatgaccaaaggcctgaagcagtcagtttgtgaccagggtttttacaatggacctgtcagcaaattctgggcttatgcatttgtgctaagcaaagcacccgaactaggtgagtatcttcttccatttcctctccctctctttgtagcaacatatccacagtatttatttagtgagcaaagaaacattttgaaggtcctattttgttggttgcaagaaagttacaatgaatgaatttgagttcttgcctgacttctactttttattgttcgctccctctttccttttaaataattttacattgtgcatattaagagtagatagtttatactgaacatgctgattttcgagctctactaaaaatatacctccacggacttataaaatgtacagagacccctttaaaaggcccactgagctgagctaatattaaaacatgggggaagaaaagagcaacacagctatttccaagtcccatatctgagcatactttcatctgtagagttaggattcagattaggaattaagcttttcatttggggaccctcctgttctcattaacaaatgctgagggttggtctctggtggtgtttgattttaatcatcaagactggccttagggaaggggaatgtaatttaccttccagaaagtaatagaaaatacaggctgtatttgtagatttctataatttttccctcaacccttgaatggtcttgaatgtaagtgtggcacaggttaccagaaatagtaaagtcaaggagttaatgtgggcacagttttccaggaagatgtctttatttacacagaaagagatctagtggtgacaataagctctgagtacatccatgagtaatgctagcaaactggtacagattgtacaggtacaaactggtaaggcaaacctggtcacctctggggttctgggttttttttcacctgcaattaagaattatacatatttagttcaaaagatatcaattgcaatttttgccattgttttcaatggcaaaaccgcagttaacttttgcaccaacctaatatgtattgtcccctctcctgtttctcctaaaaagggagtttggtgttgtactttccttacaaaccacctgcaatataagctatgagcagtcttctgtaaggtgccccttgttcacgccccgtgtccattcagatagaatgggaactgtctgatttgtgtgggccggcaacccagccaccttccactggaagccagaaacctgctgtttataagtagatgacaattggtttgagctactgtcttcccaggtcaaaaacaagggaagaacaacagaagaaaatttttcctgaaaacctttcctaagaggggcagaggtacaaagatagtccaaaataactagataactaccgcgtgcatgtgcatgcctgca

SEQ ID NO: 112619 - DNA, 1014 bp, Homo sapiens
aaatcagcaataatagtaatacaaatagtgatagagtaagaagagtaatataatgaaaactgtttcgttgagcacctgtgtatcagaggcttgatgctagctaaataccttacttatattgcttcaaaaaattcatacgatgaatttgcatgttagatattattctcatttcagaggaaaaaatacttcagtaacttggctaattataaaactgttagtaataagtgattggactgtgattggagcctattgtacaaagggttcgatttgcaactctaatctattgacagtggcatagagtggccgagaacttaaatgtgtggtccagggatggccagaaagactgctgagattgattagcagcatctgctgtgagcctaagtaaggactaggggtagcagaacagcagcatatttgcctgctgcatcacgctgcctctcaagctaatgtaacttggggaggaaggaaagcctcttcaccttaaagtgtattttgttaaagtgtcacgatgtgacactgttgtgataaaaaccacctggttccaaagcgtgcagaggatgaaatgtgcgaggggcagagctagtggctccccacaaataacaattatcccattggcccccacagtgctccccagcagtagcactgtcacatcccaacaatgcgcctttgcccacagacacatgggcccaatggctggcactgacggtttccctgaaaagtgctactgtcctctgttctgagttagccttattgttcagagcttagggaatgaggcacatgtccagatatgggacaataatatgtgctatacacttgctgtcagcaatattataggtcaccatgatatcaaaaccttcaactctacagtgctctgaactgacctccccataccctagccctcaaacttgtgaatacctatttgcccctaattcaaataccacttcctctgaagtcttctaggactaccactcactagccagagttagcttaatgattttttttcactccatcatc

SEQ ID NO: 112620 - DNA, 2826 bp, Homo sapiens
tgtcagtcaacaggcttcagctgatatctgtctcactgatctcacgctggtggattgatttcatttgtgaactactgtatttctcatacaaaggatccaggtgaggaggaggctggctccgcccttctcacgttatgaagttatcagccaaagagttcaccagatattgcaggccctgaaatcttttggaaaatcctcctgaaacttccctggaggtctgtatatccctgtatttaaaatatatttatcaacgaaagatgtgatttagaaaggagtatcttttcataccatctcttttcagtggtggtatttgagcaatcttttaaaacacaaaaccccttgctccagtgctctggagtggtgcttagacgcctggcatccttctgagcaggcagtggatcttggccaagttccgggagggagcggtggaggaaactgtggagggaaggctgggcgggagagggggagccagccatggaggaatcccccctgctggttctgaaactgaagctttgtccccctgcctgaaaagaaggtgatttgccctcactgtagtggcatatcgtgaccagacacttcacagttcacactttcaaatgacctaagttccagagcatacacatacttgctccagtaaaaataactaaacatggaaagaaaaaaacaaagctcttttcagtgaggagtaaggtatagcacagggcctatcacctgagtgcttacaagtatgtgtgaaatgacttcattacatttaccttctttggtatgctttgtgctaataataattcagttactgtggacaactatgaacatctttggaaaaaagaacaatgtgatctttaaaagattgtaaagatggaatggatctttaggttaatgaacccaaaggaaggaactgggcatatggaagagccggagcttatgactctgctacctcccttccttgcagttcacagtttagagctggaatcataaggagtatttccagtcccctcattttaaggatgtggaatactgagggtcaaaatgacttttttccctccctggtttttagttagttgggttgggggaagactctatacagataatgttatatatcatggttcaagtgctctcccaatgaaatttgcattaattatctttattcgtcccttcttacattgctacaaagagctacctgaggctgattaatttataaaaaaaaagaggtttaattgactcaacagttccgcaggctgtacaggaagcatggctggggaggcctcaggaaacttacaatcatggtggaggcgactggggaagcaggcatatcttactggccgaagaaagaggaagagagccaagggtgaggtgctacacactttaaacaaccagatctcgtgaggactcactcactatcacaagaacggcaagggggaagtccacccctccaatcacctcccagcaggcccctcctccaacactggggattacagttcaacgtgagattttttcccccaggaaaaatgtttggtttcctcatgagaacgtgaaacctacctaggactgtgagatggagttaatggagcactgctattatcgttgcactggaattgtcactgtcctaataatttgataatgccctgaaagagattaatagttttctcaaaggaacaaagttttctgtagaaacaagatgactaaccacttttgtgatcctggtgagttttttggcttcaacattaatctttactgtgaatacatgtattccagtttctttttggttcatataagcatcattttaattttctgctctgcttaattgaggtcactattggtagaactttgttctttgttcctattagaaaagtccagaaaccagcacactgttctttccatttgtagttgaaatcagtattcatttggcatggctgagcctccacaggaatgcgttgtggcatctcttccatagttgagtgaagaagaaaaggcaagggaagaaagcatacccaccagtaattaattttgtagaatttagtacacctctttaggtttaaaattccaggagaagggttctcatctaggacaccagggatgtacagaaaggcaccgttctttatcagctgcctaagcagtgtcatccccaggctcatggagtggggttgtagagggagaacaggccagaaggcatcttgcacggtggggtctccaaaggtgtccctaatccacagctggggagctaggacccacaggggctcccaagtcaagattctgagccagttgttatgagatgactcctaggtgttagaattgccttagtgcttccaggtgattgtcatttccagccaggcagagaaacactatcctaaatgaaagcccagtgagttttcaggatcagctatcaggtaaaaggcactgagctgtagacagaagattctgctacttagtaactgtgagaccttgggccagtcctctgccctctctgtgcctgtttctttgtctataaaacagggataatggtgccccatgaggtgtagggagaatcaaattccataatctaggggctcaatcaagttctgtaaatgtgaaataccatggcagcatccagtgcagtgctcgcacagagtcaagtactggtcagccagcattgaagccttgcattgtttagtctgggagatgggctggagcaagcagtaactgcctttctctctggccttgatggggtcgaggctattagtagtgccaaggagatgaagtctttatatctcaaagaaaaaaaaaaaggtagcttaagtgacataaatcctgcttgtttttacaaaatagtgtgtgatatcttcatcagaa

SEQ ID NO: 112621 - DNA, 1092 bp, Homo sapiens
gatgctagctgtgactgtgtgaaaatggagttcggtttttctcatcagcttgctattacccactgtgtgccataatactacaatgcaacatcactatgcctattcaagttttggtcaaattgtttcagggtatcaactcttcattgttggaaactttgatgtgtttcaggaagttattttagcattttcatcaaaagcacatgtcacctacatttggacttttttttgtcccaacattttacaagtcattaacttgaaaatccatttaattggtatatggaagtgattctttaaggaataggagtttagagttagagacatttaaggccatcttccagggatctttttgtgctgctgtggtggtggtggtgaaaaatggataacaagatttatcctcttaaccattttatgtgtatagttcagtagtgttacatatattcattgttgtgcaaccaatttttagaactttttcatcttataaaactgaaactgtacccattaagtgaaaactcctcatttctgcctccccctaacccaacaaccaccattctagtttctgtatctatgaatttgactgctttagatacctcataagcagaatcatacagtatttgtctttttgtgactggcttatgtcacttagcataatgtcctccaggttcttccactttgtagtatatgtcataatcttcttttcaaggcttagtaatatttcattgtatatataccacattttttttatccattcatccattgatacatttaggttgctttcatctgttgccaattgtgaataatgctgctgttttgagcatgtgtgtacaaggaactcctctaaatcctttttctaattcttttgaatacacacccagaagtgaaattgctgaatcatgtggcaattctatttctttttaagaaactgccatactgttttcaatagccatagagccattttatattccctccaacagtgcacatgggttccaatttttccacatcctaacagtaattatttttcatttttttgatagtagccatcctaatgactgtgacgtgatacctcattattttcattttctaatgatcagtgag

SEQ ID NO: 112622 - DNA, 1050 bp, Homo sapiens
tgcttacataactgagacaggtcaaaaagttaaagaggactaaatccagaaagacttcattagtggcttcgattagataggaatatgattttatgagcatctgagggagggaaacactttgctgtagagtttctcaaactgtgacctgtgggtcatttgcatcaagacatctggaatgtttgttaaaaatctccatttctggtttcttccccaaagctataaaattagagccagtaatctcagcactcttgggattactttgggaggccaaggtgggtggatcgcaacatggcgaaaccccatctctacaaaaagtacaaaatatttagctgggcatggtggagcatgcctgtagtcccagctactcaggaggctgaggtgggagaattcacttgaaactggaaggttgaggctgcagtgagccaagatcacaccactgcactccagacaaagtgaggtcctgtttccaaaaaaagtagagcctctggtggtgaagtttggaaatctgcatttttaacaatctccatgttttactgtaattaaagtttcaatatagtattaggaggcttatatgcccctttagataccacccaatgccccctcaccagagtccagggactcttacagtaactgtccccattgaacaactaaaggcttttgggacgtgttcagtagatgagaagttcaatacatgctgtgtttctccagacaggtatcacactgtgattctggtcaactatggcacacttactctttactcatgcatttcttaattgtgcctctgacctttcaccagctattttttccagcactgtggactattaactggatgcttgcacctgagatagcagtgttctggtaacctctcacttgaggaagttgttatctcagttggcttcctgtttggcctcatgccatccatgcagagccatgagaggcaaagcagcccagaagcagcctctcatccctctcctgtgacttcctaggagaagaatattccagtggttatgatttcccctccccacatccctccaacgcatgcacatacat

SEQ ID NO: 112623 - DNA, 1089 bp, Homo sapiens
gtgagtcacttagtagccctgttggtgatcagactgtctttgtgtcacagtgcttgtgttcaagtgactcttattttacttaatatgacctgcaagtgcaatagtgatgctggctacttggatatgccaaagagaagccagaaagtgctttaagagaaaaggtgaaaggtttcaacttagtaaggaaaaaaatactatatgttaaggttgccaagatctatggtgaaaacaaatcttctatacatgaaattttcgagaaggaaacagaaatccatgctagttttgctgttgcacctccagctgcaagacttacggccacagtgcttattaaaatggaaaagccattaaatctgtgggtggaagacatgaacagaaatgtgtcccaattggtgggtttcaggcatcctccaggggtcttggaatgtgtccccgttgggtaagaggagtgtactgtatgcccaaggaattcctcatgttttcacttggggttatctgcacccagccctttgatagaattagtgtttattctcattttcactcccggaaaatgtataagctacaatactctaattagcgctctgtgcttggctttggtgagaacacactctgtgtgtgcacagttcaccaaaacctttgggaatgactgaagggcctggaagtttccaaactgagggtcaaggtcaccttggctttgctatccattatttcttgtttcttttacaggaaaaatcctttgatgttctataaattctaaatacatttgcaatttaaaacactcttcaaaaatgtagtaaaaccacgtatttgtaaccttcacgaaggccggaatctgaaaaaagaaaagacagagccaaattgactctaattgttaaggacaaaatgaaccatcttttgactagacaaagctaccagaaatctctttgattggaagtattttgtgctgaaaaccaactagaaaataggaggttttttttttttttacaattttattttaggtaacaggagctatttaaaaaaaattactccttcattccaccagaagttttaaatgtttcttgatctaaaaatgtagatgtggtttaagtaatt

SEQ ID NO: 112624 - DNA, 1034 bp, Homo sapiens
tagctggaataccatagctcttttgaaacttggttgaaatataaaatgagcattctagaagagattgcgtgttagtttaggatgtaatatacttagatgtaagtataataacacctgcaggcatttgttaaggattgttttgaattaagacatagttagggattacagtttgtataaacttcatgttatctcataaatcctccacagatccttgtttggcagggtttgggatgtgtgcacgtgtgtgtgtgtgtgtgtactacaagatttcgaactaaaaattgaatccttaaaaaattcttcagacttaaggaatgaacttttaatgaaattgcctaattgcataatctggaatgcttcaaatgatgctgacgtccataaataaaatactgtagccacacttatagattagctgaaggaaacattaaagagaataacatggaaaaatactagacttttcttctctggtcgttctcattagtgagcagagaattaactgaaacattgcgagatgagtattccttcccctgatagtccacatgtccttaaagtgtggatatgagtggaggatggtagagaagagtggtattagtgttcattaaagagaaattggtcacccgccgtatggttatatgctgttgttagagcaatgaaaatcattttcctacatataaatgcttttcccatatgaaacttcttacaggcctcttatgacctcggccttgaaagcattgacagttctttcctgaaagctgtcaatttttattctccatgttttaatcaaagctctaaatagtaactgtcatctgtttttgatgatactagggtattgacagatgtcccagatctgacttgattttgcatatgacatagggagctcttgtttcttccttgaaaccggcaactcttgttagccagagctactagtaaatggactaatttcactggttgctagcactccttgaaactcgtttcctagcatgtgtttcaaaaatttgttaagtgagaattggtgctgactgtttgatcccttc

SEQ ID NO: 112625 - DNA, 1023 bp, Homo sapiens
ccctgggtgtgctgttcctaacacttaatcaaaagatgacacttagacatagaccagacactggacatctgtgtcagtattgctagaccagagaatgcttttgctctgcatcttcaaaagcaccctccaccctcattccccgaactgacttgcagacatgtgtttatgtagccagctctggctttgtaaatgtgaaagaactcaacacagagactgtcaggacaaggcctgttctctcagggcatctgtcagctggtgtgcagactcattcctccagaagctttcaggagcatttccagtcttgtattattttgtgatctaggcaatcacaagactaattagcacccagctggtgtccaagcaagtgccaggatttacctagagtgctaacaaaggcacctgttctatttgtgttttgcttgtcaaaaccagcaagttcataactaggcttggggaggaacgggagcggagtaaatgtagatatactatgaaacacaaaactattaattttcatatttataaatattcatttgtattttttcatatattaactgttctaagcagaaatggatgttatcattaaagcttcattagttacttaaagcttattaaaaatgactgaggaagagtatttccattaaactcttatgatctgtgtttttccataatgttggatccctccatctaaaacacccacttactcaccactactgaatatactttttatttcagtgcaatttctaaagccctaggtttgaagtactcatgatttggatctgtcactaaaatctccttccagttcaatctgtatcagatcatgattctctataatataaagaaggcttttcatttttatttacatttaaggttgacagagtatgcctcacctgaagtattttgatatttgtggggaatttatctctatcctaatgaagcctttcaccattttactgatttttcaatattccctgcacctttatcttttgttattttaaattttaacacttgtaagcggagaaaaaa

SEQ ID NO: 112626 - DNA, 1631 bp, Homo sapiens
ccagaatatctttgggcaggggacatctaatcacatgggttgttaaaatggaagcctctaggctgtggccctggattatctggtgggcccattatattcacagggttcttaacagggagttggggggatcagagtcagataaggtgacgtgaccatggaaacagcttggtgtgatgcattttgaagatggagaaggaggcagccatgagccaaggaatgtcaagtggactctagatgttggaaaaggcaaggaaatggattctgccatagagccttcagaagaaatgcaaccctggtgactctttgattttagccccgtaagactcatttcagattctaacttccagaactgtaagataatacatttgttttgttagaagccattcagtttgtgagaatttgttgtagctgtccccattatcggagttctcaaagctattgtctgcaaactttatcctcttatgtcactgaatgagagttcagattttgaaggagcagtatgaaagccccagtcaaaatgttgccatattattattatttctggaagtttttttttgtagagacaggttctcaccatattacccaggctggccttggattcctggccttaagccgtcttcccaccttggcctcccgaaatgctgggattacaggcatgagccatcatgcttggccctatattattatttttaagaacaagatgaaattcagagttctttcttgggtaatcgggtgataatctcataagtaaaaacaatgtttaagtcattttcactcattactaaaaatatatttcttctgattactgccagttttttctcaagcttaatttcttatgtacatttgattttgctgacaaaatcaatttataaactaaccatgagatcatcgtcactgctgagatattttctctaatccagaaatagtatttggggtatattttctcattgcttccccagtttcttttcaaaatttatattgagggaatcattagtgacaggagtatatttatttatccaatagttaacgtgaaaacatgccatgttttccccttcattttattttctagcttttggaattttcagctgtctatgaggtgatttggggaaatgaaaaccctatataaatattaaggtagtggtaacctacaacagaaatggattctcctttgatataaatgtcagtccttgagtacagagaaagtgctcataaacatggatatgtttatgcttgtttatataattgtgcaagctgttatttttcttggttttgatttaaatctaggaaaattttcagtttgaattggacttaatcttataaacctgaaatccggttttcaatgcattgtgaataattgtctccttttgacagtgttttttcacttctagttttagcctccagctctgataggtctattagttataagacgtcctaggcttctttaggataaagacaatcaggaaacaggtttttatattcaactctaagtgtagcctgttagtttgaaagggtgttggtcatccataggggaaggatgagtggcttcagcatttgggtcagtttttaaagaagcccagctgtaccatatgatcaggaactaatgacctccaagttccagtcattatttctac

SEQ ID NO: 112627 - DNA, 1531 bp, Homo sapiens
aaaactccaaagggacatgcagacaagtctgtatgttttaaaaacctttcccagaagccccacctggcaactcctgttttcataatcattgccatagcttcactgcagactaatctctgaaaaagagcaaggcaaatgagtatcatggatgggcattcagtcatattgccatacttagcctcacaattgatccagtccagtgaagctagggttccaatcaaagaacgtcttgtggggtgtatcacttactataacatctatcctggtgttaaggcatctcttgagagactcaaggactttttaggaggtgacagatgacactagggaacaccctgtttctcagctggtaagaagagaaagcaatccagtgtagatgtgtctcacttgagaaatatataaaacaataacagaaatatataaaacaataacaattatttgattcttaaaaataattattaatttttcttaaataggaaagctccccaaatgttttcaaaatacaatttagttttttgaaaaaaagatttatacataatttttctggactaaatctgctacataaagcaagataagcctgtccttttgaaaagtttgcctttgagtactgaatgtgtaggttggtgcaaaagtaatggcaaaaccacaataacttttgcacccacctaaaatcttagtagctcagttacctacttatctatcctcatcagtccagcctttcttgtatcttccaaaacatgttccaagtgagctgagaagtttcctttacaagttctgtcttgttggttggaaatatggatgactgttttctcagtcttgaaactgacattgttgcatgttggtagctgacacatggtgggaggagcataattttatatctaagaacatgataagcaccgaaacaaatgaggaaatgttagatcttgctgttgcccctacgctcacagataagtgtctgagtgaaactgtttgcagaaggcactcgatggacttcatacacccatatgtgtaaaacatttaacgagttgctctgaaatgatgctccagttgggagggtacagatgcaggaacttcctgtaaccgcactgcccatgacgcctgccttatcctcacctacaaggcctgctgttgtctaaaacctgtgccattcccaccagacttactcaagctccagctttcatttcatcagtgagtgatctttatatatcacaaatccaagcacgtgacttcattcatttaaaaccttcattggctacccattactcttaagatgaaaaagaaacgtcttagcatggcctataagagtcctcatgatcttgcttccacttaacttcttgcaccttcatctcaacactctcccacttactctgtaattgaaggtcaagtgctctaaatttcttagagttgtttgaatgtgctttctctctcatgcctctggctctttgcccatactgttccctctcactttctttgccaggcttatactcgtcctgtctgaatatgtctccagaaagccttctctgacccaacaaga

SEQ ID NO: 112628 - DNA, 1070 bp, Homo sapiens
ttttgattttttaaactaggtgatgtttatgaatattatagatattgagtaaatgtttttgaataaacaagtaaaccagctggagccctcgttcatgtttttgagttcacatacgctgtattaacttggatttgttactgataattctaaaaatacccctgtctataaaagaggcagtttagttttctagagaagactgcctatttgtcataatatgaacttgaggatttggagattctatggccaattttgatcaatataaacagataatttgaatagttcagattaaaaaaataatccacacaactctggatttcagcatcccaaactcttctagcccttctggtgactcatgaaaggtgtcccacctctctgtaactcagtttctgtcagtgtaaattagaatcatactgtgaagcaacagggattagaacatcaacgcaacagatatttcctaggtacttcattattttcagttcaatgtccaaggtgcagaccttacatgtagtacagtcaatgataatttagaaagcttccttacctgtaaaaaattctcttatattcaaataaactagtgcagccagagcttttatataggagtgggagttagagtgaagtatctaatgatctttatatgtgttaaacttacatgtttccttgaaagaaatgtgtacttacctatgtttgtatgcatttaaatgcctaaatacagacccatgcacagatataaattttctgtctttgatatcctaaaatgactgatggtcatgtgcataaaagctagtctgagaaccctggagcctgccagacaggttgagcttctgagtaagcactgtagctattgcagtgctcagcccacacgatatgttttgcttaaagggaactatccaatccttggccggatggatgatggtggacactttggtttaatactgcttattactgtgtcactttaatttgcctaaaattgttcacagaacgttgtccttatatgtttctgggagttacttttccttgggctactgtgttggttttgctttagcatccttggttcagtcatttttagtact

SEQ ID NO: 112629 - DNA, 1040 bp, Homo sapiens
atcagcacagcctttaaacactttataattgagcttaaatctgaagcttgaagtattatgtttatgtgcctattcctaatgctgggtgttttccgactcaagggcaaacatttgagtcactcatgatatgtcaaaaagtgaaataggaatttgagaaaatttgtctagaaatctgagaccaaaataacacaagaaatttcaaacatctagaatcctaacaagtgcagctcagtttatgaacatgcagtctttgtgatcaatgctttaagaagcccatcataagataccttcaatattagcccagacttaattattaacatcctaatcacatatccaagttaagaaacaaaaattcatttttctactagactcacacacactcaacatccaatgaatctgaggaagttcttgagatgttaaggaaggtagagatcagttccttccaagccttacattaaattgtgatcagtcttctctcttctagaattttttattttgaccctttgttcatcttgaaggatcttctctgaacaccaagttgtctgtggtgcctggcactggatcagaccattgctgataataggaggattacttcattattcccctaggcagccttaattgtggtcagttactacaagaggagacagaagggaaagagagacagtgcttgcttgcagttcgtctgctgattggcttcttacccactaaggtctttacctgtcccttgaacttacctatttaaacaattttagtgtctgacttttttccctaggctactaccctgctaccctgtaagtgttcctattgagcttcatttcatgtgtttctgaccttttctcgtatttgccaactaaattataatttttgccttctaagttgctgactttggctttgaagtcatacagaagccagtttgaactgagacctcactccatttcttacaagttatgcaaacttacgcaagttatttaacacagtatgtgctgcatttctttatctgcaaatgggggatggtacacatacctagtgaagttagtgtg

SEQ ID NO: 112630 - DNA, 2943 bp, Homo sapiens
aaagaactagggcctgagagtcaacatccattcttttttagcagagcaggggatagaaactgctagggatctgacactgagcacaaagtttaggaagtaagcagcaggaagcaccaatcaatcattgcagttgcagaaataaaccatgtccacaggcttcccctagctttatcatcttgtggaaagaaaagtaaaagaaaagagacccaactttttcacctactgtgaaacacaaagtcaagtttgggggcttatatagaaaagtactagccctgcctatctccaaagtggcatgggcagtaaaggactgtaaagccagcggcaacctgagaagcatgtcagccagtcccagctaaggcagccagggattagggaagtcatagataatcaccacatggtaggatcagtagggaataccaaacagaccagtgacacagccatccgtccctgatggtgcttaatgactagtgtaaggggtaggttctgtaaggtgtcctgccagggaggggattagataggacaagcgcaccttaaacactagagattacaaaataatttacaaccaagtgggaaaatttgagattctttgctagcaagatccagtaatggtagacattatttcagttatgttagagggtggtacctgtcgaatgagaggttggctgaagtggacttgggaaaggggaggcaggggtaggttaaatgccagcaaaaaaaatcttagataaacaaagctgacttttgcttaaaaactgttaaaacactgttgatgagaagaggaagtcagctatatagcaattctctcctttgcttccaaaatacgtctgaaaaaagacaaaaaatggagatatatattagagaaaaagtccaggtctagcagaacaagaggaattttttgtgtgtgcattgttattctctaaaattatatatgtaagcaaaaagaaaaaatctttaacagggaaaactacgatagaaataaaataaacttaaataagagaaggaaagttactgaggtcactgtgattatctacatgtgtctttttatcgctgaaaagtaaaatattgacagactggagccccaaggggatggaaatgtatccaattcttactcaaataaaaatgtattgagctcagttccagagaacattcttggatttgatgtttttagctccctaagttaaaacagctgaaatttcttcttattaggctttcatagaagaaaaacgttttcattttgttgtttattttttaattaaaaatatacatatacccacaaacatgctaatcccccataataccacttttttcttaaaattaaaaagaaatgaaagttgccacaatcttcaaccctgcaagataagaacttttaatatccctttaaaacttttttctataccagagacacatatctatatctatccactgatgtatctatatcaatacctaaaattatatataataattttacttcatgcagatcttcattgaaaagatagaatactgtgtccttggcttaggtactatgggtgtaatgatatttttatatgtttaatctgtaatcatttttggattaccacacagttattcaggttgtggctgatggaaaccacaggagtctgaggacacacttaagagctgcgtgggactcacccctgccccccaccccacatccacacatcttatcacacaagtgaccattgctcagctccttacatacaccaaactctagtgttcaggctttccagtatgcactttcttttcctttgaatgttcttccttctgctcttctcaaggctggctatttctcattttttgtgatctcaatttattcccatgtctttagggaggcattctcattctccatctaaaagagctcccctccacctgctaacaccgtctctttgatgctctaattttccttcaaaacacatcgtagtgtgttactattaatttgttgattagtgtgtatctctctgcttttcaatgaaacaagctctgtgaggctcatttgtacccattttgttcagtactgtgtatccagtacctagcgtaggatctggcagataagaaatacccagtaggatttgtggaattaatgaggtgtatagaactttattagcacaaatccacagacatatattactagcttgctttacaaccacaaggccatgaagaaagaggttgctatttcagtggtgtttattagacatatttacaagttaaaagttaaaagtgaatccttagtgaaatagttaaatcagtaataaattatagagcatgttgtattaggtcactgctctttagaaacctaagcaataacgtggaagaactgctctatgcatttctgtaatgactttagcagaagctgtgggtggaagaaagaattggactcactttgaacccagagttcctctttattagccagttataagcaagtccttttttgagccccagttttcttgtctgtaaaaggcaataagtttgtctgaagaatgatgtaggtgctacatgagatacagttaagctctgccctaatcatgtaaatgaatgtgcacagttctgttgttttgaaattaaagtgggagcccatgaagctagatggctggagttccgtagccaattgtgttatttctaaaagtttgttatggcctcagagtgtgttgttgaggaatttatgtaatgttagtgacttgtaaagagccatccacatttatggtcctatcattactattattgttatatgcttaaaaaaatccacattctattaataaataagataaatctgataagactgagcattagctttttaccttttgaattcagatagatttagtggaagcataaacttaactgacatggataataagatctatagtaaagtcaaaacagcttatcaaatcttgaatgaaactaatcttgaaaaggggctactgaaaatggccc

SEQ ID NO: 112631 - DNA, 1049 bp, Homo sapiens
tcttaggatgggttattctatacaaaactaacatttttcttctgaaaatcagcatgaaatcagaacatgaaattttctgaccttattctcagatgcaggagcgccattgaaaaaagattgaactaatgaagtaattggatgataaatattatacatctaatatctcaaacgattttttttaccgttaaaaatcatatggtaaagataagttaaaaaaaaaagcactacagtctaatttgtgtgaaaatctcacttctatttatttgagctgatcttgatgaaatatgccactactagcaacgtcaaatgaggtttgttttgttttgttttgctttttaatgatgtgtctttggcatatcctggaatcaggagtttgatgtttctcacacaattttctaagaaattataagtcaacatgtattatgttccagcccacagttccttcctggtagagaggtaggctattagcttctaactggtagatttaaggatctgtggaagtaagcaaagggccattccttacgtgctgagggacgggagaggggaattgcatgggggctaatcaacaagtcaacaatcattttagaagatttagcactggcataattaataacttcttgagaaggtaaaaccacaatttaaagatgagttatattgaaggattggtatgttataggactgtgataactagaaaaaatggcagcatagccaacaaaactcccagccaaaggatactcagtgataaaagaaggaattaactagaagttgaagtcagtaattatgttgtttacctgttcagtgtaagtgaggaaatggcatgatctacctgaaggaggaaggacccatttgattatccagagagcaagagttcattcttactattggagacttcaacttcctggttattccattaagtcattcatttaactgttttttcaaaaattccttaggcaaactaaatgagtagactgattacattaaatggcagtaattccacacagtttagacagggatagatgagattgtctgcaatgtttataaattatttt

SEQ ID NO: 112632 - DNA, 1517 bp, Homo sapiens
tttttagtagagacagagtttcaccatgttggccaggctggtctcaaactcctgacctcaggtgatccgtccacctcggcttcccaaagtgctgggactacaggcctgagccaccgtgcccggccctaaaactgtatttttattttaaaatatgaatatctattatcactaagtaataaaattaaagcttggaaatgaaaggatcatacaatgcaagagtatctaaagtcatttaaataatgtcaagaataatgttttaattattctgctcttagaattttaagcatttttagttttaaaaataaaaatggagtatttttgacaatattttgcttaacattccctaattgctgagaaatcatctgtttcagaaattagccattgacagataatgagtttgagattcccttttgccagaaaaaattgtagtaacatacaataatatggaaattgccagtatgtttgggtatttattagattgagaactatttcaaacacatctagatcaatctgtaagcaaagaatccaaaacttgtgagtttatttcttgtcgcctgtctgtttaagtctgacagtttaggcaaggagaatgtcttatgaatttgagtataatgaatttgtggaggggttttactgaatgcattttcaggattattttgaaaatacatgaagtagactgaacacggtggctcacacctgtaattccagcactttgggaggccgaagcagaaggattgcttgagttcaggagttcaggaccagcctgggccacatagtgagacggtgtctctatgaaaaactaaaactaaaactaaaaataaaatgcatgaagtaaatgcagaaaaaaaaagaaacagtttccattcaaatttctacttttcaaatctgaaacacataactgttcactctcactacatgatgtacttgttttaaggggaagaaaaattcaagatttaagaaggcatttatttacgctctcaaaaatctataggatacagtctttgaaaatgaatacatttattaattatttttggggtgcttacaacatgtttttctatgttggtcttttctaagtggagatttttctatgtaggcagataaataccagtattaggaagagatatatatttatactcatggagtacaagtgcagttttgtcacatgaatatactgcattgtggtgaagtcaggccttcattgcatccatcagtggagcaacacacttcgtacccaccaagcaacctgccatcatctatcaccccatgcctccaagtcttcattgtccatcatttcacactctgcttcttctgtacaaattatttagcttccacttgtgagaacatgtggtatttgtctgtgtctgaattgtttcacttaagataatggcctccggttctatacatgttgctgaaaaagacatgatctcaatctttttatgactgagtagtattcattgtgtacacataacacattttctttattcggtcctccactgatggacacttaagtcgattcc

SEQ ID NO: 112633 - DNA, 1059 bp, Homo sapiens
acgctcattattcagggcagtggttctcaacatgagctgtgcttcccgtgttgtaattgtctgggaaccttttataatcaccagtgctgaggccttgacatctgtggaagtgggggtgggaggttaataaatctctccaggagatgtgatgagaacctgtggtttaggaagatgttagatacgaggaggttgttgatctgcccccaagctctctagcaattctgattattttaaatgtacctgcaatatgtagccattgtatcatgcatattgaactgtctcggggtctagatatggatatatgaaccaggacgacttgggactcttactgtctggaaagaatggcattgtgttagaggaaaaataagtgttccaaaaaagctcaatcgcatagataaattctgatatttgtgatacaaattgttaaactttgattttgtaaaatattcaatttgtaatacaacctatttaagtatctttgatagattgaaaaattatttttttctgactattgtaaataataattttttttgctatagattaggagtttcctatgctctcagtctctagggctatcccttctgtattagtataactataactatataatatgtaataaatagtatgtgaccaaatgtaggaagatttttaaagccatgaccattatgatttgattcttaaaaaacaatcataataatttataattgaaaaacttttaagaagtaaaagttttggtctatgtgagtgtggtcaataggtacttcaaaattaaatgttcatagaagtttaaaaaatatattactagttatgccccaaatttgctaaatatttattgggcaattatatattagtatataatagcagtatatgctatgtagattgtatagtacaatatattgtagcaagcatatattaagtgcctaacgtgcttaaaatatattgctcatttaattctcaaataatgctgcaagaatcagtcacaggattgataactgtcaaaaaagtaaaagttggactcagatctctctttgtggaaagtccctgttttgacctctagca

SEQ ID NO: 112634 - DNA, 1087 bp, Homo sapiens
tttgtgatcttcaaaatggggtttattgaattatagactgtgcacacaatggtccactaggttgttctttactgtagttatctatttctgtggagatggatgaatatgtagtgatgtggaaagatgaacttttcataatataaagcagaatagggttgtatagtatgtttggatttttgttaataacatgttaaaagtgtcaaattgccaacaagggcaagagcataatataatgattttctgaaaccatgtgttaaagcataattaactaacttgacaaatacagtttcaatgtactatatccatgaactttggtttatctttgtgtttatatataaagtaattggatatttaatgattatttaaatgtatttagttaattcttcttgtacctagaaaaggatttgccctgtcaaagacaaagtgctggtccacttcttcatgaatatatatttcctacttttaataatttgcttgtcaatataatgagactaacaaagtgccatttaggctatttcaacatgtgtagttccctgagggcacatagctttacagcttccatagcagatactataattccttgaggtagttggcactcagtaaatgtttattgagttgatgattttcttaaggaaataaaatatccaagaaattttttttttttttgagacggagccttgctctttcacccaggctggagtgcagtggcgctatctcagctcactgcaacctccgcctcccaggttcaagcaattctcctgcctcagcctcatgagtagctgggactacaggtgcatgccaccacgtgcagctaatttttgcatttttagtagagacggggtttcactatcttggccaggctggtcttgaactcctgacctcacttgatccacctgcctcggcctcccaaaatgctgggattacaggcatgagtcaccgcacctggcctatccaagacatattttagagtattcagtcacttcttttccctccctctaattactgtgtactattatttggcattttaccagctcaaagtggaataactatttttgcttcacattgtatgtaccaaattaatttcata

SEQ ID NO: 112635 - DNA, 1839 bp, Homo sapiens
gtacttcagcacattcattaacctcctgtagggaggcaggaggaaaatggcaactttaattttctggggaaaacagtcatccaaaatatctatatattcaggcctggcacagttgttcacacctgtaatcccagcactttgggaggctgaggtgggtgggattgcatgagcctaggagttggagactagcttgggcaacatagcaaaaccctgtatccaaaaaatagaaaaaaaattaggcatagtggcatgtgcctgtagtctcaacaactcagaaggctgaggtgggaggatcacctgagcctgaagagctcaaggctacagtgagctgtgattgcgccactgcactccagcctgggcaacacattgagaccctgtctcaaaaaataaaataaacccacaacccacaagatgtctatattcagcaaaatggttcagcacagcctcttgaaatcactacattaaagttttactgagtctgactaaaattaagaaaaaattttggttgtctgttacctttataattaattttactatgggtaatctttcaatcatttgctcagttttctactgttagcattcttttagtttattttttaactttagattaaaacaattataaactaggcatggtataaaatttaaaatgttccacaagggtatgcagtgaaaaagtattttatataaaggactacatccctttccccaaccacacaattctcctccctgcggatagccagtgtgctcttcagagatgttttgtgtgcacaaaagcaattacaaataatgagattctcattattccaggtagatatgttctgtaaagtcaccgcaaacactgaacttgtgaatatggaacccttgcacttagggaaatacagcgttagtttcctgagagcttttggttacaatatttctgatcaacacataacctagttttgtgtgtgtttctgcttaaaataccttatttaacatatattgttgattccttaacatggaactcacagccaacagcactaactcatgcctgaatgaagcttatctaacatacgtagtttctctgtaagacctgttgaagccttctcgttcttaggaacatgagatagcagtaagcttgggagccattttaaaccgtgaaattgccaacacaaagcacaaaaattggaaagacatggaactaaataagactgcaaaagagacacctattttgcagtatgagagctgaacaggaggcagtgtgtcaccttgctccacctcagctggggatgtgcaggtcaggcaactccaatttttcatccctctgtgcatgtttgaaaatgaccatgaaagtgccatcagtatagacttggggttaaattttcataagtaggagaatttgcaaatacagaatcagtgaatgaggattgactatatatttttttcctttaagaacacaaatgctagtatataatacatagcattttgtatcttactctatggacttaacagtgcatcttgaagatattttatacatacacagacatatttcatttgagtaaactacgagcttctgcattctatattgttcaggctgtatataatccattacatgggcgtttgtgtttttttccagtcttttattacttggattacattgcactggaaatgttgctagatactgtcttctgtaatggttgtatattatacctctctaccaccattacaagagggaatagatagcattctttcatgtagcagcatccattgctaattgtactggataatgacttgaattctatttattctttagtactgatctactctgttggagaaaccaataaggtgcaagactccactgaa

SEQ ID NO: 112636 - DNA, 1051 bp, Homo sapiens
tactgcactccaacctgggcaacagagtgagactctgtctcaaaaaaaagaaattccccaaaacaagaaattctttcatcagaaataaatgagcagcctaccaacccacctgccttccaacctgagtgtttttttttttttctttttttttttttttttgagacagggtcccactttcacccaggctggagtgcagtggcgtgatcatggctcattgtagccttgacctccctgggctcaagcggtcctcccacctcatcctcctgagtagctgggactacaggtgcatgccaccacaccgggctaatttttctattttttgtagagatgggctttcgccacgttgcctcagcttgtttctgccttggcttcccaaagtgctgggattacaggcatgagccacctcacccggctgtgcttgctttcttgtgacaaatgttcatggcatcttgtggcagacttatgaaagctgagttaggtcaaagtgtttccttagtgcctagctcagaatactcatgctatacaaaccgttttactttttcctttcctagggtggccttggcttcatcttccctcaccttaacttgtcatcagggcagcagtgtatcaaactctgggacctgtggattcagacacagtttcaattctgcctttgctacttaatgacttggtgaacttgagcacattcattaacctccctaggcccccatttctaagtgtgaaattgagataatcaaattaggctgtagtaataattaaactagttaaggtgtgtcaatggcttacaaaatgtccagcactttctaggctctccatgaaaagtagcttttactggcatgactctcagcagatattttagtattattttgctttcaactgagtaatgaattcctagccaacatttttgaacttctcattacacattcagaaatgtcatgtcacaaccagggctaagaacttttcattgctcccaaattgcctgtcactatgactcagatttacccacctgataaggaagattccttgaccttaactcaccattcgatcttac

SEQ ID NO: 112637 - DNA, 1047 bp, Homo sapiens
gtgttcattgccttctggcagcaagggcaaaagtggaaacacaagaattttttcttttttttgagacggagtttcactgtcaccaggctggagtgcagtggcgcgatctcggctcatttacaacccctcctcccgggttcaagcgattctcctgccttagcccttctagtagctgggactacagggcgcgtaccaccacacccaggtaatttttatatttttagtagagatggggtttcacggttgttggccgggatggtctcgatctcttgacctcgtgatccacctgccttggcctcccaaagtgctgggattacaggcgtgagccaccgcgcctggctgaaacacaagaatttaagagaattcttgttatctgaaaagaaaggtgatgtctcattattgctcaagtaagttaagaacaaaccaaggtcctagcccaaagacaacaacatttgaaggaaaatcagggatataatgtcaaagaacactgcagtccaggggcgaaatgaatgtgccttgagcaacttctctaggatctcacttgatagcaggctgggatttatagtacccaggggaaggctgacagtatctttcctccagatcagctctgagctgggcttttgttgataagctgtcccaggagtgctgaggctctgtcactgacagaggaggcagatgtattgaaagcaggatcgtgggttgataatttgttagggatgtagagaagcctaactggttttcttacgtggaaaagaccaccctcttttcccacttcccagatgtgctaaactcttctggcagaggatataggattgtccttggggaattagccttgggttcactccaatgcatgggtaaatgtttggttttgcaaggcaggtgttacctggccagctccacatactttattacaaaaatcctcctgttagttctgacaggaatgcatcataattgttattttatagttgaggaagctgactctcaaagaagtgattaactcatctctgtgtgtgattcagatgagattagaaccgcccagctcctgag

SEQ ID NO: 112638 - DNA, 1049 bp, Homo sapiens
gcacaatgaaagcacgtgagagcagtttttgaaaaagttctgattgcatccattgaatttgactttttttttttttcttttttagacagtcttgctctgtcgcccaggctggagtacaatggcacgatcttggctcacagcagcctctgcctcctgggttcaagtgatttttgtgcctcagtcacccaagtagctgggattacaggcatgcaacaccatgcctagctaacttttgcatatttttttagtagagacggggtttcgccttgttgcccaagccggtctcgaactctgggcttccagcaatctgcccacctcagactcccaaagtgctgggattacaggcatgagccatcacactggcctgaatttgacccttactctaatgatttatagccatataattctcatgcaataagctaaaaatacacctaaaaatgatttactctcaaagggttttaactttttttcattgaatctcttttatgttcacttaaattttggctctgttcataaattgatacaaagacaaaatttccactaaaatattaatcttaagtagtagacgttttctaactataccttccaattggaattaagcatttaatctaaaattatatatcaaaaatacaagaaagaacttccttaattgcctggatatgtttctgcctctcaaggcctcagaaagttttgtacaaactgttagaatagccctaatcatggagataggtgttttattttttctctccaaaagcataagagaggttgggtgcagcagctcacgcctgtaatcccagcactttgggaggccagggtgggaggatggcttgaggccaggagtttgagaccagcctgagcagcacagggagaccctgtctctacatacaaacatacatacatacatacatacatacatacatacatacatacatacatacatacataactgaggtggtggcaggcaccctgtagtcccagctacttgtggaagctgaggatcattgcaccactgcactccagcctgggcaacagagtgagactctgcctca

SEQ ID NO: 112639 - DNA, 1003 bp, Homo sapiens
gcactttgggaggccaaagtgggtggatcacctgaggttaggcgttcgaggccagtctggccaacatggtaaaacatggtaaacccccatctctactaaaaatacaaaaattagccaggtgtggtgtcacacgcctttagtcccagctacttgggaggctgaagcaagagaatcgcttgaacctgggaggcagaggttgcagtgagctgagatcgcaccattgcactcagcctgggcaacaagagggaaactccatctcaaaaaaaaaaaaaaagaaagaaagaaaagaaaactaaatataaaatgaatataagcataaattcataaaaataaaaattttcttaaaattagatcaaaaatttttgtttcctaagggagaatccagagagaactgggaagaagagtggataatttccaaacacctgtgtgtgctcacacacacaccgtgaatccttcaccattgttttaatatggaagatgattggagtgtgttttctagaaattctgaataatacttatttaaagacttctattgggctggccaggcatggtggctcacgcctgtaatcccagcactttgggaggctgaggtgtgtggatcacctgaggtcaggagttacaggccagccagcctggccaacatggtgaaatcccatctctactaaaaatacaaaaattagctgggcatggtgttaggcacctgtagtcccagctactagggaggctaaggcaggagaatcacttgaacccaggaggtagagattgcagtgagccgagatcgcaccactgcactccaacctgggtggcagagcgagactccgtctcaaaaaaaaaaaaacaaaacaaaaaaccccaaaactctgttggggtcgggtgcagtggctcacacctgtaattctagcactttgggaggccaaggtgggtggaccctgtctctaccaaaaatacaaaaattagccaggtgtggtggcatacacctgcagtcccagcaacttgggaggct

SEQ ID NO: 112640 - DNA, 1035 bp, Homo sapiens
cctaacttttaagaaatatatagaatggatatttctgcatgttgttaaatacttcctgcaccaaactgtaaatgagagaatttgtttctttaatgtaatgttctggctgacacatgaaaagcttgaggagatgcatctcactctttttaggtagcacattattttttaatcatttttagacgacagggcaaagaaaactagtagctttagagaaacacaaaatatactgaataatagtattacaattgttttaagtttgaccagtcaggtacaaaatgcaataagtttcagattattttcttcatggattatgtcatttttgggtaatactcatcagtttggtgtgaagaacatttatgccaatcagggaacttttaggatgttttcaactgcaagtaacagaacttaattaactgtagcctaaaacatgaagacttttaattatttcacataacaataactttgattggaagcctcagtggttgtttagtggttttaataatgttatcaatgacctaggttctatctgagtttccgttttgccattcataatgtgtcaatagttttttcttcatggtcacaaggtggctgccatatcaccaagcttcccacacaagcatctcaagcagaaagaaaggagcagtggcatgggagcctttttatttgctttcttgtcaaggcaaagcctccaagccaacttgcactcagtaagtttataaaaggatatgctcttattttattattattattattatttattaatttattttttaagaaacaatgtttcactctgtcagccaggctggcgtgcagtggcatgattacagcttattgcagtctcatattcctgggcttaaatgatcctcctatcttagcctcccaagtagtttgaactacaggacatgccaccacacctgacaaattctaaaattttttgtagagatggggtcatgctatgttgcccaggttggtcttgaactcttatcctcaagaaatcctccagccttagcctctcaatcactgggattacaagca

SEQ ID NO: 112641 - DNA, 1055 bp, Homo sapiens
ctgttcctataaatacatacatacatatataagtaaataaataaagctttcttaatgatttggcttattctttttaaatccagcaaatgttaattctaaactttagttctgctgttagagtgagacgagattagcacattatatctgctatctgggcttagattgtgggtgttatttcacacagataattcaggcaaacccgagatttttagggggtgaacttgcattatatggatacaataagcacactcacaatagaaaactatgtggcatatactaaaagaaaaaactctaccgtgtttttgagaattataccatggataagtaacagaaggctcatcctcagagacctaagagtttgtcttctgactaaacattttatggctgatatttcttccccacagagcattcagtgtccagagactcctttttccccagcaatgctggagggatgaggaatagggagtgtgaagctgatgacatgttctaccttttcatgatggagtacagaaaataactaaaattaggtgctaatggttgtccttcttcaggattaaattttactcagtggaaagaatataggttcttttatgtttatagtttatcatatctagatgtgctataatagatttaaactgttttctctaggtagttacaacataacagctccgtatgtcttgtttatatgcaatatctaggacatttggaatgaagtagttttccaaagcattatataaattaagttttcattgaccttaggccagaccatcaatagcttgctagttgtctttaatattagcttaaattgtattttttcatgtgaaaatgaaaataaatattcttgttttctctttatttcatttgggtttaatgatttaatatttttgcccttttcttttgaaatggaattttgctcttgttgcccaggctggagtgcagtggcgtaatttcggctcactgcaacctcagcctcccggtttcaagcaattctcctgtctcagcctcctgagtagctgggattacaggcatgtgccaccacacccagctaatttttt

SEQ ID NO: 112642 - DNA, 1023 bp, Homo sapiens
attacaagcatgagccaccgcgcccggcctccctgttccagttttctataatctgttcatattatattctgggtatatgtgggtggtgtgattatccatgtggtcttattttcacattctttgcattaactataatgtacttaatgttttaagataagtttcattctacaaagatgtatgtacaatacctggtatcaggtaacaatcttaaaaaaactaattcatttaaaaataaacattaaaattagcaatacaattaaacataaagacagtttgtgaggacattgaactgcccattcttactccaaatgaatttgctttcttagactgaggaggaggggccatattgttgatgtcacaataaacttgtttctccttcttcaataataaattacataatttgatttttttaataggaaaggatcatacttcaagggaggatgataaaaaacattaatttaactttagaattacaacttttacatgtgggcccaggaatgtatctaatgggacaaaggttccccagggacaaaagtcatctaatctaatacagacaaaaggttaagcataaacctgtccctagagtgagaaaaaaatgaatagaataattggctcagggaccttgtggcacctggaaacagatgctgcacacgtacctggagtacgtggttaacaaatatcttcagtagtactgcagaatgcctaggagatagtgtctggttaagaggagctagaaagattttgatactctctgaaacgaagtttagaaggggccagtctgtctagtccagaggccaggctctgtggatccagagagcctggtatgtgtgatctgcttgggagcaatgtgacagggctttccacaggactgctttgtgaagcagatcatactggtctgggccatttctagtcttctagacttcctttctgagagaagaaagatggagaaggttacctttcagtacacagaaagtagatgttttgttttgttttacattttattttattttctctcctctcctc

SEQ ID NO: 112643 - DNA, 1428 bp, Homo sapiens
ggcttatctcagggattcagatttagcagatctgtggaggggtccagacaagtgttactgtgaaaaaccttcccacttgccctagggagaagcactgctctgtatgaaactgattccatctctcattctttgggtttgtcttctcaaaccatcgattttacagactgaactcttccttagctaatctgctttacctgctttgtcatctatgtgggaccagtacatagctcagcatgaaagtactcatctcccttttctcctacctgtaatttacaaccaattcctgtgtgagttggctgtcagttccctttttctcggttcattgtgcttgccactgacttcctttagctccccaggactacttttagtcttctagattcctacctcccattgtctttctgagtcactgatctgatcttgtcatcacaatggttaaaaaccttcagtggtttcccgttgttttaaggtcattcaaaatctggcaccaaattcccttcttaatgttacctctagaagcagcccttgtccagtgcctacttagttgaaatttgaattccaaagccttcttctctccacccatctatatctattgctctttatttgtggttcactggcacttggtttataaatagataaatattttctctgaaatcagtgcttaccacagaatttggcatattcagtgtttgaatagttgaatgaatgcatgcatggacatacgaggctgttcattaacttttaaatgtatctgattatattatctggcactgctttgtatttcgttaagtgaatcatgggagattgtccagtcccttaaaaatattttactctcttcatctgatctcatttttaagaagaaaacataggcatttaacatgactaattatcagtgaatccatgctaactgttggggattattagtccttttctagatactcaaactatctattccaatcagagagagatgatttttttattttatattttattgattgattgattgattgagacagggtctcactctgttgcctaggctggagtacagtggtacgatctcagctcactgcaacgtctgcctcccagtctaaagtgatcctcccacttcagccttccaaatagctgggaccacaggcatacaccaccacgcatggctaatttttgtattgtttgtagagatgggatttccccacgttgcccaggctggtctcctgagctcaaagcaatccagattgctgggattacagctgtgagccaccgtgcctggctgagatgacttttaaaaaaagacttctctaaagtagaaggaagggtggaattgtatgcacaagaagaaaaaaacctggaagaaaaacatactaaagaggtaaaaaaaaaatagatctgtaaaggtggtaaaacaatggttattatttatctttgttgatgaaa

SEQ ID NO: 112644 - DNA, 3596 bp, Homo sapiens
gcctcttctctccattcactcagtactgagccagacaggtctcagccctcgtgggactgaaaatgacaaaaatgtgccaacgtatctactcctgttaggttctgaccactgtttcctcctagttctttatctgtacctttcttctggcaatatcctttactgttatatacatggttattaacttacagaccatcagctcttcaggttacggttcttgtcatcccactcttgattctgcaaagcacctagcagagtgctttgcataaggcacattcttgagaaaatgtccagtgagttgaaatggtgattggtgcccattttattgccagcactactcgttaatacccgaaggttaacaggctagaacttgcataccgtggcagagtcacatcttgggatttttcccttcctggcttctgctctctgttgatgttatgttcttagattgcttattgcagtcaaagaaccctgctggctgttacccctcccttgcaactcttcctgaccctaattgtcttactttcatgtttttttttaaatgccagattttgtgcatttctcccaatatcccagggtgcccaattttatctctcctccctccccaaaaactgtacagccaaaaagactttaaacactttttaaaatttaattttattagccgggtgtggtggctcctgcctgtaatcccagcactttgggaggctgaggtgggtggattacctgacgacaggagttcgagaccagccaggccaatatggtgaaaccccatctctactaaaaatacaaaaaaattagccgagcgtggtggcgggtgcctgtaatcccagctactcgggaggttgaggcaggagaattgcttgaacccgggaggttcaaattaaagcttttagtttttatttttaatagaatccagctaatgcaggacaaaaagtcttgaaccagattttcttttcactccctttttaataggagaagggaactccataaccaaggcttagaccctcttgaggagagaggaacttgaggaaaccataaaatcttacctttttcagactcattaacttaaaatggtttgaaatagcttctggaggaaaaacatgatatagtgaagcttctactctgtcttttgggaatttatggttgtccttataaatctcttcttagtaacaggcaaaacttgttaatttagagaattaaaacatcctctctcaaaagtgaactacattggcttttgaagaactgtgagaatggccaggagtagtattttgccagtatgctgcctttgctaactagcatcatttaagaggacctaaaataagaatactttattaaacatacgctataatccatacttactaaccatagcgcaaattaatgttaacataccctataatccatacttactaaccatagcacgtgttaatggaatggggcccgacttttggagtagcatttgtataaaccctaaagggttcaactgaggctagttttcaagtttattgctgctttaatgaatcattaacctcatactcattggcctagccatgaaagtaaatactgcagactttttttactttgctagcaaaaagtttcatatataataggttagaatagcaattgaaatgcaaagtaataagtgtattcccttgtagaatcatcctgggcctcatcttgaaactacatgtccagtgaaaaatatcctgtctggttatattatctggtcaatgagagtttattacatgaggtagagaaaaatgtctgctcataggtccaaataggagttttgaattctaattttcactgaaaagtccttgcaattttacaacattgaaaatagagacattttgctcttttatgagatgtctggcctttacctgtttttctcactaagagctgacttaagttggaagtgctgctagccagggagcaaaatcacctggtgattgctaaggcgacatataattcattgagtgagaagggaagctgggctctctctgccttctctttcagcagcctgccaggtttgtgctaacagcagtggatgctagttgctccagttgtaattgtctagccaatgatgattatcttctgatgtcggctgacacggtgcccaccaataggaaagcaggaggcctgtgctgactgctgtaacattatgtatgtgaggtgacgtcttcaaagggcttgcctagaacttcatgaaaccctccccctctcctggcattctccacacatccagcctttcaaagctttatatatttttctgacttttctccccactcactcccttggtggtgtaaaagggtttacttgttttaacattttgtattctgtattatagagtctataagatagtataggaattttaagaattaaatgctgttcagctgaggaagcctttttattcacaaatttgtttttaccaaaggtaaaaatggagtgaaacattttattttattttgttttatttttgagacagggtctcactctgttgcccaggctggagtgcagtggcacaatcttggctcactgcaacctctgcctccgggttccagtgattcttatgtctcaacctcccaagcagctgggattacaggtgcctgccatgacaccaagctaatttttgtatttttagtagagatgggaattcaccgtgttggtcaggttggtcttgaactcctgacctcaagtaatccgcccacctcggcctccgaaagtgctgagataacaggcttgagccactgcaaccggccgtgaaacattttaaaaggagttgtacatctatatcttttttgtaggtgaagtttggaaagtaacacgatgtacaatttcatgattaaagaacataaaaagcactaaaaacctgtgttagcatttaactcaaatatagcagcataaaaaatatagcagcataatgttaatgaaactgttcaaatgcagacatagtatttggctgttgtttttcatttagtgaggattgctttgaattgcttcctgaagtcttccttgcaaccttctacattcatttgtaagaaaaatggctggaaaacagtgcatctgtgactatggaacagagtaggccagagtttcatttcatcattaacattgcagcaacaaatttggtcagctctgtaggaatatagtgtgtctatattgtactcatgtcacttgctgtttattttgaggtatcacagttcatattgatttaggattaaaacttgtgtgaggatcataacatgacattcaataatttttagaaagcactgggatgtaggcatatgtactaggttaagagtgagaagaatgagaaaatacatagagaaaaaacgtgtaatctgtgtggggtcctagaaaataatgtaaagttgtgctggagctttgatatgaactttcatgtatcttttaataaattataaatattcatgcaattcttgtttaggattccaaaggatgaaagccagcttaatgcaaaatattttatgattatattatccatctgtgtatttgtactagttataattagtgcttaaaattttttcatgaagtctttttcacattggaagtaaaattttgtgatcttcagaggattgcctgtt

SEQ ID NO: 112645 - DNA, 2034 bp, Homo sapiens
gggcctgggttagcgtgaatctaagccagagctcccgggtgggggtgggggtaggggtgggggtggtcccagaggtagggcgaggaggtgggaagcgtattcccttcactggtgatctcaacgtagatttgcccggagttctcttgcaagagagctggcaggttttactatttcccaatcgtttactcgccaagctctcgggtccacgcgccgcggggatgcgccctgcaagctgaaacttcattcaaagcaaggcggcccacgaggttgggcttaggggatctggatgacctccaggccacttcctttctctctgcgcccttcccccactcttccaaccaccttcgctgtaaacaaaactgtcccccccgggcggagagaggtcgcgctctttcgcacactccctcgccaagggttaatttctcaaatcgcacgagggggaggagatttccctgtagacgagtaaaaagggtgatggacaaacgtgcgggcactaagaccgcaaggcattcatttcctcctacggtggatgcggacgccgggaggaggagagccccagagagaggagctgggagcggaggcgcaggcaatgctcagccctggatgtagctgagaggctgggagaagagacgaccgctggagaccgagcggcgtggggaagacctaggggggtgggtgggggaagcagacaggagaacactcgaaatcaagcgctttacagattattttattttgtatagagaacacgtagcgactccgaagatcagccccaatgaacatgtcagtgttgactttacaagaatatgaattcgaaaagcagttcaacgagaatgaagccatccaatggatgcaggaaaactggtacgtgatgctttcgcctgatactgttcccgggagccctgcgcgtcttcccggagtgccttaatgtcggtattccctgcctgggcgtgaatggagcgatgaatcgcgggcagccagctgatcgctgagttctcgggtctcccgggtgcaggagacgctgggggggggggggtacatgaagcgcgaggtctgtgggtgcccctgtgtgaaccgcggctacataggcatcttttatatagattatataacacagaacatatgtgtgtgcacagggtgatgtctgcgcgacagggaaggcgggagagatgccacagtccagatcgcctacctgtgctcccctcccctcccccggttttcatctagatttgggttttctcgcttggcctctcccgcaaccggagtgtgaaaggcagtggagggaggaccttgtctcctgttgcctttaaccctctcccgcccgccgcccttggccctggtcctcgctgtctctccatccctcgtgtccttcctttctccttgcagcgctcctacttcaccgtcctcctctgtctgccgctcctcaggcggatgccccctttttagtacccctttccccacgcggttccctttccggtttcatagagagaccgggtgggagggaggaggggacaatgaaaacagtaataaatgaatgaacccgagcgagtggagccacgccattattaagtttctgttttacggaaacgccttttggacacacttctaattctgtgcgtagctgctgattggagttcaggcacacagattaaaagcccctccgtctgcagagtccttaggggctcttccctaggaaactaataatcagggaaaacacctttcttgtttactgtagtccccccgccagaccttttgaaaatccctgtgtgggaggcgatccagtgtcaccttgcaatatttaacagaggagggtgtgctcatctcgcttcttgtagacagggttgtggcagaggcattcctctcctccccttaacttcgggtctggcgatctgtaaagttcaagcccaacgcaccccggagctaggcaaggggccggcagcccgggggatggcttgaccggggagggtcgggccgcagggtctcccgggagccgggggattccgcccgccgcgtgcgcgagcgcgcgtgccccgcgcc

SEQ ID NO: 112646 - DNA, 1118 bp, Homo sapiens
taaataatagttcattgcctggatgtaccagtttattcattcacctactgaaggacattgtggttgcttccaagttttggtaattatgaataaagttgctaaaaatatctgtgtgcaggtttttgtggagacataagttttcaactcttttgggtgaataccaagcagtgagattgctggatcatatggtaaagacatgtttaattttgtaagaaaccgacaaattgtctttccaaagtggctgaaccactttgtattcctactgtcaatgaatgagagctcctgttgctttacactgtcaccagcatttggtgttgtcattgccagatgtggcaaagtacaagttgcaaatcaaaggtcagtctttaggacatcaaaattgcaaatctttaggggtttcataggattgaaatttcataaggctgaaatcacacctggtatgatacatgatattccagataaagggatgagagccatgaaattaattgagctgctttcagaatgcatcagatatcaaaataaagaactcctgactttttttttttttttttaaagttagggtagctagtctttgaaaaggatcaggtactatttggcttgatttccccaaatcagaccacaggtcagactattaaattagttatagagtatatacccctattaaaaatgggcacattgaatttgctcctagataaattgatctatatgaatcttgagaagggttaaagaaaaaaaatccattcatacatacacagaaaaatgattagaaggatatatacccaaatattaaagtaattatctttaggtgataggattatgagtgatttttcttttctctttcttttattttttatcgatatttatataagattctttaataggcagggactaatacattttatttgaaatacatgccaaggccagatgtggtggctcatgcctgtaatcccagcactttgggaggctgaggtgggcagatcacgaggtcaggagatcgagaccatcctggccaacatggtgaaaccctgtatctactaaaaatacaaaaattagctgggcgtggtggtgcatgcctgtaatcccagcactttgggaggccaaggcgggcagatcacgag

SEQ ID NO: 112647 - DNA, 1046 bp, Homo sapiens
atggcttcgggccgcagttcaatgggctcatgcagccctacgacgacatgtacccaggctattcctacaacaactgggccgccaagggccttacatccgcctccctatccaccaagagcttccccttcttcaactctatgaacgtcaaccccctgtcatcacagagcatgttttccccacccaactctatctcgtccatgagcatgtcgtccagcatggtgccctcagcagtgacaggcgtcccgggctccagtctcaacagcctgaataacttgaacaacctgagtagcccgtcgctgaattccgcggtgccgacgcctgcctgtccttacgcgccgccgactcctccgtatgtttatagggacacgtgtaactcgagcctggccagcctgagactgaaagcaaagcagcactccagcttcggctacgccagcgtgcagaacccggcctccaacctgagtgcttgccagtatgcagtggaccggcccgtgtgagccgcacccacagcgccgggatcctaggaccttgccggatggggcaactccgcccttgaaagactgggaattatgctagaaggtcgtgggcactaaagaaagggagagaaagagaagctatatagagaaaaggaaaccactgaatcaaagagagagctcctttgatttcaaagggatgtcctcagtgtctgacatctttcactacaagtatttctaacagttgcaaggacacatacacaaacaaatgtttgactggatatgacattttaacattactataagcttgttattttttaagtttagcattgttaacatttaaatgactgaaaggatgtatatatatcgaaatgtcaaattaattttataaaagcagttgttagtaatatcacaacagtgtttttaaaggttaggctttaaaataaagcatgttatacagaagcgattaggatttttcgcttgcgagcaagggagtgtatatactaaatgccacactgtatgtttctaacatattattattattataaaaaatgtgtgaatatcagttttagaata

SEQ ID NO: 112648 - DNA, 1425 bp, Homo sapiens
acttggctcgacaagcagccgccctggaaggagaggcagctgcaaggagagcccagcgccgcggctacaaagcactagggtggagctgcggaatagcgggcggggtgggagggcgttttcgaaggatcccagaaaacccatagactctgtctttaattacttgccatttctaccctaggccatctaaactttgctcaggcgagaagagtacgtgagaggcccgttcccttgatgtgcaagagagctaatgaaagactgaccttgctcaaaaccacgccgcccaggacccagctctggctctggacagttaaactaaaaccattttcaacttcttcccggccttttatccaccagcatagcctcatgccttgcacaaatgccacccagagagtgtcttcattccctctgatttgggagagcattttggtctttattctttttatcgttgttttcttctttttgtttgctctgctctaaccgggggctttattttttctacccagagcacttaattttttttttttaacagcaaagcctctggatgccgcttgatttgcttgattctgttttctgcttccagaatcctaacaaatttggaatcttccaccgaccagcataaaccaggacgttgctattgggttatttatttgagctcatttttgccaatccataaagtacagatttgctacaaagttaaggtaagccctttttacaaaactatgattataatttagaagagggggtgtgagtttcaatttccagagttcaactcctgagagaagataaataaaccaagcagaaaagtctttcttctttttttctttctccttctaagaggactagtagttgtgtattaaaactttgctcccggagatcacaaaactaggaaatagggtgtgtgggagagacctgaatggccgaaacaaccgtaaagaaggtgtaagaagcgcgagcccaggagggaaaaagctgggccagggccgggacaaaggtttcccagggagggccaactcttccgtgtctctggcgggttttccttgttaaaggctcacaggttggagcctgttcgcggctcttggcctggtagggattttattagctctgctctggcaactgcaagccaggaacacaatgtcctgtgcaggggattgcccatgcagcccagctcgtgagatcgcgggatggcggggcagtgagccggtgccgctctgggagcctgagccagggcggcagtcctgtcggcctcggagagggaactgtaatctcgcaaccaggccgccgcgaggccttctgcctttgcaaagctgcgccccaccggcgccctcccaggcggcgctgccttccacattctctcctggtctacttggcctgtacctccacaacatcctccccccatccctcccagactccgtgctggctcctacc

SEQ ID NO: 112649 - DNA, 1009 bp, Homo sapiens
agctcctggagctgctggctggtaaagtgagtccgctgccgcctttgccgcttcttcttagacgggtcctcggcgcccacgtcctcattcttcccctgctggcttttatctttctctgaaaacgaaacacacacactttcccgtcagcatgcccacctgcaacgcggacgccaactggaccggcggcagaagccgtggaagagctgggctgcctggcgccggaggagggtgcgcgcggcggctccgggccgcgaggagcgctgcgcctgtggggtgtgcaggcgcaagtgtgggtgtccgcgccccatttcctcccctcccccagcgccgcacgttttatttacatgtttatctcactgcagcggcacattcacttttatagcctgtgctttcaagtatatttatacacctctgcgcagacacaccaaatctcctgggacgcgcacacgcgcgtggtttacagacccccctccccctcgcagaaagctcagatttccatgcggtttgggaaggctaggaaaagatgtggggattcggttgggcaccgaagttcgccggccctttcccaaaaaaaaaaaaaaaatgcctcttcgcgaagggcatttctgagtggtttcaggcaatttcctaacgagtggagctcctcgggagctgaaagccgagaggaaaacagggacagaggtcggcggcctctgaaggtcctcgaatcaagatgctgggatttttgtgacccaggaaacagaagggaggccagggtacgaatagagagggcggcagaattgctcgcgcccttagcgccccaggagccgggccggtcgagggagaactaaagggatgcggggtagtcaaaattccggctcccggaagttctgcggggagccaggcgaacgaccactcccaccacgcctccccccggaggggctgacttccttggggcgagagggagcgggtggcgcagagcagctgagcgggaatgtctgcagggcggcgcggcgccttacctgcggcc

SEQ ID NO: 112650 - DNA, 1114 bp, Homo sapiens
tgaagtattatctgaagcagggctgaagcagatgtcttgggagagaaaacagtagcagcataccagcagtgtgagctgccatagtcaggcctgggtcactcagccttaatgagatcatgctgacagccaaccagaaaggcagagctgaaaaaaaaatttcattggaagcattggagccactgttgctaagctaaggccagcttgcacatgtgacttggcagagagttctgcgaattcataaatcttgccagatttagggagctgggggcattgaaaaatgaccaagacccatgtagtcatggaatgcagtctacaagtgaaaatgtcattttgttttttgctctaagcaaccaatttccccaattcaacaattgccaaaatatgcccattacccttttctgacttctactttcattcatcagtaaacatttaccaaacaaacatctataagtcatgtgttatatgcttggcaaaggaagaggtgacatgggttctgacccatgaaagcatgtggaaccctagaagatgggcctgggccactactcctagtctgcttgagcagtttcttctagctcctgttagaggcatgccatccccgaattctcttcacctgtattactgtcaagttagaataatggccttgtgtttggattgagcatggtgaaaaaagatttttaccatcatggagagtgtctgagcagtagtgaaattctactctaattcatccctaccacttcttggaaaaactgtgaggctccatatcccggggggttgcataaagggaggaaaagagggtctttatgaggctcagagttgagttgagggtctagtctcctaaatatcattttataaagatcttttcagtaataaaagaatccctgaggctgtagctcctgggctaggccttccgatgggaaatacagaaggccatcagctcagctgagtacaaagagtagtgattctgcggggagagggttatggcagcggggcagggtggctgaaaggatcaacagccattatttttaaatctccctggatctcttttgtgatacttaaattgtagagtaaagaacaagatgtagtaggaaaacaacactttggagagaaagcacac

SEQ ID NO: 112651 - DNA, 1039 bp, Homo sapiens
aattatgtatattcatatttttgtctgttttattagacatatcatcatcatcattatatatcatcatcatcattatatattagacattgtgaggagtatgaaaagcttaaattttggtcctttttctttaagaatatataatatgctaaaagtgtagattttgaatggtctcaccacaaaaatagaaaaagtatgtggggtgaaggataggtcagttagcctgacttaattattctgcaatacgtacaagtaggataacatcacattgtatcccataagtatatacaattattatttgtcaattataaaagtaaaagaagtaaaaacaatacacaatctggccaggaatatatggccctttcatgttaatgagataacttcaatgctggatgctaaactgagtgccaactaagttgtgaatagaatttaaacgaagtcttaaagaatggtcaaaatgtaaaaaggcagaaatgagaagcgagggtctttcaagcaaagaaatctggttgagaatcatgtggagataaaatagattaaaggcatagctctggactcattaggatcatctgaggagctttaaaaatctggtgtcaaggccacactctagagttatcaagtaagactctctatgggtgggatcaggaatctgtacagtatttctaaagcttcccaggtgattgattccaaaggacaataaaggttgagaactgctggagtgaagcatgttgtaggagctatcagatctgcttgggtacaactgcagtagagaaaagaagagagaggaagcaatttgaacagaaacaaaaatgctaggccattgtgtgaaatcttataaattttagttattgagaatggaatacaactagaaagaagaatgaattactttcctcagttgatggtgactagaactgtgtggcaattaattgtcaaaagaatgctggctatattgtggagatgatgatgacttcagtttaaatgtatttattttaagctaacagtgaggcattctgttaagtatatctattgtctttttgtctac

SEQ ID NO: 112652 - DNA, 1065 bp, Homo sapiens
ctaataagctcgcaaatgatgctgattctgttggtccaggaactatgctttgaatagccctgcaaatcgtaattttttattcgatatttgtaaagagatgaaagaaaattaaaaggcttggcaagcaaaaagaaatgaaaagtaatgtgtactcggtgttcatataggaaataaaacagtgtaatgactacttcgaaggaaaaaaattcttccaaaacgtaggccacatctacccaacagtatgcaaacatttggagaggaaattaattggtacatatggctgtaggtgttcatttctaactaaactaaacagtccatcaaagcctttctttcagacatttaattaagtaattctgaggagattatgtcatttaaatatttcttgtctgggggtcagggacccacttaggttcaggtatctcttctgctcatctctaaatccttgtttagcaactccacccagaccattaacaaaatccagggtaagcttgtcagttaggagtaaaggagagctgtttgggacaaatagtataattcagtttgtaaatgtctttacccttgaagtggagatctgggcaatcatcttaaaacgataagctccctaatggcaagttcaaaggaaatctttatccatccctcaaggctcatcttaaattgcactccctcattaattctttcctgattccatcaacagactgtaagcaccaaatccttatctcactggcagatctcttaagatataacctactaattccgaactgtaatgttatttgttgtattagtgtggatccaatcacacagtgggttacatagaagaagtataatataaagaattattaaactctgataaatgaatatacagaaaaaaggacagtaaaggaaaactataaggaaccctagggctgaataagagtatcaaggaagaacaaagttgtaagggggccccctccccagacctggggttcagacctcattggagaaggtatagtttagcctgataactgaaacagaaaagttcactggtttgcattagcccgagctggtctggggtcactaggagagcag

SEQ ID NO: 112653 - DNA, 1054 bp, Homo sapiens
agggactctcccagagcacgttcttcataaatacagatgagatcaaagcttcagttaaaaagtggagaggcaagaatattgctttcggttataagaggccagccatagtaagggaaaagagaagttgcgtaattttttaaactctctgagtttatctcatttaaataaagtgtgataatgggcattataacatcaaatatcttaaagattaggcaaaaggtttaattttaaaaattgaattgtatgttggatgaattttctacagcaaatacagtatttagactttccaaatacctgaggtaagccgctctttagactcacattaaggagcaggaattcaaatgattattggcctttattacagcctgtactgttaggacaattaatacctgtctctcctcatctttcttcatctgtcctttctgtcacgtttcacaaattccagtatcatcactaaatgcattaatagatgtataccttacattgtttcaataggttacttaggaaacagagtaatactgtgtggcacacaaaatatgccttagcgttaggtttgatcaccacgtggagtgtaatttttcatctgtgacaatataagagaaagtgactcaagcaaataatttggtagcttgttcttcggattcccttcctagtggtttttcccgttaactattcatttgctcaagggcttgatttcctctaacttaaattgcttaactggaaaagtgaagaagacagcacaagaattcctttgggggtggggaggggttgcatttgagcaggggtttccaaagtaaattttcaaatagttgtaagggagcatataaaaatacttcatttaagcttctgtgtacttcattagtatgattatgtagacatcactaatagttgtggtctttccaaaattgcttatggtacaaagtaaaaggataaaacaaaaaatgaaaagtacatcttagaaaacatatcactttgcatacctgcctccttcattgaatgtcatgaaagttcattctcctgtactcctttgaagtgttatttttatcattctgtt

SEQ ID NO: 112654 - DNA, 2053 bp, Homo sapiens
aaatagtattacatgtgtaaagatatttgaggaagaaatgaaattaacaactatggaacatatcccaaggactcattttatttagtttttatttagggagatgatttttgtttgtcctgttggttggtttaaggatacaaggactccagattacaaatggaatatttttgaaagattggtttctaagttaatgatttagaacttaaggtgaacttttccatgaaaacaatgatataaacaggaacagaaccaaaactaattagctggaaatgagacagaggccatcttcctgccgtcttttctacttggcacgctcacttcgtgttccggagtcatggatagcctcatgggtattgagaggaaattagaggcaggagctagcagaggcgctccttttaacccagaaaagagctatggttgtatgctcttgaacaccatagctccagaggcacctgacttgtgctcctctagctctttcaatgattttgtcaacacctaattttctgtattaagtccctttctatttctattcccctcacagagtttgccctttcctaataatttgatggaggtttctttcttgggctatttctcaagctaaatcctcgtccacatacatcccttccttcactgatttttctttccacttctgtctgaaaggttcattccttttcctcaacctggaaagctctttcatcagcttgttattacaataccagaacaaaatgtatctttattttgttacttatttcatatatatatgaaatatataaaacacctagtattaacataggtgttttattactagttaagatattgtctgcatcatttttaacaatttgtctttagatgctactccatttgagcaaaaaatgaaggttcttctgtcattctggcctgagtctttccaggtagggcgattgacaaaggatgcctggttaaaatcaagtcacttaagaaaggaggccttgggagaatgaatcaagtcctgtagatgaagaaactgtgccaggtttgaaataggatcaggtgtctaaagagagataagcaagggaaagaagcaatttcagggaatgtccaagaaactgaagggacaggacacagctattccatatatgtgttggtaattgtgtgtatgagagatgatccaagtatgttcatgagggtgaatgccaggtggctttatgtaagagtttctgtgccctgatgcatagctgaaaggctaaacatctctagtccattattatatgccttaaatgtcaatagcatctgcttagatgtggcacaatgtacaggtcactcacaatctgaaataacctaacatgaccctcttacctagagaatagggaagtcccattatccttagattgactttcgaattattaactctagctttaacgtctttatgattataaaagtaatgtgtgctttggaaaattagaactatagaaagatctaaagaagaaaaaagcctttgaaatcccactctattttgggattttgatatcaaatattttgatatcaaatatgaaacttggtattactacagtatattcatttgtctatgtgtatatgcatatatacacactttttttttgagatagggttttgctatgttgcccaggctaatctcaaactactagcctcaagcaatcctcccgtctcagcctcccgaagtactgggattacaggtctgagcctctgtgcccagccacacatgtatttttaatatgttttaatataaatataattttgtgtcttcttttacaaaaggttgtgtcattttcccatgttatggaaattctatgtgaaaactctctttagggctgccaaataattcattcccctaacaccgcacattgaagttgcttcaagctttcttttataaatcgtgctgtctgaaaatatttgcttgtaaatccttaaacttctaccctggtatagattcctagaagtagaagaactaggtcaatgagtcaaactctttgaagcctcttgaaacatcctaaagaatttaattcaagaaaggttgtactcatttacacttgcagca

SEQ ID NO: 112655 - DNA, 1067 bp, Homo sapiens
tacatgcattgtataatgatgaaatcagtgtatttaggatatccatcacctcaaacatttattatttctttgtgttgggaacattcaaatattctcttctagcttttttgaaatatacaatatattgctgttaactgcagtcactaactgtgctattgaacactagattttttctgactgtatgattgtgctttatcaccccttttccccccatacatacatacttcccagctctgttaactgtcattctactctgtctccaaaaaatcaacctttttagctctcacatatgaatgagaacttgcaatatttgtctttctgtgcctggcttatttcacttttaaataaagtggtcatggaagagctcactgaggtaatagttgagcaaagacccaaagtaaatgagaattacctacttggctgtgcccctcggtttgctttgactctttagtagagtaaagcaatttaagtcccagtcttagtaactatggtaacatatctttcttcaatctagattctcaattctttctcacaatccccacttccagttctctatattttgttgctattttatttgctcctactgtaagcaaacgcaaattctttgtggaaagataggaggaaaaagtaaattaactatggacttatttcagttagcaaatttcctcttttaaagggtgcatttattataccaaagccagacaaagacacatcaaagaaagaaaactgcagaccagtatctctgatgactattgaggtacaaatcctcaacaaaatactagcaaaccaaattcaacaatatactaaaaaggttattcatcatgaccaagtgcgatttatcccagggacacaaggatagttcaacatacacaaatcaatcaatgtgatgtatcaacagaatgagggataaaaaccatatgatcatttcaattgatgctgaaaaagcatttgataaaattcaacatcccttcatgattaaaaaacactaaaaaactggatatagaaagaaaatatctcaacataacaaaagccacatatgacagacccacagctagtatcatactaaa

SEQ ID NO: 112656 - DNA, 1082 bp, Homo sapiens
ttaaatttttttataattaaaaaaaaagaagaagaagcaggctgcaacagccacagcttgcccagacctgtccttactgggtcttcagcttccagtctcaatcccaccagctgatctcaagatctgagataatgtgagcattgctgtctcctcgcctggcctgatttactaactctctgttttgatttaagtgttgcaacacctccttcttcccctgaaaaacccacaagcatttgtagatttaatttattttacaaagaatttaaaccttcagacagtacctaccacatccagattagggtactttcttcgtactaaaaccacaaaaatactgaaaaaaaaagtcttaaaaagcttcagtaacaacaaaaaaaaccccaaagtacaatgagtgcatagattacaagaaattgggaagagtaaaaaaaaaaatttttttaagaactttaataaaaaatgaagaaaaaaaggccagaaacagtatcaacatgctgaacactggagaaatagagagggatgagggatcagcagaattacatactaaatcgaggactcttcaagttctaccctaaagaaaagaaagctttaatattaggcaagaataagggtttttttaaaatgtagtatattgttatggatcatatcaaagtacaagaaacataaaattgacccagtcataatatatcagtgaaggaaaaaataatttagaaatcaattttttaaaaaaagaaaagatccacaaattataacttaagagaaaactatcagtatcaaaaaaggatcacataaatcattttatggattagaaaactgaagttcaggaaaagtgaagtaatttggctaaggtcatgtcactcagttaaagtgttgcagcctggatgtgaactccctagataactctacaacattttgttcttctcactctttttctgatagaagtgaaaatccaaaagtaattttaaaaattatataaaataggccgggcacagtggctcacgctggtaattccagcactttgggaggccaaggcaggtggatcacctgaggccaggagttcaagaccagtctgaccaacatggtga

SEQ ID NO: 112657 - DNA, 2130 bp, Homo sapiens
atttagggcatctatataatgaacaggaaactatgcaagggcctgcgctgaagtctgcttagctgagcctaagacaaagatcacagcagtagtggctgaggattgctcaataataacagcaaacatgctttggtcatctgaggctcggtttcttaacgtcttagtgtcaaaggaaccgtctaaaaagaatcttaccaggacagagcagtcaggccttgcctcataaaacaggagggtggcagaaaagggtgttctgaaatcatggtcactcacaagagaaatacaaacatgattcttcacttaagcagtcatttttgtgcaattccaggatcaaaaagaacattcccattgtgttaacaggtacttgtagaataattatcagaagtatgcccagcactttggaagatgaagaactaaggttcttaaagacgtttacatatttctcatgttatgttcatgttttgtctttttttttttttttaaaggatgttgaagactcacagaaccacactggtgagccggttggagatgactacaagaaaatgggaacactttttggtgaactgaacaaaaaccttatcaacatgggcttcacaaggatgtattttggagaacgaatagtggaaccagtaatagtcattttcttttgggttatgctgtggttccttggcctgcaagcccttggactagttgctgttctttgccttgttattatttatgtgcaacagtaaaacatggccgaattgaattgtttgacatttggtagccatatatgtaattgaagaagttatatatttcactttttgacaaccgaaaaagtttgccttgtttcaaatcatgtgctggctgttttgtaagtaaatttatacatggatgtcacttaaaactaaactcttgatcataacagggttgaatatatattttgaatatacattagcttattcaaaactcttgtttcactactgtgatctctgtctcctttatacacctctatccccatgccaaatcttaagtaacaccaccagaaagtgaacagggaaaataacaggacatggaattcaaatcaagcaatatagttcttataaagagttccaataaaacatttcagaagaaaaagtatgaaacaagctaaaagtaagtttcacttagaaaacttctccccactcacactccccaccaaataatctcatattatttgggaaatatttggatttcaattgtccctacccagcctaaactaaggtaaatgataattagcatacactaccttaatattgtgatgaaaatcagtaaagatagaacgttttctaaaggtcaaaaataatatatttattattactggggaaagctcccaggttaaatataacttttttaaaatgtaacatttggacctagacctactttaatatatcatttgaagtttcagacaattttggtgctaattactttttgtgagtttttaaagtctcatagcctagttgactgcaccctatggtaatgccatattttcttgtatctaacaagttgcatattttttcctagagagacattttcagtgtatttttttttagaaatttataattttatagttctttcataacacttattctgagttttgaaacaatgtatttcctatcttgacatggattttttcacaaaaaatttgtattttactgttgttttcaggaaaaaaatcagatcatttttctttgatatctatatcagaaaggtacaatattaacagtataaaaccaaatgcttaaatttggaacttagccaattttgataatctttttctaaggctaaagtcacatcagtaattggctagccatgttattaaggtgtcttaattcagcattttcaggttttatattgaaatacgcatttctttaaatattctttgaaaatggagaatggctttagtgatattttgggttttgttagagaacctaaaatctttacactttcatctcaaagattataaaggaaaggggggtagttaagatttagaattcaagttaaatttcagaaattggggcagtcaggcatttgtatctttggtagggcaacaagtaaaacatgtagagtgcttgctatcccacttcataaagcttttacccaatcttattt

SEQ ID NO: 112658 - DNA, 1062 bp, Homo sapiens
ctgtacagaatttaagactcctacattcaattgcttgcccaatatttatttgcatttggttatcccatagtacccaagactcagcgtgtccaaacgagcgcagcatccttctcccaaatctttaattcctgtttcccatctcagcaaatgacacaatcctttccctaactgctcaagcaggagttgtagatgacatccttgactctgtgtttcctacactacctacatgtaaccaagtaccaaatctattttacttctaaaaatataatctttctacttctattcattcctagcatcactgagtccattctgccatcatctcacctggcatgctgagaatcctgattagcctccctaccttcattttccactttgtagttacagatctttctaaagaattattctaacatgattctgatatccttgacctaaatcttttcaatggctttctgttttcgttatgataaagtccttatgccttaatatgttttacaaggctcttcatgtactggttcttgcgtacctcatctctctatactgccactctccatttccaggattcaactatactgaacttttccccagttcctttaaagagacatgctttcttacttccagaactttgtacatgctttacttctttaactgctccctaccagactgaccaatatctacacagccttaagacctcaagtgagacatcatgtcctccagggaaacttctctgactcctttaaatccagttttggttcttcattatggcttggtttctcaagtgcaaccctgtgctttccaggtcagcacttctcatgctatattgcaatagcttatttgtcagctgctgctttaataattgattaattattaaattaatcaataggcttcacaagggaagagaacatgtctgtcattctataattgcattgctagtgcctaacacaatgcctgggacataataggccatcaaaatatttatcaagtaaacccacttcatctactcatggtcttcatatagaccactaacaaaaaagatctagagctggttgtactttgaagttcttt

SEQ ID NO: 112659 - DNA, 1825 bp, Homo sapiens
cccccgtggctcctcctcttcggcccccggcggggaatccctttcaccgtcccccggcggctggaggtggcggtcgagagccctgctacactcactgcttagcagacgtcagactggtggtcgtcttggaggcccagtctggggtccggtcttggggcctcctcggaaagaggtagaagagggggcggggtgtccctcctgccagggcgccctgtcacgcggggaaggagtcacgggagacatcatctccaggaaacaaggggtagcttcgcgctaatgggctgtaggaccggctccacggcaacctggacacaccctgcgctgagcttaggtttaacgccaaagctagtatccctgtatctgaccctctctttagccctggcagagcaggtgggatctggctccggagttaatgcctcagattgattttaagtagaagtcatttggatgctggagtaaaataaggttccagatactgatgaactctggtagctacaaagacttgctgaattgcagagttcccaatgggcattcagattcttggtgctcataactacagggacaatgtgtaattttttcgtattaagtttttgaaatttcgagaggaattccttgccctgattgctactcaaacgtcctgtaacattaggtaaattgcagtccttctgaacttcacttctcttgagtaaacctgggatattgcttaggttttgtatatgcaccatccacagaatagtaatttcataattccgtttttgtgtttttttatttcatatatattgaaaaaattagagcaaattcctttggggttggctttgttgttattaaatgtccctccggaattcaaacctagaattgaaaatctgaaccaagccagtttgtgtaaggactaagactgttttgcactttctgaaacagattgctaatttttcataatctgttccatttaactaacattattgggtaataagatgttcaacataaataaattgcagtaaatgatcataatttgaatctttggtaatggagatcttataaaatataggattctcattcattaattaggcattgtgtcacctctctgatacaaaatagctaaggttttacactaagtatccctagaatggaagggcaaggatttgcagtttgtgcctagtgtaatatttcgatttccctaatttatgagttattactcttgagtgggacatgacagttgttttatcttgtcatccaggatcatctggtttaagtatttataatttttgtgtgtgaatgaaacttacaaggtcaagctgcttaagtaggcttgcccaataactagatgccacacaatctttggcttttactattatttgtagttgtgttacagggcgttaaattctaactccaagaaagttggttggtgagggagcagtacttacattctaaatggataagcaaaaaactttatatttgactttggactacatgatgtgtctgtggactttagttttgtttttttcatggggtctccgtagagtacggcattaaaattgtaggttctactccctcagctcgtgagcttggcagcacagggaggtggcaggaggaaatccatgaatcagcgtgagtgttaattgtctgtagatatgccataaaaacataagcaggtggagtatttctttctttttttttgagacggagtctcgctctgtcgcccaggctggagtgcagtggcgcgcgatctcggctcactgcaaccttcgcctcccgggttcacgccattctcctgcctcagcctcctgagtagctgggactgcaggcgcccgccaccatgcccggctaa

SEQ ID NO: 112660 - DNA, 1044 bp, Homo sapiens
tagatttccaataattctgtgtgtattcctcgttcaccattctctgacactactttgttttccttcatggcgcttaccactccatgactttgtagactccgagcatttgtttgtctgttgactgttctcccttaatagagtataaatttcatgtggtcagagactttgtttgttcctgtatctccagtgtaccagcggtgcttgccacatagtaggtgctcaataaatatttgtcgactgagtgaatagactatcaagtgggtctacccacatatattcctgaccttttccaatttatcctgcaccctggaatcgaagtgatcttaaatgcacatctgatactctggtttctcttcagagtcaatagatcttttgccttttaaatgcaaatctgtgacacaaatacaacataaattctgaagtggcttaccaaacttgtaggataaagactgaaatcttaatggagctttcaaggctctgtgtttatcttttccttgcctacctcttctttctccttttatttttttatttttgcttcatgtgtgtcacacttttccttgaatctatttctttcctttttacttagatgactcctattcactcatcttgtagatgccagcttaagaattctttcctacagaagtcttccaaaaccatctcctaccctccagagggtaagtctgcacatcatcatggaaccatctgcttttcttctgtgcatgttcttagtttatagtcatactgatatagtgtgattatttggttaatgcttgtctgctgctctcaataaaaaggaaggagtttatgcctgtttttccataccactgaatgaatacccagctctcagttaagtgcctagtacatattacatgttcagtaaatacttgttggcagaattaatgaatacagtatcttgaatatgtcaggttcttttcactcccccttgcctttggtacctgccgctccctgaaacatctcttttatctgcttggaggcctggctcattcctcggcctcaggctgatttttgatgacacctcatctg

SEQ ID NO: 112661 - DNA, 1052 bp, Homo sapiens
ttatttttctcttgtactttcactcttgatactgctgctttcatattacatccccattgggattctgacacttctcccatcatctcttgttttccagtccgtctcccaaaccagatgatttttatcttgtaaatatttctttaatccttccacttctctcactgacaccaccctagtccatcttattcttgcttagcctcaaatttgattgcatacgttattcatacgttcattctatacgtttatccccgctcactgtttaggacttgtatcattcttggcacttgcaggagcagcttcttatatgaaccaaggtttacttctggttcaagtcattcatttctattcctgtgcagtattgtattatatgaataggccataattacttcacccttctgttgatgggcatttagatcatttccaacttctttttttttctttttcttttacaaactacctcaatttgtgcaaggagataaatgtctctttgtacacatgtgcagaagattctttaggtggatatacctaggagtagaattgctcagtcatagcttatgtacctcttcaaatttactagaaaaataaaacttcttcagagtaattatactactttaaacttttaccaataatgaattttcattgttccatttcctaactcttggtattgtcagatattttttcaatctgttgatgtgaaatgcaatctaatattttgtcaaaactttattgtataatattcctatataccagcaacaaatactgcatattataaaattaccttttaagatagcaatgaaaaaatataagagactagtaatcaataatagatgtgtaagactagaacaacgtttttaaagatgccatctaaataaatgcagggcaataccattttcatgggtaaaaagactcactgtgcttaagatgtcctctgcctatttacttgaaatttagtgcatttgtagttaaaatcctaataggaattttgtggaacttaagctgattccagcaattttaatggaagagcaaagagccataaagagcccacaaatttt

SEQ ID NO: 112662 - DNA, 1398 bp, Homo sapiens
tataaatgaaattaatttgagattcagtaggtttagtcagaagttacaaatatgaaagcggagaatactgttttttagcttccttatttttaagcaattatgtttgcataatagaatcttagattgttctgtaccaatttacactataattttatttagcaaatgtaggaagctttgtacaacatgacctacttataggctaacaataggtctaaaaaagtagggtggctattctcctttatttttagattcttaagcagttactattgaaaatagtagatcagattttcttttaactttaaatgtcaccagatttatatactcctaatttttagtgaaaatctttttatgaataatagttaattaataaaataatgttttatgcataatacaattaaacttatttttttcttataagaatgctctaaaagcatataatgtgaacagtgttatatataaaattagcgcacttttagattccaggctacacatattatcagaacatgtatagcagtgttttcagctacagaactgtgatggattgaacatggagggggaagaattaaggaagatctaaaagatatttatctacacttgaccttggatatatgttgaaaagagcttactttttggagtttagatactttacgtaattttttgtactaagtcctcaaaatccaatgcatgtttgacacataatagcctttaaaattcagactagccacatttcagttgctcaatagccccttgtggctaatggttatcattactggacagtgcagatctatccaataggataacaatagttcataggatgattctgggaagcaaatgaatataaaatacatattttaaaaataagcttcgttcctgacccattgtaggtcctcagtaaatgcaagcctctctttgctctccattatattaatagcttgttatgttttgggttttgtagcatatgtagttggaaacttcaagtcaataaaatattgacctttttttcaaattgaagaaaataaaatgttcttattattctctaaactaacagtaattgagagtcagcttttgtaatagatattgctgcttttgctcattttgcttcctatctttccttctaagactcaattttcacctaagattattagaaatgtacgttaatagttggcaccaaatttctggttttaaactgtgatccagtttccttttgtctcatttttttaatgatgctgccctatatacgtctaaaacttcattcttgaaaatattctcaaccagcacctatataataatgaaatattactacacagtacttgggggacttgaatgatgagttatgtgatttttcctgtggctacttttgctgtcccattaatatataattttaggctgggtgtggtg

SEQ ID NO: 112663 - DNA, 1059 bp, Homo sapiens
gcgtggccattactgaaaagttaaaaagcaatagatgttggcgaggatgtggggaaaagggaatacttagccactgttgatgggaatgtgaattagtacaaatttcatggaaaacagcatgaggtacttttctttcatggcaattactatcatctgatgcatttatctatgtgtttattatcattcattcacaaattgttagctccaaggtggcaggacctttatctgtttgttgacagttgtattgccagcatctagaacagtgccaggcactttagaagcacttgataaatatttatgaaataaaagtgtaaaacttgacttaaggtttaatagttgagtacttccattcctttccccagttgttccgcttacccttcacttacattctcatccttacctaggagcaagtagtgaaggattgattgccaagagcctcattgagaacaaaactgaaggaaagaacagaaaatgcaggatagtttattataggaaacattgtaaaaggtgtattccaaatttgctaggcttttaagcatccaataatatggaaagatttgagttttcatttttcatttcttaatagctctccgaaatctgaaatggtcctttcaaaccattaggacgttggctttctaattatttttaaaacatatatattacatagaatatagaaaagtatgtgaaaagttatggttttatatggctggaagttggcaaaatgtcagtgactgaatttaatacatcacatgtctgagggtcctattcagtcatcaataatgtttgaacaagtaaacataattcaagcatacttgaataagtaacttaattcatggaatatatacatgttatgtttcttggtattttcagataagtcacaggataaagctcccctgataaaaatgttgaccctgagtttgccaaatcgagtatttactttatcagtataatcttagcttttattgtggtaggagtcaagatatgcattttgtgaacaaagtctcaatctaatccattttaaaaggaaagcttgaattttttcccaaatatattttgctt

SEQ ID NO: 112664 - DNA, 1934 bp, Homo sapiens
aaagcatctgacaagtgttaaaagtaagccttctttcagcctccagtagaattcatcccagcatcgtaacacttttcaagagaactcgtgattccatggattttcctaagatgctttttgtttggttggctgaggattttttaatttttgtttttgctaacccctcttctcctctctaatttacttcatattttgtgtttggtttagttgaatgtcatcctgttttgtagtgctactttctaaactaatgtggaccatttggaattttattcctgctattatattttaactttcagttatgaatagtttaaatgtgtaagaaataggcataaacctgaataaatcctgaaaatagttatgctttgctttggaggaaaaaactacagataatttcataaccttgtgaaagaaaacaaaaagttgattctcattattgtatttaagttgctgtaaatgctaaattagtgaatgctgaagcattactgcaggggaaatacaaggttaggttcctgcaagcctctgatcacaatatgttcatcaaccaatcagtatatagcctcattcaatgtgcgtttctgtgtaagacactgtattaaacacatattattgattcattaactttgaactcacagccaatagcacaaactcatgcttgtatgaagcttacctaacacacatattttccccataacacacatcatagctttcttggactttaggaacactggaatacttagaggtcattttaaacagaaatcaccagcaaaaaagcacaaaaatgcaaacagtgtggcattaaatagactgtaaaaaggatacttgtttatagcatgagagctgaaacaagaaagcggagtgtctgtcgccctgttctacctcatctgggaatgtgcattgctgagcaactcaaaatttttactgctccatgcctgtccttgaatgaccaagagagctcaaatattgattttgtggttacaagtaaattttccaagtaggcaaatttgcaaatatagaaactgcaaaaaaatgaggatcaactgttaatataaatgagaacatagagaatatgttgtctcataccatactgaccacagttcatttggtatgtaacaaatatttgttaaaaaaaattaagaaatgtccagcaaatggttttatgtaattaagctagatagtaaactaaattttgctttggagaagtagcaaaattttaaagctttttgtttcaaatatttttaatagtgaaatatatttaatagtgaaatgtatttactctgataaaaaatgggtaagttgaaagtatttagattaaataaaaattgtattggttactttaaatagaatttagctaatgaatttgttttaattgtttaattaatttttgtacagggggagagcccaggaagcagtcataggtaaggctttgttaaaaaaaaaaaacaaaacttctatgcaaactgtaagaaaactctcttaagaagtcaggctttatcatttgcttgctttgagacattaaacagtttacatttcagaactttcagatttttctttttataagattgagacaaatatcatatatctcaaaagactgttttgaatattaaagaatttaatgtaagtgcccagatgctttcctgttgtacctgttatatgttttttagttttcttaaaaccatttaatactgataagtacgtttcttttaaattttttaactttattgcccctttctttccttatgcattctaaaacttattctactaaattttttcacatcttttaatagtaactaaaaccttatgctataattatttaagcagcttttaaatattttattaaaattgcatgtgttacttgaagtatctttaagtcaaaagagcattcttaatttcaagagaatagttttcatatacaatgttatattatgaacaaataa

SEQ ID NO: 112665 - DNA, 1222 bp, Homo sapiens
caaatggaggttttttccttagtttcttctttcttccttccttccttcacatggaagagaggtgcaaacagacaaaaggaataggttaaaggtaaaagagaggtactaattgatagaacaaggtcccagagaattgcctggagtggggcaggagagatgggctcaatggtgagtgagtcaagagtgtaaatgtagtaggtgactctgaacaagttaagaacattcctctttagaggatggtgaggagaataggaaggatatatgtaagtaagtgggggttgccacaaagttggggcgattcatggttgatactcctcatttcttaaagtggagtgaaattgccttttaagataaaaaaaagtatgaataaggaacttgagtatgtgaagatttttaatttggtagtgtaggatatgtgaaggaattgccacatatatataaaaggactactgctggggtccgagtgccaaattgatgtcaggttttctctagcagcctgaaacaggaagggctgaacatggaaatgacccagggtcagaatgtgagtaaaccaagtgaatatggaataatgataggagtgtaagaaggtgagtatgttggtaagaaagtagttcagatctgccttggtgtccatattggttgtaagtgaagcaaggccagaagatgactgggacagatagactgagaaaagggaaggatgaagggcctggggaagccagagtgattaagcaggataaaataggaggattaagaagagttccagaatggtatgacggctgagatcagggtgtaatagtgtactgatgtttatattttatgatgagcatcttgggatatggtttggggtatatacccataggtcagatggctgaagcagagccagatgaaggtaaataaaatccacatttcttaaaaggtagctgtaatgctttaaaaactattctgatattgtatcatcttaccagtttatatactagaataatagcaagtgttagaatgtatactttttactcttaacaattgaagttgtagcaaattgctttaacatttttaacagcaaaatttgagaatttcactggctttttgagtgttttatttggacttagactcatcagaagtttttgttttttctttttctcctcctcctttttttctctaggcctcttactgaggaagaaattgttgacctaagagaaaggcattatgattccattgccgaaaa

SEQ ID NO: 112666 - DNA, 1037 bp, Homo sapiens
aaaaataaatgcacacacacatatacatacatacatatacatatatttgtctgtttaatgtgggtatggtggctaatgcctatagtcccagcactttggaggccaagacaggcagattgctcaagtccaggagttaagaaccagcctgggcaacttggcaagacctcatctctgcaagaaatacaaaaattcacccggggtggtggcgcacgcctgtagtcccagctactctggaggctgaggtgggagaatggtttgagcccaggaggtcaaggctgcagtgttggtgccatggtactgcaggctgggtgacagaataacaccctgtctcaaaaagaaaagtatgtttaggaccaattagtgatttcaaaagcattaacgtaagctatacagtagctgttaatattagtctaaagaaaaaaatttgtgttgaaatttgattttcaagttaactttaacatacaatagatattactaaagcagcttatgtgctcttatgaatagcaagaacttacatttgaaagtaattttttaatagtttgatagtaatgaaattaaggagacatgtgcattgatgttaattagatggcaagacatgaattttgtgaaagctgagttcactttggtcacagtgacgtaattgatcttaaagatactggatttatgagggccaaaaccggcaaactagtgagggtgataggtgttggaatgattgtttaaaatgaagatcactgcagattctaaagaaacacttctatatttatacagaatagatgctactgcttcataactcagtttctaaggaattccgtaatgtgttttatatcctttgggttattttgtaaaagaaaaaatttaaacaattgcaaacatttcaattctgttatgctttgtagagatcaattattttttaataatttattttttgttttataaatagaagcattttatttttagagcagttagacaggttctgatttttgttaatccttatcgttttgttcatgtacagttagccttacaagaagagaagttaa

SEQ ID NO: 112667 - DNA, 1050 bp, Homo sapiens
gatgtaggaacacattacagtctatacagcacatactgacacacagacatacactgacacccaccaagtcatttgattttcatgggaaccctgagtttgctagagcagtaatatagctatctgtaatttataggtgaaggaacagtaggtaaaggccatgccagggatatatagctaatagctatcagagccacaactcccaacagttcttctaaatcttagccaattgcttttattatttctgagtcaactcagccagatcttataaatctgttgttgtattgctacttatttcacccagaatggaacttcatgtattgttttaactattcctttcctgctcctcatttttccagttggttggaagttcttgggtatactaagaatgttaaggatatcaatacatatctgttaaaaaaaagttattttttaataacactatgaatattctggccacttctggattacacatagataaattcagaaaaattcttcccataaataaggggatatagaattgaatagtgatggatttaaggaaaaatatatcaacaaaataacttttttttttagaaactagaaaaaaatactttttggtgttgcatgagtggttttaaaatatataattttacaacagagtgattttttttattacattatgtttccaaagcaagaaaggcagagaattgtgcagcaatatcatccttccaacaatggagaatatcaaaggtaaatagtgaaacatatgcctccttccctttgtggtagaacattttattgcggtgtagagcatcattcacctcaagatgtgtatatacgcattcatgtttatgtgttccctaaaaattattccttctaaaagacattgtcttggaagaaaactgagaacatttaagttgaaacattattattaatttaaactgactttattgcatttttaagagtggtctcatttcccatatagatgtgatacaatagctgaatgcctttgggtgagttgtttataccccagttgtttgtgttttccttagtccctctctttcttataat

SEQ ID NO: 112668 - DNA, 1030 bp, Homo sapiens
cttattttttacttattacagattgacttataagattaaaatatttcctcaggtttcaaaagcaaaaactcttatgcttcccaatactggaagcatagtatggtagtggttccttttgaaaatataggttgctttttgttttatctttcttgttcattgttttttgtgccgctttgtaattgactgttaaaaatattatctagagttaatcatatttgaaaagtttataatcatttatatttgcatgtttgctatgcttagatggcaaaaaaaaagagagaaaagtttctttatactgttcctaacagaaacttaccaataaaatgatttccagaattatttcttatgaagctaaaagtaataataataatatttagagacagataattgttacaaaataaaacggctgttgcggtggaagagtagatgagagtattcaattgtatttcgtgtatattctaggactctcatcagatgctacagttttgacaccaaatacagaaagcagttgtgatttaatgaccaaaactaaatcaactagtggaaatgacgacagcacatccttagatctagagtgggaagatgaagaaggtattttataattcacaattttacctgaaaaatttaacgtaatctgtgttgatttatgtaaatctaccttggtctttatttaaatggaaataaattcaaggccttgaaaaatcatataaacactttttagaccattattgtattggtgatgatctctgttgataaaaatttttagaaaattgcttaatttttaatgtttctttagatttagaaaataaatgtcgatttctttaaggtttttgtaatccaagcccatgacattactcagtatgaaggattactacccccttgtggacagtccaaagccagaagttaaatataacttctcttagaaataaatccacagaaacaaatccaccagatacagatctacaaagttatattagtatctagctcatatttttttcttatctatagaaataacttgttttactgggtt

SEQ ID NO: 112669 - DNA, 1381 bp, Homo sapiens
tgtcattctctgggaaatgaaattatgtgggtaggaaaagactttggcagacatactaacttggctatatgagactaacagcagttgaaatcctccatccattctgttttatttatgagtcttcaggaatttcatcttatcggataatcgatgcatcaaaactgccctttggtgactgttaatatttatttttatctgaggcatacttcagggttagaacccaacaatttcccttaagaaggcctccatgggactgggtctttaagttaattcacacatcaagtctgatagttaaataaaaactacattgctaaatttgggagtttttaaatatagctttattatctgttctgagatttttgaaaactctgttcaaatcataggaatgaatagaatgcttccaatgagagaacgttccaaaacagaggaagacattctacgggcagcacttaagtatagcaacaagaagactggaagtaatcctacatcagcctctgatgattccaatgggctggagtgggaaaatgattttgttagtgccgaaatggatgataatggaaattccgagtattctggatttgtaaatcctgtattagaactgtctgattctggcataaggcattctgacacagatcaacagactcgatagggtaaaattgtgtgaccttgtttatcagttatgaccaaatgttaaaaaccaactagaatgtataagtgattgtgcttagcctttttgtaagggagatgtgtaagaaaccatgttgtaaatgcttattttattacaaaggagtagggatgataggatctgaattgatacagaattaagtgcaatttcatcatctgccttctgcttttcaagaccaatttaatggtcctgtcatgttactgattaaatttactttgtcttgtctttatagcatttctgtttactatggtagatttccactttcaatttttaaaattaattttactttgaatgatttatgaagcctatttcattgtctaactatgaaaatattaagacttttttgttaattctcagccgatgtgaaggaagcatgaggagggatcgtcagattcagatttagaatagtgttcccgtttccagcattatttatttctatgacttctttggattttattatctaatagtaagtacagttgatgtgggtagatgactctaagaaatgctgaagtatcggcattacatgtgtttatttacatgtcctagtatgataatgttgattcaatctgaacaaaagataatataaaaataacccttcagagtttggacatttcaagttggtaataataaaaaataatatttaagaagatatatatatatatatatttagttttttccacttcattttacatgcca

SEQ ID NO: 112670 - DNA, 1055 bp, Homo sapiens
ctcgaatgaagttgtttctgtgggttgaaaatatctcttctgtttctctggtaaccttccaaataccaaatatgtatacaacagatattcagtaaatgcttaaataccattgagaagtttacagatacagtgcatcttatttgatgcattaaacttctaagttagctatgaaagccaagctttaaggaaagagcaggaagcaagcaattattttttgccagtaatagactgtgtaaaagctaatatgtttcacttgcctatttcgatttacttattttttaaaaatttcctgtatcacactgttagctctatactggcaaatattccttcattagctaaaagcaaagaatagaattaacactaagtctcagatcgccatcctccttattagagaaaggagaaaatgagagttcttccgcttgaagaggtaccaaagaaagtaagcagagtggttcaaaaacaataatcatcccctaagccaggtgattggcgttctgagcacatttgctctgcaacttagccgcatttcactcagtcacataactcttacagaaagtgtagaatcctgaaagtctaaaactgtgctcattttccaaatcagcctggtgaaatctagttcttgattctcaaattcagaatttcagttttaagtttaagggcattaaaactgcaagttatagagtgaatagaagaaggcctggttttctaaacaagtctgttggtctctgaaggctagctacaccaaggcctctgtgctttgcacaagccatgaggtgcttaggcgcggtgtcgagaggtaagtcaacaaaaaatgaaatgtgctatcttttctttgcagacacattttgagtttgttctccttaagatcaggcaggactagtagaatcctactgtcgactgcttgtcttacagagtcccttgctgctggcctgtacttagttgtcactctgtgaatagcttggcatgtgggtgtttgctgtctttgcgcctgcaaagtgtgcggacatccaggcggttctccgttaccatctccctgccacttgaggacatgcaag

SEQ ID NO: 112671 - DNA, 1057 bp, Homo sapiens
tctggaattctgtgggaatagtctcattatctgaaacatctggttattacatttccctgagctgtgtaagcaattactgtctacgattcttttacaatacagactgatatgagctcttccttgggccagttattcaggcctagcagtagggacaagttagtattgatcatccagtgaaacccaactgagaagtagctgtgtttacattaggcccatgtgccctaggatgtgttgatccttcaagctctgtggcagccaatttaaaaatatctccaagtcagggtattaattattacacaatgtatatatatgtcaaaatgtcacattgtatcccataaacatgtataattattatatacatgtttgatataaaacatgtatttttaaaaatagtatttttaaaaatagtatttttaaaaattgatttttaaaaatagtatctccaatgtcatagtaataaaatattaataggcaaatagttcatatggaggaataatcatagcctttaggccatggatgagagcagtaatccactgtgaattcccgatctgtgacttctttgtgtttttcttacagggcctctccacgtcgctaggtatactggcagacatctttgtttccatgagcaagaacgattatgaaaagtttaaaaacaatccacaaattaatttggtaattatcataacactgagtggcatcacctgtaaaattgtcaatcgtgtccttggtggttggttagtggctgtctttctcaggagattgggaggcagggagctcagtgctgcgcctcctagacaaatgggaggaatcctggggaggagtcttgtggggtcctatttggctttattatcccagcgcctagcactgtaacagacactcagagagtgctcagaaagttactggtgaatgaatgaatgaatatcaacaaaatgattttgagcctcacttctttcctttcaaagtataacaaaatgcagtttccaaacttgggccatcttgatgataaaggggtaataattttaaaactttgtaatcaccatctgttcaaatcagagca

SEQ ID NO: 112672 - DNA, 1071 bp, Homo sapiens
agagtgttgcctaccacataatgtgagtttggtgcgctcctggttctgagatgctgggtttcacacacattttaaggtttttagatgcaaggaacacaggcttgtttaaggaaagttaaataggatacacatgatacaagaagtggtctcacagttccgagtccagtggggcggtgggagcgatgacagtctgagatggtaggagcagttgtgtgaagatggagtctcccggaggaaatgacaattacctgacaatcacagggccgtcacacctcttcctgtcaggggccgagacattccatacaccaagcttaggtgatgaagaatttgaaatcccacctatctctttggattctgatccctcattggctgtctcagatgtggttgaccactttgatgacctggcagacccttcctcttcacaggatggcagtgcttcagcccagtatggggtccagacattggacatgctctgtgggcatgacccatggcttgatggagcaaggtgggggctcctcagtggaggcttgatcatggacttaaaccactctataggaactcagtatagtgccaacccacctgttacaattgatgtactaatgatagacatgacatctgacttgatggggcatagccagttgaccaccactgatcagtcagaactgagtttccaactgggtttgagcttacggggtggcaccatcctgccacctgcccagtcacctgaagatcgtatttcaaccaccccttcacctactagttcacttcacgaggttggtgttgaggatttctggaggcaaatttccagccagaagacagtggtggtggaagcagggaaaaagcagaagttcccaaagaagagaaaaaagaaagatcctaatgaacctcagaaaccagtttcagcatatgctttattctttcctgatacacgggctgccatcaagggacagaatcctaatgccacttttggtgaggtttcaaaaattgtggcctccatgtgggatagtcttggagaggagcaaaaacagatatataagaggaaaactgaggctgccaagaaagagtatctga

SEQ ID NO: 112673 - DNA, 1012 bp, Homo sapiens
ttggcttggttccaagtctttgctattgtgaatactgccgcaataaacatacgtgtgcatgatttataatcctttgggtatatacccagtaatgggatcagcaaactgtcgaaaggacaaaaaaccaaacaccacatgttctcactcataggtgggaattgaacaatgagaacacatggacacaggaaggggaacatcacacactggggcgtgttgtgggtggggggaggggggagggatagcattaggagatatacctaatgttaaatgacgagttaatgggtgcagcacaccaacatggcacatgtatacatatgtaacaaacctgcacattgtgcacatgtaccctaaaacttaaagtataataaaaaaaagaaaatctatattttgctttactgtgatgttatgaaaaatggaataaagaggagtgttttaatataattctttagcttgcatgctggctcagaaaatgaaagtgaacagttaaaagaactacatgcactaatgaaagaagacctgactcctacggaaagagtctatgtgagaaaaagcattgagcagcataaactggggaccaatagaaccctgctgaagcaggtaagaagtagtagcttcaatttgtttcttgatttatatataccattcagattctcttatttctgttgatgaaataatatttcctttaaataaaacaaactgctatgatagtttatattctactaaggtgcatgcatgtggatccttggatatagtctacccagtgtatgttttatgtttgcttcaaagcattcttcaaattcgtgaatagatccaactcaccatgaccgagtcatcctttctccttctccctgtttactttctttttataggcttgaagaggaaagtatagaggtgggaatagattccttacaagttaaatgaaattagttgtattctaggagaaacagtgatggagaggatctgaccctgagtaaaatatccaaatgaaatttgtgtttgatgctctccaaga

SEQ ID NO: 112674 - DNA, 1246 bp, Homo sapiens
aatgtattttgaagacattaattaattaaatggaggagggagagatggatgaaatatttgttatacctatagaaatttatgtttgaccaggcacagtggctcacgcctgtaattccagcactttgggaggccaaggcaggtggatcacttgagttcaggagtttgagaccagcctgccaatatggtggctctactaaaaatacaaaaattagccaggtgtggtggtgcacgccggtaatcccagctacttgggaggctgagacaggagaatcacttgaacctgggaggtggaggttacagtgagctgagattgtgtcactgcactccagcctgggtgacagagtgagtgagactctgtctcaagaaaaagaaaagaaaaaagaaatttatttattttatgctttttatttttttcttcttttaaaataattaggtgtgtttggagcaggaaagagttacttgctggcagtggtgattttgttctttgtacagctgtttgaaaagagtgaagctcccaccattggaaatgcaaggccgtggaaacttctgatttcttcttctactaatgtggctgttgacagagtacttcttgggtaggcatgacaagtgcatttaagtagctaatgttttgggatattgttgagagaggcaacccactatgggccctgagtgtccatgtactcttgctggttatgccaagaatgcaagacctttgtctctgacccagaagccagcatctatgaaacagtaatgggctaattagcttgtaagtaggataaaatcaaaaccagaactggaaattttggcacagtgatactcatgcaaaaattcaagttcagccaagaacatgtagggctagagaggtattgttgggggaggcagtctgccagcggccctgagcatccctgctgggatgctaaggatgcaagtccctgaccattcttacccaacacatttctcacagtttgtttgcaataagcagctttgactgatgaagtaatgtctccctccaggacaaagagcaggcttgcttattacttgttataagataatggatccccagcctcagtgttcttgccctactcctcaacccacggcatgtgcaggcatctacctggatgctctttgtctcctcatgtgacttgggaaccaagggaaaccaatgcagatatgttgacgattatactgcttcctgtgccataagtaaaagtcctttgtctctgatctagaagtcttgggtctgtta

SEQ ID NO: 112675 - DNA, 1828 bp, Homo sapiens
ttctcatttaagatattaatcatcttaataaattactcatttaagatattttgttatggcagcctgaacggactaataaaatagtcttatgggctagcccatgtcctgccttcttaggccttctgtgggtttatgcaaaacctagggatttccattgtagcaaactcatcttcccatgtgatgtctctgccctccttcttcctcaccctgtaattctgccatctctttagtctttttctgtgtgattcaagtggtactgtattaattgcagaatctgatgctggttcttttgttcagagcactcccaacctttaggttgatagttgatgaattatctttccagaactttacttctcatcttgtgtatgtatatgtgtactatagatatatgtacacacatatgcaaatatatataatttctaaaaatataaaaccatactgtatatgtctgtgtaatatttaaaaatgtttgtcttttcagatgatctttgggtggtttcaaaaaccctagactttgagctggatacttttatcgcatgtagtgctttctttggaccatcatctatcaatgagatagaaatactgcctttgaaaggctatttcccttctaattggcccactaacagtgagtattactatgctcattttagtttatatttaaaaagaatgatagacataagatgcactgtttgattaaagccaacaaaaaggacccaactctagtttcgactgttgtgtacagtgagttcctgaaaatgtgtatgaagttgaatatatagatatttctgtgaggaagaatggtgtgtgggggattgttttgttctaattttctaattagattattctgattttctgttttccatatatttctgtgaagtaattgaggaaaaaatgcaagaaagtgtttaaaaattatacaaatactactctgtggcacaagtgatatgttgattaaaggaaactgctggctgtgaagttgtgctactaggtactaactcaaaacaggtgttcttgttcatttgctgatatatggaagtccaaatatgatttaaattatgcagtttatgcatacccattataaaatgaatgagcagatagcatagtaatttaatgaatataagtttgggatctctgtgtgtgtttaagggtttgttttatgtcatgtgcttaattcagtagctgaactctgagttatgtgggcatttaacacagagtttttatggtccattttatttacatcaaatgtttattttctgcatcctctgtacagtggttgtccatgcgttattggtttgtaatgctagcacagaactgactactttgaaaaacattcaggactactttaatccagctactctacctctaacacagtacctgttaacaacgtaagtcattttttacctttgagtcattggtattaaaaaatggtaatcagaagtaaatatgaaaattcaataaaagtacagtatataaatgttgccaataaaattgtaattatttttcagactatgacattattctctgtcagtggttaaaaagagaaaaggggctgggtgcagtggctcatgcctgtaatcccagcactttgggaggccgaggtgggcagatcaccagaggtcgggagttcgagaccagcctgaccaacatggagaaaccctgtctctactaaaaatacaaaattagctgggcatactggcgcatgcctgtaatcacagctattcgggaggctgaggcaggagaattgcttgaacctgggaggcggaggttgcggtgagccgggtgccattgcaccccagcctgggcaacaagtgaaactctatctcaaaaa

SEQ ID NO: 112676 - DNA, 1006 bp, Homo sapiens
ttatttaattagtaacttacttaaaataatacaataagcatctgtgagcccacaaaccaaatcaaaatctagtacctttataccaacctacatttaagttaaccccattacctcatcttgtctctccaaacccaaggtaattatcattttgatccttgcactcaccagcatttttctttcttctgtgtatagatttatgtaaatgaattcctaaagagctatataaaatttttagtttttttagaccttactaaaatgatgtcattctgtatataatcttttggaatttatctttttttggttagtatgttgctacaatttatccatgttgttctcaaatctagagtctagattatttgttttgactgttgtataatattttgtaaacatgctatagtttattgttttcattgttgtttgggtttctaagttttaccattgtgaacagggtgttatgaatattattcttgtactgtcttttagacatgtatgggtttcttttgaatattactctaggaatgaaaatgctgccttacagcatatgaacatacttcacacatctttagattgtgatgccaaactgatttccaaagtggctctatcagtttgtactcattctaagtataagagatcttatggatcaacccattcaaatgagtataagatgattgcattgtggttttagctcacacttctctgctcaccactgatgttaaaatactcttcatgtgttttttagttacatgtgtttcttcttagccattttactattgggttctttataaccttcttttatttatagaagttctttatgtattcttcatattctttgttgattatgtatattataaatatctgctcatcagatcatgtcttttcacttactttaaggtgtctttagataaataaaaattcttaattttagaatagtcatatttattagtaatcttttctttttgacagtgctttttgcatcttaccttaaaaatcttttcctatgctgagt

SEQ ID NO: 112677 - DNA, 1343 bp, Homo sapiens
ccagactctgtctcaaaaaaaaaggaaaaagccagatatagaaagacaaatattgcatgttcttactcatgtgtggagctaaaaaagcagatctcatggaagtaagagaatagaatgatggttaccagaggctgggaagaaaagggggtgggaaatgaagagaggttggttaaagtgttaaaaaaaaaaaaaaaaggaatacagtagggaaattatagttaacaataatttattgtatatatcagaataactagaagagaagaattgtaatgttcccaacacaaagaaaagatcagtgtttgaagtgatgaatatcccagtttccctgatttgatctgatcattacacaatgtgtaaaggtatcaggatatcacatgtactcccaaaatatgtgtaactattatataccaataaacaaaattaaatttaaaaattttaaaaagcacacgaggtgttctatcttttagatacttttctatctcagtctcttctaaaactgatgacagttctgtgacagttgttattttcttactttgatacagtatatttatattttgtatacatgtatgaaactaggtaaacatatgaaaccctggttcttttcatactgtattttaaagattttcaaaaaacttgcatcttaatattacaattcatttttattttttattcccttttcagaaaaggatttgattttcagagaaaacagtatggcaaactaaagaagtttactactgtaaatcctgagttttataatgaaccaaaaaccaaactttatcttaagctaagtcggaaggaaagatcttcagcttatagcaaaagtaagttgatctgatcatactggcgattcagtctagccttattatctccattacatacagctgtataaattgtttatattaaagaattttatattaaattttaaaagtataatttaatagtaatatgtattataaactaattgtataataaattagaccacttctaaaaaacatatttttaagatattagggctttttatttttatttttttatttatttttatttttatttttattatactttaagttttagggtacatgtgcacaacgtgtaggtttgttacatgtgtatacatgtgccatgttggtgtgctgcacccattaactcatcatttaacattaggtatatctcctaatgctatccctcccccctccccccaccccacaacaggccccagtgtgtgatgttccccttcctgtgtccatgtgttctcattgttcagttcccacctatgagtgagaacatgcggtgtttggttttttgtccttgcgatagtttgctgagaatgatggtttccagct

SEQ ID NO: 112678 - DNA, 4132 bp, Homo sapiens
ggagtcttgctctgttgcctaggctggagtgtaatggcgtgatctcggctcactgcaacctcgcctcccaggttcaagtggttcccctgtctcagcctcatgagtaactgggattacaggcacatgccaccatgtccggctaattttttgtattttagtagagatggggtttcactgtgttgcccatcctggtctcgaactcctgacctcaggtgatccacccgcctcagcctcccaaagtgctgggattacaggagtgagccactgcgcctggctcttgtcatttattaaggaaaatatacagtcactaacataatcattttaacaagttcaaatcatttacaagagtatgaagttataagtaaaagagcttttcccccaattccactcccatcaaaagccactctaacaatttggtatgtattcttccaaattttattcttttattctgtgcttatacaaatatatatattgtgtatatatttgatcatcatattagattttaagatgattaatttctggaagaagcagcagcaaaattaaatgctgttctaacaagaataacatatgaactgtatagctggcatgtatttaacaagttcacttcatttgggagcaatgtcttgaagtttagatcaactatggacttgaggacataagagaaaactgttcagtccttgagtttgcagggatttagaccttcacagctgtaaacatgaggtctaatttggcctgagccccttagaatggcagttgatcttcaggaccaaagcctaataacccagaccagtccaaatcaaaatctgacccacttcaagtaaatctgaaagattttatgctctgtattttactgttattcttgttgattttagtaagtttattctgtcctttttggaagaagttttatagttgttgcccccaccatagctctacataatgtgctttaaatcattatttttataatatagattactagaattcattcaaactaaagaaaaaaatcagaagattttggtctgtagttttgattcttctttctgtataggtgacatcaccagaagaaaacatctctacattgagccctgtttctaccttttctttgaactcaagagatgaagacttcatggtagaattctctgagacgtccctgaaagcaagaactttacctgatgatcttcattttctcaacttggagggtagtcgttaccacattgctctaatatctgtctattcatttaagatgaagttttttatttgagagattattacactaaatatatcttagaaccagattcagtgtcatatcccttgaagcctttccataacctttcttcctttgaactttttctatcatagatagctattccaggtacaatattcccttctagctatctagttccttcttgtttctcctcccaactttgtcaacacagacccctgaaagtatcttctaccattgtcagttcttctcacagctgtaactccagcatctgacccctttacagccctttcctgttccagaggaatgactcattgcaagtgtctcatcaacaccattggttgaccttagcataaccttttagtgtctctttttgctttgggatcctgaactcttcaactgctgctaccacccttgcattcctaggactctaggttttcatatattttggcccttcactatgagtcagcttctgcttcttgatgaatataatactattctctaggatccctttcactaaaatttctttttttctcttttcttataatctcatcaatatatcttcccctgattctgaatttatgttgggtgaggggtgagttgtagatagttttttgattttggatggatgataacaaaaaattctgtaatgtgaattggtagttgggttagaaaaggttttatgggtgtggttggtagaaggcaacaaggtagagaagaatcaaatacaccggagtgggtattcaagaaaaagtgatatggtagtgaacagtagatgattttcacagttataccatgaatcttttactttaatggacttttaacttttctgtcagtgttacttgatcgacttgttagaattacagcatagcactttataaaagaatattcattggctcacctactgctctgctactttccagatgatctccagagtatatttccaacaagatagaaactctgtcaggaaggcacattattataaaataggaatccatagtattgtcagataaaaactataagcttgcataattctgatgcagtattattcatttgtttatatattcaacaaatagttactgcttcttagatttttaggaatatatcactaaagctgctgacacacagaaggaatcattaaactctttcagacagaatttgccatgagtttaccagaattatactcttatcaaacaccattagatcaaaataaagctaaaatctttttttactctgaagggtaacatgataattcatgagtgtaaaaatatataaaggaagttacaatcacatagtcatataaatgaaccatgagcttccgtctctgggaaagaatgtaaagtagatataaaaaactagtctaggttcttatcctgactctgccacttagtagttatgctactgctaagcctttgtaatctcatttgtaaaatgagaatgatgcatttttgttgttgttgttagctttaaagtgctttgaaaatgttaagtgctatataaacataatttagtaattaggaaaaaaaaaggaggagaagaaaaagagggacttcatcaaccctaagaatgtttcagtatatatgaattaagctttgaaatctttattttttgaggttaaaaccattaatttttttttaaggaaataaaataatgtgattttttttttcagagcaagttgctacattttgcttttgtatacccactgttttctagagcctaggtgataactagtagaacatttttatttaatcagcattctgttttctttcagggatgaaaaaatcccgttctctggagaatgagaaccttcaaaggctttcattattaagtagaacccaggttccacttattactttgccacgtactgatgggccacctgacttagactctcattcgtatatgatcaactctaacacatacgagtcttctggctcccccatgctcaatttgtgtgaaaagtcagcagttctttcgtttagcattgagcctgaggaccaaaatgaaacctttttctctgaagaatctagggaagtgaatccaggggatgtttcacttaataatatatctactcagagcaagtggctgaaatatcaaaacacatcccaatgcaacgtggctactccaaacagagttgataagagaataactgatggcttctttgctgaggctgtttctgggatgcattttagagacacaagtgaaagacagagtgatgctgtcaatgaaagctctttagactctgtgcatttgcaaatgataaaaggcatgctctatcaacagcggcaggattttagcagtcaagattcggtttccagaaagaaagtactttctctgaatttaaagcagacttctaagacagaggaaattaaaaatgtattaggagggtctacctgctacaactacagtgtaaaggatttacaggtgaggaaatgtaccggtcttgtggtgcatttttccaatagttattgtctgaatttcaacaaaagaattaccaaaatatactgcataggagcaatttggacagatggctttttttgatcctaactctgagctacagttacatcatcctttacttaaaatctctcgtaatagtagtgaacattgaatgaaatgatttatttgaaagtatctggtgcagtgtctggtaaattatcagtacttaataagtgatagctcctacttttgtttccatcactactaccattacaattattgtttttacttttgactgtcaattgtgtttgctgattaagtcattagggtaaaggtgcatcttatttcacgttaattgtgaataatccttattatagtcataaccagaaataaagatacgtaatgatccattcacatcagttaactttttcctagcaaaaaatatataaaaacttactaaggggcagataagaaaagtta

SEQ ID NO: 112679 - DNA, 1050 bp, Homo sapiens
atcacttgaacccaggaggcggaggttgcagtgagccgagatcatgccattgcactccagcctgggcaacaagagtgagactccatctcaaaaaaaaaaaacaaaaccccacagttactaatggaatgtgtacctctgttgggcactatacaacttctcaaaccttggaatagattaggtaacaccaccttatttcttgttacacgttgattttctcatgataattgctttttatcacagcagtttctcagaacccagcttcacaaaggtgcaatgtcattgaaagaaatgtagcaagatctgatgtagaaacagacctggagttagtagttcattaggtgtcagacagatgtcaggtgacactgttaccctacatataaaacaccttatggagctcctgtgagttcattgtgccacctcagggtaccttgttgcacagtttgggaaccatggtagttatataaaaaataatagttctaattaggatgaattgaaattctaggataaatcatctagatgagtgtttctcactcaatggggatgctgttagcacttttggagggtcagttctttcattatatggcactggtctttctacagacatgtttggaacaaaagaaagtagaatgtttcacttgcctccattttatttttgtttttatttattttgagatggagtctctctctttcgcccaggctggagtgcagtggcacgatcttggctcactgcagcctccatctcccaggttcaagtgattctcctgccccagcctcccaagtagctgggattacaggtgcgtgccaccacacccagctaatttttgtatttttagtagagatggagtttcaccatgttggccaggctggtctccaactcctgacctcaagtgatccacccgcctcaggctcccaaagtgctgggattacaggcatgagccaccaggcccggcctcacttgcctccattttatatcttactttattctttatgttactggtcctttttttccccttttaataatgttgatttttttttcttttttctaaatac

SEQ ID NO: 112680 - DNA, 1325 bp, Homo sapiens
gcattttcctcaaaaacaaccacaaggaagtttaaaaattgctactaaaccaaagtacctaattcaacaggaagagtgtgctgagatgaagagcacagaaaatttatactaccagcatcaatcagaaaataccatgagaaataaaagccggtgggccatgtatttatcctcacagagttcacctatacattcttctactgtagatgggaatgatacagaaaggaaacccaaggcccaggaagatgatgtaaattctaatttgaaagacctttcattacaaaaaattatacagttcgttgaaacgtatgctgaagagaggaaaaagtataatgtagaccagtcagtcggtaataatgatccatcctggaatcaggaagtaaaattagaaattccttcattcaatgaaagcagtagcttacaggttacttgtagcagtgcagaaaatgatggtatattatcagaatctgacattcaagaagataataaaataccttttaatcaaaatgacaaggggtgcattaaaggatcagttctcattaaagaaaatgctcaggaggtaaatacatgtggaacactggaaaaggagtatgaacaatcagagtcatctctgccagaactgaaacatctccaaattgaatctagtaataattctaggatctctgatgacattacagacatgatttctgaaagtaaaatggataatgaaagtcttaatagtattcatgaatctctgagtaatgtaacacaaccatttttggaggtaacttttaatctgaacaattttgagaccagtgacactgaggaggaatcacaggaaagcaacaaaatttcccaggattcagagagttgggtaaaggacattttggttaatgatggcaattcatgttttcaaaagaggtctgagaatacaaactgtgaagagattgagggtgaacatttgccattcttaacatctgttagtgacaaacctacagtgacatttcctgttaaagagactctgccatcacagttttgtgataaaacttatgtgggttttgacatgggaatatgtaaaactgaaaacacaggaaaagaaatagaggagtatagtgacacattaagcaattttgaatctttcaagtggactgatgctgtatacggagataataaagaagatgctaataaacctattcaagaagtcagaattaactatgattttgctttacccccgaataaatctaaaggtataaacatgaatttacatattcctcatattcaaaaccagattgctgaaaacagtaatctattttcagaagatgctcaacctcagccttttattttgggaa

SEQ ID NO: 112681 - DNA, 1050 bp, Homo sapiens
aacattcaaaatagatgaattttcaaatccaagttcaacaaatgtaatcctttcattatatgattacttatataacaattacttatttcctcttgaagaagtttaagaaaagcataattgtgttgttcctttttaacatttattttgttttcatacaggcaattttatatgatgacaaaggagcatgtttggagagtctgtttcttaaatgccttgaggtattttagtgtgtttatcttatttttaagttattatttaaaaatctctttaaatacctcctttatgaatattgttagtgtagtcataatattaatactaatagtatttgttgaacattatagctagactttgtgctaaaaccttttagatattgtttcctttaatctctacaactgattttttatgatctaaaaaaaacctgatttttatagattaggagtgcagtgcagaaaggttaagtaacttgcttatgttcatagagtaacagtggtaggaaggctgaaatttgatcctaggaggtgattctagagtctaattctactacatgattttttcataggcagaggtctactgtgggaaattttttgtgacatattctcatttaagtataatattctctcaccaaaaagagaactaccattcaacccaggagtactataactgggtatatacccaaaggaatataagttgttctaccataaagacacatgtatgtgtatgttcattgtagcactattcacaatagcaaagacatggaatcagcctaaatgcctatcagtgatagactggataaagaaaatgagatagaaatacaccatgaaatattatacagccataaaaaagaatgagatcatgttcttttgcaggaatatggatggagctggaggtcattatccttagcaaactaatgcagggacatagaaaaccaaatattacatgttctcacatgtaagtgggaaccaaatattacatgttcttacatgtaagtgggagctaaatgatgagaatgcatggacaaacgggaacaacagacattgaagcctactgaga

SEQ ID NO: 112682 - DNA, 1009 bp, Homo sapiens
tgagccgagatcgcgccactgcactccagcctgggtgacagagtgagactccgtctcagggaaaaaaaaaaaaagaaacctttggaggagtttgtgtaaggaattggcatgatctgatttacatatttaaatggtaattctatctggagaatcgattataagggaagaagattagaagcaggcagactagtaataaagttcttgtagttgttcagacaacgcagtagtagcttggaccaggtgcttatgatggaggaaatgagaattattcatatttgggatatattttaaagttagagctaacagaaatactgatgagttgaccatgaggtgtaaggaaaagggaaattaagaatgattttaaggcttttgccttttcagcaattttgtaattggtgtttctgagatagggaaaattggtgggaggggattgttagcactagagagtcctattttcaccatgttaattttgagatatcctttagataaactagtggaggtgtcaggtggacagttgaatattggaatggggagctaatgggagaagatagatttgtaaagcatcagcataaagccaatgagcttaaagccaggatcctcagaaagaatgagtgtgtaaatgagaaggaagcccaggactgagtccaatttaggcatcatgtaaaggtgtagggcacagtgggagaggtagggtgaaaggaaattgagaaactgagattgcaaaagggaattgaaaaggaagaagactcgtttggaagctatatgaagaaaatattttcaaggagggagttaccaactgcatttgctgctgagaggtcaagtagacagtggagcacattgaggagcttgtttgcagtttctctagaatggtgatgaggaaaacctgacaggatgggttgaagtaagagcatgaggtgaagaacatggttgtgtggtactcaatgacacctcattgtttttctattattaattctgacctatagttgtgttttatgtcttaagctagcat

SEQ ID NO: 112683 - DNA, 1145 bp, Homo sapiens
ccactacacccagctaattctttgtatttttagtagagatggggtttcactatgttggccaggctggtcttgaactcccccatccacccgccttggcctcccaaagtactaggattacaggcatgagccaccgagcctgagggcctgaggggcaggttaaattgtaccaaattgaattaatcctgctgatacactaacatattaactttttcattttctttagatgttgatatatcactacttgtgtcttttaacaaaatgaaaaaattgactactgatgggaagttaattgccagagcattgagaagttcagctgttgtagaggtaagaatcaagaataactactgtttatatttatagtttataattataaagaatgttaacgtaatgattattatatgattatagcttacaattataaataatattagttttattaatgtaatatactattttaaagcttgatttggaaggcaccagaatccggaggaaaaaacctctgggggaaagaccaaaggatgaggatgaacgcacagtgtatgtggtaagcttaagaacccgggtccccagtcagaaactggcacagaaacaatataattaagttaaaaatttattgacattctgattgtgaaaaactctaatattgcttttaatttataataggagttacttcccaaaaatgttaatcacagctggattgaaagagtatttgggaaatgtggcaatgttgtttatataagtataccacattataagtctactggagatccaaagggatttgcgtttgtggaatttgaaacaaaagaacaagcagcaaaagcaattgaggtaagtccagatcctaaaaaaaaaaaaagaaagaaaagaaaacaagtattaaaatagtaacttttgcaatcatttcagtttcttaacaacccaccagaagaagcaccaagaaaacctggcatatttcctaaaacagtgaaaaataagcccattccagccttaagagttgtgggtgagtatttttcaatatttaaataggtgtagttgaagtaagatgaactaataatgatggcacttttacagaagagaagaaaaagaaaaagaagaagaaaggccgaatgaaaaaggaagacaatatccaagccaaagaagaaaac

SEQ ID NO: 112684 - DNA, 1690 bp, Homo sapiens
aagcagataggagattttctttttctttttcttttttttttttaagaggaagatatcttgtggtaatggttttagctgttaacattgacatctgtatacttcaaaaaaaaaaaaaaggatccagacccacccaggatcatacattccctgagagctgatacattaaaataacaaaaggcccttgtaatgattctctgagataaaaaggcaaaaggaattcaagagttaagaatagtataaatagaagtggctgaagtccctgccttttacccttctggaggagaacacgaatctttgggaactagttcaggaaggtaaaaaaatttttttcttctaaagttatgccattttgttttctttctcctcagctctaaatactctgaagtccaaagaagttgtatgttgggtgggctcccttcaactttaacatggaagtgctttctgtgactttaaaagtaagtgcttccatgttttagtaggagtgaatccaatttacttctccaaaatagaacacgctaacctcatttgaagggatcccctttgctttaacatgggggtacctgctgtgtgaaacaaaagtaagtgcttccatgtttcagtggaggtgtctccaagccagcacaccttttgttacaaaatttttttgttattgtgttttaaggttactaagcttgttacaggttaaaggattctaactttttccaagactgggctccccaccacttaaacgtggatgtacttgctttgaaactaaagaagtaagtgcttccatgttttggtgatggtaagtcttccttttacatttttattatttttttagaaaataactttattgtattgaccgcagctcatatatttaagctttattttgtatttttacatctgttaaggggccccctctactttaacatggaggcacttgctgtgacatgacaaaaataagtgcttccatgtttgagtgtggtggttcctacctaatcagcaattgcgttaacgcccacactgtgtgcagttcttggctacaggccattactgttgctaatatgcaactctgttgaatataaattggaattgcactttagcaatggtgatggattgttaagccaatgacagaatttaaaccacagacttactttgatagcactcttaatggtataacttcttctcccattttatgtctctctttatgttttttcttatgtttcctttttgttttcaagagagagctatcttttagatctccagtatccttttcctcttcagtagagatttctatatcttgaaataaataaaaaagctctccgttaagacatggggctgtgaaatgggtgaaacagaagccaattaaaacctaattaattaaaaactaattaattaaaattaattagttttatctaattaaaaccttgtagttttacctctattttccttggaagcttctgatgcttccttaatgatgtctttctgaataattttctttacttttgatcggggagctagggattctgcatcttcagagctgcttctcttcctcttccctgttctgacttcaggtaagctagatgcttcaactctgtcccgttttttctttttctttgagcactgcttttggggttcagtggactcaatgtcagagccctcagatgtgggtctggatcttttcattttactgatgctggtgttgcttgtg

SEQ ID NO: 112685 - DNA, 1284 bp, Homo sapiens
aggcaatttttatatttttagtagagaaggggctttgccttgttggccaggctgacctctggtgatcctccctcctcgccctcccaaagtgctgggattagaggtttgagccaccgcacctggcaaaactaactattttttttctattctgtaatatgtgtaaagtagcattaaatataatcaaaaactgtcctagttactattattgagaatgtaatgccttgaatatggtttttcagatatgttcttcttttcatccatcagagtctttgtttgtttttaaggtgatcacgaacaaaggtattggcagaagattttggttgatagacaggcaaaacttaatcagcctcgggaaaagaaaagaggcactgaaaaggtaattgattcatttttgtttttttagactaaactttccttgaacgtttaatgccaaagtcagtactaggtagtcataaaatgatcgtagttttgctattacctaacaaaaatttactgagtatatactatgttttaggttgggagggaaaagtcatttctctagatttcaaaatgtatgaaattgaattatttttctcacaaggatacataattttaatttagattttttctttttaaccagtgatatactttaacagtcttgatatctggctgctatgtcttgtagtttggtgataaatgattatagaaagattatcttcatggtaaaaacacaatgtattcagaatgtagtttataaagataggaggctccatagataagatggagagactttatgcatagtgtttcctatagcaacgataagctttattcctctttctctaagatagtaggtaatacaaacaagcttaaataatttaaagcaagcccctctttcagtaattttatttttctgtcacttaaaatgatactggtctgatcagtagtggaatcacacctgggaatagccactgctttccagcttaggcaacatagcaagaccctgtctcttaaagttttaaaacaaattattatacatgtaaaggttagtacattttaaaagtgcctggaacaaagtagggtacataatacctaatattaactacagtcatcaaaatttagaaatgcatattataaaagtgtaagaaaaatgaaaaagatgaacttccttttttgttaggtgagcaagttaaaagtcctatttcctgtaatctaagcttgttgatttggggtcatatttatacaaaaaaaaaaaaaaactaacttaaaaagcaagtgtttttcatcaaccttcttctaccattgccc

SEQ ID NO: 112686 - DNA, 1174 bp, Homo sapiens
ggtaccaaacactttaaaactatttaaatgaatactcattagaatctatattttttagagaaaaagatttgcatttactccaaagtttaatattttaacttttttttctcaaggaagcttttggaatattttagacattttaaacagttttcttttttattctgtgtaatttcatttgccttccttaaaaatattcaacaatttatgtaagggtgtaagaaataggaaatagtaaatagccttaataacagatttgatttgtaattgatttgacctgagcataattatctcatttgtcatcttctcgctgtttttaaaaaatttccatttaagctgatagctgtgaaattttttctagtcatagttttgtgtgtgtgtgtgtgtgtgtgtgtgtgtgttttgagtatccaatacattttaatttttgatttatttctctttagttaatcaccaaagctgaaaagattagactggcaaagactcaacaagcgagtaaacatataagattttctgaatatgattgaaaaaaaaaacagttcacctcttaatacttcacaagatacttgagctgttcttgggagattcacttttattatggtagcactgcataattaatgtgtttttaattaaaagaaatatctttgttcctcaacttgtaaataagacttttttctagagacaaatatgatgtataccacaatttttcttaaacattttatttgttgaaattatcttagatgtcagtgtcaggtgatttagtaaataaatgtgttttgaacattatttggaaatgtgttgattttgtttttatactgtaaaaacaaaacataattgcaaaaatactacatgaatatatataaagtttagagaaatgtttaacactaaactctcactgtacttagtttgtaacttgcaataccttcaataccttttcatgttgatttatacagacatgtttaatagttcattctattcattccactttgcctatctgagcttccattgaacaatagaccatagggattggttctaattaaaatgttaaatttttaaaagaattgagtttcttcataaatcaagttaaatgttttgttttggttagacaaaataaaatgtattaggtgctattagcacaagaaggaaaaaatagaggaatcaaccttaggcagaactg

SEQ ID NO: 112687 - DNA, 1051 bp, Homo sapiens
ttaacccagtttagtggcaagttctttagcctttgccttttcgagcttggcaatgcgagccacagacttaggacccaggatgttgccaccccagtgacggcagatctcatcgtatctgtcattgtaattggtcctgatagcttccaccagcttagccaaagcgcctttgtcttccgagttcacctgtgtgaaggcgacagtggtgcaggtcttcctgtggacgagacgtcccagtcttgccttcctcttgataatgcactaagggaccaccattttacgacatagggcaggcaagaagacagccagctcgatgggatccacgtcgggtgcaatcaccaccagctgagctttcttgttctccaccaaggtggtgacggtgttaactcctgctcaaaggacaggtggtctcttggtggggacgtcccctttgccagcagctttcttctcggcctgggccaacagccttcttctcttgctttgtctctggtctgtacttgtgggccagcttaagcagctgagtagctgtttggcggtccagggcctgggtgaactggttaatcgcaggaggcactttcagccgcttatagaggatggctctctgctgctgcaacctgatatagcggggccatttcacaaagcgggtgaggtctcttttgggctggatgtcctgtccaatgccaaaattcttaggcctttcctcaaacaggggattcaccactttcttagcctcctgcttcttcacgacagcaggggccggagccaccttctttcccttggccttctttcctttcagcatcttgggctgcgggaggagagagtttttttaattattaatattatatacttcatcatctcaaatacagcataaactctctgagggcaggaaccatattttatgtatttttatttccctcaaagtgtttagggcatggattctatgtaatagattacggttcggtgccttcctccatcttaaaaaaatcacatttgcttctaaggaaaatgtaatgtatacttatttgcaagaaaataatactctcataaagaagtt

SEQ ID NO: 112688 - DNA, 1043 bp, Homo sapiens
tgtttgttctttggcttggtttttattttttattcctaaaaagcaccacattcccacactcatgcatcaggaatgattctcacctcgacgatgtcttaggtgtggcctttttggagagcaaaggaataaattcaataacatctttctcttcctcctgagcatataacattaagtttgctttagagactgaaaataaatgtgtgtggttggaaggagatataaaggggaatttagaagaacagattgtttatttgccctggcacttttctgtgaacacttgatagagttctaggtcaaggtgtatggtgtccccttgagggataataggcaaataattaggctatgtctttaagcattggaaaatctttattttttaaaggaagagaacctagtcttttctatgaatctctgcacaaaccagagactttggggccaaacactgattccagaaacacttaggcattgaagaaacttttgggtgagaaagatgatggtatgaatgcaaagaaaatatgcttagatgagttttgtcctttttttttagccttttgcagtatatggtttaagtcacagaacaacaaacaacagaagagagcatgccccacccagtgttgtgaacatggatgattcccctcccattctattccactgaactgcataaacactagcacagagacagttctaattcatcttttgaaccctgtatgttacaggtacaagccatataaaatgaagacatagagaaatggaagatcctcccaccccaccctactttctcctccttccatattgttgagtgaagctatattcatcttggaaagggtctgcatcactgcttgtaattttgttagccatttcttgtagacgagcacggtgtgaggaattcagaggtagtcttcctgatctggccctccgtctctgcctagaccacacccccttttttggccacatgcctaaaactctctgaaggggagtgtgataaaacgatgctcatccttgggcacatggattcctcggtcacaaaactgaagaggcctgatttc

SEQ ID NO: 112689 - DNA, 1029 bp, Homo sapiens
tagatgtttaacaaatggcagttataaaaggaagaagaaggggtaggccacacgcatctgtcatttcttagtttttgtcattgactgttaggtagggaatgcttatccaatttaatactctttggtcagcaatttcagccaatgctttttcatgcatttagacagactctgaaagtaaacataatctctcaagattcttatgaatctacttatgattgaatggacattctcatatttttaaaaatctatttctcttacagattaataggctatttttcatcttttatcacattctgttttggctactttactgaactcttgaaatgttcaaatatttttgctttgctcttttgcatttataatagtggctttttaaaatgaagaactccatcagtgcctcctataagcttattttgatttgaaatatggaaactgttcttaatgataaattgaaatgatttcaaacttctaatattttctcttttttatccttttaggtaagtaatgaaaagagacatgaagaattggtatttcaaatgaccaccatgttgcaaaaggtacttttggtattttaaatattactttaaaggaatcttataaaaagacacggaggttagaatgtaattaagtactattttggtaaaaacaatttttatgaaaacagatttaaagatgttatagcattaacaattttttaattataagaaatgtaatatactataagacttttctttctgtagtctaggcaattatcattggtatcatttgggaatgaaaaggtaaatagattgtctcttcctcaagatattcattgctggaaaaagggaggtggaggaaagaaatctgaatacaatagacataataaacacattgggatttgttcaccaaagtcatctattttctctaagggcttatgaatttgttttctgtgatcagaacattatcttcataattacttataaaattgattgctataaggttgtcaataaagttatttgattctaaataattcaaatagattgcatccat

SEQ ID NO: 112690 - DNA, 1459 bp, Homo sapiens
aggcgtgagccaccacacccagcctccatcttcagttttttaaattgagttcagggtagaatatgacaaccaccactcagattagtctataaataggtaaatttttacttaccagttaaaatatctttgactcctttctttggtcaaagtcaacttctgcttttaggaagtccatgatttacactactatacttctcttattggcttgaaaatgattgacatcttattaattcattaagtaaatatctgttctaaaaagggattacaatgagaaaggcaaattgccttcagaattatgaacaagtgaagaaatgaaaagatctttatggcagggaagctcctgaacttgttggcttgttgtgaccaatcttcatccattttgaggattcattgtgttattgtgttcatgggcagcactgcattaatctttcttctgtgcttctgttgtggccagcataggcactagccagctggccaggcttagtttttcctaagaaatcttctatttcttgacctcagatgactggtctctaggtgaattcagagataaatgaggtctggattacaatgagtgattgttcttgcatccagagtcaggcgcctccatggtagttctcactctcacaatctgcactgaagactcagccttagttctctctctctctgaggaccacaatcctaatgacgcccctctctgcatgaggacaggcatggtgacttgttctgtcttcttcctagaaagtagtagcctatacagatgttgaaagaaaaattatcctatgcccaggttacgagtagacattacccagttaggagactgtgataggatctgtgattcataaagtacagtctctttgagtgattgtcttgtcacttgtgaaataatgaactttttgcttccaatgtcacataatggagttggtgaatagggtgtgctgaaagggtagaggaatggaaggaggaagatctgatcagaaatgaaagctccctttttttttttaacagccattttcctgctcattgaatatgtttaggctgtgtctggtggctcacgtctgtaagcccagcactttttgggggctgaggcgggcagattgtttgagccaaggagtttcagactagcctgggcaacatggtgagacccagtctctaaaaaaaatacaaaaattagccaggtttggtgtgcacacacacctgtagtcccagctacttgggaggctgaggtgggaggatcacctgagtccagggaggtcaaggctatggtgagctgagatcacgccactgcactccagcctgggcgacagagccagaccctgtctcaaaaaaaaaaaaaagaaaagaaaatgttcaagtgttgttgaggagtgctacctctacccaggcaggggagttatagtatgaggggcacacagggaaggctggatttgactttgtaaacggttaaaaaaaaaatgtagga

SEQ ID NO: 112691 - DNA, 1748 bp, Homo sapiens
atttttagtagagacagggtttcgccatgttggccaggctggtctcaacctcctgacctcaggtgatcctcctgcctcagcctcccaaagtgctgggattacaggcttaagccaccatgcccggccagttcattctttaaaaatacaattttattttaaagttggacattcattaaaatgactcataattcaagaattgcaaaaaggcatactgtgaaaaatctccctccttatatctgtcttccagctacccaatgcccttcctggaagccaccaaggttatctttccatgtgttcttcctgagacttcttaggtgtttgcctgtttatgagctattactataagtagcaactatacaaattatacctattattctaaagaacaaaatttgatgtaaaacttagagttgtttcaacgatcataatatgctttcagttattaacaaaaatgtcagtcttttttgaatgaaaaataccatttggtatccctttgattatatttaaatgacagttcttattttagctttgtcagttgtttaagttagttttataataaatttgtatttgtatataaattattcacacagattcccagtatgttggttgacagttttactaggtcataaacttccaccatgtcatctcgcgtttccattgccttagtaatttgctgcaatcactacagcaaacaagaaaaacacaattacaggcattttactttcatatcaaatatttatttgcctagtaggccaattttggcttaatttcttaattttgctattaagaaaatggtaaaggaaagtcagatacgtattaatttgagaagccgttcttaaatactcttataagcctaaaactgtgctaggaactgtagaaatcacctaattaacttagaacatttgtgggacaaattctacctagggacacacaataaaaggagctagtgacattaaaaaatttggctctatctgaacacacacagagaagatctaattatttttaaaaaattacagacatgagatcactttcactgctgtacttggttataatgagaagtgatgttattagcatttttcagactctctcaaatgccagaggcattgtgtagaaaattagagtagccatcagtatcatgctgttgaataactgctgtaggattttatttagcatacaaacctctgaaccataactacaatgctagctcagtatttacatttttaaacaaaaagacccaaagtgaaggaatctattgcaaatctgtaaactcttttttgcatgaaaaaatataatttttagttgaggcagcttaaagctcattgatttgttcctgaggcatctattttctcttgatgaaagcacagccgaacagggattctcgtgtcaaagagtatgatttatttatgttctgaatcacagccgctaatgctcacatttctattaaaaacttaacatctatgggagaaagggacaaatactttcaagttcctcatgaggttgttgataagattctggcatttttaaagttgagaaaacacactgaaaaattgtgagaagagtttggctactttagcataaaagttactaaatgcacctttaagatgttcatattcttcctttatactgtactctattaaaatcatatgggtagaagaatagttaatatgagaaaatgttcatgttattttgttgcctaaaaaaggatattaaaaaagaacatttaactatatgaacctaattcggttaaaaag

SEQ ID NO: 112692 - DNA, 1063 bp, Homo sapiens
taaatccttattaatttttaatcctgaaatatgatggtgttgtactgagttccaagtaaagaagtaaatgtagtgtcatctgcaccattgaggagggtgcgatttgtgagactgtgtatatgatcttggctcccccttggcaggcataaagactggattagctcttgtgccttcctggggctggaagccaaaagtcaagattaaactaatctaaatctttccttttacaagtgagcaaaatgatgctgaaggaagttaaactactttcccaagttacataatcatgtgccagagctgaaacttgcagcggcagagcccagcgtaataaccttttccctcaccaccatttagtttagagcttcagaagtatttttccattgttcgataatcaaaatagtaacttaaatgataaaaatggcccattgttatctggcttttatcttttaaaaaaatctgtgaaaagggttactgaaatgatgtatacttttccaaaggtgtgaaaacaaagttatcagaggtgtagcaaaaatttgtagtaagtcaaaagcgttaaatgattgaatgtcttctttaaaaaaatcctgtcaaatccgtatatttttgatgttatatcagtttttattttagctggatccttcatttttagctctttaatcacactcagacagatcttgaatgcaaaattgttagtgtgggtggcagaaacagagagatagcagcttgcttattttaatatttaatcatttcccctctcagcttgagttgaaaagacaaaaagcctgtgaatatatcaaggaagactgtggaatccatcgtccttcataaagaaaaatctcctgattgacccatttcatataccatacagacatcttttttcctggtatttgatagttgattacttccactagttggtaaaattagatgatttttatgttttttcccccaacctctcaccttttttattccagggagatttgcccaatcatggaatgtgtaactttcagaagcattgaactttttttcaattgcttattcatttgaaggactttccaatgaaccatta

SEQ ID NO: 112693 - DNA, 1921 bp, Homo sapiens
gcacatatgtccctgctctatggatttttttttaggcttttaatgtcactctattttttaaattgacaaataaacattgtatatatttatggtacacaacctgatattgtgaaatatgtatgcactgtggaatggctaaatcaagctaattaacacatgtattgcttcatgtacttatcatttttgtgtgtggtgacaacacttaaaacctattctctttagcaattttcaagtacacagtaagttgttattaactagagtcaccaggtacaatagatctcttgaatttgtgaaatttctgactgaccaaatctgtgatccctcttatttatattcccatctgctcctcctctatcctccaaaaactactgatatgcaatatgcttaacagatatctaacaatatcaaccctcactacaccttgaaacttttcagatgcagaggtgatgcctccacaaaatcccttttgtgtattttactccttgtagctcatttctagtcaaacacctaaaaaagactccatagaacttccctgttttggagactgtagcatttgttcttttcttccagtatatgtgtgcacaaatattttggtcatattatcattcatttaattagttaattatttttttcattgacaagtaaaaattgtatgtggtatacaacatggtatgtatatatatgtgtatatatacacacacatatatacacatgtatacaaatgacttaaacatatatacacacacacacatatatgcacatatatacaaatgacatatatatatacacacacacatatatatacacacacacacatacacatacattatagaattttgggctattttttttttttctaattttagagtctgtttctcaaaactttggtgtcatttgctgactgttttgtccaaatacataagcacgtggaaaattgtaacccttaaaggccatcttttgagcatgtggtcctaaatgagatggtcttaattcctcacattttattatcagaagctactagaattataaaaagtccattagttaagactgatgttaagacagtgtccaacacactgtgagtttttcagaaatcttagataacccagtggcaataaataatcgccattttcaaggtacatttgcctgttttgccaagggcaaatggactctttcaagcagaagtcaattatgtctgccttttgtaggtgcaattttcccctcacccactgggcccttagggtacaattcaaaagagatttgtgcccaaaatgagtgatggtctttaacaactgttaatactgagtaccatttgccagaagtgtcctctgccttttcattcaacctcagtcacatactagcatccatcataatgcatttgccaggggtttccaggatgactttaagtagtaatgttagtgaatgagaagaaaagtgcccagtgagcctagttagagttggtgctggatgtcttactttataatgactgctgcatatttgaaacatactcattgatcaggtttcccaaattgcattatgcagaactctagaggttcatgagatattaataggtggttggttaaaaaaattagagtgtcatggttaaataaatttgggaaagtgtgttaaataaagttaagcagattcatctgctgtgggatttctgagaaccttccatatgtcattgtgaattttgaatctctaaaataagcatatagtacacagcattgcctaaacatgtttgatcacagcaccctttttcaaaatttaaaaatatccaattgcatcttgcagaaaatgaacactcttctaaattaatttggagaagtctttctgtatatacttccttttgtatatgttttcattgcaaatcaaaatgggagagattggaaaaataactatataacaaagtgagagagaatgc

SEQ ID NO: 112694 - DNA, 1033 bp, Homo sapiens
ttaactgaatgagtctttccttttgaattacatttttaatggaaataaactagggttatagtttcaggatttcccaactgcataggactgtaaacattatataaagctttgtgtgctacactttattagcttttaaaggcagttgagtggagtttattgtacataagacttgcatttgtagttagagaaaagcctcacatgattaccatctgtttgcttttgcaagtgtagccctagaattctgatatgccaatagaaatgttattttagttttagttcacactggaggttttccacaggcaatttaattctcctatttggaagaatatttgtgacccctggttataagccaataggctcaaattttgaaatttacttacatgaaattaacacatgataaatgatataagaatttcagtttaacttatgtttggtgcaaagctggagttcctaaaataagcctttggtatgtggtgtcatatgtgaattaaaaagtgagatgattcttctgcagaaaggtaatatataaatgtatccaaattctatttggaggacacaggggggaaatggtcattttccattttgtatcattagtgggatattttattatttaatagcccagacactccattactgaaagtaagcacaatccttgctgatggtaggcagatgaggctgtgattctatattctgtgtctaggtggtggataggagcagtccagtccagctgtcccacagactcagcctgttcattggggaaaagggctcagtgaccacagctaacaaagaaaagcagggagataaagcaaaaaatcttgcagctgctgatcagctgcttcactcgtggggcctcagagaaagaatttaatttgtcctaaacagcatgttttaagttacagtacaacacacctatccacagaagtatacgtggaaggctgttgggaactggttcttccaccattcttgaatcaaaggttttaaattataaacatgcagacaaaggagaacactgttctgtttaggtttttgtttt

SEQ ID NO: 112695 - DNA, 1037 bp, Homo sapiens
tgaaatgcatcctttaccagattggaaactaagaggaaaagcattacttctattaaaatcaattctagtttcccttcctaaaattgggcattacttatctacatcatatttggtacgcaattccaggataatcacattttccaactggacagggctctagttcaaatgcttcacctttcacagtgacttagaatggtttagagatttatccagtgccttgttcttggtgagtctagcatcttagtcgcatcctgtaagcacttgatcattgcctgccactagacactgagtgtacatggaattttagggtatcgttcattcatttacagcttaccataataggaaaatttagaaagtaaaactataattgctacctattctattaatcttgctgacattctaattcacttaccttgaagaatttaagccagcagatttggtgtcataagaatcatggactatttttagcaaagacttcatatcacttttcattgactggatgatgcaatgatgagacttgaaaaattagccaaattcccatcattgtgttttatcatcctgatggaagcaatgctgttgaatttcaagaggttagcataatcaatacaatgaagttacagcaaaaggggagatgtctctattattgaagttttacaaaaatattaaatgtttggattgattttttttttaaattgcacacacataactctgtggagtgtctaatagtcaaaaataggttgagtgtgatcaggataaatagctaatgcatgtgggacctaatacctaggtgatgagttgataggtgcagccaactaccagggcacatgtttacgaatgtaacaaacctacacgtcctgcacatgtatcctggaacttaaaataaaataaaatattttaaaactaggttgagtatgaatgagagggaaaacagaagtgagccagttcataattataggctaaagattatagtgaaatcagatcacatcttacatttcacattattttttctgtacttagacattaagccctcatttcgt

SEQ ID NO: 112696 - DNA, 1709 bp, Homo sapiens
tgtgatgtaaaaattgtgacagaggaagaaaggttgtatatgtggatttggggaatctgcctgggtgtccccatattccatttcttttctattactccctccacacacatttattttgaagtaggcccatctccactagtattctttactttgtccaaacaaatgtacgtttctctttgtgccttatggataaactccaaattcctggcacataatgttccttctattcaaaaccttgctaaaaatcaatctcttgacactttctaaggcttctcttcaatcatgccttcattccttcaaaatgaatgcaactctctccatatgcagttgtaattagctttgtacattatgtttcttggcttcttgtgaatggctaatgagtacctctctctttttctctgtgaaatttataaatttaaattgctaaggagatctgagggtggaggggaagggggtctcactctgagatcagaaattgttttgtgaaaaagcagcttttgagagatgtagaggtatgggtagtataactaatgtggaggaatggctgctatacctgatagctatgtcactttaagaagtaggcaatgatataaaggtgaacttatgtagattatgtcactttcatgggcattttaattttctagtttataaaatgtaaaacagaaacagcaggttaagtaaataaatgaaactggttgggcccaagaattgcttgctttcttggtcattttgcactttggcattcaatagacaaagcgtatatggtacatttattttccctctttactataaggaaacaacacaaatgccgtaatacgtggccacggacacttgggacctgctatgtggaaagcaaatgccctatttaaaaaggaccgctgcaatttagttctatctgttgtcatgtaggaatgggagcacaatattgacagactggagttttcagaagaagtaagcagatttttatatgagatctcctgacttctaaatgtgaattctaacaaaacccaaaccccaaccatgtggactgaatgaaacacaacaaagccatatccggcccacagattgctgtgatatatgtcctgaagatcctttctgtgccagagaactatgattttaaattccttgataacagaaaccgtgtctactctttcctcttcaactatatcaacaaagcattttaactggagatcaacaactgatcatcagatatttttatcacatcaaaactttcattggattgaatttttgtaggaaattttgacctatagaggtattttcagtggacagggagcattggtaattctgaggacaactatttataagaaaaggctcaaatgctgaactgtggaacatagaaaagatttagtagcatgcaaagaaaatagatcgaagtagctggagagaatgggatcatgtctgggagtgcaggacgatgagtaatcaaggaaaagggagttattcataatagtcagctctgctgactggccttttgaaggaaaaaaataaaaaatgattagtatagggaagaagcaatttgatttggcttagaggaggttattggaaaccttggaaagggtggcttttttcagtagttgggatggaagccagactggagaaggttaaagggattagaggtgagaaactgggagatccagaggtatgctgcttttccaggaggttggacacaaaggaagaagggctggggt

SEQ ID NO: 112697 - DNA, 1045 bp, Homo sapiens
ttccctgaacccattcattcatcttgccttggatctatttatttaaggacagagaggatgccgtggggactgttgcagggtaatgggcagatgggctgacttcttgcttattagtaagctgggatgatctgactctaaacttcttcctaagggatagaggcacttaaaatgaggtttactcaatcatggaagtataattaaagtaaagatattatttcatctccctccctcccaccccatttctatttttttggtattcttgtttgacttgatgacttagtgttatcactgatgaaaccttaagtagaccagtggtttgttcttttgttcttttgttatcaggatgggacagatgtaactgcagggttcagcaggaggtagctaggagaagcttctcattaaacaagaattgagaaatcccatctgaacacctcttctcctattatttagtaaatggagaacacatgataaataaaacagagacattcttaatatcaaatgcaagggtatgcaaaacctgcaggaaactctatgtgtgcttttcttctttttttccatctttttctttttgaaaacaagacatttgtattcactcaagttaatcatagtgtgttttcaggtaatcataattagatgtaattactgtgtggtcaagttatagcttaactcctcgatgagcccaatcgagtactttagacataaagaacttctcaaacccaaacatcccaaaaatccttgacaggaacgctaatgctatcataaatgaatcaaagcattattttgatgctaattaacagttctacttactgtaccactctaaggctgcacacactgtttgaaaaatatatgcaacttaaatcataagcttgtttgttttttgagagagaaagagatatagaatgttttggattcatgtcttcttttgttgatctaatttttgaattggtttctaatatagaaaagctgttgttagatggcgttgtcccagacttggggcacaaactgtgtggagagccaaggaagggcatgggttaaaaatacagaa

SEQ ID NO: 112698 - DNA, 1005 bp, Homo sapiens
aggaataccttgaagatggtttgagataggattcttgataggaacaccttaaggatgacgattatatcaagagcggaaatcaagataagtttttactggatcacgagtgttccttagattggcaaaaaagaggaatctgctgtttgtttatatttttatttagcttataacctgatgtagtttttcaattaaactaataataactgagtaatcctgatttatctccaatctattcaattgatcaagaaatacacactgtctgctttgtgaccagaatactggaaagaaaatattcaggagaaaagactgcagacaatataaagaaacctcctgggggtggttttaactttcctaggtttaagtgaaagtgggaacacatttttcagtgagaagagagtacctttttatgcatgtccttgagggcaagaatcatgtctaaattatctttttatctgtagaaaggagaagagaagctggcacttagcaggtgcataataatgtttgctgaagaaatattgacaatctttctgggaaaatgtagagagtgagtaaattacctgattattttccacttaatgacatccttctcttttctccacttcctggcttaggctaccatgatggggaaatgtagtttggtaacactactggagtatgaaattcattttcctatggaagaaatgtttaaaacaacagtttagacattattaaatagacataataattattttccattagatgtaattgaaataataatgattagatataattgaaaactgttttgcagagaacaaatgtttctgtgggctatctaggaactcaaggcatatataatgtaatttctaggaacaagctttgtgttcaaaccttgagaacctcatcgtttttctaacttggcttgacatctaccttccattttttttccttttttcttaaaaagtaggcttttctactattctagatgttatgagtctgtggaagaaataacagataccaagagtggct

SEQ ID NO: 112699 - DNA, 1049 bp, Homo sapiens
gcaagtgtttagaatatacatatgtgcatttgtacaaagtatattaggttctggttgcatctacaagtgtgtatatatatatatatatatatatatatattttttttttttttttttttttttttttttttcaaggcggagtcttgctctgtcaccgaggctggagtgcactgggggcaatcttggctcactgcaaccttcgcctcccgagttcaagcaattctcctgccccagcctccccacacctggctaattttttttttttttttgtatttttagtagaggcagggtttcatcacgttggccaggctgttgtcgagctcctcaccttgcgatccacctgccttggcctcccaaaatgctgggattataggcatgagccactgcgcccagcctacaagttaatatttttaaatatacaagtatggccaccttaatcaataagtgaatttgggtttcttgttataaaaacaagccccatttttttaaaatcaagaagaattccagaactttatagtatacaccccttgagaggagggattgtgttttattcatcagtcaatagacacaattaggttaagaaaacttttgagataagttataaaatattgcaactccattagttttttatgtttttattactgatagtgtcttagatatttaacaagccttgattaactgcctttaatgtgccatggattatgcttggttctgggaaattcagttctccccctacccagacacacacacacacacacacacacacacacacacacacacacacacactcctgatctaaagctcttggcctatcaagaaaagatggttaggtatctgggcagttgtgtaatacattgtcacaggtatactgtcagaagcttacattggaaagagaaggcacaggagaagagagtggttggggttatctggaggttggagaagctgttctcaaggctttatgacagaagtcatccttgagtgtagtttcaaaagattatattttaaaccaagtgaatgacatctgaaaaacatagctttcttatattcac

SEQ ID NO: 112700 - DNA, 1087 bp, Homo sapiens
gaagttcaacggcagtagtcagaggagaaaaagacccaagaaggtaaatcgccggaattaggaatgtctgtgtataaatatgtatgtgtgtgcatgtgtgagtgtgtaatatcagcaaggctatggaaaccgtggagcattatgagtaactgtagacgataacagtgccaagccttgctttttaaagaggcaggtgcaaactgctgctttttgagaatagtaaaggagccatggctcataatggatacactgactggagcatggtgaagtgaatagagataaggtgtgttccacatgtggattactgaggaccgtggccactgatggattcttctggtgttaactgggtagagagagtcgttttatttttagtgtgtaaaaggaagagtgttaagcaacgtggattgtgaagcaaaaggcagatttttggccagatgcgtttgctctatgatgatcctgagatggctagacagcaaaagccttttggtttcatgctaagtgtattcctcctaaggagaaaagactgctgtgacaggagaaatatcatccccagcatgatatttctttggcttgcttagctcctctgcagttttcccagacattagtgtgatagctctttcaataataagaaaaacagctaaagatgttatggggtgggggctcttgggcacacaaagcagtctgtaggatttcttactgtggcatacattcccacaccctcgattttcatggaaatgatagcagcgagaaacagtgggaaaagatgcaaactattcagccccacccaatgccagcacttctttctttatggcctgactccttctggtaaactgttgcagcctcacagagcttccctgagcctcacctctgaaagagatgctctataaataaattctcctaaaatgcatttatttcctggagcaataatatgggcaggatattagatatgattgtaatgtaaatggctttcaacattagatggttttggattttgaataagcagattgcaaaaaataataagcatgaacaaatgaatatttttcattttgctaatgaagttgcattgtgtttcaaaattctagatgtc

SEQ ID NO: 112701 - DNA, 1050 bp, Homo sapiens
cctgtgctatgtgaatacaacaatcttttacacaattcaaataggattaagaattaaagaaataggagttttgtttatgtcccaaacctgtttcactcatatgccttcgctgattggtcaattggtcaatgaatctaaaaagcttttttttttttttttttttttcccaaatacggtttaaaacagaagtataaatccaaattagaaaagtttttttatgtagttgttgactaagattattagatgctttcagaatattcaagccagatgtgaattctcagactcagctgtggaacactgaagaatgaagctttatagttggtatttccatctgcacttcaactgtatttgtcaaatggctgacacccttagcatagcctctctaatataagggggaatttgttagtgagttcatgttgcttgtcctaattcaaaaggtcactaatctatcatgtgctccataatctcattacacagcagggacctctttccagttgttaaagaaccagtaggactgattggcctattacatggggcagtcaggcatttgtttactggcccatctagaaactggtgctttaaactgtttttttggatgggtaggaggtctgttccatctggaaccttggtacctcttccagatgaccctgccccaagtggcttccatgtttgatttgtgaaggtagttcttgagcactagcaacaggttaggtgtggttggggaacttacacttactgtaacaaaacgccttgatcagataaaaaattactgttggaataattttctgaatcactgaccctcatccagtgggagactaaagctcctcccctgattgctttttcccagtaataatttaaatggatgactatttttggtaacctttatttatagtttgtcaaaatgagcagaatattagctaaaggaagtatgttttcctttgtggagcaattaatttttcgtttcaaaaaggctgtcaggagataatttttgtaggttgcttatataacaacatcaataatttaaaaaaattacatacacacgtacacacg

SEQ ID NO: 112702 - DNA, 1036 bp, Homo sapiens
tgtcttattccatataaggaaatggagacccaaagaagtcaagcaccttggccagaatcatgtacgtagttagtggcagacacgggcctagaactcatgttacttgattcctagaaaagtgtttttcctgtttcttacaggtcatctgaaagagcaatcaaaactagcaatgggagagagaatttcagtgttgattttgggagaggtatagctttagcaaagcccctgatctactgcatgaaggagacttgtgattaacttggcagtgagcacaagccatgtttctaacatcaagtggggtactgagcttctatctacaacgttattacacaaaagctaatttcccaatatttactaatcaattgcttcatgagaacttgtcgtaccggtgctcccaaactaggtctgttgttcagctgtgatttgtggatggggcactattttactatagtcactactctggtgtccccaggaaattagatggcttcacctggttcaggtatatattttataatactttaagaccatctttaattagaactaaaacaaaaaaagtagttgaaataaaaatattatgaggaaacaatatttgggtttgttgaaccattaacacatatgtcctctaaaggtgtttggtttaacagtgtgtgtagttttattttttagtctctttctaccttgattcaagtaccctcccctcctccccccagccccacaaaacacacaggcgtgcacgtgagcgtgctcttaggcctcttacagtttttgcaagccgaccacaggggctggactcattctgtaagtgtttgaagttcaattactatggtactcttattacgaagggttactggtggggtgccttttattcatctatgtatttatttattcttcacttagcacatttattgaatgccttttaatgaccagacaccgtgccaaatacaagatacaaaaatgacagagacatattccttggtctcaagaagttcacggttcataaaggcaaacaaatacataaatagatgattactatgtg

SEQ ID NO: 112703 - DNA, 1448 bp, Homo sapiens
attgtggagatacacaaaaatggaaacaattagttttgtctaaacttgctgtgctgcatataagtgatgatataaattatgaagatagtgactttgttaagtttaaatgatttggatactggaagtccttggaggatctttaagcgtatgttacccttgtttgcttgtaccattgaatatgttgtgaatgtcatacaaactcacatcccatacaaactttggaaaatttcaactttaaaacatataatgaaaagcaaataaaaatacctaacaccatttgaatacttgattagaaaattgtacagcgaagcacttaaatgtaatttttagattacagatgtaaagttgatatcacataaggataaagagaatgattagaaatgactcacatgattgtatgtttgcattacagagagaaatgacatggctaagagtcaaaaactgtagacaataaagataataaactgccactttaggtttagggaaacaaaaaaggtatgaagtcaaataagagatgttagacggaacagattaaggaagttagagctgggcatggtggctcatgcctataatctcagcactttgggaggctgaggcaagaggatcgcttgagcccaggagtttgagacaagcctgggcaacatagtgagaccctcatctgtacaaaaagttttcaaaattagctaggcgtggtggtgcatgcctatagtcccagctacttgggaagctgaagtgggaggattgcttgagcctgggaggttgaggctgcagtgagccatgatagggctactgcactgggcaacacagcgagaccctgtctaatgaaaagaaaagaaaagaagagaaaagaaaagaaaagagaggagaggagagaattagaaatgaggatcaaagtcctggaagtaaaaggtgaggtaagcacagaagagattctgtagaacaaggagagagctgctgggcaggtaatcagtgaggagaggagaacgcacaaggtcagagagaaatgaagagaagaacatttatgccctaattagtgagcaatttgttataaaacagctttgccacctggagagtagaatttaaaaatttattggcacgaactaccaaatcagccaaattagagcaggccatcttccaggtctccagcacaggctacagtggacagtgtgcaatagcaacccttgtcatgaaggcggagagaagaggaagtgtacttcaggaaagcacgggctaatccaatcaacgaagatcagcataaggtcataagagttccatgttgcaatcagtcttttaaaagccaaaattaccttttgcctttggcactgctatctgataccttaaatggagtattttgctaccaaatgaaactaaataggacaagaaagagctgctcatctctttattgcaccatcattgatactaaacttttccacaaaagggtaatgttt

SEQ ID NO: 112704 - DNA, 1452 bp, Homo sapiens
aaataaaaataaaaaagctgataaaaaaatatatgaaacaacctcctgttcatagggcatataattctttcttctagacttacagaagcactaatggttttctgaaacgtaataatatgtggtattttttattaagtgttttgttgttgtttgtgtgtgtaaaatcaaacagtgagtaaaagttgaatggaatcggttttccattctttgggcagttaatagtattacagccagatgtcctcatacaaggaagtctgtgaaatcatatcttgggaatagaatggttttcactaatgcagaaattcctaactcaaaagactttcccaaagagtgagattcctcagttaaatctctttctaagaatctttctaactttgaatatagatttcataaaaatctcaaatcattgataagctatagttttatgaaataaattattactctcaactccttacttttctaaaatctattttttttgcatctcaaaatattattacagtttgctaaaatgagttttaaaatggaaaacctacatagtggtatgaaacagatatcctcttgattacttctttttttaagggatgaataggtgagacgttagaactttacttaggaagaggttcttgaaaattaaccctgaactatctgttcttaaatggcccaaataactgacattataaagattaaaagctttgagtttggtccttttttggagttgcttttatatatacatatctacttaagttgcgttctctaccatgaaatctggggattagaaaatacttagaccaagccacaggcatattcgtttagctcacattatgttttaaaaattgagttagttgccaatgttttaatcagaagattttatgtaaaagtcttaaattctagcttcgtgataaaagtcagaatacctgataatattgggccagcattcccactctaatataatgttttgaagctgaatagaagttaccctcgttagacgaggcacatgcaacctggttaccattattttcactttccatacttttataatctgcctggttgtcctaggcatttgagtttgagacaatgacagagttgtggctgaaggattcaaacatgcctctgacgtttgataaacaaacacaatttgagggctacttctgggcatatcagtggtacatcagtgacaaaggattgagaccctcagatggatgggtgcaaagagaaatgaggaacttaagaattccatatgccacctgatcaagctctgaatagcagtggtacaggttctgcccatctttgaaccatatcataaaacctgattttggcagtaatacttcagcacagattgtacctgctgtttttaaaatactgcttatcagtcatttttagcatcatattgatatcaaggccaacacagcctaaaattttgacttccctcaatgctgctgaaagctacaaaga

SEQ ID NO: 112705 - DNA, 1534 bp, Homo sapiens
agagaaatgaaatggatcagcactacagaaaattatcaaaattagcttttaatagcagtagctaacgttatgcagtgcttattatgtgccatccctttgagatagatatccccacttttagatgagaaaattgaggcatggataggggattaaatttgtctaaatttgcagagcatgaggatttgtttctaggaatttgtttaaagattatacaatgctttgcgatggttatagtcttgttttatagattaagtgcttttaatcgcttggctccaccctctttcagtttgcgctctctcagacatacgtgacagccaccactgaatttcacaaaggtctttttttcagacattgtaagaatgtgcaggagtccaatgttttttgggctttggggacattctgtatgaaacttaaggatttatagtcatatgtattgtaataacagacaaaaccaaaattcattaatatgaagattggtagaaactgtggattttccttataaaacaaaatcatatatttccattttaaatgtcatttttttctcttctgagattgtttgaatatagccaatgtgtgttcttaaatttagtttttaaatgtggtaatgtacaaagatgaaaattacggtgagactatttggatttttttaagaatggcatctggccacagaattgcaatccatacactacacaacataaaaaacatacattacagcactaaatatagttcaggcttgcctttgcttctgacttcaaggactgaaccatataaacacaaggcagatgaactagtgagaagtcacttggtgtagaagtccttgttaattaaagtgtccatggaccagcagcatgggcatcacccaggagcttgtaaaaagcagactctcagaccccagctttgacctatggaagcggaatttatatttacatcaacagattattcctatgcacactaatgtctgagaagcattgggttagatagattggattctgccagtctctgggaattagctattcatctttgaataagttactatgttctatgtattttagtttcctccatttcttgctacttactacatgttgatttagagcaacttaattctgtaatcttcatttagttgcctataaaatagggatattaataatacctacctcctattattataaggattaaatgaggtaatgagtgtaaaatatatagaatattgtccacatatagtatgtgattaatatgtgcttgtgatggttcttttagttatttctctggtgcgctatataatcttattgattacatgacaagtggaattagaaatttctttcaaaatctactacacagatatataaatatgcttttaaaaatcaaaaaattagaaggagataaattttccaagggttaaagagtctagtggaaaaaacactggaatgggaattacacagactaaactctagtcccaattcttttgaccttgagcctgacatttaacttttttgatttcatggatattatataagaatataaaatgccttaacat

SEQ ID NO: 112706 - DNA, 1072 bp, Homo sapiens
tgctgacaccgcatggaaaatatataagcagaatgatgcccaagttatagaagttcctcttcctggattttgtcttcaattgtaactgtagttcctaccgtgtggttgtatgtgttgttagtttgtttttgttttgttttgtttgggaaaggtgacatttcatctccaatctaatgagtgagaaagatgcttattctgacaaattttcttcacaatatttcataggtgtgccaagctgacagattggttgactctgtactcttttattttattcctgtaactgggccagtttctgcccttaactaaaactggatcaattataggagtgaaataaaggtccatctcctgcctatttattactttgctttggtaataaatctatttttaaaagaacctattacagagacttccatttggaattatgcatacttggtgtcaaatggtgattgttctttgttgtgtttttccattcgaaacaaagcttttgtgaggcgtccctttattctgattaaggcctggtgtaaatctttgataatgaagcccattaacaaaaatgactataaatagctctacttctatcagggatattaaatactttctcaagcacacatgctcactgattttaagactcattccacagtgttccaagttgcgtgttagattttttttttcttgagacgaagttttgctctgttgcccaggttggagtgcagtagcgtgataacggctcactgcaacctcagtctcccaggtttaaacgattctcctgcctcagcctcccaaatagctgggattacaggcacatgccaccatgcctggctaatttttgtatttttagtagagatggggttttgccatgttggccatgcaggtcttgaactcctgacctcaggtgatctacccactttggcctcccaaagtgctgggattataggcatgagccaccgcgcccagccagtgttggattttatcattaccaaatagtcataaagagtgtgagcttattaatgatgctgaccattcaaagtgatcagcaatctctttgcacacacactatctctggggatgagtc

SEQ ID NO: 112707 - DNA, 1972 bp, Homo sapiens
gcttctctttccacttagcacccataccacatttgtggtagagtgacgatatatgctgttcaattgcatagctgcttctcctgggcagggctagggaaagtgaagggggagattaagttgcatgtggctagctcagttgttattaaacgctgcctgactgatgcctgatgtctgcagaggattttctttggaatttgatcaatggagtgctggacagtgaggacagcaaatggccattttatctcctgtctttaaaataaaatatgccctctctgaaggacagtctatgctggctctcaagtttaaatgtgaacggacagtgtgctccttacctttgaaggcagacacaagtttatcccattgatggtcatgatgctttgtggaaggaatcagcttttgttacgagctcaaaattcagccagaattatatctctgctggaggtttgatgggaagagccttttaatgtggtgcatgcatcatttcaatggctgtgagctcctggaattggaacctggtgccttgtctgtgcagaggtcagctggtgagtatgagctactctctttcctcagagaactgataccaattattttccattcaaatagaaatcatagttaagtttgagcaacacaagtatacaagaaggaaagattttaaaaacatcaatttctcatcagcttactactgaataagctagttataaagaggcaaagttaccactctgtgtaggaatgtctaatctgcctagctttcttaaaaggattatgtgctactatctcctatgggagcaatctgttccttaattaaggaaaagagaaataaaaatcacacactacgaatggacttgtgatgagtttattttgtttacaaatatttatactaattgtctgggatttcctgttttgtgatttgaatagtaagagccctcaatgagggctttttgagtgggttccttttccgaggtgagttgatttaagagccctgaaccttggccctcctgcccttgagagccatcccaaggaaagatacctggaaaaaattatttggcttctagtgtcctcatctataaaaacatggtgactctgcttctctgtcacacttaaagatattatgagaaaatgtaagcaaagtagtgtaattatgattcttaaagatgtggcaatcacagtgctttgtgcaatgcgtatgtcggtcaatctaacatctaacaaactatcacctggttcattaccttttctttatgagacaaagataaaaagagctgtcatacttgtttatagaaagtaaaagagtcttagagactaagactctgttaaccatccctaaatttttttttacttattaagttgaagtttaaaaaatgtgtaaaaatgtataattttcctggcattagaaaacaacataatgaaattaataactgtttgattttacaagagagtctatattgagctcattaaaagccaatgaaataaaaggttttttttgacaacaggaactcctcactttcttctctatctgtgctgatgatttttcactttcttaatgaggtttctagaagaggagaggatattttgatagtgtatcagcagattctaaaggggcagtggaaaggtcttgtgccagaagaagctggagtcaccctcacaacaggaaaaccattgcaggaggcttagccacatttccttgggactcatgctattaagctaaatggacatccaccaatcaagtaagacttgcttgttgcgaacatttttttaaaagtagaaggaaagaaaatgccagatggcattcagaacaccctgtgctctagtcttgctgctttccctgaaccaccttctttcctaatgactgctttgacaccacaacagctgattctccagagtacttcagaggacaaaatgtttgaggtatgctatgtcaagtggtagacggtgactcccctggccaaggagatagaagaatcctccccacatc

SEQ ID NO: 112708 - DNA, 1050 bp, Homo sapiens
cagaagacacagtctgtctggaggagtccccaaagactgttccaattggtgatgtgtgtctaaggatggctttttcaactagtaggatgcttctctgcacttgcagccacccaactgctgaagagctggaagtctagtgctccgccttcccccgggaccatttctgagtgtgggtgcacacctatgcctgtgtgcgtgcaggtgtgtgctgctggaggtctcggtttgggaccttagttcattgtagtgagttgtgggtgctgcagaggctggagcaagattatgacctagctcgggggcggagtggattatcttgtgagtgttctggctgccagccattgccctggtggggaaaatcacatctccatagagctctgaaatcacctggattgctggggagtggaaactgatcctctgctactgcttctgctgatttcctctgcaaaatggctcacgctgctgcttctattaaaaaagttcgagaggctgatctggatgaaaaggaaaaaaatcttgagagagacagaaaaaaacaacggaaaatccccagagaacgtatggaacgaaaaagaaaggtatgaggagcatccttttaaccctctttctctgcagctctgtgtagcaccatcagcctcagaactggcaacttcatcctcccttccttccatcattcccctgcaccatttctaagctcagtttgcagcctagagctcatgcctacatttgctgcattgggaggagatgcttgagcagggtgaatttcctttgctttgaccaagcaaggcaaaaatgcctccacttcatttttctttttttttgtctcaattatctttatttaatctcaaagctaggtgctttatctcttcaggctactcttagtactgggcacagaagaaggaaggggttgatttacggttggagggttaaagtattttcttcttcttgttcctcatctctattactctatctttagcagtgtgtcttctcactgactgtatatttgatgtagacctctagttaagaataaactaaagattttatgtgctctct

SEQ ID NO: 112709 - DNA, 1204 bp, Homo sapiens
gttttctatcattaatcctttaattttcttttctgaatatggcaatgaaatcaaaacaaccaaggttaaacaagggatgaaatgttgattccttttacattgaactattgtttctttctcttaaaatattgttttcctttataatagaaataatcttacaacttgatggaactgaaatactcatttagtcagtgatctagatctataaagaaagacctctgtaaatgttttaattaacaaagtaggtcactgaataatttcagaagatgataaatggcttattacattagcagagcattaaaatagtggtttgtacacaagctgttgttaaacatagctctgggattagggatgcaatggggatccatatacttaataatccatatgctcaatggactctttttttcttccataatagatatgtttacctttcaatttgggggatgttgtctttgcctcacttttggaaagacacttgagaaccaacattgagttgagatcttactgcatagggattcattgcatttcagtttactacttatctcaccaccaactagatcaaatgactgttactaggctacagaaataaaattagcagtatataatgatttcccttctggggaaaactttcatactgcttgtctgacctttaaaaggccgtgttgtttcaagattgcattaattcttttttttagtatcaaaagtattattagccattttgtggaggtcgacttccttcttgacagcgactgcagttctgtttctaatgctctaaatggaacattattgtataaagaattttctgtgattatatcttttttatcttttgttctccaaaacacagtatatgatttcttggctagcggcccttgtcagcattcagctgtgacctagcaactttgcttagctagagtaccatgcatacacctggaaaatcacttgttctcactctggtttgtttctgtatctagttgaatgtttttccctttccaaaccttgataaaaacagaaaaactgaaaaactgtactgttaaaataaaaggtgccagttgttgttgagaatctcagttgcttggatgcttcattgctttagcttgaatccagaaccataggcaagattattggttagtaatgtggtcatatgacaggatcatctggtcttcacatgtagatattatatctaagctagaaccagagtaaatta

SEQ ID NO: 112710 - DNA, 1018 bp, Homo sapiens
tgggcattgcgtggagtagccttcggaaagctatgcaagctgttagcactgtttattaaagaatgttgtcctttatgtaccagaagtcaagaggcagcagtgtggaatgaaaataatagctggaaggaatgtaaaattaaattggttaattgatgtttgtgggcacatgaatagcttggcaatattcattttgattaatctgtgtaaagcataaacagtaaaagtcatttatattgacctcaattagaaaaattatgccacaagtccatatagggaatttagtgtagatccataagttatgcaacagtttccctgattgatcagttataaacagggccaatttgtaaaaatcatgatgtgtttaacttttagtcaaataaattgtattgaatgtacccaaacacggaagaaaatagcatgctgccttgcttattgcacagaatgttccaattttctttccacaggtcagtaattcccaaagacaggagaacttgtccttggattcatgtgactatgtcggcatcgagaattctgcatgcaatagggataaccaaagattaatttaattagataaacgcatttgagtgaaacaatcggtcttgaattatagctgccatgatcaaaaacaaggagaagggcagacagtaatcgaagcagatttctaaattcagcaaaggtaacatagatcttacatattaatgatgatctgaaaaatataaagtattgactaaatatcacgttaggatagtttttttgcacatgatagtttagtttaagagaaactctacatgacctttttaaatttgtgtgatgttcttgaataatccttggatcttggaggagagaaaaaaatttaattcaatgactctgagtgaaacattctgatttgccactttaaagactcatggcaatttttttttcagtctttttaatatgatagcactagccctttaagaataaattaatcggccgggcccagtggctcacacttgtaaccctagcactttgggaggccgag

SEQ ID NO: 112711 - DNA, 1019 bp, Homo sapiens
gaaataataacagtaaaagggcctgggaatttaagaagatattgcaaatatgtcacgtcatggaggctttgaatttcactttctaagtcatgtatcaaattcaagtaccctgctctaagtgtggtcaaacatgcaaatatttgctttctgagtaatttgccctaatgactttgaagcatttttgaaaaacagtggtgacattgttctgccctggcagaaagcatattccttgtcagatgtccacagagatcccgactgtctactggcagattattaaaggatggtgctgcattgtatttgctaagctttccttcagtttgacaaaatgttatgtatataggttgtcacatcacccaagcttctgtgccagacctgtctggcagccacccttggttaaccactggaagatagaactagaaacgttttaacttctgaaataaggtcctcttctacagaccccttacacttttattttttattagaaagtatctgatcgtcggcaaagtttgaagtgatcacacataggcagctgctcataggaaattctgttttcacagctatgatgttttccaggttccaggttggtaatttaaatctgttcagccagaaaataggaaatttcagccatcacagtagcaccaggtgtttgcatttgtctttccttggcctgtccctgtttggacactaagctttagcagtggggttcagggatcactacatggcatatttgggacagtgctaatcataggagtatggatattatattcaccaagcagaaagtttctttattggagaaagcatgagatgatttccccgagatgaagaaaaagaaagaggggggtagaagaaaacaaataactagttatttagggaaagtgtattccaacagttgtcagcatgttacttggttggttcatactctcagtggttttttcgttcttaacaaagcactgtaatttcttttctaggaaaatttaccccaaatggtgttaacctttttttcaaaggccaaaagggag

SEQ ID NO: 112712 - DNA, 1141 bp, Homo sapiens
aaattgagcaaggaggccgtgcatgctgtggagggagcacactttagaagaaggcttgacaggtgagagaaccgcacagaaggagcatgctggcatgttcaagggccagcaaggaagcaagcctgcctggagtagaatgagggaggggaagcgtaggaggaggttggggagagcagaaagcagcattgggtcatgtaaggccttgtgggctattttaaggactttggctttaattccgaatgagcagagaagtgattagagggtttttagtggaagagtgacatacgctgacgagtcttaatagtaaggctcaggctgaaagggaacaagggcagaagcagggaacacttttgtgatactttaggtgagaagtgaggtgttttacagtagagcaacaggcaggagaattggtgagacgtggctggattctagacacatttcaaaaatacagctgattttgttgatggagttaatgtaggatgaaggcaaaagaggaattaggcatgagggttgaggtcacaatggaaagaatgagagctgaagttttattaactgagatggggaagactgtgtgaggagcaggtttgagggaatactcagcaggtcagttttgaacatgttaagtttgatttgtttgtgtgatatccaagatattcagtaggcagttggatatatgaattttctagggtccagaaaaaagattttggcctgaagtgtacattttggcatacccagtgtatagatagtattcaaaaccgtgttactgcatgaggtcaccaaaagagagagagtttatgaaaaatagaataggttcaggggcttggccctggagtactacaatatttagaggtcaggaagatgagaagccatcaaggagaatgggaaagagtgtccagggatgtaggaggaaaacctgaagttgtgatttcttagaagccaagtgaaaacattattttcagatggatgaaatgataaactctgtaaaatgctgttgatccaataagctgaggaactgaacaacagccttagtaatgtgatggaaactggtgacttgatcatagcaattttggtggagtggaggggtaaaagctggactggagctcattcaatggatgacgggcagaccaaggactgcttcaag

SEQ ID NO: 112713 - DNA, 1046 bp, Homo sapiens
atggcatttacataggagagttgaggctgggtatggtggttcacgcctataatcccagcactttgggaggccgaggtgggaggatcacctgaggtcaggagtttgagaccatcctggccaacagggtgaaaccccgtctctactaaaaataccaaaaaaattagccaggtgtggtggcatgtgcctgtaataccaactactcgggagacggaggcaggagaatcgcttgaacctgggaggcggaggttgcacgatgagttgagattgcaccactgcattccaacctggacaacaagagcaaaattccatctcaaaaaattaaatgaataaataaataaatagagttgaaatgttcagtagtaaaattgcaactctttaaattattgacaagggtgactactaataaaccaagctccttttacccatctacttcctaggttttattgtaattcaaaatacttaaaaaaatacatcacttttgcatacgttaatacttttgctagcctacgtaaacgtatgttgaactcaaaaatgctcaattcatctcatcacatttagccaaatcttagtgatggaacattggcagggctgtggatggggagagcaggaatatatacatgtattactgtttgcatgtaactgggaaataataataccttacatttgttttttacttcacaaattacaaacagaattaacctacattgtttgatactcttaaataactatctgaggtaggcaaagtaggacatttcccttttttactattgaagaaaccttaaatcctattgtttaggactggagagacagcacgggagctcagatttccttttgccctgtgcccgtgttcttcactctgccaccgtccctctcagaaccccaaatgtggacacgatttagccaatattctcaaaatgaagaattctgcttcatcccattgtcagtccttttatttgcatcacaacacccatctaaaatgaaaattaagttcagaaaactcaaataagtctaccaacaaaaccatttcttttcttttttaaaaaatt

SEQ ID NO: 112714 - DNA, 1181 bp, Homo sapiens
accctctgatgccttgacctttgcctcacgagtctaatttcagataggatatttaaagtcctaacctaccatgctcatacataaaaacttgctgcttaatactcttagtaataaattttttacagaatgattcatgtcaacctttaggctgaagaaaatattagtcaaataccatgacaaaacaattctgtgattcatggtattgaatattataagcaacaggctcttaataaattaatgaatgtaataaatattttattaattgatttgtagatttttccagattgtttatttaaataatcataacttctgtataaaacagcattttggctcctctctccggtccgtgcctccaagatgacaaagaaaagaaggaacaatggtcgtgccaaaaagggccgcggccacgtgcagcctattcgctgcactaactgtgcccgatgcgtgcccaaggacaaggccattaagaaattcgtcattcgaaacatagtggaggccgcagcagtcagggacatttctgaagcgagcgtcttcgatgcctatgtgcttcccaagctgtatgtgaagctacattactgtgtgagttgtgcaattcacagcaaagtagtcaggaatcgatctcgtgaagcccgcaaggaccgaacacccccaccccgatttagacctgcgggtgctgccccacgtcccccaccaaagcccatgtaaggagctgagttcttaaagactgaagacaggctattctctggagaaaaataaaatggaaattgtacttaaaaaaaaaataaaaaaaaaaaataaataaaacagcattttgtcgtttctttttccatttatattcatagttctctttctcttttcattgcactggctagggattgattgcaatgtcaaatagtatcgcaaacaggaatccttttcttgttactgcctttaatgagaatactgatgtttgcagtggtttttggaacgtttcctctgcaaagaacctgatattcctagttggatgcttttcaacaattattaacatttaatctattgatctatttaatctggaattaattttaaaattttaaaactagccaactaggaatatcgggctgattccagagggcatatttgcagattaaaatttaaattaaatcaatgtaaattatttgcatatattaatgaatcacttgaat

SEQ ID NO: 112715 - DNA, 1046 bp, Homo sapiens
aaggcagtaacaagaaaaggattcctgtttgcgatactatttgacattgcaatcaatccctagccagtgcaatgaaaagagaaagagaactatgaatataaatggaaaaagaaacgacaaaatgctgttttatttattttttttttttattttttttttaagtacaatttccattttatttttctccagagaatagcctgtcttcagtctttaagaactcagctccttacatgggctttggtgggggacgtggggcagcacccgcaggtctaaatcggggtgggggtgttcggtccttgcgggcttcacgagatcgattcctgactactttgctgtgaattgcacaactcacacagtaatgtagcttcacatacagcttgggaagcacataggcatcgaagacgctcgcttcagaaatgtccctgactgctgcggcctccactatgtttcgaatgacgaatttcttaatggccttgtccttgggcacgcatcgggcacagttagtgcagcgaataggctgcacgtggccgcggccctttttggcacgaccattgttccttcttttctttgtcatcttggaggcacggaccggagagaggagccaaaatgctgttttatacagaagttatgattatttaaataaacaatctggaaaaatctacaaatcaattaataaaatatttattacattcattaatttattaagagcctgttgcttataatattcaataccatgaatcacagaattgttttgtcatggtatttgactaatattttcttcagcctaaaggttgacatgaatcattctgtaaaaaatttattactaagagtattaagcagcaagtttttatgtatgagcatggtaggttaggactttaaatatcctatctgaaattagactcgtgaggcaaaggtcaaggcatcagagggtgcttgcatgactaacttcaactatattttttattcttttcaaatcactgggaaatttttgtgtaataattttgaaatgccatgaaatcatatcactgtgaaagtacacatcattt

SEQ ID NO: 112716 - DNA, 1059 bp, Homo sapiens
tgccatagctaaaagaaagataaggaggtaagaatcctgttgattgccaatgaaatgccttatgaaggcaattaggcctgttagggcatcatcttttgaaagcacaataataaatatcatttcagaggccaaaataattattgttttgtgcagtcttgctccagtaaacacatctaacagatcatccttatcagtttttgggggtacattttgaagccaatatacccaggaagaacaacactcagaacatatttttgtttaaaatctggctctgaacacaagtataacgagtgggcagagcatacttaggtccttttaagtaagagctttgaggagcaacaccttcccttaaagttattggggcccaatttgtagcttttgtactttgggatcaagaattttatccatccagatttttaaggcagttcaaacactatttttttttttaaaggaaaggcttgctatagaacgtctttgttggaatgaggcagcttctgtgtcagtaagggtacatcacactctacaattttcacgatttgcatgaatcaaccttgccacatcatatgctaatcagagcttattcctctgatgaaaacttaccttcatttaatagtgattcttccctcgacacatatgagaattcttccaaagaacagccaccggtacactagacagccaactgtgtgttctctgtcctttgtatgaaatcatcattctagatggccaaaaacaaaaagcaagttctcctttatcaaaatatgagaactcccatctctatcacatttcccttttttctgtggctgccaaaagcccaagtgttcaattattgtacctcgttcattctgagttctggttaccaccactagaggactacaactaaagtttgttcggggttgcacttatagccctatcttgactgtagatatatattttaaccatatatatataaagtgtttcaagtagccttaaatttttgaatgtgaatgtatttcaaggtataaattataactaaatactccaaagcagcggttgccaaggaccgattttgttgaagacatt

SEQ ID NO: 112717 - DNA, 1050 bp, Homo sapiens
ttctgtaaaaaaaaaataatgtttttacagggctgtgtggttgattgccatttgatatcctgtgttatactgctaaataccttctacagtcttatgtgcccatgtgtcaatatgcctaaagaagggacttgccctgagctgtttggtagctaatttgcaaaaattaatgactaatcaagacattatgatcactttaaagttcaataattgtgagattattcaatgtggcaatgaaattcatgattgagaagaaatatttgaagtttttaaatttcccataattatggcacttagcattggtaaataaatgatgaaaaatgaagctaccaaactttaatatggatttccttttaattgaggcacttgaacaaatcattccaaatgtttagccttgtcccatgcagtacagattagaatgaaatctacgtggtgaagatccgaggttaaatactaagaagggagttctcagtctctccagtaccatttttatacagtatttctctactctcttccttcttcctaaatattaccaaaattaaaggccaaaaactttttaatgacattctgttctgtgagcaaatgcctcatctctaagaaaaagattaatttcacactcttttaatataaactatcacagtgctgcaggaggtaatacatttaaatatgtatgtgctaatgagtctgtgcttttctcattcacagagcatttaatttgtgccaaacaaagttctaaattcaggctactatttttcatcttaagatactacatgctttactcttccattctgttaagtaatgtgttgtgtttaaaattcagttattattaaaaaaacgattattattgctggtactgcacattgatacaatacacttgaggaaaattattttttcctcagaagtctgcagtgactttaaaaaaattattttcggaaaaaaatggagtagttaaattgtggtaaattaccatcgtctctagaatgcagtcctgggttcaagcaattctcctgcctcagcctcccaagtagctgggattacaggtgcacgccacca

SEQ ID NO: 112718 - DNA, 1013 bp, Homo sapiens
aatattagcattccaatgatacatcgttttataaaacaacatactccagatacatttactttacaaaagtctaaatctgttatcagaaaataagcccattagaggataaatgagtcatcaacaaagaagagaaaattagagtagatatccaatttagtgctttcacaatcaaatcatttgacatgaatttctcataacttcaaaagaaatgggtctccaaaatactgagaaaaaattaactgtgaactatgtgccaaattaaagttcaccttaaagtttctagatttaagggtttgttgtacaaggaatcagaagaaattattctctgcagtttgtcaattaccacaaccaaatttaaaatcaaatttagtttatttggaatggtttactttacttggttgaaatcatccttatcttctagaacagttgtggtaaatcaatctgtaataatttttattccaatatcttattctaactgtaaaattacttgagtgaatgaaaccctgccttctttagaactatatatggttttaaaatatgctgatttttaaaaacctctctcttagagacagtagagtaataaccggctacttgatgagaaaattctcttaatcaaacccttgttcttcatgctacacctaaagccaccctttcctgacaaatgtgtcatattttggggtagaacaaagatacctgaggcatgatgcatggcctacctcaacagatgacactgctgacagtcactttattcatctttcagtggctctctcaaataactgtctataattaaatatgctcattaatcttaaatagaggacctcctgggcaaatcaaatttcttgtctgatccatttttgtctagtctcataacacaaaaaaatcagatacaaaataatattttatttcagaaggaaattttgaatcttgaaatgatttatttatggtataagtggtattaattttttgcaacgtgttgatcttcagcatctagtttctcactgaaatagattcaa

SEQ ID NO: 112719 - DNA, 1030 bp, Homo sapiens
acatagcagcagataaacacagttaaacaaagacattcactggggaggatcagggaatgtttctccaagaaagtcacatctaacctgagccaagagaagaggggaaagaagatttctggtaaatgagagaatatgtggaaaaactcagaggcatgagagaacatgacctgtcaaaataaaggcagctcaacacgatcgtagcatggaatgagagatgaggccttgctacctctcgctctttactgaatcacagggctcttctgagccagtttaatcagttttctgaagaaaacaaagagccaccaaaaagctcatgcagtatcacattatgatcacacagatcttatatatgtatatagtcagagttgctcagtggaatttgattaaccagttgaatttctttgtaaatatatttgaagttatctactgcttttggaaagaaaataattgatgataggttcattatagcctttcaaacaattatctaacatctaggtcaaagcctaaaaaactagacaacctattttttgtactttggtggttttagttgaagatgttactcttatgtcaagggattcatttttttttaaagtttccatgacagtgtcaattgatgcccttaatgtattttcactacagaaactgaaggtttgaatttgacactcaatagtctttaggtgatgttcaaaataatgagatttgaatttttatgtttttggggtacacatatcttttatttatttattttagttggcaaataaaaattgtacatatttatggtatacaacatgatgttttgatacacacacacacacacacacacacacacacacacattgtgaaatggctaaatcaagcttattaacatatctattacctccacatacatatccttttttttgtgatgagcgcacttaaaatctactctcagcaattttcaagtatatactacattgttattaactgtagtctccatgttttacaataaatctcttgaatttatttctcctgtccaactaaaattttgtat

SEQ ID NO: 112720 - DNA, 1284 bp, Homo sapiens
aagaaaagaaagtttgtccacgtagtgtaatgtgttctgctaatcaataatctcaggtttatagttttaaagttggcactattgtaagctattttatgaatatccagcatagagtctaagaaataaataccttaaagtctaagtgaataattagcaaaaacaaacttttcttgggctttttccttgagcaccaatgcccccttccactatctttttttttttctttagcaagataggcttgttaacttcatagtctaatgggatgggagagggcataagctagtggtacacatagagtgccactgaagccctgaggctctagcttcctggagcagatgaaaccaaactgagaccaaataatgagtaacaatggtgaggaaaagtggggagggcatttgaagccttaacaaggtcttgagcaaaggctcgcagggtgtatgagaaaaaagggaatgcagtgttgctggagtgtaagtgtggaggacgggaattatatttgcatagcagggggatccttctgccagtgagaaagaggatgaattttaaaggagagtttcaaagggctaaacctggagattgcagccactctgagaagcaattgttcgtgtattaactgcaggtgtcatgagaggactagcactctaaccttggtgatagtcatggagagaatttcagaaataaaaaatttgagagttttttgagacatgtgtaggaggcaaaactagtcagatttcatgatgaatttcatgatttaggtgaggaaggggaaggagattaaattgagtccttggcttcaataacttagataaagggtgctcccagaaggaggagcccctctggagttccataagctgtcttgatacattggtagatttggaccttatactctgagattcttaaaagatttcaaatttgaataaagtgtaatgttcatggcattgcacaaattgatgataatctatgaacagtcttattactgtcaaccataaagcttctattttttgcatggtctcccttattaagaataagtacttgatttgatctgtttttcttctttcaaagtacttaggttgaggaagaatttagaataatactttctataaaacaggatggatggcttgaatgctcctgcttaaatccaatacttttcagcacataaggtcaggggacatgaaacaaacaagacatactgtgttctccaggtctccacttgcatttctagatcactagatgtattcaccatttccaaaatagagtgacagacagcatctcattttcatggtc

SEQ ID NO: 112721 - DNA, 1305 bp, Homo sapiens
atgtttaataaatattacagtttaccaagatagtaattattatacttttcaataaaattacactttcataccacctattatgtgtccataaagcagttgtaccgtagtaaaataaaaaatataaactaagaccataacaaaacccctagtacatcccctagatgaacagcaagtaaaactttacacttctatggctatgttattatacatttattaactgaatagcagaaccattgacttcatgaaaaattggcaactgtattggaaaatatttaaacttgtttttaatgtcttaaatcagagtgaacaatttctgatccaagggcttaaattattccagacctttgtcatgctggttatattattttagtgagaataattctttagttattattattttagagggaatattcttttagagcgaataacttctctggtgttggaatagtccatctttatttcatttaagtagattatacgacatcatttttaaaaaagcagttagaaatgatacacattgattaaacaaccaattagtatttcagaaggcagtaagtaagtagaggaggctagaatacaacccatagaaaggtagagacactcctatatatggttttgacttattcattgttgctccctctctctgtccaacttttctcactctctgtgtacatatcctaatatctttctctctctactctaatcaattttttgtgattatatatcactttgtctccttctttcttttcttatccctctgtatttctttcctgttggggttttaggaaagacaaaaaacaccaacacctctctattcctctcagtacaaaaccaattgagagatagactcaggtatcaactaaatggatatcaaaatttcacttgtatgactgatataccgattgcaaagtgcgactttactttcatagcccaatgggctctttaataccacattcctgaaatagacagacttgtctacttagccatagtcactccttgagagtggcaattgagacctgattgattctttcaaagtttagacctttgcaatctggcagccacgtcacaaggttttatttgaggtaccattatttaccattcagtttgttctcattcaagctaaattttcattttccctttgagaccggtgtttctgctattccagaagacggttgagcccatagaacagctgtattagaaacagaagaggttggctcctctactattttcccttccttagccaaattcaaaacaaaataaaggtgaatagaatttaagagttgctgatctagcccgggcatagtg

SEQ ID NO: 112722 - DNA, 1050 bp, Homo sapiens
tacttaaatattactttccaggtttacaatgacacagagatacttataggtaaatttatctgcttgcagcttcaggctttaaagtgctattattttgattttcccatctttggtctttcttcatataattttaacttctattaaaatggtttattttgttaaattcaaacttctggtttttgcttactctcattttctactagtcctctatcaaaggaaatcaatgtattaggtctctctatatacattagagcaggaataagcctgtaggagaatatttaacattcaggagagtcgttcccaactgctttcctacatctgaatatagtgattcgaatgaattctgactgctctgattgtccagagactaaagaattaaatttcctcctatgttagccttagacataaatatatacagctcctcacgtcttgcccttttcactaggttgtacattcgcttattcaacagttatttattgactgcctgctaagtgctccatccacactgtgccaggctctagaggacacaggaagaaatatggagaacatgttcactgttattatggcacttttatggctcctatgtgtggacttagtcatttctcagtgaccaggaaagtaagcagttccaagtaatgacgaaaccatcatgtgacatctggggcttacaccatgtactttgtggcagcagctgctatgtctttactttctgtatcctcagttcttagcagggcacttgacacttaataggagggtaacaaatgttgcattgaaaggagcatagaaacggaactatagagcaagtgagaacaaaaagagagtttcaagagacacagtcaatgacacaatcagggcaagtaatctaacctgtagttacttaaacattgttacagtcaggaacttagctacttcaattcactctttagagaatgggccaccagaagatactctacatgttcttccatcgaggctccatgttatataggccataagccatcactggaataaatgtagtggagaggttatagcacacaacatgagcgtggaaac

SEQ ID NO: 112723 - DNA, 1075 bp, Homo sapiens
taatagaaatgaaaaacataattggaaaacttaaaataatatgtttctaagatagacagatgcatatgttattagttatatgtaaatgttttcaaatatactagttttctttttttaaatgttattccaatgcattcaaaataaaaaatataataaatacccttatacccaccagcttaaaatgtaagcccttatcagttcagaagatgccccggattcgttttttttctgataccttgcaatggagcagggtgagagaggtgactatagaagcactgtcctgccgcacatagccatatacacaatcaacttaagactgaagtcattctttccctcaactgcacagtcactctttgcttcacatactccatttccttcctgtactcagtgaccctaccactacagctgttaaaaatgatagggaagccaattttgccatgttcacaaatcacttttttctcttagataattttcctactgaatactttctggaactatttagggcaatagatccagttcatattcttttcaggatctggaatgctggcttattattaacgataatgaaactacttctgtagaacacatcaccctagtgttgctgtttgtcatcctttcctttttctccactaaatggatacttattattcaatactgacttcaccctttttctgatgtattccctaaatatgtattccaacatcaaaaccagcctgggtcatatcttcccaggattaacatgctagaaaggactttctacctgtagtgtctagaaaacagaaggtttttttcaaagtcaggataagaatcatggagactctcaggaaaaaatgtagcaaattactctgaccttcctatagctatggtgtcacccaacatgtataattatgaataggagctttttgtgcacaccaggggctatgagccaaggcagtatttgtaaccattcaatttatgtatgttttctttcagatcgatatgacatcagaaaaaagtaagaatttaaagaaaattgagtttgtttgaaagctggctaccataaaaagaagcatgaattaaaatgcaagctagttgc

SEQ ID NO: 112724 - DNA, 1052 bp, Homo sapiens
tatatttataaaagcagcttggccagttaaattacaaatatacctaatttgcgagctaattagcagtaaaatgcaatgattattcatctaagcattcactttcttttgacattcttgttaaccctggtattgctgttatgcttgtttagaaacccaccctaccgttttgtccatttgttagcaaaacactgtcatctcatcattttttaagcactgacatgacagtatcactttttatgtaatgcaatagtgacttctgtagagagctcattatttttgtaggatacacctgcaaaagtgatactgtctaatagttcttagctgaagctaaccccatccaatgcctgccccctcccccatcactcttttgcactttttactgtggtgaagtgtaaccaatgtctttagagctgaggtctaacagacttctgtgaaaactttctgaaaaaaaaccacaaaacaaaaataaacaaaagtgaagagccaagaatgcaaaattaaaaccccctggataaaattactaatcacaacagcatgttattatagggttaattttaaataatgatgcaaatcccaaacctgatctagtagagagagaactggttttgacagaccttaaaagagctatcttagaactcatttcaggtttgtaatatccaattaagattttagtttgttggactatttctagtgactctctggcttcttgtgtggaaactccagttgaattttacagatttctgcttttgtgccccaaatgctttttaaaaatctgatttttaaagtttattgaatatcaataaactttatttcagagtttattttgatttgctgtatttcacagtatattcccaaaatgagaaaacttagaaccatgtttaatatgctcatgtggccctacacaatgatctgagggcttttttaaagtcctaggacaatgtaatttactactaagttatggaagttgctttgaatgaggcttaccctcatgttaaagcattattcagatctagaatgtttgagattctggatgttttcattggtttatataa

SEQ ID NO: 112725 - DNA, 1053 bp, Homo sapiens
ttatgcatggactcatagggaaataagtacacttcgccacagtaatgttttacatatctgttctaaattcccgccatcctcctgcccatacgtttcagcaaggccgcctctcccagccgttttactccacctttgctttgcatggaaataacttggcttacataaactgtgtgtgtgtcccgtgtgactgtctctgacttgggttgccatgcatcacattttaactttggactcacttataagtttaatcacaattgttgtttctgttgtttttctttcctttcctttatttccctccttggtctgtccattctgtgtctaaacaaggaggttgctccaaggaaaggaccatgcctcgtagcaccagactgtttgtttcattgttaggtgtgaatttcccttagatgaaatgccggtttgcagctgattcagatgtattttatatagtctttgtatattggtagaactaaacatactgaatttcagacttttatatgattaaaaatgtatatacatcattagatgttattctgagcttgctactactggctttctcctagaggaaatcaactttctgcaatttctaatgctttttttcttattttttcctcatggttggttttcttttttttttcaacattgatctgtaacatctgaacaatcttgagatacctctgtgtaatttcactgcgttctttgttttgatatgtagtgtttttttgtgtgtgtatgtgcgtcttgttttagctttgttgtatgtgtggatgtgctacaagtgagaaaaattaagcaagttatttcctgctcatttttccttttcagttgttttttttttcgttagccttgctttgctcttgtaccctgaggccttgtggatctaccattcccagcccattttgttgcccctcccaccaccaccaccacaggaaaagacgctgtgtcgtttcagtcctgattacatttgccaatatcttttttgatttccattttactttcaatgtttttcattcacatcaaagatgatgagacagaatctacagaaacatctgtcct

SEQ ID NO: 112726 - DNA, 1022 bp, Homo sapiens
agtgttagagtgagtattaatcaagttaatacttgcagtgcacttgaaacggtgcctaacatggaataaattttcagtatgtattagctattgtttgttatgatgattattaactgtactcatcttactcttcagattctgtgctttgactgtctcagtcaattcccacttgccattaggtctccttggcatgtaacacactctgcattttctttccaaattctaaccccatgttaggtgctcccacactcattgactggcacctatgacccagttgctctgcactggaattgaccgttacttgcgtggactcttctacatgatccgtatcttgaaggtggacacagtgtcttcttcatctttgtaatccatgggcccatctcaggatgtagcacatttatcttcttattttttttatcctcttatatttattacttaataaatatccattcaatataggtaagcttcaactaaatacttaaatcattctgcctttagggttctcggtacttcaagaggagttatgcactgcacagcacaagcagaaagaggagcaagctgtttctaaagaaagtgagacctgcgatcaccctcctatcgtctcagaggaagacatttctgttggttattccacttttcaggatggcgtccccaaaactgagggggacagctcagcaacagcactctttccccaaactcacaaggagcaagttcaacaggatttctcagggaaaatgcaagacctgcctgaagagtcatctctggaatatcagcaggaatatttgtgagtttccaaagaaagcctgtcaaatgtaataccaaagaaacaggctattgtggatgccaggcatatataagcataactagtttttaaatactttttaaaatgaccctaccaaacacaagtgccagagctaaaggggaaaaaaaaagcgttaacatgtaagagacataattgtgacagtgtttggggcacagacctacaagaaccaacttccagagctgtgactttgaacaagtcc

SEQ ID NO: 112727 - DNA, 1100 bp, Homo sapiens
tttttaccctgagtgagcacttttcactttccagctaggtctgtttttcagcttgcagacaagattgagaaatccttgaaaatttggttttggttaaaatttttggtttatttatttgaaatccacactcccttggaaactcttaagtgcatttgtgcacttctgtttgtttgtctcaaagaagggactgtaacaatctgagtaatttccatgtcctcttccttattcctctagtggttgaagctgtgtagcattttaacatatatatattcacaaatatattcatataaacagtatacattttgaatcagtcatttgttaaagaaaagtatattcaatgaagatgaaatttaaataaaaaaggacagagtctatcctccagggattgaacattttccaattatctggtcttttcctgttgtgcaaaaatgactcattgctccgaatgtcaaaaacaaatgcgacaaacaatggcacttcatcatttaaagtaatgttgccaagagaaaaaatttcctgggagggaggtttcccacaagccaaatctcctaagcctcaaatgctagcactttttggcagttggataggaaatgagacattctttggcagccaaaataagagaggccgatggtgaaactttttgagacaccctatggccttcttgtcaaaaccttcactggagctcaagaaaagcatttctgttgtgttatttgcagtgcagatgatgtctgtgtaacaacataatggttattcacctttttttgattttgatttttgctgtgttatcaaaaacttgaatactgtgagaagaagtgaattttcagttgacgaatcagcatcttgttcccatggtgataacactaattgaatatatctatgagggcatgtattagttaatggaaaaaaaaatacaacactaacaatacatagctgcaatgtgtacaatggctgatttaattaaataaaatgtacaagtgttaaatgtggcaacggtgatttgttcttctttatcatgaatctgtgatttcaggagaataagaggttttaaaaagttgagctagacttgaaaccaacagaaagacacaaattgctttttttct

SEQ ID NO: 112728 - DNA, 1053 bp, Homo sapiens
actgtggtaacaactgcccatcctatataagaaaaaaagttttcttcttacaactaactggtgttttcaaaatatacaattctttaggccaaaaattgttgaaatagtcatttccatttttaatcaatttccagtaaaacagctacttccattgatttaaggtgttatccaacagctgtcatcattagctcttaattagcagttaacagtacaaactgcactcctcgccaggggtgtgggtgtgcctagagtcagtgatgtgtagcagtagttctttccacactgtatacatgtgaagaccgtcctttggtttgtggctgtagccacagtttgcaggacctgtcgctgtatgccgcaatgcctctccgcctcataacccatccagcaccattgttcagagtcacccacttcctcctgatgggtacatgtccatatggtccatctgcttatgtttcccagcattcttgtgcagcacctgttgaagttgggctcctgtatgcccttgtgtcatttctgtcaccatcctgtttccagtatctcacttcagctcaccattcaccacgagcttggatctcttgctgcatttcatccttcttacacatctaggaaagtggagccctttacaacaagcagattctatggctatgagactgtgtgtggagacttcatccttcttgaattcctttttacttttcctgattactaggtagtagtaatgaggatgtttgcaaaagtctcaattaaggacaaagttgttggcacccttattacttgaatggtgattcatgtttgatgacctggatatcgtggtctcagctaatttatagaatcacttgattaatgagctctctgtgtgggtcttctataaatatgtacattagtgaatagtatgatgactgattacccagattcaactattcttaagttctgtttgatcactgaaaaccttcttttctgtgtgggatttcctaaggcagatgatctcatggtactgatcttcttggtatctacatgtaatttatatttcaggacttgtcttgcatacatttctca

SEQ ID NO: 112729 - DNA, 1041 bp, Homo sapiens
taacccagtctctttaatatatctgagttggtttctttacctgtaaaataggaatatgttaccctcattgaattgtaggagggtcaaatgcagtgcactttaaaggaagacaattgacaattgctacttaattaatgggtaaggtcttaggaatgccccaagctctgtcttcctgctacctacctgagagtatcttctaagcatgaactctaaggcatgaactctaaaatgccttgaattagagcattgtcacaaaatatctttgttcaaatctaaatgttaatggaagatatctcagatattttccttgcaataaatcagctcccagcatacatagatctgtttctgctgatgaatttaaaaagcaacagagtggcctgagactcaggcagacacagacaggttttgtgaaggatacaatcatattttttaaagtatttttaaaacatgataaagctatatttttgtaaagatagggggttgtagctaaaacgctgcatttggaccttgaacactagagggatagtgtggcatacaatagtcagtaaccaagggaagcaggactcagcataagggacatttcatactctttctttgcctgcttcatcaaaggccttttccagcctcttctgcctttgtgtttatctctccttgttttcctagtttccttcctattttctactttttttcttcatccctcctgtctacttcataggtaagaggcagtatgtatagtggttaagagaacacacttagcttctcagttcacttgctgtatgacatggcacaaattctttagtccctgtgtctcagttccctcttagaaatggagatcatcaaagttcttgcctcatgggactgcagagaggattttttaaatacagtaagtgatagttatcattgctattattatacaaagtctttatttataaatgaagtttctagataactgatatatgcattatagtaggcttaaaaaacaaagtgtattatataactcagcattattggcgtgattatcagtagaatgccctcatctga

SEQ ID NO: 112730 - DNA, 1073 bp, Homo sapiens
atacttaaagttccagaatttaaaatttgatgagaactgttgtgctgtttcaggttgtgaaaattcatttattcatacacgtaattttacctttgagcaaacttcaaaaagaatgactgccaaaatgtattataacctgttttctcaaatgtttttctcattctcttttttaaaatttctctctaaaaacgtcatagggacaactgtaattaggctaattgcgtccactcatatgtgcagcttatggcaataacagagcagtcatagaaagaacgaggtgcagtatgcttcaaaatgcagcatctgcagtgctgtcaaggccagccatgccgtcagtcttgagctaacagctgtgatgaacagaatgttgtgttattcctttggtgtgaaaatgaattgacagttatttatagggaataattaatgtaacattttgtaaaagtaaacatgattttcaatccttgagaaactgttaaaaaggaaaaaaagaataggaaatgaaggatacttttgaccaacagaaaaggcttgaagagaaatagatgatgtctacaactaaaacactatcttccagaccgtttagacataccatcaactctgagaataatagttgaagagttaaacatttttaaaggaaacaaacccatcctcacagtaattgtgaacatgtggaatgtctctgtgaagactatagtatctacttttgttaatatagtaagtaaaaatcatgacaatttcttataattctgttttttcagttcattatttaaaataagagagtggaaggaagtagggtgggacataggaaggaaggaataaaggaaggaaggaaatatgtatatattaatcccaagtaaatatgatgctgaatatgtgatatgaataacacatttattcataatctcgcatggtcaaatggctggttagacatattagagattattttggaattgtgtgatgcaaaagaagtaaacttggctgaatgatttgtctcaaacccttatcacatgttagctggttaagtgcttttgtatcatgtgtttgattatcatgtttccatctgaacagtaact

SEQ ID NO: 112731 - DNA, 1033 bp, Homo sapiens
cagtggaggtggacacagctgggagtgaggtagaatgttgtgatgggaagatgaaaggatttgttaccggcacattaattttagaatacctattagactcctgagttggagatgccaaagacgtcattggatgtgagtctgaaatctggtagagagttcagggttgggaatataaaatcagaagttgacagcatgcaacaggaatgttatttaaaatatttgataaccagtatgacttgagaaccaaccaatcaaagcagatgcctgctttaaccacaggcatagctgtacagctcctgtcagcaggctatcagtccaatatgcacttgcatttgctaaaacatatcctttctacattggtcattctcaacctttacagataaactacaaattttatcaatataccataaatgcagattacccattaaaaccaaaaaaggcaccaactagaaagcataagcagggaatatttattttctccactattatatttgtccactccctaattcacattatgcccactgtattttcttgtaagggttaagtacaagtatttaacatactaacatatttgtgaaggccagggactagtttgaaagtaccagctttcaagtacaatggacttgtatttgagtcctggatactccattgtactgtttttgcagaaataagctccttttccttcctttttctgaaaataagtctgtaaagctggaaataagactacttcacattgttataaggattagaaattctatatataaaggatctattacagtgcccattaattgcagtacaatttcccacacaaattgtaggattttagagcttgaaaagaccttaacttggcttgtgttcttaataataactggtcaaattattataatatatcacacaatatatgttggatttaggctgtaagctacattcagaaatgcttgggcataaatatgtgcacacttggacaccctgtttaccaggaggaagtataagttcttatcaaaggaaagaatgattttgattatttctttct

SEQ ID NO: 112732 - DNA, 1031 bp, Homo sapiens
tacccaaacccctgatctttcactttttggcagaagatataagcttcttaccatgtgagcatcctcttcaggatggaaatatttggctgtgactgtgatcatctttcttagactaagactgaatgctgctgagtcaagagcagtcaagttgggtgctcaaagtatctgctgaaaaagcaacataacgtctgtagcaactccatcaccacctaactgtggttgagcacttatttctagggtgctttttccccccattctgtccactaaagtaaagctcacttcttaccggtcccttgtgcctttcccaaacatgtatcttttgttggctcaactactttcatttgtgtatatcccatcagacttgcatgtgggataccacatagagctgtagagagtatgaatatatgttttgagtcatctacatgtatgggatagtgagagcatatgaacgtgcccaacagtatattaccaagggggccatagacagaatgatgaaaatgcttatttgtaaaaatttgacttcttttaaggagcaataacaacagccattttcttagattactttcattctgaatatattttaaaacatttaatatataaaacagctaaatttttattctagatgaataaaaggaaattatatttgggaacaaaatattttgagatgtacaaaaatgcagtataggcttctttttacaataataatccaactaccccaattttaaatagggttatatcaatttatactcttagaaaagtaggaagactataaattttaactacagtcttaattttgttaaagctataatgagttactattttgaaggtcattatttccttctgccaatctccttctcccaaataatttctcatttaaaagttgtagtgccaaatgtgcatttaagcttatttgttaggaactctctaagagaactctgataaaacatggttttcaaatgttattctcatatgtgttgattattccagtgaccttttcttttgatatttcttatataaatctgccattcaaa

SEQ ID NO: 112733 - DNA, 1136 bp, Homo sapiens
tgaagtccaatttgttttgtctttcatagttactgctttctctttcttaagtaatctttgcctgcttcatagttacaaagaatttcctcttgtgttttcttctagaagatttactttagctttagatttcagtctttgattcatttagaatttacttttgtgtataatatgaggtaaagagcaaagttctttttttttcatgtttgtccagttgttccaacatcattattccctattgaattattttggtgcctttgtcaaattaattggctatgtatgtgtgagtgagtttctggacactgtactgataaatttgtatatccttatgccaatatcacattgtcttgtttactgtcacttaatcaggaagtgaattttattctttttcaagctagttttatctatccgagcttctttcatttttatataaatttacagagagttgtcaatttctttaaaaaataacctgtcctgatgtttctttgaatggcattgaatctctacattaattttgtgagaatgaacctattaatatggagtccttcaatctacatacatggcattatctctcatttatttcatagcccagaataatgcacaagaaagaacacatgagcggagactagttgatcaattacctctagcaaacatagggtctcctctctcttttaaagtctatttaaacaccaattctaagaaaatatgcgtttggtgttaagagagggtatctcatgtgaaagtgagtgagctatacttccttatattaagaggagcggttaaaacttcagaactgtatcgggtttcaaaaaaaattgttttccaaaaaaatgtgcagccctttgactagtaatatattttctgtactagtgaaagtgtgatctctcgtagtttaattcaattacctaataagctgatatgtgatcactagtattctcataaaacatcacataaaaagcaagcagtcgtggtcaggcttggtggctcacacctataatcccagcactttgggaggctgaggtggcaggattgcttgaggcctagggagttcaagaccatcctgggcaacatagtgagaccccatcttgaccaaaaacaaacaaacaaacaaacaaacaaacaaaaattagccaggcatg

SEQ ID NO: 112734 - DNA, 1374 bp, Homo sapiens
gtgtttcgacattaaaaaggagtgcagggtggggcacggtggctcacacctgtaattccagcattttgggaggcccatgcaggaggatcacttggggccaggagttcaagaccagcctggacaacatagggagaccctgtctatacaaaaaataaaaacttagctgggcatactggcacatacctatagttccagctacctgggaggctgaggtgggaggatcactttagcccagaagtttgaggcaacattgagctatgatcgcaccactgaattccagcctgggcaacagagcaagaccttgtctcttaaagaaaaaaaaaaaagaaggagtgctgatgtcccaagagtctagacacctgctggactctagttgcctaactttaaagatgagaaaccccggcccaaaggagtgaaatgacccacctcacatcacccagaaagtgtttaacatagaactagatctggttcctatggccctgtaatcatattacttctctatacggctgtggacataacaaatgggaatgaagtttatgagagagggccatataaaaagagcaataggctgggtgcggtggctcacacctgtaatcccagcactttggaaggccgaggcaggcggatcatgaggtcaggagtttgagaccagcctgaccaacatggtgaaaccccatctctactaacatacaaagaattaaccgggcatagtggcgcgcgcctgtagtcccacctactcaggaggctgaggcaggggaatcactcgaacccgggaggcggaggttgcagtgagccaagatcacgccattgcactccagcctggaggacagagtgagactctgtctcaaaaaaaaaaaaaaaaaagcaataaccctggcttagattatcttttatactttgaagtgttttttcatcatcaagaaataaaatgataggaaaacttgtttaatgaagataatgttatatagtgcttatgaaaatagtttcatctattacactattaatttttgattctttagaaactcagtaatagcaggagcatcatttgaatagtactcaaactttttgacattatttccaattgtgattttatttctttataaggcctgagaaataattagggaagatttggtgagtgcctctttagacccgggaatgctaatacacagagttataaaatgaatggcctgcggtcattgaccttcttagttctcctaacccttagttctattttatgtccattatctttgtttttactttgtggcatgtctttgctttttggtgttgctttagtgaaagcagatttatgggagagaggtggaaatgctagtcactcagtttggcttttcgctagcacttcttgaaaatattcag

SEQ ID NO: 112735 - DNA, 1053 bp, Homo sapiens
atccacccgccttggcctcccaaagtgctaggattacaggcgtgagccaccacaccttgcctgtacaagtttgcaaaaggcagaattttatatatatttcctgtgtattattctaactgggctcttatatgctatcggtattgtagtttcttggacaggcaaacgtttttattgtgttttgtttgtgtgtgttttacttttttaaaatgtcttgggtagttttcggaatctgttttactcatttggtgattataaatttagaagtttgccatgtaagatagtaaaatgttttagatcatttgggttgatttttctgcttctttttttttttttttccattttcctaaacttaggagtaaaactggtttaaaaaactttttgagacactttagaagattaagtggaatggtcatattatactttttcctttggtttttactttgtattaacatgaaggcatatattgcatttagagaaatatgaacacagtaaaatgttttcccatcagcctttcaaatttgttgtatcttgattatgaaagtgttgtcattttaataactagtctaactaggctgtcagctggttcttggaataaggaagctgcttgggcattagtgcttggacctcccactctcttattgtcaatagataacactgaacaatttgaactatttgatttacatacttgttaagtaatttgtatatatgccttctatttggaaaaattatttttgaagtggataaataaaaaaattactataggaataaaagagaacaatgtaaaaattctactaccttagaatgtagtagaatattattttgcaaatttgtaaattgtgattcaagaagtatttttatgaccttcctttccatttgtacactctgaactagatcaaatgaaaatcatcacgagatttttcatgcccatttaatgttttattttagaaagagttaaggagaaaaaaagtaagttgaaacaactgaactaatctcttgtaaccaacattcagaacaaagcttttaaattactcttcatcttctgtgtttcttagg

SEQ ID NO: 112736 - DNA, 1019 bp, Homo sapiens
ttgttgaataaaacaaaattagatattccatatttttaagatgaaatgaattttatatctgtagttttaatatttaatcatattctttacctgaaaatcgctagccatacttttcgttttcagcacttctctattttgcagttgtgtttcagtgcttttttttttcccactgtgcttagtccttcacgatttatggccctgttatttgtaaagcatagtaatctaagcaggtgattttcagtttaggatttcttctagttccatgttgtatattcaccaagtcagttttagactatatattgtcatgctcagcactcccttacagagataacagatgccaagttgaaattgacttatacagaatgccacacttaggtaagtgtttaggagtgcatagccaaaataaaaatggtacctttggtttatgaatggcagggcatctaggacagtgtaggtcagttcgtattctctggatggacatttatgtaaatattaaaacatttagattagatggaaagatgtatagtaggaacatttcagagatactgtttccttgtagcattgtactatttatctgaattgttaatttggaataatcactatattgattttattttgaagatataatttatttccattgacttgatataaataacagaaatgcatctgcaaggaatccagttcattaaagaaatttacattcgtatctgatttggtaaatatgtgcttgatttgggaatattatataacaaaatatttgtgaaatcattttgtactttttaattgttttgaagaaatttaatactcaaaatatttcaagacaccaaatcatgactttttagttattacattaagctataacttgctttaatgagtaaaaactgtggggctaattttcttccaagtgaaacatcaagtttaaataatgtgcacatgaatttacaaagtagaatcaagtgtgcaaatatgctatatgttctgtaataggttcttgaaaagctgtatataaactcagcttt

SEQ ID NO: 112737 - DNA, 1050 bp, Homo sapiens
ggaagtgtagggcttgttgcaggactttattcaagttacttttaatcctacctctggaaatagccactcaaaacaattttgctaaattgttgatttctagttctggtactacatattaaaaattctatcagggccttgatgaagagtaaatccagattttctcgtatagatgaggacaatcacatggctgaattttgtcgtgaggcaataaggtgattagaaatatacgacctgtaggcttttctaatatggccattagagttataattaataaataatatatcgatatatttcatataacatggaaacagaaatggcctgtacacccacagcatttcaaatatatacagccactggaggccatgagggcacacttgttctctctgacgtcaactgtaaaggatagggattaatctcagcttatcttagccattcttgaatttatccaagctcattttgaatcctcagatcttctctggcagagtcaccttcctaaaggtagctaaaatcagattttagaagtagcttctaaaagatttggtaatcaaggtgtgtctttaccttaactgagtcatttaaaatgttacacaaatcatccttgttctctctaggtcatcatcttttccgagctagaacactccccttctgccagctccctttggttttcatctgggtgatgtctctcttcttcagtcacttgattgaagaagaagtatatgatgaaaaggagctggacgcggtgtcccatgcctgtaatcccagcactttgggaggccaaggcaggaggatcacttgagtccaggagttcgagaccagcctggacaacatagtgaaaccttgtctctacaaaaaataaaaattagctgggtatggtgatgcatgtctatagtcccagctactcaggaggctgaggtgggaggatcacttgagttcaggaggtcgaggccgcagtgagctgagatcacaccactacactccagcctaggtgtcagagtgagaccctgtctaaaaaaaaaaaaaaaaaaaaaaaaaggaatgtcctgtcctgat

SEQ ID NO: 112738 - DNA, 1031 bp, Homo sapiens
aaaacttttatttctggtgaagctaaagaagagaacttactgatttttttcaatacttctgccttccctcagactcagggtgttaaggatttagggatattgactgccatagcagtggcagctctccctgctccttcttgttccagcttctggctgtttgtggggaataacttctagtgtaggtttatttgtttgttgtttgtttgtttgtttgtttttcccatctctgtatgtgtataggcgtgaggaaccaatggaaaatagatctctatgtaagcaaattatttcttgtttttcctccaaccagtgaaagtttttattaaaaagaaacttaatcaaatatttgctgttaccaaagcatggtttcattcttaagaatatcaacaaaagatcatcaaacatttattttaaatctcataatttaatcagagagcccatactatgagtaaggtttgatttttaaaagactaattgtctggtgtacattttaggttttctggacccaaaccaaagaatctaggaaacaacactaaactcatagaatggttaccacaaaatgacctgcttggtaagtcaatgatgtgtggttacttacttggctgttaggttttaattacataaatgtgactttttttttttttttacttcagaggttcatacggtatacggtatgtatgtagtatatggtagagttattatgttttttatccagtatctcaaatcttaaatttgaggccaaaattttaagtctttatttattggaaaacagtttgtaaaatgtaaacctttgggcctctatattaaaatttttagaccagccatcaattttaattatctggaaattatgtacttaatgaactatataaattagtagtgaataagattatacctaattagagtaatcagatgaaagtagaacagttaaaacaataagaatgtagatttaggttacaggtttgttacagatggtctgagaaccaagagaaattagaagttattcatttgtctgaaaccaaagagaagcagaagac

SEQ ID NO: 112739 - DNA, 2163 bp, Homo sapiens
attggttcactcattgaatttttattgctattatttagtctaacagctactaaaagtaaaacatcagtaaacaattctaacatgcccttatgagatctactaatgaaattctgtggaattaagatggctgtaaaaagcacaaacctaaaatgcagaaatgtattttattcaaatactgatgtagagagttttggcactgaaccttttagaagccttaattatttaaatcaattcagtgactgtgtcagaccttagttttaaatcttgatatgtgcgtgtcccggatcaggaatggtttcatttttcttaataatgtgtgtgtgtgtatgtgtgtgtgtgtgtgtgtgtgtttgtgtgtgtgtgtgtgtgtcctaattaagagaatttttactggctgcttgttacatttgttgagggtacaacacactcaagaataaagtaaaaggatagtcaggatccagatgtttcttttctagcatttaatgtgtgtgaactcagaacactaccatgaaagaacacttccccccaaaactggatgcagaggaagaaaaaaaaaaaagaaatggcacagttttttgtatttttttttttagttattttttgttgttgttgtttgtattgtttttcttttctgatagagtatggccacttctgggggaaaaacatgtaattaagtaaatgtatacattggttttcacgttttacttttgttttcccactaccaataattttcctctggaagaattttatagttttttctatttcattttaatgagtaacaatatgttaaatgcataattaagacaaagcaatgaaattctgactttattcaaagtactgaagattattgcttctagggcatttttaaacagcaccattgtattgttgaatgtttatgtaactgatggcttttctataatgtaatttttgaatgttcaggtgttacatttccaaagtttaacttttaaaaaaccatcttctgatcccttttattgtctgggccatacaatctatattacataggtgccaacatttaattcttttaaatggaacatttgcagttttccatattggtacctgctttttctggagaggtttgagatcttgttaacaaatcagactttacactatatacagatgtgacagataaattgaaccacttgtttgtgaaaatgagttcctgtcatcttcctcattcactcagccctcaccccagcagccttttccggtcattgtagctgacatggagcagtgacagtattcatttgagaacagggatgcaagtcacagacatcataaaatcagggtctccctgctgaagcattcactagttggcaactatgaatttattccatgtcattctgtttacttagcacttgcactacccttgttggttgagtgtatgctttatttgtttctagtttgaaatcccacatctgatagctgagagtaggcaaatacaacatttacctaatgtcattcactaacatggaagagttgtgaaaattctagagtgctgtaaatccttggcatacactatgacaaacaacttcattactctcccaccaggagctgctctcctgcacttagaaataatgtcacaagtagttttctaatgtacaatgcagacaaatgtactgctctctgaatacttgaagaaatggtattatacatacatagaaacttattagttataccttttcacaatcttattacgatgttgccgttaaaagggaaaaaagacacaggcaatgaatggtgggatagtaagaggacttagagtgtatgaatgagttgattttacttttttggaatttgattaagttgacagtaggcactgattggatgattaaacataagttaatctccactgtgataaaaacttaaataataaacatgatttaaaatagagaagtgttgttggaataaaatttttattcagattttatttcataatattatatatattcattttaaacatgtttctaagacaggtctcccaacttttgtatgtatttatgagtgtggaaacacgtgttaaatgtgagacttttttttttattgttaaacagagggagttaccttacaaggacatcgacatggatcttaaaattctgttccagaattcagaatgttaagtgtaggtatttactgatcattgtt

SEQ ID NO: 112740 - DNA, 1033 bp, Homo sapiens
attgctgttctgtcgtccagttgcacgatccaagcctacgtaacatggaacttaattactctctggcttcagaggtgggtagaagattctaatattcaggcctcatgtatgaaaaagaaacggtcgagatcttctaaaaaaagaacagaaaacggagtgggagtggaaacttcaaatagagtagactgtccgccaaagaggaaagagaaatcttcataatctttgcaagcgcattgattaatgtctgcaaaggaatctgctctttgaggtttctttctgcactagagatttttctgtttttgaaaatagttcgtgctcttcggtttttgttattgaactgtttcatgtattttttaaagacatttgaggggaggaggattattatgaatgggaaaaaaagattttggttgagactaaattactcatcgtcaaaataatgtcaaaatagttttggggatcaccactatattttgttttgatttttaacctttcaacattttcctaatgatttgcagagataactgcacaattttgcatatcaatgatactggttcttactcccaccagtgtttcataatactaacaagatggtctctcctagcaagattatgtgtttaatgcttgctttggggtaaaataaaagtacgaaaaaggtggaagtcaaatcagtattctgtaattgttagaatttattttttaagaacttacaactcagaaaagattgctagactcaccaaaataataaatgttctttattttacaggtagtgattattagtgcttcatccccatttaaaaaaacacagtactaatgggtaacacatatggaggtttgctgccatatatattgcatcaaaatatcattaattaatataaaaatattaaaatcattcctgtccattccacttgtaaatgggaattcatgaaattaaatattactttaaaaaggacattgaacttagtcttttttaaaaatgtttattaaaaatgattcctaatgaggccttgtaagatcagtaaccacagcatcttag

SEQ ID NO: 112741 - DNA, 1373 bp, Homo sapiens
tccagtcgatgcattcaccatgtctgaaaatacttcagttatacaaagggaacacttcaagagtaaggatatattataaataagtctctcagcaagatgaacagatgaacagttcaattgcacccacaggagagaggtcttcttggagaatgcttgtttatagaatcttctgtaaaatagagttggctacttctaatgattcgtcttgtactaaaacaatatcataagagtccatgtacttttctaaaagctcatccactctgtcatttagatatccaactttcagaatgtgctcaacattggccactccatctgccattcttaagtctccttgggagtctcccagaagaattatgttactattgtcttttagttgattgaaatattctgtattcctcaaggcaccatcatgtttgttaaatatatgaattagaactcctttaaatcctttgagcaccccagtttcatcaaaatccataaaattggacacaactttgacatttggatgataaacaccagcttgacgaataacctcctctagtacatcgctgattccagccgaaaatatgaacaccgggatactatgttgttggagcttatcaaagaaattcttcatatctttctttgagcataacgtcagattctgccacaatttctttaagtttagcttttggtaaagcttgttgaacaagcaaaccatgtgatttagtataccattccaccatataagggtacttctcttctacagtaagaacaggatcaacttcaatagcgtaatattttttctttagttgcaataacttttttctacattcatctgtaatcagctgacagttgtcaatgctattatgacatgttgggcatcttttccctttgtatgaaaatctactgagtgtcatatcaaagtccgttattatctgaagtttggcagctcctcctttgataagaccacagatcatttcttctactcttgtaaggttcttgattcgaactgaacttttctggaattctggcatcatctcgatgatcttggtcttccgccccgtcttcctcttcaaggtgaatatgtactgagccagcaccacccccgccaccagggcgcacacgctggcgctcactaccgcgcccaccctcgccacggccgcgcggtccatggaccgggccctcatgcgcgtccaggcaggaaaaaaacaggcaactctcggagactgcgagtctcggaagcgcgggatcccagagcaccacggaccataaaattgtcttaaattgagtgttcatctcagctgttaaaactaaaagaacctctaacctcataatctgtacctttcatccatgagtaaggaaaacaagttgaggactgagaccaaagtttc

SEQ ID NO: 112742 - DNA, 1053 bp, Homo sapiens
tttctactgtataatggggcattcttattacagaggtaatctgtgtgtgtttcatctttgtgctttccattgtgtctagatcaatgtttgaatctaataagaggttgctaaatgtattttaatgattgactaaacgcatgaagagttatatttcaggggcatgacttgctttaaggtatatccaaatgtgaatagcaagcctagttttaataaaactacatttggcagagtctctgcttgcaagtaaatgaaatttagacttcagaaaatgtttgaatggccctaaatctttagcaggttttcataagtgatgatgaaatttacctgacacagaacaaaggactattaaactggaaaagaccaggaaggttatctatcaatcttttaatttttgatggagaactagaattccaaaaagattatttagttcactgcaggtcacttctatagtattccgaccagaactctgttcttcctgactctcagttcaccacttcacccgctacaacacactgtttctgcacgcctggctaaattggtcttgacgtgatgtacattccttcttaatatgagtcagtgacctggtactgggaaaatctgtgagtggtttaacatgtcaggctattgtctaagaaaaagcaaaccatctccatgtagggttaaaaagcaaaaaaatagtgcttttgagaaaagctgtaataagcacttgcagttaaggaaaaatgtctaatgtacttttaaagaactacgaataaagaactatgttctctttatcttaatacattgtattgatattacttataaaatggtaagacttttaaatttataaagccaaaacattttatttcatctttttgctatcctccatattagccctatttttctattattaatgttcttcatcactaactgtggtgttagatacagcaggtccttaaataatgttgtttcatttaatatcatttagttataatgttgataaggaaaacatcagttcccatccagggccaatctgtgtgtagtttgcacattcaccccatgtctatgtgggtt

SEQ ID NO: 112743 - DNA, 1264 bp, Homo sapiens
ggctaggcggggcggggagtgaaacagcataggctccgcccctcgcggcgcttcccccggaatagcgtcatcagttctataagagagcgtgtgccgaaggcctcggcctttcacattcgggaagcgtcgggattaggtgaaagtacgtagttgtctttcgtaagttaaaatgataattgggccgaaacttactgccttacctaaaaggcagcgcagtcaggatattggtaggtcgggggcggctttggaaacccttaagtttacaagcatgcgcggacttgagtgctcattaggtcgccgggcgtccacgtgcagccctggaccctgaaccccggcgtgcgtgggccgtgggccctcggggaaaggttccgtgcactcggggactccggtgaagcctgttcagccgtctgtgtcatgtggccatcttgagtctactctgtcgctcttgtgccctagcaccccgagaaccgtcagtttgagccagatggtgagtaataacctgtagcagtttggttgctggttaattctggattgtgaatctccatgtatctttgggacctgtcagccgtggcagtctcccttcctagccatggaagagcatatccttgtttattggcaaagctgtcaccatttaattggtatcagattctgacttgcacaagtaacattcactgttaaaaacctagagggtgccgggttattgggcaaaatttctaaaccgttgttcaatgtttctaggaagctgagctgaacacattacgatggatgatggaaacataaggtacatttcttttttgatatttctgagttaatctgaaacgccttagcggcaggacgttggaaagctaaagttggcccgttttgctggcttttgtagtttgagttaacaaccaactgaattagctgataagatctcaaaacagtgaggtaagtacacagctcggagttttataatgctttttttctcttgcagactatcaagaaatccaagtggtaatgggcgaagtttattcagcatccggcaatggacttatcgtagttggggaaacgggtgttccgaataatatcctggaagttatcaggacacctattttaaatataggcctgaattttgtaaagtaatatttaaggtggtccgtgataattaaataaaatgcttaattcatgtggctactcattgttccttgactgagtgattaatagacggaaaggtagttaatagcataatacctcctatttagtgttacacgctcatgtggaagta

SEQ ID NO: 112744 - DNA, 1113 bp, Homo sapiens
tgtaaaaatgatcttttgtaaaatcagcatagaatgattttgagaaataggtaggggatagatgaggcttagaataagtcactccagtgaaattagggtagaaaatgttcatttaaggattatcacttccactacactgaggcctctgaaaatgttcacaaatttctcaaaagcagcagggggtacacaattttttaccacaacacaaagcaaaaacagatcttgccatttgttgtcatctctgctgagtgctaatagtgggggttcaaagttttccatttgtttaaatgctgctttgaagtttccatgaagaattacagtttggtgacactttttatccaaggtacaaaggctgagactttggtataaacaccaggagaatccttgactccacagccatacccccaggaggtcaccccatacaccacccagctctctccgggccgttcacacatgagtggtcctccgctgtctccctggcagctgtccacgcgtttgtgttcatggaggtttccagcacaaagcattctccctgtaaaccgacccttataacgttcttcacaaaaccttttaggaagtaagggaatggctgcttgttgtagtgttcttgaataggctcgtcctactcagaccaaacatctgattagtggcattccagataaccatcgcaacatttaacagttactgagcatgtaatagttatgaaaataaaatccctgttgtggcattagtgtagtttaaaatgagcaatgactaactggtatgtactattgttagctgccttttttaatgttgacacaatcttaaccttcacaaatttctcagtactgaattgtctgaggaataatgaataacatttatggatttgtagagtaaggtgacctaagaaagcatatttgtgcaggctttcgtatttgaattctgtatattaaaaagcatagaatgcattaatgctggtttcgcattagcacatcaattcatatctacttcactgaattaaactgagttctcagtttatgctaaagttctcattagaaccaacaatacctccagaatataagtctcaattacatgcatgcatttcacactaagcaaaatttctccaaataagtc

SEQ ID NO: 112745 - DNA, 1050 bp, Homo sapiens
tctgtttttcctctctggatgaaactcaaaaagtagttgactgaagttgtttatgtaaatggttccaattgcttacagagaagtaaacctcagtagaatcttgcgttagcccttacacatacacaaatactatgtgtactacagaaatagttttagcatgattggtgatatgtgtattaccaaaggctatgttcctaagagctctgctctaccatatactatgtcatgatgaaacatatattaggcatctgacacactgtgttcttaaaaagtaagtcccattacctctgtggccatctctctaattagaaatatctagtcatttctaacaatttccagctactattgcatttctagggcaaaaagtcaatgagataaagtcaggtaaagttatattcttgaacaagtccactttggagtaaaattacagaaataagaaagcccttgtttcaggtacatttattcctgcaaaatcaggtttgttatcagaataagcaattaaaagaaattaatattcaggaatttttgtctcagttatattgctgcaccacaatagacacgcaaggcaatttcatggtacttgtagttacaatctagaatagaaagcaaaaattagcaatttatattatgtaagattcacaagccagttacaaaagaacttaatttaacaaagtttccaattcaaattgccaacaggctactgcattccatgtgtattgcattaacattaagaaaaatgtgaaaaatgagatagcctttaaatagtgatttaccaactacttcaggtgcgcttgttacattggcatggaaatgtgtgaaagctatgagggaataagagttgagttacgaaaactttgccagccttcacataaagcacccttaaagagactactccacatgaaatgagtgtaactgaggctagcggcattatggcattaatatggcagagtggaattatggcattttgatctcatcctcatcaggccaccattcctagattattctgatacaaagattatataaaagagtgactatgctatgaaggcaaac

SEQ ID NO: 112746 - DNA, 1017 bp, Homo sapiens
gagattacaggcgtgcaccaccacacccagctaatcgttcatagttttggtagaaactgggtctcgccatgttgcccatgctagtctcaaactcctgacctcaggtgatccaccctcctcggcctcccaaagtgctgggattacaggcgtgagccaccatgcctggcctaaactgcattgtttatctcgattttcaactttggattctctaagtagccatgattcaccctcactggatttggagaaagcaaaaaaatacatgaaaatattttttatcttagactctaagatcataacgagaagcttataactaagcctgtcttacaaacacctgcgataacctgctagaaatgtcaatatcaatatacaggccatgtctgcacctgtctagttacaactgttggctgcacatctggggaaaccgaggaagaacacaccccaaagtgcggggagcctgatgagttcaccaaaccccaggctaccaggaggaaaggaaatccctggagccttgagttagggggtttttaaataaaacagtgggcagaattattttatgcttcaataggaaacgtatgggcatcccctcaccaagaggctctatgtaatcctgctgaattgcttgaaaaaagaacccaggcaatccacgcatgacagtcataatgttttgtgagagaaatgaaaaggcgtttggggtgtgttgggactgacatctggaagggaatcacgtgctgctccgtgctctattcccgtgactccaaaatcagagacggttggcagaaacagaccactcacctaagccaggggcggggccaggagaagacaggaggctgatattcgttgctgaacacccatcatgcgccacatagtgaagtggaaagtggttgctcacttccaggtttgtctgtctcaaagtgagtgtcccgctgctccaaaccacgcagggtccggctaccagctgcgcccgctgctctccagacattgaacagggagctcggcagtctccaggcctcagggtca

SEQ ID NO: 112747 - DNA, 1034 bp, Homo sapiens
aatcaacacttcagaaactgtaatacaccaagggaacctgctatcctgggaaagagagataaaggagaagtcagctgactgtcctccttcagactagctcagaccaccccaacctgcgagggccctggagacccctgtggcgcaacagatcccttactgggtcccttccaagtggcgtcacatagcaagcgtccagaaggaggcgggacttccgggccaagcgagccaattccggccgcgccggaagtctctactgaggaaagctatgaggatactctgttcgtaagctcccggtgaattttgttccacagactcggaagaaaggttggataagagttcactggagattgacaagtactcgggatagtgaaaagccggagttggaacatggatagccgcttgcaggagatccgggagcggcagaagttacggcgacagctcctcgcgcagcaggtccgcggccctggtgtcccctgtgggagggatcgagaatgcgagtgcgcggccgcctcctccctccacaccccgcctttttctgtcccttctctacctgccgctgttaaggcctttctggtcctgcgatcttgatccctggttctgcctttgtagttctcaattttcgcggtgtcccgaatgtttttccagttccttccgcggtctttgtggtgctaaaccgaatgccaggattagcctttaagctttgtggaactcccaccgagtgtctggcatgttcacgccaggatgagtgtcatgttatcccctacatttctcttcactattaaatggtcatctatttctttcttttcttcgtcgtcagccccaaattcttgagattgtggtttcattatgaaatacgtttacagtattttctttgacatctttctgaagacaacactggaagtagcctgagtgtaaattttagattctgcatcttatatagagtatccttgtcacatccacagttaatatttgaaatcttactctgtgttagtcacaataatctcctgaaacaggtattattaccttcacttatc

SEQ ID NO: 112748 - DNA, 1029 bp, Homo sapiens
caaagtgctgggattacaggcatgacccaccatgcccagcctaaaaatttttataaaagaaaatatactttatcctaaaagtggtatttatttggtagttcagaaagcatttcaaaattttttcgctattctagttttcaatttgtacgtctgttttgctcaaaacagattaaaataatacatactatataaatttattttcaatatatcccttatagcagcttattttctcatttggttgctttctgataaaaatgaaacacagaattatcaatcaggttatttgactttttggatgacttataaactgcgtagatagatattctttaatcaggaaaaatttgtcttgttctgtttttataacctgtttattattattaatagatgcatttatacatcttgtatatatttatgggtaatatttctgtttatttttcagggcttcctatgatacctctgctccaaatgcaaaacgtaagtatctggatgaaggagagacagatgaagacaaaatggaagaatataaggcaagtagagagtgaaataagtttatggtcaaagaaaacataaatccaaatgatagattcatatccaggaaaacaaatttgatggaaagcctaattttaagatgtgctaaaataattgtcagtggcatatgttatcaccagttacattaagaccattatatcagttttcttatctttttcttttcttttcctttttttttttttgtgacggagtctcgctctgtcgccaggctggagtgtaatggcacaatctcggctcactgcaacctccgcctcctggattctaagggattcttctgcctcagcctcccaagtagctgggacttggtgcaccaccatgcccagctaatttttgtatttttagtagagacagggtttcaccatgttggccaggatggtcttgatctctttacctggtgatccacctgccttggcctcccaaagtgctgggattataggtgtgagccaccgtgccctgccagttttcttatcttaatgcaag

SEQ ID NO: 112749 - DNA, 1003 bp, Homo sapiens
gaaataatacctaatctcgtgaatattgtcttatatgttgcagttctgataatatgtaacttaaatgtttgtgacttttttttttattaattaaaatgttagtgattattttaggtggaactatatgcagttgctgatattctaacctttttgacctttaagcatagcagtttcatattgcaacattggtggtcgtatctttcatgactcaaactagactctaacacttatagtattgtatatgagataaatagttttagacaaatcaatcagcaaaatagtagttacagtaattatttatgataggaaatttttttatgaaaataatcagctagctagatctaataatgggaaagcaaagacttcaatgtttgattttaatgctaatttaaaacatttattaaatcttaaggaaataaaatatgttgagttttaatcaggatgtgatagagaaataacccctatttgtaaaatatttacttaatcttatgtttttcaaggatgaactagaaatgcaacaggatgaagaaaatttgccatatgaagaagagatttacaaagattctagtacttttcttaaggtaaaataaataattttcaaattttgtaactcttcatatttaagttctatacctgaaaagattttaaatacctgtttgtcttcaagatgttttttaattattgagggatcattgttataaaataaagattatttaaaattactcatgaaatagtcttctgatatttggctatttagtgtgaggtaacagtatattaatatcagtagctactgaaaagtaataattttagttgtattttcaaatattactaatttttaaatctatcaattgattgcattttatatcaccttgtaatagaaaacagtacagagataatttatctgccattacaatgcatgttacaaatttaattttgttttttaatttagggaacacagagcttaaatccccataatgattactgccaacattttgtagacact

SEQ ID NO: 112750 - DNA, 1042 bp, Homo sapiens
ctaactgaacaattgagaataaaacaatgtgatattccttagaaaattcagatgagaagggaaaggggttcagagacacatctgagtatggatttttaatattgagagaagaatatattctgggtgtacatggggaaaataggacttttactatgtagtttaattacgttcatgtcttaagaaagatcactggtagatcgtttaagtctatactgaagaaaaaaagactcaataaaaaggcctttagtaattaggttactgattactttgtaaatagtgtttagtaataatgtttagtgatatctaagacatttctttcattaccatctgttaaggtacttgaaaatcttatttaaaaagcatttttttaaaaacctcatttttaatgctttaatcaaataggtacttacaagccgatatagaagcctttgacatcagagaactaacacccaaatttgatgtgattcttctggaaccccctttagaagaatattacagagaaactggcatcactgctaatgaaaaatgctggacttgggatgatgtatgatcaaactttctacattgtaatgaattatttattttcaaatgaatatgtttatttggtcagaaagtgagataataaatatcatccctacttttgtagggattataaatgtagatttatagtgtaaattatagctgaaggtccaaggtacattgactaatattacattatctttaatttgagccttcttttcaaggcaaaaattgagcagatagcaagtgaataggctgtagaagacttaaaattttggtcttagagtccttggctatatagttagagaagtttaaaaacagatggaatgattcataattcattctgcatttgattagtttcagtaaacatcagagcttgtttatgtatataaaaacatgatttctactctttaaacagcttacagtgtagtaaagtatggataaacaccctgtatggacacataattacaattttgttgattaaacgatggagtcctgcataagatgacatgagagcaactga

SEQ ID NO: 112751 - DNA, 1028 bp, Homo sapiens
ctcatttgaagttagcgtttagaaaattttcaatagtatgtagctttgtcagagaatagaatattgagttggcaggaatcaaattgtgttttggattgttttgtgattacagaaggtctgagtgcttacaatttaaaaccccatgtccattgatgacaatagaatgtagaattgggagatgatgtaatcctttctatgttttgatatttaactatatatatgacattgatatccaaaagatatatatgcattccgtattatggctatgtatttaaagactggcatttctttttatattctacactgaaacaaaattaccttgaaaccttggaatatagtgtctgaaacctctagaaagttttttttaatgctggttgttattgttaagtattgtttatttctttaagttaaggatttgtgtttaaaattcttttgtttctagtgtttacgaaaatggggttacagaagatgtgaagatatttgttggattaaaaccaataaaaacaatcctgggaagactaagactttagatccaaaggctgtctttcagagaacaaaggtattgcctttactgatttgttttttttaatttttgtgattttctctcaagcttttccaaataactgtatactgtttaattaacttcagtgaaaaggtccttttcttagacttgtaaagacagcattgagcattacaggaatacatccaaattagttttaaaatgttttattcattatcttagatcaaccccaccatgctagaaaggggagtatatattcctccatgtcctaaatgccatatttctaagttagataaaggcttttgatcacactcacccgcagaatttttctaggctcagaaagaagagatagcaagatcgcaagactcgagttggccagcttagagacgtatttctctcttctttccttctttttcctttacaagaacccctgagaacttctgtttgttgtgactctgccctgctagtatcaggctttaacagtttttgttcttactttttagggagc

SEQ ID NO: 112752 - DNA, 1123 bp, Homo sapiens
cctaaaatacagtgacttttggacagtttagttgttcctaactgctgttaactgaaggagaatcattgggcaacatgcaaacatttaatgttttaattcaatgtaagaaagccattgtaactaatgatggaaaatttatttgccgatctttgcaaccatagtataaatctaaccctgctctcagtttctagttctctgccaaaaaagtgacatgatcttgattatatgcttttttagtagtaacttaggcagagagtcaaatctgtttctgggaacaaaagtcttagtatcttcaaactctgttatctggaaatattccagaagtctaattgatgggaaatctcacccagccaggcaaggaaccaaataaaaattgtacattttgaagaactttttgtaagcataatcttccttttattattccaagtagagttcataataaatatgctgtaaacatcttcaaatttgattataatttaaaatgtaaataaagtataataatgagttggcttagctattcagacaatgaaaaagcttatttaatttgtacatgtattttttacaccatgcacttggaaagaggaattacaaaatcacattttcctattcatcttggctcatcttaatgttgattttagatggtaaaattaacattattgaacatttaccatgtgccaagctgtaggctaaattctttctatgtattgtatcatttagtcctcacggtgaacccatgtggtgcgtaccatcattacttgaggaaacttaggcttagagaccgcgtaagtgccagcttcaggccatacatccagaaagtaacagagccagactgaaaaccgtatctgtgtgatcacagaagccctattctctaatcagtacactgtgtatacatgagcaagtattaacacaatcatcctggagttccctcagaaaaaaaaaggcctcagctttgccatataactgagagtttatcattaataagtttatggaatatatctgcatgtaaagtgtacttgaaatgtgaagtctccatccaagtcagcttttttttttttctgaacaaaaatgtagtttcttcacttaattttaattcactttgacattaccagatgcctaacatgtc

SEQ ID NO: 112753 - DNA, 1048 bp, Homo sapiens
caatctgtgctccagtcgaaagccagcctctctccctgtgcaccactcaagtatatttccacagtaagtttcccctcttcctcttaaatcatcagtatttttctttctacagaatgattcccatctttttttaaaaaaaaccttctctcatcttaaaatataaaaatgttttcttgatccacttcccttaccagctagcactcttttctttccacccctctacagcaaaacttaaaaggactattgccaattcttctccttctgttatctcttaaactcactctgagcagatttttccctagcattccaccaaaactgcctctttaggatctccagcagcaccatctggcacagatgatcgtgcctccgcgtgatacacatcctacacttcacttcaggacgctaggctcctcgtttcatccttctcagtcctttggctgctttctcctcctcctctgacctccttatcttggaggaccccagggctcagtacttggtcatcttctcttctttggccataattattcccttggtggttttaacctggtttcatggtttcaaataccatctatatgctaagaattcccaaatgtgtatctccaccccagactttagcccagtctccagatgtacatatctaattgtctactcagcattgctgtatgactgtgtaatagatttcccaaattggacatgtccctgactagattcctgatctctacccgcacacccgttaaaacatcccttccctttctgcagcctttactttgtcagttggtggcaattttatgcttctggtttctcaggccagcaatcttaagagtcgttcttgaccatcacgctctctcacactcacatcttcacaccttatatgcccttaacaaataagtcactgtacctttgaaatatatccagaatttagccacatctcaacacttctactcctgtcaggctggtactgcagcagcctccacatggtctccctggttctactcttccccactgcaatccattctgaaaatgcaggcagaggaacctacattacagc

SEQ ID NO: 112754 - DNA, 1034 bp, Homo sapiens
agctttcatgtgatttgacatcagcagcaatttgacacatctgtttactccgttctccttgaaatgaaacttttacattttgcttctgggattccacccatttgcttatatctctgcctaccccactggaggctgtgtctcctttgttaatgtctcctcatctctctgactacctagtgttagaagtgtcctaaggcttagtctttggacctttccaaagacttagtcttagtctttggacctttcctttctccattggcatttactctctggataacacttctcaaaatgtgctcgcaggacagcaccatcagcatcatctgggagcttattaaaaattcatgttctcaggcctcagcccaaacctacagaatcagaatctctaaggctaaggccctggaatctgtgtttcaacaagctcttcagatgattcctaggcacactaaagtgtgcaaagcaccactctaggtaattccatctattttcgtggctttgaatgagaatgcagatattcctagtaaagaccttttccctgaaatccagatccaattccattcttctggctcctcaggccaaaaacctggggatcatctctgattcttcctttcttgcacatctcatatttagttctttagctaattctcttggtcctaccttgtctattcatcctgttccaagcctctactatctacctacctaggtttttataagagcctcctaattggtctccctgccctttcagtctgcacagagcagccagagtcatccattcaaattctaagtcagatcatgtcatggctacggaaaccaatactctaaaaaccaaagttcttacaatagtctgcaggaccctacattatttgccacccctggctcccctataccctctgacacacacacacacacacacacacacacacacacacacacacacacacacacacacacacacagctacctctgacctggtctcttaccactcttctccacccactttgaccagcaacaccagcctctttgttgttccttggcag

SEQ ID NO: 112755 - DNA, 1051 bp, Homo sapiens
atctgccgctgtgtgagagaccaacttgtgatcttagattttttttggtggggggtgtcttaagaacagttcattctcattgcacggtgttcctttcctattaaaattctcatattgctctataaaggacctgattctgtttgtgtttgagtacttttgaaaatgccaataacatggctgggggaagactatgactttgcagatatcagtgatactgacttccctttgccctgggggtgaagtgcaagtgacacataggactttgcagtctgaccccagccaacctggacagcttccactctggctactttccctcccagcctctccacaccaagcctttcccctgtcctggtcgtgccatcctctctcatgtctttgctcaagctttgctttctaactggaatcccttatcctgtcttctatatgaagaaaactcctgcttgtccttcaagattcagctcaagcagtcctccttctttgaactcttctcaattcccccaggaagagttaggtagtctctctgcatattgtaacagtcatcccaagacattgtaatgatttgtttacatggttgtctcttctctcaaatggctcaaaggcaccttaaatgtatgttgaataataatgagaatgatttgagaatgccacagaatgatttgaatcactgccatagagttgattcccaaacaaaagggagagcacagtaatattgatgtataaagttctgcttgcatatatcagagcttttttttttaattctctagacatgtctataggggttttcatgaaaattgctgctatcctacttatttttttaaagggggaatatttttggagagctgtgaggcaaatttaaaaaaagaaaaaaaaagaccaaaaaaaaaagaatattttcgacttctcgtagtgcatgtaattatttaagttgaaaatattttaatgctactgttgtgaattgcctacttttgtccaaaataatgtttttaaaatgaaaatataaatgtgcttgtaattatgttgcatatgctttgttagaataaaaatgcttaag

SEQ ID NO: 112756 - DNA, 1050 bp, Homo sapiens
atagtctgagaaataaggtttttgttttgtatctcaaaggcttttaaaataagctccttgatacaatttgtgcaggttcgtgtttactggtgataaaccatgaaagtgatttattaagattttttcattaatgaaactgggaggtttgtgtatttcttcctaacgtgtaaaaaagagactaagaactggcctttcctttttcctaagaattttaacaaatatttttaaaaatgtatgtagattgtgtaagttcatggaatttgatactaataatcaattcgttaatattttcactaaacaatgcataagatagttttaaaaaagatattttaatgggaaggtagacttttccaactagtgtattcttttccttaaaaaaaaaaaaaagaaaaatcacaatactcttaagacctgccatatgtgctgtgattcaagttcttttatattgtttaatgttagatgtttattttaaactgtgcagtatcaagaaatacaactttggtaccatatggtttacaagtttgttttagcaagacaaagtttaaaaatgaaaattttatctcatttaaggttatatgtagctttaaaagccaaaatcagaattattttccctcctggaattgtttggaactctcttacttactggggtaggagggggtacattgctttaccctacaactttccgaaaacacagttgatctttataaagtgatggaataaactatcctacaaagatgtttggttactaaaatacttagaagatcctttttgacagctttaactgtaaggtatttcttgtagaactcaaaaacaacctgtagaaagttgggtagtttatatattgcatctggaagcatttttaacacagtgtgctaggtgtgctagggccaaaatgattgccagtttcgcttactctgctcatgagctcttgttttaaggagggaagtatgctgatttatgttatctttgcagagctaggtagaaattaatgatgttacaaatatagtattattatattgttaattttatactgatgattttagaaaattt

SEQ ID NO: 112757 - DNA, 1646 bp, Homo sapiens
tgacttcttacactttgcttagttttttaaatgttcattcatgtcatagtatgtgtcactacttcctttttatggctgaatagtattccactgtatgaatatacataacacattttgtttatccattgattggttgatggacatttgtttgggttgtttccactttttgactgttatgaataatgctctgttagctattttcttcacagcctcccaaatatttattgagagaataaatacagactcacatttgcattctcgtaataaactgcagtattcttttcaatagtatgttattcctttgacatattggtagattctgtttgctagcattttatttataatttttgtacctataatcatgtcacatttgtatgaggtttatcatgttttgatattaagggtatgttagctttatgaaatgatttggggttactttctatttcattttccctttggcctgcagtgatctaacactagaattaactgttatttgaagtttagataaaaatttaactttgaatttgtctaatccagatgccatttaaaatgggagaacttttctctcttttccattttcttctaaactagcctttttaagcttttcattttttcttgtattaattttggtaatttgtattttgctaggaaattacctgttcctttttagttattgccataagaaataaagtaatattcttaccattgcttatgtgtttggttatttctcctttaacaatttcgttagtgtttatgtttctctctctcttttttttttttaatcttaatcaggctttttgtaaagattttgtcagtttttgtaaaattttagtttgggatttattttttctattgtttgactataaattgacttggaaatctcctttcttctttttagtataaggtttcacagttttcatcttacttctcttttttcctacatcatgtttggattctttgagttacacatcctgtttttatctgagtttctcagtctctaattctggcaaattcttaatcatttctagagatatttatttatttccctttctgagaatcttattagatattgacatttaaatattttaaccatgtctcatagcttttgagaagtgtttatattttctacttccttattccttttttaatgctttgtagaattgcttgacctgaacttgttgctcactagtatattcttgccctatattcaatttgctagttaacccatcggattttttatttcagcagtttaaaaaatctatacatatcttcaattggtgaatattatgtttgttttaaatttgtggtctctttagtcttttttcttatggtattgattgttcatttgttgcctttctttcattgtgctcatactctccaagtgtctggttatatttttcttagaagttccaagttatgagctagtaatatttgcctggggagcagggtgaaagactaggctttaacatgtgtctttgtgtaatttcatggagtagaggtgggagtgtgtgggctgattcggggtgatgcagttcgacagttggtgccaaaaaggaacttcctgttgacctgcttagaggcatgatcttctccaggacctgctatccttattgtatttatgcagtgccggtgagaacagaacacac

SEQ ID NO: 112758 - DNA, 1029 bp, Homo sapiens
gtcttgctatgttgcccaggctaggcttgaacccctggtttcaagtgatcttccgcacttgacctccagaagtgctgggattacacacgtggaccaccctgcccagccatcacccagagtttaaagccagagttcttaaaaagggcttgtgagatcccacatgatctgtctttttcccatttacttttctctttgttcacatttctcctgccacactagactttatattactatttctccgctataccagatatgctccaaccctcagtatctttgaggtttctgttcactgtgcttggaattccttctcttaggtggcttcttcatccctttccaatctttgtgcaaatgtaacctcaatgagaccatcgttcattatcctatctaaaagcacaaaccatcccacattatatatacttcctatccccttttcttagattgcttttgttactacttatcatgtaacccttctggtacactctacaatttattattccttaaggtattgtctgcctttcgtcattataatgttagtttcagtgactggttcaatacatggctcaaaaaatgttgaatgaaataattcatcaacgaaattcagttgattagacaaaactgttagtaatacaggtataccactgaggtattgcaggtttgattccagaccactgcaataaagcaagttgcaggaatttttttgtttcccagtgcatataaaagttatgtatacactataccacagtctattaagtgtgcaaaatagcattatttctaaaaagacaatgtatatatcttatttaaaaactattgttagaaaatgctaatgatcatttgagctttcagtaagttgtaatctttttggtggtagagggtctcgccttgatgttgatggctgctgactgaatcagggtgatggttgctgaaggttgaggtggctgtggctattaaaataaggcaacaatgaagtttgccacattgactcttcctttcaccaaagattcctctgtagcatgtgacactgtttgatag

SEQ ID NO: 112759 - DNA, 1063 bp, Homo sapiens
ggttgacacacaccttcagtttgttaaaaaggcagtatatctgcaaagagcgataaagtaaaatgctataaaacaaagtattcttgcatttgtttgtttttaattcataggtttaacatttaaagtccttttaatcaggagtgtgcgtttgttgataccatggaaatttaattcaccaagatttatttatgacttaaaggtttcttttgaataattatacatatccatttacataaaatctgtctttttttggaaaaatatgattctatgtaagaaggataacaatatattctagagcaatttagtgttgacagatacagcataccagctgaaatataatttattctagatttttggataatattttccttaggaaaccatcttttgaacattgagcttaaggtaggtagggattgatgtcacattgatattttaaaaatgtaaatgatgaaatttttaaaaatttatattagaatgctatcagttctaatcctttttatgacgagttttaattctatattcaatatttgtgttcaaatggtaaagttaagaattttcttatttgcatttgcttttatttaaacttttttttcttttttgtagatttgctttgaggtcacattgatatgaaatatggagtcaccttttataacttcacctgggaaagagagagaaaactttcttgttaaaaaaacataaggaaaacaaacaaccaaaggaatcatgccaaatgccaactctacatctttttgtattattaacatattttatgcatcaagacaaatggcttatgcattaaaggggatgattcgttcatcagtatttttagccattaaaaaaaatcgttttcatattaaccttatacagctcccataaaatttaacacatataaacatctttaacgccttgtttaaaatagctttcttttttagtgcttagaacttcaatgtttatgcaccctattgttacttgtcagagtctttaagagtttataacatcaggaaagatatggacttggaaacttacattattaaaatagactgcagtggatttaattggacaa

SEQ ID NO: 112760 - DNA, 1060 bp, Homo sapiens
gaaatgtggaatttatctcatattttgaatttctttatgaaaagtgtcagtcatgtgtcattagagatactctattattgctaaactaatttgtagtgaattcgttttattggacttaaagttttatgaatgaattaaaagtggtaattctgttaacaatgtgatgtcagtggtgccttcaagtaataatataatattagattggggcagtatgcatgagaaatatttcattatgtgtcaaagacatgattcatctaattattcctcattttacaaaagatgtagtgttaagtgtacattaccaatttttttaaacagcttttttatagagttactgatgaaaatgccaaaaatagtgaacttaaccttgttggtatgatctgctacaccagccaacattattgtgcctttgcatttcacaccaaaagttccaaatgggtattttttgatgatgcaaatgtgaaagaggtaagtgacactttctttaattgaaataattactgtgatttttactttttgttaataaatgatatattgatattaatattcaaaaggatgatataattaatatgtaaaatagtaataaatgaacatgatgatagcatcagtaagttcaaactttcttttgttattcttgaaattggcttattttgaagccagcttttaaaccagtccatttccagaataataataagtaaactaatgaatattagtatacaaatatgtaactatcagtgatctgtgtgtcagtgatgatcctttttgcctgacgcatacttgctatatttacttttttgtggatgattcacagtagttttgtataactagtgatgaaaatatgcttgcctttatttttattatgacaatttttttcaaattttgtgtgtagaatacagaaatagatatatcagttatatcttttggtaattacagttgacccttgaacaacataggagtgccaagccctctgtgcagttgaaaacccacataccactttcgactccctcaaaacttaactgccaacagcctactattgacaggcagccttaccaaaaacata

SEQ ID NO: 112761 - DNA, 2368 bp, Homo sapiens
aaactactatttatatatagggatttcttagataacatttaataagcatgaaccataaaaatagctggtaaattagacttcattgaaagttaaaatttttgttcttcagtaagatactattaggagaataaaatgacaaaccgtatactgagagaaaatatttgtgaagcatttatctaataaagactgtatccagaatattgaaagaactcttaaaatccaattaaaaaatcagcaaaaaatgttgacagttcaccaatgaatatacatgaatggcccttgaaatgatattcagtacatcattagccacaatggaaatacaaatttaattcataatgagattctagtactcatctgttgtaatggccaaaattaaaaagaccagtagttggtgaggataggaacagctggatctctcacacaaggttgatggaaccacaaaattgaacattcactttcaaaactgtcagtttcttataaatttaaacatatattttccatataacccagcaaatccactcctgtgaaaatgtaagtccatgtaaaacgtgtacttgaatgttcatggtagttttcataatgcccaaactagaaatgactcaaatgtcagcaattggtgaatggatgaacaaattgtggtatagctatacagtggaatataatactcagcaagaaggactgaactattgaactgacacatgcaataatgtgaaaaaatctcagaagcattatgctaagaagtgagatataaatgactacatgctatgattccatttatatgaaattctagaaggaaaaacaaaggtgtggagggtagatcactcatttccagggactgcaaaatggggtacaaggtaagattttggggtgaggattacacaattgtattgtcaaaactcaatgacttgtacactgtaactagataattttacttcatatagtacaactcaataaagctattaaaattttttggtatttatatttaaaatcagcactttgcttgaattacttagtactttgatgtaggagtttattaagtttcatcttgagttgatgtgtaacaacatttgcagcttctactttgcttttacatagtttaaattgttcaaaatttggaggaagaactggctgtattaatcaccctgtgaagttttttattttatattcacattgactcctcaaagcctggccaacatggtgaaactctgtctctactaaaaataccaaaattagccaggtgtggtggcacatgcctgtaatcccagctactcaggagatggagtcatgagaatcccctgaacctgggaggtggaggttgcagtgagccgagaccgtgccactgaactccagcctgggcgactgtgagaccttttctcaaaacaacaacaacaacaacaacaacaacaaaacaaatggactcctcaagtctcttggaatccccagtgaggagggtaaacagctgaatatgtgtagttcaaaaaagctcatcagaattgttcttaaaagtccccttgcctgcaaaaatattctagaatgctttgtggtgtttttgtttggttggttttgttttgcttttaaatcaattttatagaggtatagtgcacaaacattaaaatacacccattttaagtgtacagttggagttttgataaatgtatttacctatgtaactaccataatcagtacacagaacatgttcatctgctagaaaaattctgtcaggcttctttgttgtcatactccccacaccaccccaggatgaggaaatcactggtctcattatagattagtttcactcattctacaattttatataaatggtctcttacagtatgtactactgtgtatctgcctcccttcctttagcataatgtctttaagattcattcatgttgtttggattcacactttatttttattgtgtgttttatggctgtacaacaatttatccgtttacctgttgaagtatgagtaatctgtgaacatatttttttccgttgctgttagataataccttgaagtgggatttctgggttgtgtggtaagtgtctgtttaactttacaagaaactgtcaaattgatttccaaagtggttataccaatttgcattttatgagagcaatgtatgagagttcctgttgttccacattctcagcagcacttcgtgttggtattctttttaatgttagcccttctcgtgtatgtataatattatctcactgtggttttcatttgcatttcccttgtcattggtaatattttgagcatcttttcatgtgcttgtttgaccattcttacatctttcttttggtgaaatgtccaattttttgccagtatttcgcattggattatcttcttattaatgtgt

SEQ ID NO: 112762 - DNA, 1057 bp, Homo sapiens
ttctttattctgcataccagtcctttattagctgtatgttgcttattttttttcaatttcttaatggtgtctttccaagagcaaaagttattaattaatttagattaagtccattttaaaaatatttttcttctatggtttggtatgctaagaaatctgcccttccccaaggttgcaaagattttctcttttgttttcttctgtaagttttagtttttgtgtgagccattctgagttcatttttttgttgttgttttatatgaagtcaggttaaagttatttttctcatggtaaaagttctttttctccagttgtagcaccatttgttgagctgactcttatatttctccattgaattgtcttgaagtctttgtcaaatgtcagtcaaccacatatttggaaagctttttaaaatttaatcaccttgaagtttataatctttgcccgtcaaatttttaaaagataatgtttaaaatatttttatttagactagttactaaatacagttaattatatgatacatacttgaactactagcagctgcatatctaaattttttaaaaatataaagtaactcagagtctgtcttttcatgtaacacattgattacaaggttttgttttgtctttattcattgtgtttttttaaaagattggaactagatggaaagatgttgtctccaaatgcattcgatgccactttcagccactacttttgttttatgcaaacccagatggcacagcagtttctactgaggatgcactcaggcaggtcatcagctggtcacattacaaatctgttgcagaaaatatgggtaattctttcttttaaaaattctcaatgtttttctattatcacagtcaactaggaatactagtactctgaatataaaatgaatatagaggataatttcaaatttgactttcagtagagctgaggaaattttagtaatttttgttagtattttggaatgaaccttttctcatcggtggcctcagaagcaccttcaggagttacccactattatggtcacacaatcacagaagaggcttcatta

SEQ ID NO: 112763 - DNA, 1038 bp, Homo sapiens
ctaaatacatttattatattactgtttaatccttctaacaatgtgtttgtttgatattagctgatatttgaccacatttgttattaaaaggtagatttgcaaaaatcaactgctcatgttttatgaaaatgcttgtttcaataaagacttaaggaaagggccaggtgtagtgtttacacacctgtaatcacagcaccttgggaggctgaggcaggaggattgcttgagcccaggagttcaatactagcctgagcaacatggaaagatctcatcatctctaggaaacagttttaaaatattagccaggtattgtggcatatgcctgtggtcccagctacttgggaggctgaggtgggaggatttttgagcccaggaggtcgaggctgcagtgaaccatgtttgtaccactgcactccatcctgggcaaaagagcaaaaggtcctggctcaaaaaaaaaaaaaaagacttgacaaggtaattttataattcttcttggaatggagtagcctagggtagtagaaagatcaggactttataaccagatagacttagattttaattattgggcaaattaatttgacttttacagtctttatcttctgtaaaatgaagataacaactacttttaagtattaaataatgtacattaagccctagaacagcacatggcatataataaatgtttaacaaatgttgtttttttttagactaaacaaaggcagtccataatacctgatgtgtttagtgtgtattttattttctagtgaccagattacgacaagcaacctaaataaagaacgtggggactgtacctcccttcagagccaacatcacttagaaggtaaaaaacttatttgaatataatagttgctgtaaaaaatgaattatagtaatttattgtttgctattatgtatctgagagaaaatcctatatgactataaaaattatttttaaataaccctaaaatatcaataaacaagttttattaagttaatatatgttttaatgaagtacatgtggaaagaaggaaatcagca

SEQ ID NO: 112764 - DNA, 1001 bp, Homo sapiens
tttaaattcctaatattcccatgaggtaggtaaaatggattatcattatcccattatataagtgagggaactgagattttaagaggttaaaaggcttgtttacctacccataattagtgagtccaaacttcaactcaagccagcgatcttcaaatgcagggtttttttcactgttaacacttggtcagtaaagatcttgtcttaagtaacagggaaaacacatacacagatctgcatgacccagcaggaacagcactattccatcatggatgacaccctcaagtgataataaactgaagaaattttgcataaagcattccaaaaagaactgttattttgagttgggtcttaaagaattcatttttttaaattggaagagattaccttttatagaaagctttatgtaaatatagaaaagtataaatgaaataaattctgtaacataatttaaataattttgttttcctcatctcttctccccaccccacccaaccctaggctttagaaaagaactcaggaatttggaagcaggctataaatctcatgaattccacccagaatcacatttacaaataaaaaatcatttgataaaaaggtaaccatattttttttccctaaatacatgtattataggcacgttgtttatcagaagggcataaatacatattattactttgaaagcaatgggtctatagtattgagatgcctttcttattgggaatcattaatacaatgtggatctaaggatagagagcttacaaagtaccaggtacagtatctgattgtctgtttcaatcctcacagcattcttatgaggtaggtgatattttacaagagaaaatttgaagcttaggttaagtaatgtgaccaaaactatcgagctgagatttgattatagctccatctacctagcaaatcctcaactctctttaaccattgcattctaattcaattccacataattcatataagaaaaataatttgcaatatggcatcattta

SEQ ID NO: 112765 - DNA, 1037 bp, Homo sapiens
gagtgaacagtaatgaaccatcttcattatggtcttcacacctaagaactgttgggttaaagccagaaactgctcctctcatccagcaacaaaatatcatggatcaatgttactttgagaactctctatccacagaatgtataattcggtcagccagcagatctgatgggtgtcagatgccaaaacttttttgccagaatctaccaccccctttgccaccaaagaaatatgctataaccagtgtgccacagtcagagaaaagcgaatctacacctgatgtcaaacttacagaggtgtttaaagctacctctcatcttccgaagcacagtttaagtacagcttcagaaccaagtttagaagtgagtacacatatgaatgatgaaagacataaagaaacatttcaagtgagagaatgttttggcaacacaccaaactgtccatccagctcctcaactaacgattttcaggcaaactcaggtgccattgatgcattttgccaaccagaactagactctatttctacctgtccaaatgagacagtttcattaactacctatttttcagttgatagctgcatgacggatacatatagattgaaataccatcagaggcccaagctctcttttccagagagcagtggcttttgtaataattcactatcttagagtgaaaaaggactagacctgtgttacataataatcttggttcaagctgcccttctgaacaaagatataaacctagcatacattgtaatagataactggtaaaactgaccaacttttacttctcagaggccatttaaatataataggaacctactgaccaaacctagtgatacataaaattaaagcctgtggcatttttaaagttgttaatcactatacatatgtatgtgtatatgtgtatacacatatataattttatgatcaatatcttagatattttagaaattccctttgaatagtcttggcgtgccgtgaaaaatagaaaatcagggagatataataattcatttgtcatatgctacagttgaataa

SEQ ID NO: 112766 - DNA, 1081 bp, Homo sapiens
aataataaaaattcctttaattttcaaagcactcttcatgaaaagtagttggggtaaaattactatttgttcaaagtagaataaaagggaaggatgctctaattaaacattttattaaaattaaactctctatatgaaaggtagaaatttaatctggaaacctagatagattttcaaattcagataaaatgggttgacaacctataagcaggtaatattacagcaaagaaaatgtaggcaattacagtgacattcccaataagagggtgccctacattaattcctaacactggtggttagcagcccaaagtaaaccaaaccaaaataaagacctttcacatttcatataaaattagaaaaaaagtaacgagataaataaatacactaaagtttaagtattttaactttttaacttacatggctaaagtagcatttatgaatacctataatagtcaaaggcctaatttatcttaactagatattctgaagacaaaaattctaggagcaaaattaaattccatccgatcttgaaaacttacaaattgttaatcatataaggctttttttccccaaatgctatcaaattcataagtcattttttttaaagacacttaaagggatcatatgcagtgactatcatagaagtcaaaaacaaatgggtgaagcccttttctggttacccattagaaagtgcttcttcataaagcaattctttgacaaaaaagtaccaggctatgtatcacctggtacttttcaattagcatagtttataatctccatacatgagtactggttagtttaatacttcccagtctactggccacaaaatagggggacaaatttaatttttattcaactgtagcatatgacaaatgaattattatatctccctgattttctatttttcacggcacgccaagactattcaaagggaatttctaaaatatctaagatattgatcataaaattatatatgtgtatacacatatacacatacatatgtatagtgattaacaactttaaaaatgccacaggctttaattttatgtatcactaggtttggtcagtaggttcctattat

SEQ ID NO: 112767 - DNA, 1096 bp, Homo sapiens
gccaggcacagtggctcacgcctgtagtcccagctacttgggaagctgaaataggaggattgcttgagctggggaggtcgaggcttcagtgagctgtgaacgtgccactatactccagtctgggagacaaagcaaaccctgtctcaaaaaaaggggtggcaggggagcgagagggattaatgggaggatggcaaaagggatagggatttctataaaattctctgtcaagccatttgtaaagggagagttttactctccctccctgttttggtagagactgataatctcaaatacagtgggttttgtgtgtgtgtgtgtttttatgacctgaactttcagctctggatagaaaatagaggccttacaagaaatgttctaggcttttctttttatcaatatgtaaataggcataaagtgttaaaaactgggaagataaagcacatattgctgacaaatacttgctttttacagacttgttcgctgatatctaaattaagaagttggttcttgagtgaattctgaaaatggctacaaacttcttgaataaagaagacaggactctcaatagaagaatttcacatctccaagggacccttcctttcattttacactttgttactaatttgcagaactctattaattgggtaggatttcacccattcctagctaagttcttaaaattaaaccctttggttcgtgtttaaaaactttcaaacatctgatggctttacaggggctgaatataaaagcatttgtacttaaaggtcttgtgtattcattaagaaatatagtaatgtcttttaatgttttaagagttgatcagggtttactatgatgcaagtaataggatgattaataagggaaggtttttatgaattcaaaagtcaattattcaaaagcagggaaagattttgagagagggaacaaagtattcttagattgcgtagaagctgctaggttccagttttaatttttaggtttagttggactctgttatgaaaagataggttatgggtgggcgacaggttgatacagtcttagaaaaagcaggtaatatcaaagtattggaaagctagcatgcatgccctcttacctg

SEQ ID NO: 112768 - DNA, 1354 bp, Homo sapiens
tggtggtgtttaaatattaagtgtcaaatgctagagacagtacaaaacccaccagagggggccttcctaacacgttggcataaggatccaaacggaatacggggataggagaggtgacctcgtgcagtttcagggaggagtccatcacctgactggactgggcctttcagggggacgagaacgtatttcttccaacgaaacctgaataaccagctatctgcctgggacgccgcgaggcagaagtaggcgggcccattgacttagtgtcaaggcggaggccgcgcttcatgccagcggtcacggaggcagcggaaagccgagccaggcgcctgcgcgctgggaagagtaggttcagagtgcattccggaacccggggcgcggcgcactgcgcaggcggccggactccgctcagtttccggtgcggcgaacaccaaagtccgggaacttaagcattttcggtttctagggttgttacgaagctgcaggagcgagatggaggtggacgcaccgggtgttgatggtcgagatggtctccgggagcggcgaggctttagcgagggagggaggcagaacttcgatgtgaggcctcagtctggggcaaatgggcttcccaaacactcctactggttggacctctggcttttcatccttttcgatgtggtggtgtttctctttgtgtattttttgccatggtgagtatctcgaatgcaaaattggggtggtaaggagcttagagatcatttgctcgcttttgggcggggaggggactgaattccagagagtttatatatgtccaagatcacacagctggtgagtggcgcagtcgggtgggtgggggagaaggactaggagtaaaatgtccttctttagcacgtccgtgggagtctccaaagaagtgtggagaaaacttggcgtcatattttctcatgatttggaatgaaaccagctaggcttgagttcctgcagcaccatgaagcgaccggagaagttatttcgccttttggagctttattttttcatctgccatttgggaccattagtaacccaggtcataggggtgtagtgaagattgagatcgtagtgatttgcatgttgcctggcagtagtaagtgctcaacgaaagctatttttactatacagctgtttaaccatgagcagaccacgcagctgtctcaaactaaacatgtccaaaactgaactcttaacagcttcttacccaaatttacttgccttgcagcgttaccatttcagtaaacgccaactttatccaccgttacctcccagaaacctgagacactttgcccttttcttacacacatccacatatcctaaaacaccaagttacaaaattctg

SEQ ID NO: 112769 - DNA, 1096 bp, Homo sapiens
tgtatcagaaatacactgacccaccttttattgagtcctgccacatgttaggtaccgtgctctgctgtggagacagagcagtgaccccaaggagctcacggtccctgaaggaggtgctagagaagagacttagcttctgatactgccaatttaatgtgagaacatggggtatactgcatcatttccattttcatcaataacatatgttttatgcaccttctttacctgaaacttactaagaatctaccagtaaacaaacatcctgtctttttgcaagtatgaatcacttaacctgctgatagttgaagaacactttaggagttttgtattcttgtatatagtttattttttccatgtgctagccaggtaaagattacacagttcttctggactgttaaattgtgcatggttttggaccccttctgctctactacagagagtgaagaagaaagtattaaagctcactttaccattccatatacttactaaaagcctgtgtaaacatgtcttaatgaatgttgttgaaagcaatgtaaatagttgaaaatataaatttatattacagtttaagaaaaccttatgaggcatcactagccactgttaatatctatttgtattcttataccttttcaatatatttgaacaaatatagtttctggcactatttttatactaggaaaaggagttactatgtatattatgcttagcttttaaggcattttaaataaccatgaatgttgatttcattactttcctttcctccatcacgagagtcatttcagatgactctttcatgacaaaatcactttaaaggaacacttacctccgattcctgtataaagtcatgagatggtcaaggtggttttccattgtgcaaattcttcacctgtcagtggtttcctcattttgccatgctttgtaaaaataaaaagaatgatcaagtaggtatgaatactgtgtgattattaggggactctgaattttaagggaggggaattaataggggagtttggattttaggcagagagaatgggcccaatactttgagagactttaatcaagctaacctgtgatcctattagccgaagaaaagtaa

SEQ ID NO: 112770 - DNA, 1112 bp, Homo sapiens
aaatttaaagaaaagttttaattatataaatagcaaagggctattgccaatactagggtcaaaaatgaatttgagggaacagtgggtaagaaactttatgcctgaataacatttagcagtattgtgattgaaaaattgccatattttgatgtataggacaagtcaactgagatccagagaatcctggatgtgaatgctaaacactggcccttaactcacattcaatgtattttcttcccataacatttagtatagttaatattttcttagaatttgagcccatttaagtggattaatattctacatgtgtgcccctaaagacacatttactcaatattggagaagtagataatgaattaagcaactggtctaggaaaggaaaatttgtttcaaatatgcaggaatgtttggatttggggagagtagaaggagagatttgcttgatttgttaacttctacctccaacccacaaaaaagatatttgatctgagtttctatcactaatttggatagaaaatttctaagggacatggtaatccagcattctcaaggacctttcgccaaaatgtgttttccatctatgtcccgattcccctaaattttgcctaaaattcagtatgttccttaagtttttaaaattctgagtgtgtacaaatatcttgacataatgcagttttatttttatcattctggtaaaaaaacaaaaaatagaagcaaaacacattgtattgccattattttgtatttggtaaaggttaatctaggaagttaccaactgtttaatgctatatgtattgtatacttgtattttcaggatattttattttttttgccatacagataaaatttgtaaggttgcccctttgtggcactggtgtgtaaaatacacagactatcactaaaataatagttatatatacatacaggtgtatacttatgcatgcatacataaatccttagtatagaaaaattgcataaagaatagcaatctttaataaacctttttattacattgtgatttagcagttatgctaaaatatgtacttatgctttagtagtttgtttggtcccctctagtatgtgtcactgagaaattttttaaagacatggta

SEQ ID NO: 112771 - DNA, 1050 bp, Homo sapiens
catgccgagaaaacaagatcaaaaactcattctccatgtgccaaagccaacacgccataagcacttaggtgatctttacctaccttcctgcccataataaacaggactatatgcctatttatttctaaccaggtaagagaatagaagagggaagaatgtgtcttcatatatcctttctctcccctgaatcaaacccttgtacatactgttttatggggagaaaataaatgaagaaaacatttttaaataaaattaaaagggaaaaatgttggaagctaccaaagacagagagatgtacctaagtgaaaaagagtataatgtaatagttaagagagcacgctttggacatggactacttgtcttcgggtatcaagctgctgcttatttgctataaaatggagatatacagctcctaacagggccttcattcacggtctctgttttaaagaatgatatgcttttcattgtcaaaactgagtctgttatttatttcagatagcagaacttgtagcaactgaattttttgatcaaggagacagagagagaaaagaactcaacatagaacccactgtaagtatgaaaccttgttggtaggaattattcaaattgttttttttttaattgtagactcctttttatggctctatgggatctttccttaggaccacaatttctcattttattttttaaaacttttttctcattggaagaattatacatgttcattacagaaagcaaaaccaataaaaggcataataaagactcttgggttcatcatattgtatcagtgttctttgtaatttgtttttttccgcttaagtattagaaaccacttttcattttaacaaatattcttatgtattatcatgattacatgaaatcgatgtaaccataatttacctacgtcccttggtgtaatatttgcagtgttcactattacaaacagcactgtgataaacatccatcatagatgtttcactcctactccttggttctcgccatcaaaagaatttaatagagaagctgtggctgacagagaaaggaaggaga

SEQ ID NO: 112772 - DNA, 1072 bp, Homo sapiens
ggaaaaacatgcatatgtaggcagatgaagcattatgaagcggtttacatgtatgacagaggggttgggtgggaacatagaggggaaactttatttcatggtatttaagtgtgtcctccacattcattagaatactgggcatgtgtttaagatatgtgaatatatttctagattttgttcttgtcagcagcttctccaggatgttaatactggttttctttttttataaagggcaatcagattctcagtggcctctccattgaagaatataagaccacgttgaaaataatcaagcaagctattttagctacagacctagcactgtacattaagtaagttttaagaaataacctgagaaataggtatttgaagtcttttcattgtttcaaacttttgacatccatattgagaaatttcaaagcagaaatgtcctggcaaaactgcttatcagaatacggagcagtttctgaaagggtagccagaaaagtctactcctttggcttatactgctgaaaattaagaatacctattatttctgatgtttatctaccactgtgtctctgaaactatatacaaatctaatagccatctcaaggtcagtcattccaagccatgttgtccaaagattatatagatcatttgcttttcctcctttcccttgctccccacaacttctgaccatttcatgactcctttataccgtcattcaagcttagttgggcaggaaaaggagttactgccaagcaagtaactcttgtttctttttatttgattttggcaggagaagaatatttatgtagaactttgaagttgttgattctaaaataagagtatacattagagttgtctctgtgattatgcattttcatgattaaactgcctttctaaaagctagaaaatactttcctgcatttgagcaatcataagtttccaactcctagctgagatctttgacgcatgtgtgggaatgaggggagtcagggaatcactctcaggatttccttgtaacatgagtctctctccctctgtaaggaattcacattcatggttgtagttactcttaggagaagta

SEQ ID NO: 112773 - DNA, 1050 bp, Homo sapiens
tgcactaaataccttcacggatatacaacatgagagcatgggaagaacttgggagtggccgcttttatggctctcaaatggtgaattcatacctatgtgaacctttggactctcctagttggtgacacatggaaatggcacatggacacatggaccttttattaaaaaaaaaaaaaacctacccagtgccctaccctgccaaaaatacccttcttagggatgtcttgtgttttatatcaatttaattagcatggtacttaacatggtaggctgtggagtcaaattgctcaagttagaattttggccccatccctaactaacaatatgaccttcagcaagttacctctctgagtgtcagttttcttgtctgtaagatgatccaaatcggagtatcaggctaaatgtgaatgctttgtagtgtctggaacatagtaaatgtgtgaagatgttggcaattattgttactacttatgttttattccctaaaggttctttgcagatggattttaagtgttaagaagaattatcggaagaatgttgcctatcataattggagacatgcctttaatacagctcagtgcatgtttgctgctctaaaagcaggcaaaattcaggtactttttagagccattcatatatctaatacattttgttgcttagtagtaaaatttatagcatattctttcaatttcactttaaggtgcacaatgatttaaaataatatttgctgccacttacataataagttatatttcgttaattaaagaggactaatctggcaaaactacttcgttgctaattttcttccatatatgatatatatggcatattagaaaaccttcaaaataacttcatgttgcacgtaaatagtctttgggcaaataaatatttccttctgaggaaaacactgccttattaagaaaaagtaagaaaaagtatcacatttctcttgttcacattcaacctgctccatagtagaattcctcaaaaaccacctagttcctgaacttgcttcattgataagttaggggtctgtatcgcattttctct

SEQ ID NO: 112774 - DNA, 1053 bp, Homo sapiens
aaccaatccactaatgacctcataaattaatatactgaagatggttttgaaatgttaaatgtaaaacaacatattcagggtgaacattacacataattattagaagcatatcataaaagggataaagcatagtaagctcttgggagttgagttgcccaggaatttccaaagggaggctcatttccacatggtgggaagttttagagtttttgtgcttcaattcaagagccacccaattagaaggaaaaaaatgagtataatgttgtgccgtttatgttagctctttaagaagtagatattttagtgctataattccatactaattaactttatgttcattcacaaatgcacatttgtgtcataaaatgataaatacatagaattaatccttttaggtcactttcttggaatatacatattagtttatacttgttattgattatcatattagaaaatataagtgtaattaaataagtaaagactactactttaaaaaattgtggatacagtgtagaagaatgtagaagtcagattgattgtatttaaatgtaagtatttaagttgcaccacatactgggcttactagctgtgagacttcatgtaaattatttaatctctcaaagcctcagtttcttcatctgtagtggtagtaggattgtactaagaatcaaataagataatgtatataaaatgcttcagaaaatttctggcattcagtaagtgttagctattatttccatgtctctttgattttttttttatttgtctttggtttacattacctgcagtgactcccatttaattctaaagcacagaaatttatcttttcaagctccacgtacctaattctctcatcccaacaatgcactcatatacagttcattgatacacattgtacaaaaagccttagatgtgtgagttagtccaggtcttccaagaaacagatgccaagattagattaaatgtgcagaaatttattagagaaaacaccctgtgagaaccagagggaaggagccaggaaagccatcagaccaacacgaaagtctgacccag

SEQ ID NO: 112775 - DNA, 1526 bp, Homo sapiens
actccagcctgggtgacagagtgagtgagactccgtctcaaaaaaaaaaaaaaaaaagaaaaaattggagaggtagctcttgtacaccaaaaattaaatatctatataaggtgacaagataaatgttaaatgagtccaatattcaacacacaagttcgaaggaaagactgaactagggaagctagagaaatccctggggagagatgaaagtgccctgctgtgtttatctcacagcctcaagagaggaaccacataaatgctcctgatgacaaatacttgatctccatggagtgtggaggccaaggagtccttgtctatgatctctcacactcacagtactgactgccgctttcttaaatttggcaagtaaacttggaggaaataaatgttacagttttattcataatccttcaattttcagtcaaaatagatgaaaatataactgcaaaaataagcagagtttaatagcagactaccagttgatctagatctattttagtgttaaagaattggctagttacatgtttttgaaaacttagaaattggccaggcatggtggctcacacctgtaatcccagcacttggggaagtcgaggcaggtggatcatgaggtcaggagatcgagaccatcctggctaacaaggtgaaaccccgtctctactaaaaatacaaaaaaattagccgggcgcggtggcgggcgcctgtagtcccagctactcgggaggctgaggcaggagaatggcgtgaacccgggaagcggagcttgcagtgagccgagattgtgccactgcagtccgcagtccggcctgggcgacagagcgagactccgtctcaaaaaaaaaaaaaaatacaaaaaaattagccgggtgtggtggcatgcacctgtaatcccagctactcaggaggctgaggcaggggaattgcgtgaaccagggaggtggaggttgcagtgagccgagatcttgccactgcatgccagcctgaaaaaaaaaaaaaaaaaggaaaagttacaaatcgttcactgcatttattccccacagtattctttcttgtagttttgttttagaaacaaaagtgctgcgcagagtttctgtttgttctggacttgaggttgtgatagtgacaatcctttctttttccttctgcacactgccctttaaataacaaagtatatattatgaagatgttaactgctttcctaaaagaagaatgtttcttaagagcagcagatgaaaaacactgtgctaatatgtgaaatccccaagtctacattactgatcaagaagaaaaagaaagtgaataaaaacttgaaactgaagattaaattaatgtggtaggctttgtgtacccaaatggtatcctatttttaatgataagaaaatttggttcatactgagtgctatattttattcaataggaagcttatcttcattggtaatttcaagataaccattccagcactttttggaatgcattacatttttaatttaatagatgatttataaatttaattttgagaagtttta

SEQ ID NO: 112776 - DNA, 1050 bp, Homo sapiens
ctagtgagtaataccgagggccgggatttggggtgtgatacttcatctaggttaagtcctgaaatgttttttcagaatccattctatataagcaatgtgttcaattttgattctcttggaaaaatttactggtcttcatagagtatctctatgacctctttgagctctgtaataacttcacactgtagcagattccaagaggggtattaaggacacagctgaaggattgctgccaagtttgcagaatccccttcctgtcttaagtgacagctgggtatccacttttcaatggcactatggtcccaagagtacagtaggatcataaatattctctagctttgttgagaaagtctttatttgtcttcatggtcctaagtgtctccagccctgagaattcttcacttatatgtgttttatttaatctgcctaccatcttcaaagttttgacaatgtattttctgttttgcatttgataatgatttaattcttgtactattgtttaaaacagctagtgtccttgatttgcactgctcccagggtgatgcctcttagcctgtggatttgtcatgttgctacttcacatttggtacccttgatctgtatttatagtagccttgcaggagttatttcatgtcccaagaatttcattagaacttgtgggggttgatctgtgatctaatttacattgtgatctaatttatattgatattagcagtggaagtcagttggctaatggataattcattactaagcaccatccataatttgaataattaaaatactatgttttttgaaagtagtcaggatatgaaaatatattctaatgttttctgagtcctagctctttaaacatgcatctgtaaaaatgacactgtatggcagtgtttcttaagcttatttgatcgtagaccactttaaaggatgtaatgtcactgtgggaaaccaagagaggtgtctgtgaaacagaataatactcagattgatgctgagaattttttttaaagtctcataaagttaattataacaaatgacctatatttagttcacttt

SEQ ID NO: 112777 - DNA, 1028 bp, Homo sapiens
gctggggagtcatgctttctgctatacagactttttggagaatgttgaactttgccttcacatctccctgcccagacaagcctgttgcacagacagcgatacatccacatggaaggcatcagaagctcattaaacctgagcacaaagagacaaatgcccaagaggtcttgaagagatgtgagagtgaagtcaggcctctggctttcattcagataagccctactgtggggagagaagggacaaacactgacctggggaccaggccagatgcaaagaacaattatccacagcagaagtattgcccagcaatactggcaatcttgccacagacatatctaaattatgtagaatgctgaattattgtaaatagtctttcaagaaaggctaaagcgaaagcatgtttcaaatggagttattcttgataagcgctatgattgcccttcattccttaataaaaatcatggccttgtccttatggagtgtcctaggtagggaggctctctgcctttctgtctctctctctctcatgcacacacatgtacacgcacacacacagacagagagagagagagagagcatattttctcaaaattgtattgcaaatagggagtaagatctaataaaaatcttttaatgtaaagtttggaagcgttctgttgaaatcccttaagtcaggtatacatatctagccaaataacctttttttttttttttttttttaaacagagtctcgctctgtcacccaggctggagtgcagtggtgtgatatcggctcactgcagcctccgcctcctgggttcacgccattctcctgcctcagcctcctgagtagctgggactacaggcgcccgccaccacgcccggctaattttttgtatttttagtagagacagggtttcactgtgttagccaggatggtctcgatctcctgacctcatgatctgcccgcctcggcctcccaaagtgctgggattacaggcgtgagccaacgcgcccggccataacctcaattcttgattgcaatagga

SEQ ID NO: 112778 - DNA, 1759 bp, Homo sapiens
tgtaatataaattgaaggaaaaacattatcatgcaaaagtaatgtatcgtagtctccctttccacagggagacccacagtgaatacctgaaaccatggatagtatgaaccctatataatgtttttttcttatgcatacatacctatgataaaatttaatatgtaaattaagcatagtaagagttaataataaactggaacaattataacaatatgctggcatcactattcttgtgctttgggaccattattaaataagataagggttacttgaacacaatcactaaattgcacggaagttagatacaatattttctttactgaaataaatgttcattgagcaaaataaattaactagtgattggagaccaagccaaatgaccttttccagcagtgagtggttcaaaatagaagagaggcagcaagattagttttacttttagaaaataatatacttcaatgatcttatccccaatttaggttcatttgatctgctgatttatacagacaaagatttggttgtacctgaaaaatgggaagagtcgggaccacagtttattaccaattctgaggaagtccgccttcgttcatttactactacaatccacaaagtaaatagcatggtggcctacaaaattcctgtcaatgactgaggatgacatgaggaaaataatgtaattgtaattttgaaatgtggttttcctgaaatcaagtcatctatagttgatatgttttatttcattggttaatttttacatggagaaaaccaaaatgatacttactgaactgtgtgtaattgttccttttatttttttggtacctatttgacttaccatggagttaacatcatgaatttattgcacattgttcaaaaggaaccaggaggtttttttgtcaacattgtgatgtatattcctttgaagatagtaactgtagatggaaaaacttgtgctataaagctagatgctttcctaaatcagatgttttggtcaagtagtttgactcagtataggtagggagatatttaagtataaaatacaacaaaggaagtctaaatattcagaatctttgttaaggtcctgaaagtaactcataatctataaacaatgaaatattgctgtatagctccttttgaccttcatttcatgtatagttttccctattgaatcagtttccaattatttgactttaatttatgtaacttgaacctatgaagcaatggatatttgtactgtttaatgttctgtgatacagaactcttaaaaatgttttttcatgtgttttataaaatcaagttttaagtgaaagtgaggaaataaagttaagtttgttttaaatttgtcttaaaacattttgatactggtttggtgttgatatagttaaatggtaattagaattgattcagcatagctaatgaattcttgttcctacgaagttatagaacttaagggtccaaagttgagtgagtcttgaggtgtcttcaatctaatggataaactttgatcacatcctgttcatctcatagcaatagacttaaggctattacttcatcattgtgaaaagataaatgtcctttggaattagtccaacaattccagttgaacaagtgttgattttagtactttactatactcttagccttattgtcagcctacttttccttatatacttaaatactatgcttattcctgtgctttcattaataccctcatctggtacatgctttctatccagttctcacctgtttttccaaggtcagt

SEQ ID NO: 112779 - DNA, 1280 bp, Homo sapiens
cggcgtagcctcttccggagcgtttcttcctttaagtgcagatccgtcccacctcccaccccttactttccgatacaggacacggtgtgactggggtgggccccagtgtatgcgtatgtgtgtgtttttcttttttttttttaactgcgagagcaccctcaccctcccactcaaagtgattattgggcatgaggctggcagtagacaagactttgggaacccttgttttcgaacaggccagctgcacgttctaaaggaacctggcaggatttgggagggaaaggggaagataaaggcttgtctggagcacagtgactattcagtcagttgctaactcgaatgcaacagcctattttgacatcctctagcctcataatctgaatttggacttggattacaatgaggtgaaatttggcaataataagttgatacactttggctttttttttttgccacgtgaaagcaattatctgttttacttagaagcaagacttttaaggatttttaatgccactttgtacctactctgctttcagcaagatacacgtgtgttcagtcatttatagctgtatagcctaatgaaaatatagcaacatctaaatatattttattttccagagttatgcagggataatgaattttctgtaacatttcttttgcttgcagcattcggcatcaacagcattttatatcagcgtggcatatatccatctgaaacctttactcgagtgcagaaatacggactcaccttgcttgtaactactgatcttgagctcataaaatacctaaataatgtggtggaacaactgaaaggtattttaatcattggaaacaatttgagtcttgcagattttctagcatcttaagcagtcatttttccgctctgcacatagaagtgtactgacatctcaaatatattttcaattgagaggaagaaaataatatataaaatggaagaaatacactcttcccccacccactacattgtgagtgggctgaatattttgatgttagaaatctgatatggctaaaaaaatagtcttcatcaactcccttagaagtggcttttgcagtaaatgtggccaaatggaacaggttggaattttacataattataatggtgttcactatctgagacaatatacactacatattctcaatataatgtattaattttctgtaactaattaattttctgtagtctaatgttatcattacattaagatcaaggaaattggattcaaccagagaactaaacttcaaaaagagaaaagattagc

SEQ ID NO: 112780 - DNA, 1045 bp, Homo sapiens
tcatgtcttttgcagtaacatggatgggactgggaaccttttttttttaggttaaatcactcagaaagtcaagtactgcacattctcacctagtaggagcgcaacaatgtggacacatggacatacagagtagagtagtagacactggagactcgaaaaggtgggagggtgggaggtgggtgtggaatgagtaattacctgttgggtacaatgtaccctatttaggtgatggttccactaaaagccccgacctcactgttacacaatatatccatgtaacaaaaatgcacttgtactacctgactctataaaaattaaaaaaaatacaatgaattaggaaacacagtaatttgtttttctcatttcagactgggatgcccagaggttttacatgcttaaggtgaggaactgaggccagagtcaccttgtcatagtcattgcgtggtgctttttggctaaagtacaaatgagtactatgtatgtgaaggagaagtattaggctatgatgtctctaatttttaaaatactattttgacaacctaattaataatattgggcttaattttaagggtaagtaatgtaattatattttcacatacctcagttttgctatagtagattaccaaatttgtatgcttcattttctacatccataaaatgggattcacaatatgcaataaatgaaaggttgtgataattcaatgtattaaatcatgtaaatgcataggactcttcatagcatatggaaaggacacaataaacataattattatttttgatcttagataaataaaatatgtgtgaacttaaatgcacaaaccacacatgcatgcacaaacacacaggcctgaacacaggcaagtagttactgaatgccaaataatcattaatgtaacaagtgcttggggttcaaaggaggcgtaatcctcaaaagcatgctgaaagaggtggtctctgcactgcattgaaggatatggagtatttcagtttcagtaatagagaaaagagaacagaggagagccatggataaatgtgtagaggtaaa

SEQ ID NO: 112781 - DNA, 1046 bp, Homo sapiens
aatcacaaggctttgcctttatggctgttagaattatggttcatagagtttgaacacattgatgacattcttctaatgttctcattctccatatgatatataaccacataagttatgtaaggaagagggaaatgttatttcatttaacttgtagtctatgcttgttttggatataataaattaagtcattatatttgtaggtagtcatttaagatatttgaaggcttataatttctaccattaagcaattagcctgtcattttttaactatggcactgggtaggaagttaatatgcataattttgtatattcagtagtaagtatacatttaacttttatctagccctaaaaagtagtctcaatgaatatatatctcttcctgagttcactttcaaacttttagaaagtgaaatcagaactgaactgacgataggtggaaaaggccttatttttagagtccgatggaagaaatatcacatactttaacttctcttttttcccatggccttcacacttggtttaattgaaacagtggcgacttttcataaaagactaatttgatgagtgaatctgatgaagtcaggtgtggtagggataacaggctttagagagttgtatttatatatgttgaatggaggctcttagaggagcaggtaagctgtagttaggagtttctaagatgatccaaacagtaatatttctcagaaaattccatttgaatctaatgcctactgatattttgtacacagccaatgcatcccctaactactattcagataaagtactcaaaatgaataatatcattcatctattatattgattgcctgaagacggacagctatgtttggtttaggaacacaaactatacaaataaaaaagtattaattagtaactaagcaccataaaattaatgcccattcaaatatcccttcttttgtagtaccaatagtggtgtcagacaacatctttgtcaatcggtgctttgaagattatcagctgcttatgctgtctaattatataattcagtttgctgatgactaaaagtg

SEQ ID NO: 112782 - DNA, 1049 bp, Homo sapiens
ctctatgtaatataaaattcttcatctccactgtttatgaactcacttaaaatgatcttttgttgggggcaaactaattatccttaaattcacttttgcacttttcctattttagcttatttcctaaagcatcattgagataaatattgagttagagaaataatatctcttcttgattaaaagatggcatattacatattctttataactcttcattttttcaatagaattatattttaatattaatattttattttaacacatagttttttgtcagttatttacttaattattttctaaatacttactgagcaccagctattgttggggtgctggccttacaacagtcaactagcacaatcctacttggctttttctcttcatgtccttgggaaaaattgcctggctgccctaacactatcagagaaatgatgggacactttaagttcctatccaactgtaacttcttttatcctgtgattgtcaaatatcacacatttaactctaataggaatccttttctaaaataggaagctgatgaaagttcaatatggcttcccattcacttagtgctcatttcctggataataggtagtaggttttttcctcttagatactgcgttttaatacatgaacctcaactgttcatgtgctatgttaaattttattgctcctagcagaccattatccaggagtattgctcttaagtaacttctcacctagttataagcattgtggcctcattacatggggaataaacatacttattccctaatggtcaagtcaagagaatggctgtttcaacaagtcaagcaaaggaattattgcattgtgttttgtgaaatctgctgtacagatttagaagactgaaatattttaatatcttggaaaaagaaattattttctttatattttaagttaggcatgtttattaagaaacattctgtgaacttgataaatatctcctccagcccattacatttagaaattaaaacaacgtgttatctggtgggatagattgggtttccttgatcttaactgatccagag

SEQ ID NO: 112783 - DNA, 1018 bp, Homo sapiens
acacacacagagtcataatcacaaacttcctatgttgcaaatgattagagactatagtgagagcaatgtggaatttttaactttcttcaaattcgtgtaacaggaatggtatgtgtaatttcttcagtcaatcaacagaagtggaagcctgagtataaactgatgaaggtatatttttgctaaatacttgcataccacttgttaaactaaatttggtctgaggctgcccccatacttttagttcctacatagccaactgcgacctagcttaagagtttagtcttgtaacaaatagcttgagtttcagccactcacagcagcagagcttcagccaatcacaggctggcaacccccaatcagaccatgtccatataaggcaaatatctcatcacgccatgcacaaataaggtaaacaccacgcggtggtgtttctgaatgtcattggctgtttctgaatgtcatttcctttttctgtttataaatactacctgcctgcagtgcttagtggagctcaataaactcccagttttgagagttgcccaatttataaatcattctttgctcaagctctgctcattttgttttgtgtaaagcttttaacaatcttttttactagtttttttctttaacctaaggaattaattacagataaagtggttttctttcagcttgaaataatatagcagaaagtcaaataacccattaatttctccaactttgggcaccagatggtataatccgtaatatttaactttatttaaaagatgaagaatcttttgaaataatctattgtagtttaaataataaaggactaaataaaattttttaaaaatataattactttgggggatattattttgtagaagatagcatgatgtcatttttaatcacaggacaaatttttctcttgctgtttatttaagtgaagagaaaattaatttataatccctttcatggcttttgttttcagtaatttgatttccattacatattgagatcagagatgctaaaagagctg

SEQ ID NO: 112784 - DNA, 1018 bp, Homo sapiens
ctaaaatatgccataggaagtgcaaattacctatttataaaaactaaattttgcctggtttatttaatttttttaatttttaatatatctatatctattataaaattattaaatcatgtattttctctttattacttatttttttaggatttatcagaaagcaatttttggttaaaatgctaagagaaaagataaaacaaaatttccacatgaaaaaagctaaagagtcaaacaaaaatttcctatttcacatctgtatagtatttatcttaacgctatttattttgtaaaatatgatattgtataataattatttttgaaagagccatgccttatgttgaattacatgaaaaattacatgacttttgtttaagtcaaaacaaccaagttccaacaatttcaaaatattcaacctttgtatgtatcagagcttcattttttctttttgtatttccgttgtgtagtagtatgggagtattgggaaatctttgacttctttggctcataatatttttcatgcacagcattttgtaaatttaagttaactaatggctaagaccatttatccactttatggcaatagttgtaccttatagggatttgcattaaacaatctattattattatggttttatgatgatttgtcctgaattttctcaaaggaaatatctattgaaagggagaaaaggaaaagacaatctgaaatttaggaaaatctcagaaaacaagagaaaaaaagatttatttgataatgcagtaaggtatgcatttataaatcttactagttcccaaaacaaaaatctatttctattgcatctttaaatagcaattttactgttttaaacaacacttagagtcaatcatagacattatgaaatggaaggcagatgtagaggtcactatttaagcaagttttacttgaccttttccaatctaatctgtctctattctatttctaataatctccagggatggatatttcagaacattttttagtaaaatgtttcaatgcttaaga

SEQ ID NO: 112785 - DNA, 1120 bp, Homo sapiens
ctgatgaaataattataattatttttgcaaaataataataaaaattctcatgcatttttcatggccacagagtcaagatcaaatgctatgagctttaaaagtttaaaagttctgtaaattatgttgaacacatacccttgtttaaaaataagggcaaagaaagttttcaaaatgacagttgtagggtaagaggtgcaatgaggtttaattttccttgagacatgcaagaggaaagttaataatttaggggaaaatattaaatgcactaagggagaaaaggtagaatttaaagaaaagtctcccacatttaaaggatttcaggagaagaaaactaatggaatgtttataagaatggctaaaaacattaattctaaactaccaaagaatgtttttcaaagttcataacataagctaaacttcgctgttcagagtctatattctggctaatgggataattaaaatgtcaacccaaaatgaatatatttcaattatagccgtgccctgtgcaattaaaaatgcctcacaggaaaataaacttattattattatgggggaatttttattagttaaggaatgcattatcagagttgattgaggtgatgtggtaatgtcaccttaattctcataaatcaaacaaggaatccggaaagtgaacttttaaaaacattttaaaatgttcagcctgaaggaaaatagataaaggcatattctattgctttagcaatcttagaatagtaattaccctcccaataggtgagtgagcaggaacatttagcagaccacaggagtttaatgcctataaaatggcctttcttaagtttaatagcagatgtgtagtgttggttacctcattttcactctcattaagtagaaagtatggcaacattaaatgattggaaactagtctccagatttttctttccttttcctcagtagatttatagataatatccattaaatttttaattagtacttacatataatataggaagaacagaaatattaaataaaaacatgcatatattgattcaagctggatttttatttctgatatgatgggcaaaatgtaactgtcatttcaatcatatttttaaggcagctgttaagcttgcatctgaaa

SEQ ID NO: 112786 - DNA, 1040 bp, Homo sapiens
atgctgctacttctgtgtcaaaattcattattattggattacccccttcttacccaattagggccctgagcctttctgagtttcttattgctgtgaatgtaaatcttctttcctccgtaaagaaagagggcaaggattttttgttttgttttgtttcagtgtaaggttttcccaagcctaacctcaattaaaactccagctttctttacagtatttttacaagccatttcctctctcattatatttttcatggtgttttcacattatttaacatgtcttatttcacaacggatatgattttgaagagtttcatgtcagtggaatttttctgaataacatcaaactttaaactccattttttttggtaacttggacagttgtgccttgcattttctgtgttaatatttttagttatggggctgtttaatgcatgttgagccaggtgggaatgtggcagagctcatatgaaataaacttgttaccttccttagttaaacaaagtgtatataataagaaatagaaaaaagaaatagtgtgtaataaatttctgcttatgatacttaaaacagcattagctttttatttcacaagtggtactaaactgaagggatcactgctgagaaatgtcttatgccatttatgttatagagagagatgccatctagaccgtaaagcattttgcttaaatagtttaatatgaaatggcaaatacattccattaggataagaaaggtattgttgccagggagttgtttcactggaaatgtttaaatccagcagctgggaaaagggaagggtgactcgggtacaaaggacaccgattaaatgcagtaacttattaattttctttgccaatagtgtgagtgttaaattttgtttataaattttgtttatttcagtataatatggttggtctttgggtcttttctaggtttgtgatttggcttttagcctgaagaaaatgctgattcgacacaagatgactcataatcccaatcgtcccctggcagaatgccagttttgccataagaagtttacaa

SEQ ID NO: 112787 - DNA, 1026 bp, Homo sapiens
tactctggctctcattcagcaagctgttggagtgttcccatctcatccctagtgtggagcttctaggacttccttaattcagacccattatcaatgatttcagcatcttgctcaacttcctttccgttttttccagcttgccattgctctcattttcccatggtaactgtgtaaatggacttgcactttgtatccctcccaccacagtggcaagctgaactgtctgagaacctttcttacattttcacagtggtttttatatatatttttaatggtgtcagccaggcaaatggaaaaagtagggtgagctcacatatctctgtttgaaatgagatattttagtaatagttggcccttgggagggaggatagactctgaacccagactgtctgggtttaaattctggaaacaccacctagttctttgaacctgggaaacctaggtaaccttttgtgtgttcattttcttctgtaaaatgggtttaatagtaatactaatatctacttaaaagcatgactgtgaggattgagcaagttaatatttagaaattgctaagagtggctcctggaacatggtgaaagttgtaagatagttaagcctaggccctgtgctggacactgggatgaaatagtagaagatgccatgtcctgccctcatagaactcacattcttgtagagtatagcattaaacaaatacatgagaccaggcatggtgactcatgcctatcatcccagcactttgggaggccgaggcaggaggatcgtttaagcccaggagttcaagaccaatctgggcaacatagcaagactccatgtttacaaaaaacaaaaataaaaaattagctggcatggcggcacacacttgtagtctcagctattcagaaggctgaggtgggaggattgcttgagcctaggaattcaaggctgcagtgagctatgatcagaccactgcactccagcctgggtgacagagagacaccgtgtctccagagaaaaacaaaaacaaaacaaaaaacaaaatacatg

SEQ ID NO: 112788 - DNA, 1459 bp, Homo sapiens
gagagagaagcatggagcaaagtgggaaaagccccttataaaaccatcagatcttgtgagaattcactcactatcatgagaacagcatgggggtaaccagccccatgattcaattacctcccatcaggtccttcccatgacatatggggattatgggaactacaattcaagatgaaatttgggtggggcacagccaaaccatatcagcatacctgtaaatttgctgcagtattctgtggatcccataacacacacctgaatatggaggactctgcattcattcattcactggcaattttggtggtctctttttgttgactgcaggagaagccgtacaagtgctcagagtgcagcaaggccttcagccagaagcgaggcctggatgagcacaagaggacgcacactggagaaaagccttttcagtgtgatgtgagtttggatttttttcccccatagtgtcttccaataacagaaagtaggggtgtgtgtgtgtgtgtatgtgtgtgtgtgtgtgtgtctgtgtgtgtgtgttgcattgctggaatgtgcctatgcctgttaatgtcttatgctatttatagcttgttcttgcataatacatgtaactgcattgtaatcattttattcatctggtttactggcagcaaataaattctgattttcttttagacatgcttgtaccctgttttaataccgttgagttgttcttccaaggtgtaaaagcatgatgatttgaggcagctttcatgtgtctggccaaatctttactgattaatgacagttaaaccagagatttgactggtcatacatattatttacttggttaaagccaagcatgtacaaaattccaaaatgcatataaactcctttgtgttaaataatgctgttactaagtgtctaggttttctgcttatgacatttggattgaaatggaattatttgacatagcatacattatttctgaaaggaaaaaaatactactgttgacagtaaaattaatctgaatattgatcaatttaggggaaaaaaaaccactgttcttttgtgcgggattggcagttgacagagaattgacacagatgttagggaatcaatgtaagaaaaaacattaaagctgtgctgtgtgatatggcacagtgcagaattctgcttaaatattgagggaaattccagaacttagatccatcatcatgtcccaatggatacagcatagggtaagcagtccatatgaaaggaaactcacaaacacaagatgttttccttgtccttccatgaaacttcagtggtaaggttaagacaacaatgtactcccagtgggcatactcataaaaatacctttattaacagtacacttcttttaaggaaagaaacagttgtagaggaagaaatgcacacatataaagctctatactgaacagagctacagccctagttcagtgatttcaattagtttaagtca

SEQ ID NO: 112789 - DNA, 1712 bp, Homo sapiens
ccctacccaaactagttaaatcagggtgagggtgggccctaggcatcaatgtttttaaaaagatccctaggtggtttaaatgtgcaggcagggttgaagtccactggactagaaattaggagaatattagggaaaagtttagtttcatcagttttgtctcacgattccaaatggactagtttgagtcaccctgcagccccaggaaaacaaggcttttgagctggtttggatgattctttgcatgctttatgccagataagctcttttaacacctctatgcaagtgacaggactttctggctgcccagccatttcatttatacacactattctgtgggcctcagagtggattaattaaaagggaccaggtgcctccttgtttctatttaaagactgtatgcaacactttaatataaaaattgtatcctattcactgtgcttgtttttagtgttctatgtgttgcttgtgcaattcattttcctaatttatagaagtgtgtttttcattagctacaatgcaaaaccaattatggatgtgttatatagaaacctgctttaaatattctcctagcttcctaagagttataatttttagatgcattgtttactaggccatgggtatgttttgtcatatgttgaaagatcacactggctataaaaataagacggtgaataaaaagccacaaaagctataaacatctgtaaaagaagttttctaagcaaggctgcttgttagagggaaactcaatgcattttgattgtatgcagctggtggcacatgcactttcagaaaggggcccattaagaggaactgttagatatatggcatgccgtactgtgggctgtagctctgttccctcagctgtgtgtaatagaaacccatggggccacacttgcaaaccctcctctaaatttcacccacgattctgttgcgaatttggtttatagaagcaagtagtcatcttttggtctcaaagcccatcatgctaaacgaagattactaatcttacctgactcctagaaaagtggaggactccgaaaatcacagcatgggtttcacagcctctgccatggtgaggagcacacatcagtctgacctctgatcagtggtcaggaccaccacaggcccctgtctgtagctctcttttattcttggaggatctgttgtgggattgccatatgaagtacagatgttggcccagttatacacataccctatcatataagagtacaagaagccctttactccagacacatgtgaacagcttggctatgctggggttggggagagaagggccaggttttgggaatctactgctcaccagtctgcgtttttgtggctcacagtgaggccagtccctggagcgctgggttgtctcaaagcaggcatacaagacagtttctgacttctgagatggttcaatgtttacatgatccatcttcctgatatcaaaaatagttcccctagatagagaaagacaaaacccctgatgcagaaggataatggcgatatttttaagttttagaatagcatgaaagcagcttttagaaaaacaaatttaactttttaggagaaaaatgtgaaatctacagaagcagagaataggataatgaatccccaagtagccccagcccagttcaacaagtattaatttttttttccatttataacttcctcactaccctagccataaaacttgaatttttatatgt

SEQ ID NO: 112790 - DNA, 2051 bp, Homo sapiens
ttgctctttcagctactccttctattcggtgaatgaatgtactccagtcaaatgttcactgtgccagtgtaagttaaaatgaacattttactggaatgtggtgtgcctgactgctttggatctattacatatatttggctttgtagaggcaacagagtgaagggactaaaattaacatgtgttttcagacatgtaagcagtctcccatgtcattgccaaaaaaatgacattccacctagaatatagtctttaacatgcgggacagtttatcaccaagaaatatatgactcaatggctgaattttaaatttttttaaatactgaattatgtttctactccccactggcagagcatgagttgagttttccacatctgtcccattaggagccattgccaatgctgtggctgctgcatgctaagtgtctgttccttttcttgcaatactaggctcaaagccccagaggcttctatcactctccatcccacccccatttgtgtcttcaagtgcccagtgtatcttctttcatccctgcctggagagaggccctttggagattgtttgtggacattctttgaggggagagaaatgtgtactcactgaattctctctgagcattcaggcttagtttctttatgtacaaaataagaattatgttaatcgaatcttcttctgggtgtgttatttatgttgacttgacatagaggatacctggctattagtagaaaaacaactgcaactgcaattgtaaaaggagagagaacaaagtactgggagattgtgctggcagttcttttcttacaggttaacattctctgaaggcaccagtgtgtctaaaccaaataaccaatgtaaagaattacagcaaaacaaaatcatctaagcatgcaaaggaatgattcagcactgagatccgtgagtccatgaggctctctatgtctttggatataattaaaacaaggaaattacctcaattcagccttgttttacctaatatattctgagaatgggttggatgatttcttagtaacctagacagcttataagtagctctctctgtaaaaatattttttcttaaaataacaaaatatcatcctcttgagggagaaagcattttgtttggcctgaggcaaaacttggcacttcagtccaaagcactgcccttctccctccctagcccaaccctccatccctgcccctgtagcactctaccttgtgcccactcgggtgagcagccactcttcgcagtggggcagtgtgtgatgggaaagggctagctagaggtcttgacagtacttttccttggtaactaagcttgttctgccagtgggatgctagactgtgactatttagatacgagatgagagatcagggcataggaagaaggggagattgtgttagcagaattcttcttatctagtacgttgccctgtgacagctgggtggatttacaggctgacacatacagtgtgtctcctagatagtatctaaatggaccattacaatgagctgtgattcctgaattcagatgatgctgtttaatatagaaacggagttggcattttcttgttcttaacatgagctttctggtttgcaccaaatggaggggttacccagggtgtaggattttcagggctaaaaccaggctagtcctgggcaaaaagggatggttcatcactctttccatggtttttgaaataagttaatgggtgttctttctcaaggaacacactgaactgaaaacagccaaaagctagtaggtaaaaagtcaccaaggcctattaggaaaaaaagtgaaatgtgatctgtttctggttactactgatgacagtagggtcattttattttggaggtaggagtggtgttttgcagaggtgtgaagtatatatctgcctgatgaagtctgtgtagcatcatcagatattacaaaagttttcacaaacacccatttgtgaaagaagattgaactcaaatttgcttacagaaaaaaaaaaaacaactgtatatcagatgaaaagtgtaaatagtaaagatgctaattttctaagtaaaa

SEQ ID NO: 112791 - DNA, 1004 bp, Homo sapiens
tgaaataataattgtctggaatcaaatcagaaaaaaatatatatatgtatatatacacacacacatacatacatcatttagtttcctatgtcattatgtgttcaagattataaatggaaataataggaaacagaagtgggaacaatttcccaaatacattttcatcaccaaatgctatttatttatactgtaatgacatatcagacagatggattattaaggtttttcctgtcttttataaatctctgatttacagtgattatgatggtgctgattgcttgtggccttgatactagattctaacagatgaatagggtagacaactgatctgagatttgttgtctagaaaacctgaagcaggaggaaagggcaagagggtctggggactggcaatgagaccggaagcctttcaccccggggtcagcagttgggccaggctaagctgtgagtgatataaaccactcatctaaggaccagctgtgatcatgacagaaaactgacagtgatctgatgttcttcactggtactttctctctctctcttttttttttttttcttactgagatggagtctcactctgtcacccaggttggagtgcagtggcgtgatcttggctcactgcaacctccacctcccgggttcaagcgattcccctgcctcagcctcctaagtagctgggattacagacgtgagccactgtccagctaatttttttgtatttttagtacagtcggggtttcaccgtgttggccaggctagtctcgaactcctgaactcaagtgatccacccgcctcagccgcccaaagtgttgggattacatgcgtgagccaccgtgcctggcccttcactggtactttcaaaatgcaaaatacttttctgcttcagcaaaaagtggtagacatttggagatgcttgttaagctttagtaccactcttgaggcccactgagtgcctggtgatccagtcttgcagcactggacttgacccaagtctcaaatattct

SEQ ID NO: 112792 - DNA, 1020 bp, Homo sapiens
ggaagtctgaattggatcagaaagtatgagtctgagttttctaggaaaaggaacaagattgggggtagggcattgcaaaccaactgagtgtcgtgtgcaaggatgtgaagctgtgatttgtgggtgggtgagaagcccactgtaggagagagcccaaggtgtgcgttgttgagaactggagcatgaggtgggggtcaggcaggcatggcaagactgtgaggagtcccaggtgctgggacaggaagataggattgattgtgttgataacagtaagtcagaacaggctttcatttgtttcccagtgagagaatggagtaataaaatgaacaataagactaggtgttccctctttactgaaacacaaacctatgaaataaagaaaatattcagtccaagcagctctgtctatcccttgaacttacctatttttctttcatatcttttttcttttatatcacacaaatggtcttgtaggttgagactagtaaaactataacaattgctaaggctgtaggtatttgctattactagctagaacaaaatacaatgcacaacatttctaaaatgtcttcattatttgtgacctattttgagtgcagtctagagtcacagaatatcccagctgcaaagcatataagaggtcagttgatccaacccctttatttaaaaatgagggaatttaagtcaaaatatcgtaaagactgggtatagctagttatagcaggaatatttctctctctgcaagcacttcgatgacattatctttcctcaaattcatttggtcatgaaattaaagggaaactgaataacaggttaggttagagagcaggagtattataccattttttagtttttatagttttttatttttagtaatatgttatataaaattattacctgtttaaaaaattttattgtgaagtaacctgttgtattgtcctgaggtaacaacctcagagatcagttattttcaagcaatacatctgatttcaagagataagttacaatgaatataaaatt

SEQ ID NO: 112793 - DNA, 1034 bp, Homo sapiens
agccctttccagtgggcttttcctagtctccatttggtctccctctttctcccactgctttagagcaaggaataaaacatctgtggttaaaatcaaaagactgtatctcccatccagcctccagacctggcaggagaaatctcagcattttaagtgaacagcttttttttttatgccccagtagggtacagtagcacaaaggccagtgtcctgtaagtgcctccttttctgtctatcacataactctcagggactgttaccacagctggaatcagtgttttaactgaggtattggagacacttatgagctcattatcatttgaacatatgaataatgtaaaatttagacagagtttcatttgaaaggattatttaaggaacttttagtttacagattgatttatattgctgttattctgaacagtaggaataaaatcagttccctgtagtgtaagttggatgacaccatggtgacacagggcctttcttgattatctcacataatgtcaaaaattaaaagcaaaagaattgatcttagggaattccatgacagtttctatttaacttcacttaacaatgacttcaaacagttgttacatgtatagagaactcctgattaaagggactttctttgaccaatgtgttatgtttctaattgtaactctttaagaacatgcatttggtctcagatggccaactaactgttacagagtcagcttctgtgctatgtgccgtgtactgaaggaacagttaagaaaaggctgcagcccttgcagagtctgggggagaagacaacgagataaagcatggcaaagaccacgctgaaagtatcccagggtgctgtatgtgcacataggaagatcacttacctcagcataggaggagggctaggcaaggaaaggtgtcggaagaaacagaggagcgtttagtctgcagaagtagaaaatacactggagacatctatgtggaatggaaaaaaaagtggctaagccccagaatattgtccaaaaggaaaccaggaaggagcagccaaa

SEQ ID NO: 112794 - DNA, 1817 bp, Homo sapiens
tgatgaaccatgtgagtgagtgtaagcatgatgttgaaggaaaaagaaaaaggttcattctatttgaattaagatgttaaggcaggaggagtgagggctgctgtatgctaaagggagcaaaaggcaagaataattttcctagctccagaagcatcgtatagaggatatgcagcgttggttgagaacagaaaggagtcttttaagggtgagaatcatcttgaaatcctcatggacacattaggaggcatgcataaaaagcttaggaaacagatgcaaaagcaagttggttgaatcggattgggagggctggtggattccaggactagagatagaggatgatatttgagttgtgtttgaaggagtatggtagagggcaggccagaaaaaaatgtgactgcataagcaaagtgcacacctacagatacagtaagggtggcctgtccactgtaactgagtttgaggatacatgttgaaggatgacttatgttgagacaggctgagattgagcagttggtatgaattgtgaaaacattttattgtgtgtgtttggtttggttttgagtagaggagtgacattatcagttctatctcttagaaaggttgctctgaatcattctccagcaagaattgaaggaagtagcacttgagtcagggaggcccattcaggagacacgatggagccaggtgagcaggaatagggacccacatgagatggccatgggatctgagagtcaggcacatatatgagggacacctttgagataagtattgacaaagtttggacaaggtttagacatactcagtataggtggtgaagaatagggaggagtcacagatgaatctaggacgcctaccaggggcattttgggatattgtgattttccacatagagacaggaagagcagcttgtgggtttagagaggaaggaggggaggagcggatactggattcacaattatctgggttaagtgcctgaggagtgctaatagctatttctgtttttatgtctggataagaagaagagatgtacaaatttaataacttttaagaatagtttattatgaatatggagaaaatttaacatttttagaatttctaaacttcatcagcttttgtcctataggaacaagagaatatgcctcattgtcactgtttgaaaatatcgttaattcgattttggaattagtgaatcttttattgtttctagaacccatatatttcttggggaattttatatgccttgccaaggaatcatttaagataaatgacttcaaaataccgttgtattttatttggctccaaatatatacctgcatgaaattgagcattcttattctatcacaataaggcattttcttttgtaaaagggaaaatcagaccacttgaaaaatcactttcctttcagagaccgacagcatcattaccccctttctttttcttcatttctcctttgtgaaaattctttctgatggtcatcaacccacttggcagagtgccctctattcttaatctctgtgtaacttctgcccatgagccagtcagctatcttaaatatcaccagaaaagaaagttttaaatttcccagttaggaatacttttttggcataccaaatgatgctcctgaaataaggactttgggtccaggcatgctagatcatggttctctggattttgataggctttgagagtaaaaggtgaaattttaaagtaagcttgatttcattctcttgacaaattttttgggttggttaattatcccataggaaaatagacaaaagtctttgtggaacaaaattctgttttactatagttaaggt

SEQ ID NO: 112795 - DNA, 1024 bp, Homo sapiens
cagccttaactgagtcaaattcatttatatgaaacaaaaaaattaaacagaacaaggtgtcaatgaatcagttaaataattcccctttaaagagtagtacagtgatagagcaaattgattaacataaaatatttttaacaaattcttaaaatgaggagatttaatttggtctcaagtattaaaaggaatatgcagcaaatatgctactggcaaatgtttatttttgagtatcggaagtgctctgggctcagtgccctctccacaggaggggaggccacagtccactgctgtcctgcacgacccatgcttggatctgccctgctgtgcctggagccacttcttgaagtagcacagggcatatgcggtggccaggatctgagtgtgtgagaagtgatagcacaggactggttctgctacttcatgtttttctgacatggaggcttcctttatttgtaggtgagcgtccctatcaatgtccttactgtgaaaaaggattcagtaaaaatgatggactgaagatgcacattcgtactcacaccagggtaagattatattctgtttcattaatattgatcatgaaaaccatacttattttaaaagaaatatatttaactttatattacaaaataaaggcaatacactggaagttgtatatctatatttatgacagatatttcaggataattttttttaaagataaaacaatgaaagaaaagaagaaaaaaaacacaaattgaaacctcaaaaaggtttttattctttgaatcaggactcaattttcaggagttataaatgatgaacttcaagataaatagattttaaaattttaatactacaatatttaaaggtttttcttgcagaatattcaccagtaataggaacattttttaatagagtctgcaagtttgtcagcatttggccattaagtaatactgatgagcaagtatatttgcaagaaagacattgcagataaattaccaggacaggtggaaaataaggaagtgtagctcagtgcttcacaggg

SEQ ID NO: 112796 - DNA, 1030 bp, Homo sapiens
tgaaaggaaatagtaacctggtatattatattaggattaacatataattatttacctgataactgcaaatcttttgtttttgtttgctggactctgttggtatttggagaacaaaaccagacgtaaagctatgtgatacaaagagaatagctatgaatattgaattatcttaggcttgctagaaaaataattttacgtaagtgtaaaataacatgttactattcttatcatgctttatccctaatatagatttgatatgttgatggatttcattgttaataaataagaaggaaacattttagccttgtttattatctatcactaaagtaaaataaactttgaaaatctaaaaaatgactttttatactttatgaagaagaaaatgaaaaaattatctggaattgtgtgatgcaggagctaccaccatttagcagtcacattctgctatgttttcttcctgtccttttcctttgtggttcaaggttaaatgattaagatctcagtaaatgatagctcctgctgtactcctactattgctgctgatgctgttactgctattactataatgttcttttttatcatcatcctgaaatagaaaaattctagatatatcagagaagcaaaatcattatgacttagagtctggatggagggagaagtgagtaaaaaagtgtggggttatcttggatggctcccaagtttttaatttgctaactaggtgaatgtggtacaactaatcaggacaggatttatagcatgcataagaccaaaggataaataccgcaaattcaaaacaatgcacactgatttaagctgtttgtgagatacccaaaggagggtacctgttagacatatgtgtacatggagattggggctcaatagagatctggaattctgataagcatgtgttatcaactcagggttaaaataagatgatcttttcctagatgttgccaagcctttgtcctactgacttggaaaagccacaccttcccagagtcacgatgatcctaaggtcaataattctagg

SEQ ID NO: 112797 - DNA, 1004 bp, Homo sapiens
ggtggggtttcatggctctttttgctgcggggaaaaaaagtatttcaattacagaaagatgccaagaatgaacttgagctactcctatttgtcagtgtagcatttcacttctctctatggtgtacttctaatttattagaaactccataaattgaagggattggaagggtgagattggaaaagtaattgggtggtgctttcacaattacatttttggtttaattttcacctagaatgattcagtttgctgttttgtaaccatttcctagtctacaaaagcaaaataagccagtcccctgatattcatggaaaaaaatgtaaagttcttctaaagaattcccatataatacatatattttaaagttcaaccatgtggaacgatatcaggtatttttcatgaaacatacacttttgaggtttgctttttcacttgaaagtgttgccatctctaaaactgatttttgttagaaaactcaaagtaagaagtaaagctatgcttccaaaatctttaaacattatttaatttggattcattgaaaataaatgagtttgactttattccattttaaattacattttctgtgtgtacatcttttcatattttcaaggaattatgagttctttgaaatctacgttggtttttgaaatatattaaatgacaagttaacgttattaaaatgcttattgaaaatggtctttttatattaatccagataattaaatatatgtatattacatattaagctttgctgcttgtttataaaatgttcaaagcatagggcacattggctgtacacttttttaaaaaattgtggtaatatatacatgacacataatttatcatcttcaaaattttgcattttttaatcttcaagtttgatcatggtcattattaacatattaattcagtgtatttagtagcatgaacaaaaatttgatttctgtgcctctgctagagtggtcaggttcacttcttaaattagatccatgttctaatttaagat

SEQ ID NO: 112798 - DNA, 1099 bp, Homo sapiens
attattagataatagcatacctctattaaacttgcatcaccaacatttttcctttggaaaataaaaggagatttgatttcccctaatttgtgctttcttctgctgttgctaccatttttccaccaagaataactctctgtgttgtttttctgcaaatcggcactatgcttctaggctggggaaggttttatatcttctctagctgttttttttttttaatcttctctagttttatgggagagacaataattttatgggtttcttgctactcaacgttatatactcttgatacttccttgctggcactatttataggaaactcctctttgtgcaggcacctaaggtttaactgcttagttactccatgaccacggttcaccaactatactcataaatattgggttaaataaaactttggtagaaattcctaaaaatagaaaactactgggtgaaatgattaataattttctcaccaaattctgactccctaacaacaaaaccacatcaatgataaagaacatttcttccttgacttaaattgttccctaccatagcagtgtggaacactcatggaagagtttttgtttgtggatgggaaccttgaaaacttggccagtgtctggattgttcagatctttctgctgtttgtggaacagtccccttgcttttgccagcactcacatcaagaccctttattgtctgtcgtcttgctcccttagacaagtcacatgtaatgagggtaatttatgctcctggttggctgaagcaagagcatcctgagtagggaatcttttacttttgcttcattaactcacctcttttcattctgcatctcgtattcttttttaaaaaaatttgcatcagtaaaattcactttttgtttcaccctcagtaaatccacccaatctggctttttatgatttccgactgaaaagttcgtgagcacgtggctgtcctgtttttttccttcttcccaatgaacctcatgtcctttgagttggcatctcttcagaaatgagggagggatactgtaactgtaagattcttaaggaaaataaagcatcgtttaaagaaatagattttgaaaaccagactccat

SEQ ID NO: 112799 - DNA, 1208 bp, Homo sapiens
acaggtattcatactcccttgatacactgtttgaccctctattcccagtgtcattatgcttatcttttcataaactttagctacagaatatagatcatctatagaatgtagatgaggatttgctgtcaaacagggctggtttagggtgagtgaatgtgcatgtacagtgtgttgctgtcatcttcattgaaggggaatgttcaggattgtgcctggcgggcagctctgtaatttatcatccggcttcctatgctgaaacaacagagatggcactctgtgggtcagctgaaatagtagagcacagtctcctgttggtttatagcttcttagggtcagtgagagctgaggttaattcagcaagggaatccacggactgtgacatgaattccatcagttgttcataaattatggaagaaattctaggaactgcttttgggtttttaaagctctgggccagaaggttaattacttgcctacagttccaaccagctttctgtgttaatagataccgactgtgtaggcccttctgttctaggcttgcttacacattgttatttgaatatagtaataaatcactgtcttaggaaacatgtaattttttggataaatacctgtgatcagcttagatataaaaaatcagtatattattatttgatcgtatttggattttagccactgtttttctttttccttgaatgcttttttaaaggaaataatttattctttttagaatatttgtccaacattataaaaacaatagctttaaataattataagtaattatagagcaataataaaattattaaaaaattagatgattactgaattataaacacaaacgaaaatgtaaacattttaaaacaacattttagcacatttttaataagaattagatgacctccatatgttgagagagaacttattttgctatatttattttctgtctcattactaacattaaaccaaatcaaatattctcttacctgcagataatctaagagttaacagaaacgttgagtagaattgacatagaaataaatgatttccttagcatcacacttcaaaagcttcaggttttccccaagaaatgtttgaatggaattttcttataagcaaagtcttgaactgcatgtttttagatgtctcagtgttatgttgacactttaaataatttcagatccacaaccacatcaatggaatgtaccctt

SEQ ID NO: 112800 - DNA, 1051 bp, Homo sapiens
ttctccagtctccaattacgtgttactttctccttgacgtgttccctgacctgtcccctacccctgccttgttaggtcagcatatccatgctcctttaccctcctcagcactgcccacttctgattgcctgcacctgtggccatcttcagtagtctgtgggtcctcagttttcttagggccatgcccataactgataccttactttttaccattcagcacactgcctggcttagaaagagaacttgtgaatgcttattcaatagataaaataacttacaagtgggttgcattacctgtatgatagtaaaaaggatgcatgggttcagagtgagaagttccagatttgaatacaaatttagttgaccataaaattattttttcacatactacatacaaaaatccgtaacattcactttgagaagtgctggcattaaagaagaaaatgctacacttcccaatctatgagctggacccacccatatttgcttccctttccattttttatcctgttgctttgtcatgtaattggtgggaaaacaaactgtataacaaatgatcattaataacatggttcaagatctaactcactagtgcctataaacttacagtgcttaaatgagggaataaagaacaacatgtggtcaaccagcaccaaacttactgtttgatttcagcttggagtttcctagtttttaaagtttctcattagaaagaacgtagaggaaattggtcctgacaaatgctctatctgttttgtttgacaagggtgagtctgtgctattggagctggaataattacaaacaattatgtagtacattatagtcttttgcagttgtgtagcaaatctcatctagtagagatctgggggctctcattgtttattatatataaatacctattttcagctatattacactgtactttgcttatcagtttcccatgactagattctaagctgaaggacagggcagatcagactcacctctttaatctttaaatttgttgaaagaggaacgttctctcaaatatagtatctaaattaatccttt

SEQ ID NO: 112801 - DNA, 1062 bp, Homo sapiens
tagttcatagtagatggccagttcattgtcataagtataatttctaaaattcttctataatatcactccttgttaagagtacttttccaaagttaaatgaattgtgtttattaatataccgtggcaagcctttactgaatgacataacctcctatattattttctacttttcttcttacgtttatttacaggacatcatattgagaattttcatgttcaatacctttcccttttatttcttccagctttatcaagatcttaaattgttgaacgtgttgaaattttcataacttagtttcgtagatataatcttggttgactattgataaggaattaatatcatggtgtttggcatacttaaaatcatggaattttcttaatatattaatttggggaaaatgcattttagatggctatgtttctgattaactaagactttttttaaaagaaggctaagcattctttttaatacatgtttaaatgataactcagttgaaaaaatatttttggtggtatttaaaattctgaactgtgtatgtcccaccaattttttccttgaaattaaatcatagtaacctccaaaatacgcttaataaattgttctccttgccatataaaacttatcctaggcttttaatatttacactgccttatttattaggcataaatccaaagtatgcttgattcctaagtctgaagagaggttgcgggcaataatgtttgttttataaaaagaacattgttatgtcccttgaaaaactgtttataatggcaaaaaattggaaaagatcctacatatttaacattaaaagaactcataattcatggtatatccataaattggaatattatataggtaacaaaagtgatatggatatatactaaataacatgaaaagaaatgagaaagatgttacaaaaacagaaggatatatttttgtaagaataaagcatttgtatttaaataattgaaaagttatctactaaattattaactgcttttatttctatatgttataaatatgtttggttttaattttctttatgattttctgttttctaa

SEQ ID NO: 112802 - DNA, 1816 bp, Homo sapiens
ttcctaaagatccccttcttttcttagcacttcctgtgtaatttctccaatgaaagaaagctgtgccctagtgaagggtgaatgaacaactaaatatacttcaaaaaccttgtctggattctacctatcacatagataagcccttgaaaaagacttgaaagaatactattaatattgatagccagatgattttacattagtctgaaaacttttttcagtacctagactctaattacatggataactatgtgactggattatacagctgaagcttcctcttcaagggccgtagtatatgactttctttacctttgtatccccagtacctagctcaatgtctagcacaataactgtattgtcaatggagaaatgttaaagtaggccaaagaatcaatacagtgaatattagatataggtggaggaagggacacccttggagcataatttttaattttctgactaaaacttaaagacatatggtcagcttagtatttgttatcttagaataggtacttaaatacttttaaatgaaacacataaccaagaacagatagctgtggaataatgggtgctctaaagaagaaaaggaagatttttcttaattagaagtcatctagagaaagtgaggcttttaggatcaagtgttgcagaagcagagagccccaaaatgaaaagcagagggcagcacatgggaatgagaagcagagaaccatgttgagggcaggtgtacttaaaattgtgccaacggccggtggcaccaggtactgatggtacataagtaaggaactaatgaagagggaacagaaagttttgaagttcctggctagcactgcagtctagtggtgtaatctttgatgtcactgggcagccctcttttatgtgtatttgtggctgtatggagttaggatggagtaagggcaagggtgaaatcaacagcccttcactctgatatcagtaattcttagaagatatctttgtgccatacttagacttagtttgcttagcagatatcatgctgtattagtgtgcatgtacatataatttgtgtatgagaggagggcaagtagagaataggaaacatgtattatatgtacatatcagaatagtcagtttatggtaatgccccaagacatgatgtaattgtgttatgtttggtatagtgtgtttttaaaaggtagggacttacattgttcagaatgcattaagacatagctaccagcacagaaaagatgaacccaatccagtagaacccttgattattcaaaataattccatccttgaggatattgtatgcctacattttattttactcatagtatggctaggcagtggagaagaataaagcacttacactagtaattgcttctaaaattttaattagtattatcctccataaaattacaataataagaggatttttagagttccaagaattctctctgataaaattattaaatatatgtcatggtttttgttgtcttatgttctatattatgtataatttaaagtgtattctacactccaaatcactttatgtatcatttggttatttattgtatacacgagtctgggccaaattgttgtacagattctggcctattaaatttggcttctgatcaagagaactggttatctaaattcagacagcagtggtaaggcacaatgaactaacacatacaatttgattgatagataaagaaattatatatatatgtgtttgtgtatatatatatacacatatacatatacacacacatatatacatatacatatacacacacatatatacatatacatatatatacatatacatata

SEQ ID NO: 112803 - DNA, 1026 bp, Homo sapiens
atgttgggagcaaaactggtctcctaatgagactgtagggccagtttaaaatgctctgtctccctcctcttttggggaggggtcactcctttctctttgaactctccagcatttatcgaaacttgcttttaactatacttattcacctttcctcatgtgattgtttatgcctagattaaaggcatgttgagggcagaaatatgctttcaaattgactgctcagttaccacctggtgattttaaaggtcaaatcagatttatattcctttttgctttgcagtaaaaccagtctagtcaaacatcataacacaagtaatagatgactttattaagattaattctgtcctcaagagttaaatatacacaaagaatgtgaaaaatgcttcaaatgaagtgtttcttggcagctgggaagggtagctatagccctattttgattatgtgcttttgctagaatatactggtttgtataatttaatcatttttagttggggctccatgagggcttaaaaaagtaaactgcagaatgattttgaaattaacactaatgcatgattctaaggcacatttttttgagccagtgggaatatccatcataaattgtttaaaatctcattgtgaaattaaatcattttaatgaaatgtaatcctacaaaataaggatttactattgtcagaggcatttaatcatctttacctaattctttgtatttatccttagcctttttatccctttccttttagacacatacaggagaaaaggagaaaatctgtccatattgtggccagaaatttgccagcagtggtacactcagagttcatatccggagccacacaggtatggagattgtaattagactagtgaaaaaaccacttagagaaatcacatgcttccaagacaggaaatattgtaataatacaaatatcttccagattaagaattaatcttggctgttttctctctcttaaagcattgtacaacccagttttttcatctagaagaatttggaatgagtatattttctt

SEQ ID NO: 112804 - DNA, 1032 bp, Homo sapiens
tagaagtacatacttttaaaaaatgttcatggtaactttgagaattctgctaattcagtccccacgttttccagttgagaagactgaagatgtaagatgaaaggacttctgcctagtcacacagtgaattagcaaataatggaactggaatttgttgtaaaaaataaaaagttaacattcttagagctacaaagccaacattttggagaaagcaactaagtctggcatacatgggaggaaattaataggaccctgctattgcttcttaaatgtttctctttgtttctaaggtgagaggactttcaagtgccatcactgcgatgctacctttaagaggaaggatacattaaatgttcatgtccaggtggttcatgaaagacacaagaagtataggtgtgagctatgtaataaggcctttgttacaccttcagtgcttagaagtcataagaaagtaagtggaagtcttctgttagtttgaacagattacgtgtttaagcagtatgggtatatatgttaactaacatgtgataattatatattaatctatcaaaatatttactcaaaatgacaaatgcatgatttatatcagctcttcagacaatgttcactttcttcatctttcaggatagacctatttttttccatgaatgagaacctgagttagatgtagactcttcataacccatagctttgctgatagatggcttctaaaaagtactcaatgagcaggagcttatcaatttttatatatttttgaattaatgtaggctgtttctttctaagaaatatgagtagtactttaataattttatatttcaaagtgaattcttatgtttattggcaagttaatagactgaacccttttgttattgggataggctttgatctttacctctctagagcatagggaagtttctggtacagaatggggactcgataaatacttgcttaactcaaagaaaatgttcatatagtgatttggagatttttttgtgtgtgtcttatgctacttgggtcattacctcaagggaa

SEQ ID NO: 112805 - DNA, 1051 bp, Homo sapiens
cttggagaattttcctctggtcaagtgtttaaaatgccaaataataaagatactaagatttcttaaaataagtattgagtggtaatgattctgatgaaatgcaatctgcttcctgtaaaaaaaggcagtgttatgctctcaggtcattctgcattcagcttacaggtctaaagaagttattagcacaacttaccagttttcttattaaaaagaattatgtgtttaaaaataaaatttgttgtgcaattgcaggaatttctattatagttcattaccagtttgatttagaaaaataactgttatgagatgaatgaatgttagaatagagatttggacaagtaaacctcattcatactattgaaatatggctaaatttgacttgatgcttgggaaattttgcttgggaatgatgaaattttatttctaataacagcaaggaattcttaacagaagtaatctaccacctttgctttcagtttttttgttctcattcacttgagaaataggattaaagtgactatgtgtagactgtgctgtggagtatgtatttaatatgatgttgatcagcacattaatcacaggctttatgaagatgcatcgtgacatttggccaggaaaatcaactttgataactgagtgagtaaatgagttattttagggaaataaagttagatatcagttagtgaaaagaatgggaaaaccagaaatggctaaaatagggaggacaaaatactacgtcttatgcaatatgaaaattaaaacccatttatttaactttaaaatatgaaagctgttgttagaaacttacatcagctttctggctcaaaatgtgaagaataacttgtaatgattttggaaattgttgctatttcccaatatgttgaaaaccaaaaggcaagttgctggctagcttgtaggtactaagatagggaaaaaatctgataaatttaacacaaagaaatctgcaattaaagtatgaaagaaggaaggtaagaacttccttgctatagcttgatgagattttgtacagggaccaacatttttattcact

SEQ ID NO: 112806 - DNA, 1059 bp, Homo sapiens
atgggtttatactggtgtgtaatgtaaaagaggtggagtgagcagtgtttgctgttttgttttggttttgtttttgaattttagatctagttagtggcttttcattgtttcttgtttgtcagtatatttttgtttcttatgtacctgggtgcttaatattgtttgggaaatctatgctgtttgaccttcccaagttaccgcaactttttgagccttagttttatcatttgtaaactggagtcagtaatagtgttttattaatccagttactgttgtaattaagtgaaatgatttatgtaaagtgtttagaatagcatttgacacaaattaaatatttaatgaatgttaattagggttaattataacatgaataagtgctctagtgtaatttaggggaaaagcagcacctaggactagaattatttgaactgattcagtgaagttgagagaaaagggtgaaaacaatttctcttttaataatttcttttatctgtgttgcaaatgttgtaccagcagagtaaaagcctggccagtgataggggaggcttagttttcagagaaagtacgcacagtttcactacaaagtaggccctgagaaatctcagtgtgtattcagattagcagtttgagataataggaatattttttttttactatttatcaagttaataattactgtgagcattcaaaagttatttttcctcttgcaaacacagcacatttgtctttacaattttacggtggaagaatggcactagaagaaacagatactgtccaccttcccttctttcctctttcgcatcatgaatccaagctccactcgttcattgtaatgactggttgattctagatcctcctgactcagtgtttttcctctgcagacccactctgaggagagaccgttccaatgtgaagaatgtaaagctttgttccggaccccattttctttacagagacacctgctaatacataacagtaagtcacgattcaggcagttgagaatataaggaattatctcatactttgtttttataacctttgagaatgtagacatcccag

SEQ ID NO: 112807 - DNA, 2420 bp, Homo sapiens
acattggcatccttcttgacaaaagtatttattcacctggctatgcacagacatcttactacttaaaatatgtcattggctttaggccaatatctagatgttgtggctttggttgaacatagttaaaaggcattatgctgtcccaggttctttcataattaagcaacttaagtcatgttccttaagtcatgttatgtcccaaatttggaaagagaaaaaatgaattagggaggaatatagtatttttagaagatgggagcaatcctgtgttccaacctggatgctctaaaaacaaaatagtttctacctttttatgataatgctgtctacttattgttttgtagaaaatctaagtagcaaagaaaggtataaagaagaaagcaaacattctgtcaaatatcactgtctttcctttaaaaaccctcctcaatgttttgtagaatgtcttcctggactccattctgtgtgcatatatgtatgcggcttaaatggtattctttatattatgttttgcattctgcttttgtcacctaaagtatgatatgcatgacttttcatatctaagaaaataaatatagaattataatatctactacagtttagttaaccaggtttatatctttttatgggcatttaggaattttccttttatttaaaaaaaagtagtttttgcaaaaatttgtcagttgtatttctgtaaagggaattggttagtcaagggatgtgcacatttgtcattttggtacatagaaccacattgttatgcagaaaatttttattcccaattacagtatgtgggattgcctgtttttactctttagtcaacactgaatggtatccatcatcttcatctttggcagtctgattaatcacagatagtatctttatttttaatttttcattcctttatcatattcatggctttaaatattgataccatatgtaatctgacatctccatcttataccttattatccagacttgaaatattcaagtacctgtagtgctagacatctcgtaatatttatttgaacttgccccaaattgaacccctgatgttttactcagacttgtttcttgctgctcttctgcatatctgttagtggctaatccatcattgcattgctcagatcacaaatcttggagtcatgcttgcctccttctttttgtgtctcatgcttcatatccaggtactttctcaaaacctgttcactttcagaagatatttagaactctactacttctcttcacatctgtggctaccaacctggataagctctaattatctctctcctgctgcattgctgttgcttctccactttgtgttttcccctacattttgttgtcaacacagccatcaaggcatcctgttaaatgtcaggtgaattgtgtccctcatctgctcaaaatcctgcagaaagttacatctctcttagaataaaagacaaaattcctgcactggccagtcaggccgtacacgatttgcttctcctcctcacttctcccattcttctgactgcatctctccacttctctgcccatttcacatggctccaaccacactggcttccgtgatgtttcttgactaggtcacccgaatacccacccttgctccttcatatccatcagatcttatctcataggtcaccttctcagctagaattttcttgaccacctatttaaaattgctaccccattctctgaaatgtttgttatcttctttcttgctttatttttctccatcacatttatcccttcctaatatagtacatactttttcatttgtttattgtccttctcctctgctagtgtaaaagcttcgtgatagcagggacattgtcttttggttcatggctataggctcagcatctaaaataggacttgctagtagaggcatgaaacgcatagcgtagacctggcataaaataaaacgatgaatgaaattttaggagtgctatttggaagggagtccttttgtccattttcatcttttcttattaagatgccataacttcttatattagcaacattacacttctgttttatgttgcagatatttattttgtcatcaaagatttttgctttggagctttaagtttatttctgtcatttcaatgtctggtttaccttgcttggaaagcctttccagactcaaaagttatttaaaaatttactcggattttcttctagtacatttaaagtgttattcttcattttaagaaaaatacctaaattgatttgcaatttatcttattgtaggaggtgagtggtagatccaacattacttttgcccgaatatctggacgtttgcctcaaagccatttactaaactttctactcttttcccaccaattttaaatgccatatttctcctgtactaaatgttcatgtattttatgtaatgcaagagacctacttgt

SEQ ID NO: 112808 - DNA, 1034 bp, Homo sapiens
tttgggatgattcaagtgcatcatatttattatgcactttatttctattattattacattgtaaaatataatgaaataattatacaactcaccataatgtagaatcagtgggagccctcagcttgttttcctacaactagatggtcccatctaggggtgatgagagacagtgacagatcatcaggcattagattctcataaggagcatgcaacctagatcccttgtgtgtgcagttcacaataggattcaccctcctgtgagaatctaatgccgccactgatctcacaggaggtggggctcaggcggtaatgtgagtgatggggagtggctgtaaatacagatgaagcttcactcacttgcccgccactcacctcctgctgtgtggcctggtttctaacaggctacgggctgatattgtggggttggataatcctgctgtagcagggttggggaccccctgctgtagtatacatctctagaacttacttatcctgtgtaactgaaactttgtatcccttgaccaacatcttcccattcctcccttcccctgcccctttacctctacccctagttcctggcaaccaccgttctaccctctgcttctgtgtgttcagcctttttagattccacatgtaagtgagatcatgcagtatttgtctttctgtgcctggtttatttcacttatcataatgtcctccatgttcattaatgttgccaaaaatgacaggatttctttcttttttaaggctgaatagtattacattgtgtctatataccacattttctttatccattcatctgtcaatggcttcttaggttgtttttatatcctggcttttacgcaatgaacctgagagtgtaggtgtctctttgacaaactgatttcactttctttgaagatgtacccggaagtgggactgctggatcatatggtagtcctatttttaactttttcagaaacttccatactgttttctacaatggatatgctaatttacatttcaaccaacagtatacaggggttccaatagtt

SEQ ID NO: 112809 - DNA, 3101 bp, Homo sapiens
aagatagcttctcttttggagtttcctctttgtcttaatgacaaaagcatgtaattatcctagtctctttattcagtattggtccctttataaaattagaagccaaatataaagactctaccctttacattatctcatcactttcacagtcatcccttcctttaccattccaacatcctgattatttctcccctggattcctttaatactcatctaattaggcttatcacttcctgctgcaatccatcctacaaggcaaatcatcccaaagcatcactctggtatatcactctcatactctaatattaaaagtagattgccagtgtctacatatgtaatagtatatacaccttcacctgtcattcagagttctctacatcatgacctcagcctacttctccagctttttatccttttatctgcattaaccatacctaaaacaactaaatatttgcctgccttctgtgtgacctctctaccttcttctttctcttcaagttattaatatagtgtcctagtttcttctgttgattttggtttgcatttcttatactttacctttgctcaagttcttgtttcagaatgtatcatgtagataatacatcatgcttgaattgaattcaggaaattggtccaaagatattcaacatcttagaaatgcatgtaaaaacattttcatgagatacaaaatacttgcttattgattttagttgatgtattatagcatgctgttaaataacatgtatatgatcttttaaaaataatttttcagttattatactccatggggattataattattataatatttatgggatacttccaaagacttcattttatctcttttgaaatcatttaaaaattatgataccaatttcaactttagtccaaaaagagaaagaaaaaggcagatttaccaaagaataaacagtgttgattatagtgtcttaaatcgtctctgcctaatttcttccttaccatctttatgtttacctcaagcattgtacattcggggcaggactgcgttcattactgctgctttggaattacgtgactgtaaaaaattatctggctagttcctgtttagtctctggaaccctcttattcctttctctgatgaaactgatctatccacatttatgagtttttcacagtttggctcatgttatatgccatatgggaatttggcacaggatctttgcaccatctctcatactttaagccataaatcatataaaagtaataatgatgtcttgggaagcatagaaacaatgatgcttgtaatttccaaactggaaagcaacactcaatccttctgcactagacaaatgtatttcttactgtgttatgatcctagcatatatttggcattgttacatgaaaatacctgaaatattctccaagaatcatgtaaaaacagaagatcaaccttttcttccatcacaatcattaatggctagttgagaaacatagaagtaaggatatgccacagaaattagaaaaaaacgttaagagtcagtgtgatctttatcttttagtatgctcaagggttattacttttaattaattattcttttgttttttgagaatataatatatacatttttattatacttatttgagttattttgggttggttcttaacatttagacttgcttgaaaaatagaatattatttttcattgtgattatgatagcatatacagaaattatttttattttttgaaatagagtctcactctgtcactcaggctagagtgcagtggcgcaatcttggctcactgtaatctctgcctcccaggttcaagtgattcttgtgtctcagccttccaagtagctgggactacaggcatgtgccaccatgcctggctaatttttgtatttttaatagagacagggtttcaccctattggccaggctggtctagaactcctgacctcaagcaatctgcctacctcggcctcccaaagtgctgggattacaggtgagagacacggtgcctggccagcatatagagaaattttaaaggggtgtttttttttttttttgaaaatttagttactcatttatttcatcatcttgccagttatatgggttcaataggttactttttcttcttcattttttctgacaatcatttgatctgaattacagttgtattttaggatctagctaaaaaatctcatttatctcaattcaaatatacttcgattctttaaatcacaattgaaccagtgtttcagagccagaggagacagaaaccgttcaattactcttcaccctccattgtgttccctgtcatatataatgcaaagcaaaatttgggtaagttgtacagtgcttccctcctcctgctgtaggatacatgtttagatgtagtgaaccatcttggatcctagagctggcaccacttacttgctgatggaagtgagtatggaggggttttgccctcatgaatttacaaacaaactcctaggggacaggtgtgtgcctattcaaaaaaagaatcttttttcctgaccctttacttagccttccagggatgaaactttagaggcttatgaggaaatctagtcacaacttctcctggaataattccattgggccttaatgtctcatcaagtctttttcaaattctgggccatgactgctgtgtaggtcttgaaatcaatttactgagtgatgactggccattaaaaaatagaatagaaggctgggtgtggtggctcatgcctgtaatcccagcactttgggaggatgaggtgggtggatccgctgaggtccggagttcaagaccagcctggccaacatggcaaaatgccatctctactaaaaatacaaaaaaattagccgggtgttgtggcgcacgcctgtagtcccagctactcaggaggctgaggcaggagaatcacttgaacccgggaggtggaggttgcagtgagccaagattgtgctactgcactccagcctgagcaacagagcgaaactccgtcttaaaaaaaaaaaaaaagtagaatataaaatatagagtaaagggtcattcaataagataatacatgtatttgtgtgtatttgtatgtgtgtgtgtgtgtgtgtgtgtg

SEQ ID NO: 112810 - DNA, 1275 bp, Homo sapiens
agaatcaccatgtaatttgtcacttactcctccttgagcctcagtttctttattcttcatttgtgaaatgggatactggtgcctacctttcaaattagctgcaaagattaaatgagatcatttaggtactgtgctagcatagtgtctgacatttagtagatattcaaaaattataattcttgcatttttagatacttttatattctagctaagttactaatacatgttagtaagaaatctataaatacattttgagtatgtaagtttttaaagcggtagtttcatttaagcaagtcttatgaatagctctgttttactaatgcagattaaaaaaataagctctgaaaatagtttttactttatggagtctctagagtttaagatatctgtaatttgaggcgattgaagtcagaatgtttttgaatatgcaagttgttgatacatatgaatattttagtaaattaaaatcagatcaaaacctgttatcttttaggtatgctttatttgatacatattatatattttttatttaggtgtcaatgttatatggatattgcataaatacgaattttacataccagtgtaaatatctggttcctgccgagcattggaagctctgcctccatgaggcctttgtggccctgggggaaggcagctctgttctttgtctccatctctgtcaggtcactttctgtatttggggccctgaccctgatttaaactgtcacatatcagcatggttttcatctggaaataggagtccttccttgaatgtaaaccttttctttatatctaagctactttaaaaattcaaaatacgtctgtaagagaacaagctcatatttcatttaggagtagacacatttatgtgtctattatgtggatggtagatgttttttagttgtttgaccatcctttagttttcttaccgtaagaagtaatataaggtaagggtgttttctcttttatcctttacctttatatagatatgagattgtctccactcatttttttaatagaaaaacgaccctataattgcgagatttgtaataagtctttcaagaggcttgatcaagtgggtgctcacaaagtaatacacagcgaagacaaaccttacaaatgcaaactttgtggaaagggatttgcccacagaaatgtttacaagaatcataagaaggtaaaacttattaatattattattattttttatgaatttgctgctgtgattttcaatttttatttttgataaagcttttgtacatctggggcctactg

SEQ ID NO: 112811 - DNA, 2655 bp, Homo sapiens
gttggaaatgcagaaatcacccatcttctgcgtcgctcacactgggagctgtggactggagctgttcctattcagcgatcttggaactgccctctttattaagcattttaaggaattttgaacatggctttagcttgaatttttcactataaatgagatagtcaatgcacaaatgcttaaatatatagtcgatgttccctttatagttttgggaatatcagttcaattcaaccttgaaaaatgtttcatgttgaagccatgagaattaacaagtgaacaatatttcacttaaaaatgaaacaaatgaacaatgtttcatttaacgatttccattttatatgtggatgaataatttttataattttatatatcaatagaaattaaacattaaaaatgataacaaaagttttcatttatgtataactcagaaggtatgacatctctttagagtatcttgtttgtcattataaaattatatatattacagaaacatagagtttaagaatataaatctgctcttactatctttatataaacattacaaatcatatcattggtcctcaaacataggtgtttaactgaagccgctgtggaagtctttgatgattgaagaggctgcctttaacatgcctcaggctggaagtttttcttgtctgctctggagcactagcattccaaacacttgtgcaggcagtcatacagatcccacatgctttctaaaggaactctttggattctagatatcccctcatagatgccattgcatctaagcggggagataagtcagactcttgtggaatgacatattttggcttctgccttgtttctctactttttccctgctttacataactgaatttaatgactcaccaagagtcagacctgacagaagcagaggctggttggcaaccttcaaactgccacgtgcttgggcattgaattaagccgtgggctgcaggcctgggatctgtcagccttgcccctgcatctgtttccctgccttgaagccttctatggccatttagatcaagagaaccatttatcaggggccagccgagtcctccactcattactcatgtgctgtaccagttcagggacttttgcctagatctttcactctgcactgttattcctagttattctgcagggacactgtcttggcttcttgcacaagggcgtttacttctctggggtttagtattgtgagctggacctttagtgaggttgaaacaaaaacatgacttcaccacaaccatttttgaatattcaacaacattgtgtgatgctgttgttcattgggatgatcaacatttctaatataatatgatatgtaatacatttcttttagaattgaatacattgtttctgaaaacctagacttttacttttcataccacctatccagtttctctgtgttagtgtctgggagggaaataactaatttaatattcagttttaatatttatattagccaattgtttactgaagttatatccccccttattgtattttttaaatacattttattctgtatatttaagttatacaacataatgtgatgagatacacatatagttaaatgattattttagtgaaataaattaatgcatccattatctcacatagttacccatttttcctcctgtggcaagagcaactataatctactcacttagcaaaaatccagaatataatacgctattatcaattgtaatcttcgtgttatacattagatctttagagttattcatcctgcatacctgctactttggatcctttgactagatttcctcattttaaaagttgtgatcctcctgtcatgtgagacttttttttttttttttgagaccgagtctcactctgtcacccatgctgaaatgcaatagtatgaacacagctcactgaagcctcgacttcccaggttcaaacaatcatcctgcttcagcctcctttgtagctgggaccacagacgtatgtcatcacacctggctaatttttaaaattttttgtagggacgaggtctcactttgttgtccaggctgatctcgaactcctgggctcaagcaatcctcttgccttggcctcccaaagtgctgggattacaaatgtgagccactgcatctggctcatgtgaaacttctattgtgaactaaatgcttttcagaatcctgtaacttctgatcttttactgtaattaatgttgcactctctactatgtacatttaagtttaaaatattgttggctactgtaaagggaatattattaactgcatgctacatatttccaagtctaaatttgtgcataacagaagagttactatatattaggtgtaattttttacagagtataaatttaatatgtactaaataggacagctgtattacatttttaaggactgtgagtattatgtctcaaaagatattttttactacataacttatgtccactgcattttcagtgtatataggttagtgtgaacaaattagggctgaattgtaatatatagtttgggtattgcagtggcagctgttcacatgtttacacttttgcttgagagctgtgtaatttactaggctttgacagttgatttaactgtctatttaaccttttgcagattcatgagatatttgattgtcaagaatgtatgaagaaat

SEQ ID NO: 112812 - DNA, 1790 bp, Homo sapiens
ttttttgattttcaatgctgttctagttaaaatgctattcttaattttcttcatctatgtctgcaatatattgtaatagaactttcatgtcagttttaaagcttaagtttgctgaactaagtaaaaaaccagatgcatacgaaactctggagacttgcattcttattactgggcatgttgtcttcaggctgtgctataagcacaatgtctttgaggcttcttgtagttggccttgcatattgtaatattattaattctggaaatttatggtgattttgtaggaaataattcataaaaggaaatcttgttttatatatattttttaatttgtggaccatataaagtgtaaaatcttgctgtattttagctaacggttactatgccatatgttttgctggggttggtacatgatgtcattctctcattcacagtatgtctcttgcttctcccctttcctccatgggctgcacaggcattggaggaaagaatattccctattggagatagcaagcaaagcagctctcatatacatggttgtagaatcctttattatagaaaggcaaaggcactcaaagaaagagatctttgatggcaaatgtttttttgttaaggtgatatgaattgaggatgatgattagagagaagctgaatttttcaatatggatcacatttttccatagcaaccataacatgggtaggtaggttctcagaccagctcctagaagcatacttagctcacagcgtgttgaaagttgagtacttaagtgattgtgtattcagtacagttgtattaatttcctcacatggcctactggtataagtaatgtgttcctaaatgtttttgaaagtttaaatctgaaagtcaaatatcagatttacctaaataggaaagttaagacagtataacatctagttatggctttgcaggtgctgttatccatgagcctaggggagctggtagagtggtgaggctcctcacagttacttaagagggaacagagtgaaggggctaagctcctccgtcacttcccatctttcccttttgcttagattccatggttgctgacaaagagactttgcattaatgggagataacatttatctacattctcagatgaatagtcatacatttttcctgtgtgtcttctcagaggagctaggattcttctagggtgaaaaagaggagaagccatgaaaaggagagagaagactgaagattggggatgagggtttgatgtataccctttgatacctgcaggcagagttgtggcaggagtgcaggggtaaagtgagagtggtgggtggagaaatctgtttctttctctcctctctcctcctcggacccatccagtgggaaggagtagggcctagtatcaaggagtagttgctatgagggctaggacagggcaataaaggattattggtggaagatggaccatcccaactagtaggacctggaaaagagggaatattctttctgaatggtgcctcaggtatgatatgtttaggaaattgatgaccaaatatatgctatcagatattcattttgcctgggagaattttctcctttagtagccatgttacttttcaatcactgagaagcattttcttggctatcatatttagcctgctaaaaacagtgcattaaatggaataggcatcttgaataataagacaaaaattcatatttgccatttgaaagtatatttctttcataaatgcagtcctataataaaacgaaatcattttgtaatattgattttacttgttttagatttgcttcaaaatat

SEQ ID NO: 112813 - DNA, 4078 bp, Homo sapiens
atatgccaacatttgacttgagaagatgttaaatgggaaaacatataaaattgtatataaagtatgatcccaaatttacctcttcttagactgcgcataaaatatgtatgcactaaaggcaagtcaggcttgccagtaatattatgacagttgtctcttcctgatgggattattggtgttttttattttctgcattttctaagtctaattttattttataatcagaaacaaatgtgtaatttaaatagcacgctgagaaatttggtcagacctgcaccagtctatatgggaccgtgtagcataattcactctactagcttaatcagcactgtttttatgaccttggtcttttttcacatgtatgtgagattctccttggtaattcaatatagtttgcatcagttggatttttctccttgtgaaggtaaaaatgagctaaaaatgaccaatttcaggaatagcttttgttttctaatttaacattttgatctgaaaagttaacattataggatgaattaaataaggaatttgactttgtattaatttggtgaaatacaagtgattttgaaaataatgtatttctctctagtaacacttgctattatttttttgtggccaaatactattaatatttatagtgataataagaatttattcatatggtatcattaagcacaattaattaattaatttaaaatgagagcaaaactgagcatttcttggctctgaatttttgtctcatgaatatgtttccttgtgaatgtgcagatcgccttggctgtaaagaggactatgcttgtcctcaatgtgaatcgagttttaccagtgaggatattcttgctgagcatctccagacattgcaccagaaacccacagaggagaaagaatttaagtgcaagaactgtgggaagaaattcccagttaagcaggctttgcaaagacagtgcgtatattaaagaaatatctttaaaattataagctaacacagtttattccattcagcttaactcatagtttttaacctgtgtgtgtgtgtgtgcacgcgcgcacgcgcatgttttgtgtgtgaatgagagattaagcattttacattggtattgtcattaactcatcttttcttagtatagtatgttgattattaaaatattcaaattatggattttaacacataaacactgtttatggtaattagtttttgtccatttattaatttgccattatgtatcaagcttactggtttaatctgaaattcagatatgcctactttagttactcctttgaggtaacagacttttagttgtctacgttttatattccttctggaatctgtttaaaaaaaagtttaagaaatggggagttcaaagtataaagaattcctggacattttgggaagcactgtttatttgagagcaactttggaggaataatttaaagatgcataggtcccagttataacaatatgattaattagatgatcccacacatagctctgtacccttttttattttaacaatttatattaacaacataaaattatctttatttaaatattttacaggatcagaaattgttaaaagtgagaaagtaggtatatgcatttgtaaagttttatttttttactcattaaagtttgtaattttaatcagataattgaatttaagtaatttaaaagcatatttacatattggatgcaactgtagactctcattgtgttgaagccaattacttccaatatgaaagtaatgtaaattgtcccatctcatcaacatatctcttctcttatgtgctcccatcctgccatttactttctttctccaaccttagcttctcattttaacagaatgttaccttacttatgagcaagaaatctttaacataggctttaatgttacatttttacatttttgtgtttcattgaactaaaattctgaaatatgctacatttcatactaagactgtatgaatattattatatgcatcaacttttgcttataaaaattgagatgaaaattgtgcttaaaacttaataaatgttcagaatatcaaaacttttataatagcaggatactacatatttagaaattctattgtacttccttaaaaaacaagcaaggactatatgcttttaaataaatagatgttaagttgcattctggttagcttttattgcatttagtattatatatttatacaaaagacactgctgagcaagagcttatagttaaggtactgctaaaaatttaaaaaggcaaaagacaatgaaaaaagggatcacgaacatgactttattcagagttagtgtagtttcatttttgtcttagagttccagtttttgttttcttttctttctctttttcctatttccctttagtgttcttcagtgcacagcgaaaagcagtctaaaggagtcttcgcgaagttttcagtgctctgtttgcaattcttccttcagttcagcatcgaggttttgtgtctgagttatgaaatggctgttatataattgtgggtcattttttgcatgcatactttcatgcttcttagtaattcagtttcacatacctacagaatttaaatgcttttcttcttacctgcataggtaatgcatggaatgaccccgaaactctactagggagcatgtattacaaaatcttgctgatgtttgagttttgtaggtatgtcttcaccatttcttcctgttccgctttgctggttgtcttgtagttttgagcagcaccaggagacttgccggggggatgccaggtttgtgtgcaaggctgacagctgtggaaagaggctgaagagcaaggatgccctgaaaagacaccaggaaaatgtccacactggtgaggagtcgttggagggtcgtttccgaaggggcttcctttccccaggctgcagcgatctgtttttaattctcgctcttgaggagagagctggcttttccattgtgtttcacacagatgtggagcgctggcagtggatttttttctttcactgaacactatttctttctcaggttgaatttagcagcatttgttctttttcccattcctgaattaattataactgtaagccttagttaaagtctagttatgtttgggtggtcagatgcattaagaattaatatttttaagtaacaattttaaatgttttggcatgtgacatttcttttataaattgttaaaatttatcattattaagtgatgtccttctgccttattatttttacagtaaaaatccaacttgtgaaaatacagttctcctaagttagagaaaattgctaacacattttgacattggaattgaatatgtatggattaacaaaacaaatattatttgaattccatctgatagctagctaaacaataaaacaaatataaaatttgactgtcttttgggtttatctgcttagcacatggtatactgtcagtaaatatattttggcttagggattaaatctattgcagtgagttgaacagatggctgtattgtctcagttaactttttacttcttgtctttttacctccaaagacttcctccttaaaggaggttgagatttatgaaaccctgtgtgttcttctcttcatattctttgttcatgtgtttatttttgcccttgacttctgggaaatgggtggctatgtgtctctggatgtgggggaaagtggatttcttttctcccttcagttgtttattcttatattcaggagaagatgataatctgcacccagcatctgtatcctgtatttgttcattgtccaaaaagtattcactttaataataatacagttatagaggctagcgtgaacaactgctagctgcgactttgcatcattggtttgggctgcatattaagtgcaacctatggtgaaagctctgtgtggtggaagtagggccttgtgaaatgcacctccagcttggtgcccttcactaggcttttacagtgttctggtttctttctttccttttgaagaatacacagctgacttagggaagatggatttttttctgaattcagtatactggggtcttccctatgattgcaaaaggcaagcataactttttgatagacttgcc

SEQ ID NO: 112814 - DNA, 2011 bp, Homo sapiens
tatttcgggaccaggtttcagtaaattctttcaggggacgaacttatttgcacttcctctggtttgtgttagaacttgaaaggctttttttttttttaagttttgtgttagtgttaataataacgaaatcattgatatctcattgctctctgtctgcatgtgtgaatgacactgttgcatgacaactacatttataggccaccacaaagtgttgcttgcataaggccagttagtgatgcaaaattcactttaaaaattgaacataatttcatttgacatgtgtaaatgtcactttttgtcatatgtatttgtattttatttgccaggtaactgaatattgtcacctgcctttttcagcacccagatcaactagaaataaaaaaaagtaataacttttcatgcacacatagtactccattaatgtatcttaaaattatttcttaattactatcagaaacaaatgaatggttcagcatttaaaaaaatttgtttcaggaaggagaaaacattttctatttggcagttgaagatatagaaacagacacggagcttctgattggctacctggatagtgacatggaggctgaggaggaagaacagcaaattatgacagtcatcaaagaaggggaagttgaaaattctagaagacaatcaacagcgggcagaaaaggtattgcatctttaattggtgatctgggagaagaaaagttgtagaaaaaagtgtagtttaaactgtggttgaattatagttgccttgtaatatggcattctcaaataaagttagtttttgtcaaaattattctcgagggtatcctgtggtggactcatctttgttacagcaggaaaagtattttgggagtgggtgatggatgtaccctataggactgcctaggccgcaggcagggctgcattgctagggcagctcccggctctcactgctctcactggcgcattggggtaatgagtagtgaggatttttatagtcttgccatagctctgccactaatcagtcttgtaacgttgggcaagttgctgactttctgagactttactttctcatctgcatataggaaaaggtgagagtggaggtgaggtacacaagagagcctgctggatccgaaggggattgattcctcttgtttgggatcttttgggaacctgcagcttcttggcatctctttctgttctgatcacagaagcctggaggattgctaggttgccctagtgtggttaccaaaaactttcagtgaccgtaggtcagaccttcctcagtcaatactgcagccacttgcttgttaactgccagggaataatcaattattattggccttgtttctattatgttgtgttttactcctaagggaaatttaagggatatatgaatgatgctataggtattcacattttgtaataggcctcgtctttatcctttcaggctgttataacaaaatactttagactagatacttggtaagcagcagaaatttattgcttacgtttctggagcctaggaagtctatcaaggtgccagcagatttggtgtctggtgagggcccgtttctaattagatagcaccttctagctgtgtcctcatgtgacagaagggacaagcaagctctcttgggcttcttttacaagggcattaagcccatacatgaggacacagtgctcataacctaatcatctcctaaagggcccacctcttaatacaattccattgcggtttcagtttcaacgtatgaattttggggattcacgaacattcagaccatagcaggctgatacttactatacagtacttttccattttgtgtagcaaagccacttcagaagtgatactggtttcattagtcaaagtggtagtatgcttttcctgtactttttctgttctaactgcatgttattggctgagaaagtgtgaacattctgtcaccattgccagcttatgcttctgtttctttattttagttgaattatttaaggggaagataaggacaggcttatatgcatt

SEQ ID NO: 112815 - DNA, 1896 bp, Homo sapiens
agagcattggggcaacacccttgtcttagtccatttgtgttgctataaaggaatacctgacactgggtaatgtattaaaaaatgtgtatttggctcacagttttgtaggcttgtactgaagtgtggtgccagcatctgcttctggtgatggcttcaggctccttctactcatggtggaaggtaaagtgaaacaaacatgtgtagtggtcaaagaggggataaggagggtgccagtctctttctaataatcagctctctggggaagtaatagaggaagaactcattcattatactgagaacggcactaagccatgtatgagaggtctgtccccatgacccaaacacttcccatcaggccccacctctaacattggggatcacatttcaacatgaggtttgtgggcacaaacacccaaactatagcaactgtaaatccttcctgccaaagggcatgagattaggcctgggatgagcctccaggtggacaaaatggctccagaaattagggatctggcaggccttgtcaatctgaggtttgtagggaggagaacaacaccatgaagagttgcaggatttgtaggatgatcaaaaattagtgcagtgtatgcaaggaagtgacttaagaggatacttcttaatagtattggggtagcaaatgaaaggaaagagactgttggtctgcacagtggttggaattatatgtacagagatatccagacattcccattaaataaatagattgaagtaatacctgtaactatattcctctttatatcacattttttggcaaacagagaaaaaccatgcagctggtcctgtggagcctggaatgctgccattactttcattaaattaaagttttagctggtatatgaaaattttcttttattacagagcctctaaacagacatgccatatcctgtgattacagtttaagttaatggtatcatgttttaaaattaaaaattattatctttccttggtgctatcaaaaccatcacaaaattaatcactaatatactaggatgacggttcaattaactttcatggatattgatcagataaacactaatatttattattgcattctgaagtctttattaggttagtgggttacccaaacagttaaaaactcatctaataaagacctggaaaatgctgcttttgagttaaagagacctcttgcttagtgtctatatattttttgcttgtttgcttttgttgcactaagaataccaatagtatataagttaattcagtgatcttaattagaaataacctttttaatgtttttggatatataaaatttaaaaacttccaagagtgttcaaaatgttataggaatgtctatacattaagtgtagcacatgattagatttgcttcagtgctttgaacttttgaatcaagccttccttccataggattggatgcatatgatcataatttctgtctcttccatgaaattttctaatatatattgttttaaaattacaaagtagtcatgcttattattcaaaaaagccctcccaaactaagacaatgttgaatatagcccctctcccatcctcaaaataactgtatgtacaatttgatgcatgtctttgcaatttttcatgaaggttctaattgtgtttacatatatacataaatctatgcatgcatacactctccttcctcccctctctcctattccttcccctctcacatcttctcctttgtcttcctcctcctgcttttaaacataagtgctatgatattgccaaagaagagaaggctttgttctgtgctctgtgctttattgaatttcattcattggtggaccttactttctttgtcctttcctgcctttgccactatgaaggttcaataaattcagtctctgttttgcttttctt

SEQ ID NO: 112816 - DNA, 1600 bp, Homo sapiens
tagtggtttatagcaacagaggtttatttcttgctgacaaagtataggctgccagaggctatgactctgtccacagcttggctccacatggcatctgaagatacaacccttatcagggacatgtgttttcctggcagaggggaaagagagcggcggccaaaatgtgatgatttttaaagctttcacttggacgtggttcactttgcttctgttcacatttcatcggttagtgcaagtcacccggccaaactcataaggtatacccactccccaaaggtaactttctgagtcacatagcaagttgggaaagtcctcttactgggaagagagtgaataaacaggaatcctgtctattacagttatgtcttaaagacttttggttttattgttggattatagatacattttgtgaattttaatgtggaaatgatttttttcttgatgtttgtcagctttgtatgttgagtgctatagacatatcgatacacaggttaagactgattcaggagtttagtaaagaagctttatatgagaggatattaaatatgaaatctttactgtttcattctgttttcttttttgcaccttcatcgcttgtcttttatttctattgattattggatagcagtccagagactttttttttcctctacactggtataagttgttcatttataagcccttgcattgttttgaagataattcccttttccatggattacccattagtcatgttagctggatagtgtggattttcacaatttactaccttttcaatataatgaattgtacctttgccaatttcacaatcatggtttttcttacagtgtccacatgtggatagcagcctgccaacaagtaaacaaaaactgagttaagcgacatacagatacagctgaaataccaaattacccgtggcctctcctggagttatatttatttgcacacagtggggactagtatttccttgtgaaacaagagacttttactgttttgaaatagcagaactgaacctcagatgcatgagttcattaggatagatttatcctagtgaggcatggcacttgagaagagacaaagagcaaattatcagagaaggttgaggtgtacacataatgccggatgtggaagggtcatagagaatttgaaaattagatttattgcctagatatctaggagtaaatgtttctgtgtagtgatagaagcagaaataattagactggaaggcatcttgagttcatttggtcctaaccattaccacagtacagaagtagtcacattgataaaatcttatcaaagcatggcttatgttacgctatgtaattttggagaatgggcctctcaaccttacaaggttgtatattccagcttttcataggaatcctagttaagtatttctcttaattccataccatgctttgctttagtagggtgaggtctgagagggaaagcagtaatcagatcagcctctatatgtacttttccttttaaattcattaactagactcccctaaagatgagtttatttcacttgtgattgagtctagctctagaagggatgagattataaagtccaactctatcattttacagataaaat

SEQ ID NO: 112817 - DNA, 1050 bp, Homo sapiens
atctaactgtaagtcttacaggagaaatcatgggttaaaagtcatttggaattgagggcactctcagtgcttaagaggatgtttctatagaagaatacaagtatcctgttttatacttgatcttagtaaaaagaccaagaagagatgtaatagcctttgttaatgtttggaaatatattaaaattaaaaagatattataaaagatatatttttctattttttggaatattaggaaagatgataataaacaatacgtatatattcctgaacttctgacatcaacattcacactgccttacaaatgcacactttctcattcttttttcctaaaatagagaaatatccccttctctttcttaagaacaaatctcctacctgtttctctttctgatgaacacttaccttgtaggttatcccttctctccatttgatctttatcctctccttccttcaattgtctgtatgctgtgtcttcattttcttacctccaacgttctctgccacccacactaacctggtttctgcttccctctggccttctgtttgttctctctcaggtcactagttctgccctcattatgaagccacttgatgcttttcagatttccttttactctcagactccaaggcaacattaggtgttgtggacagctacctccatctttcaactcacccttctttggcttcctgaaaccacctatcctctgagtcactttttttttctttcgcctttatagcttatattcttttactcagctattaaatgtgcgagttcctttccttttgtattagtctgtttttatgctgctgataaagatgtaccagagactgggaaaaaaaagaggtttagttgacttacagttcctcatggctggggaggcctcacaatcatgatggaaggcaaggaggagcaagtcacgtcctacatggatggtggcaggcaaagagagagaggttgtgcagggaaacccccatttttcaaaccatcaaatcttgtaagacttagtcactatcacaggaacagcacagaaaagacctgcccctatgagt

SEQ ID NO: 112818 - DNA, 1265 bp, Homo sapiens
ggccacagaggtttccagccagaaaagcaacaccccaaagatcccataataataggagtgcaaaacctgttgtaaactgtgcatgccagggatctaggttgtgtgttccttatgagaatctagctaatgcctggtgatctgaggtggaacagttttatcccaaaaccatccccagccccatccctgtccatggaaaaactgtcttccacaaaacctgttcctgatgccaaaaaggttgggcactgctattctataccgctgtaggatgactatagttaacaataatatatagtttcaaaaagctagaaggaagacattgaatgttcccaacacaaagaaatgatacatgtttgagatgatggatatgctgattatcttgatctgatcactatacatgatatgtattgtaacatcactaggtaccccatgaatatgtacaattatgtgtcaagataaataagtaataaaataaaaagctttatcttattccccaaaaaaagacagcttgaggaaaggaaaaaggaagattactagcagagttgtaggctattgtctatggtactttactgcatgaagaaggtacagaggctgaatggaagaggggttgtaaaactggagtatgggctttcctttcacatggagctttgtttaacagaagtctagaaagtagatataagaatcattatcatggttagtttatgtcaaaactatacatactgtcttattatacttaattaaatgggtaatcatttgactagtgtgtctatgagttcgtaagttggtacttaatggttatattatttaattcacctcagtggacagagattaaaacagagtcattttctggttccttttcctgtggttaattaagtcctttgagatatggctgtatacactttatggtggtttacacatgtctgttttattagttttgcagacagtagacaggaacaaaaaggggcatagtcattcttgctgtgagttaaccctacacttctccaagcagtagaatgtaaactcaactaggcttttgagaactttccctcagtgacttaattaattccatgcccatttctggactttggaatatagcatgcatctatgtagcttgttttttactttatcaaatttaaaatgctcattatcgaacatttatatttttatattaaacttttgtaagtataacctgcttggtttcaaatatttcacatgcaacatgacattggttggaataatgttatgttgtatgtaaaagtgtaagttgt

SEQ ID NO: 112819 - DNA, 1495 bp, Homo sapiens
atacttaatatcatgatgacacttagataaactatttatttatgttgtcatctctatcactaggctgaatttctcaagagtggcatttgtgtcagttatgtttgtttcccagtgttcatttcgtctagtgggggctcagtaagtgcttgttgaactggcctcctttggcagctcttctgcctctttcctgatgtggtacacctagttgaatgtaccttgtcacttgggaaaaggcttacatctgtttcctttaaaataacagaaagcaaatgcttccacttgaactctggcctgaaatatatgtgcatgcgagtatttggtctggcaaagtgtcacatttttactctgtgagtgctgagtatgtacttgtatgtgtgtacacatttcagtctactgctaagtagttttatcttagccagactgccgtgcagccaacagcacctcatcgttaatgtcaaaagtctttttacagatataaccacagacaagcagaacctttaattcagatactctgttgattaacaaccagagagttcagtctggactcactcagaaaactaggatatagaataatgaaatagctaaggctactgagaaaagaagtatttactatgaagtggtagtgtgctttcaaatcatacgtaacaaatgtagtaatgaaagattagtatttgagaattaatcaatattgcactaaatatactggaactgggctatatcattacaagatttaggaggtatgttagaaattaaaaagaagaatcttaggaatgttttagtcactagaaaatataatgaaacatttgttatatatggagccaagcaaacaacatgaaagctcacttaccagaggaggaaattaaactaacaaccatgtacgtgtgagtgcgtgggtgtgtggtgtgtatttttgaagtgttaaaactaaaatttagacacccagaataagcacatatactacttgttgccaggcaagatttttggtgtatgaacataaagaaggaaatgactttgtttttgtgtttcaaaattggaaatatgttttatggtaagttttaaactattttttaatggttggcattaaagaagtcaataaacaaattacaaagtgaagtaaatgtaatggatacaacacaaaacagtagaattagccacatgtaggtctttatcaatggaagttgagtagtctagggaaatttctattcaaagaagactgtactacatccagtgcctgaatagactgtcataaaaggttcagccactgttgagcaatacgaagtaaaatgtgaagttctgcattctatcactgaattcactactcaaaagaaggtataaaaattaccttgtactttatatactgtactcaatgtaatttgtataacaaagttatactgtattaagccaagtatatttcactctgataattttgagaagtctactatgtcacaaaatctaggaaaatgttaccttagaccctaatctaatcatccttgat

SEQ ID NO: 112820 - DNA, 6550 bp, Homo sapiens
atgtatgattaagaagggccataaactaatttctctaagtagtgctgtcctctcaaactgagatatgcctgggcaaacccatttgtgtttcactacacaaagttagttagcttgtgtggatttcagtaacagttatagattttcagtttcaattctactgagaaaatttttctttcaagtattaggtggcattgccacctgctgtgcttaatttggctttttgtcaatataaacagttttggtgctattgctgtgagggtacctgaaaggaaggactttatatccaaatatttaaaattatttgtttactctgccaaaaaaatgtgaactgacatgcccattgaggcagaggtgtagagtgtacattctctttaccatatcagtgttgctggacatttttggaatttcccagtgggcagtgagtgttctgagtcgaagtgtaagtagggaggcagaacaattttcaggcacctcccaaagcagatcttttcagtgagagtttgttatttagtgagaagtgttacaaattcccataccttcacatataagcatcttaagtatgtaaatatgaggtatttatagtcctaaattgctcttttagaaattacaatatgaaaaattaaattcgtgcttcccagtgatggtctggcattcattattgaggatccttgggcacttaagaaaacaggaattgtttgagaaacatggcagtatgtcacatataaggaacaggcagactgtattctttcctgggtattatatatgagaatctttaaatatcagtttttgcagtgcctgtaacagatgtgtctttaaaatgttttttgggtaaaaataactgtacctgcccaaagtaactgtctagatggattcctggtctgttggtccccgcatgatctggtgtctgccaatctgttagatctcaatgcccaccactttctcggttgctccttctgttccagcctcataaccttcttattgttctttgaatgcacctaattcatttccaaaccgaaggcctttctccttgcctttcacttgctgtaccctctgcttggaaacagtcttcccctagctctctactggcctgttccctccctttagaactcttaaggtcctctcatcaaagggcttttcctgatggcctcatggaatagagcccttctcttagtactctattttctcctgctctgttttagttgtcatcatagtactcatctttacacgaaattatattctacatttgtttacttttaagttccatgtgctctggggctttgtcttgttcactgaaagattcttgatgccttcagccattaaggacccaataattgtttgttgaatgaacaaatgattgttcagatgtagcatgaaaatacataccttattggactgattgtcttttattttataaaataaaattttggaaatctagaattcttatcaagtctgccaaggtgaatttgtaacctgtatgttcgtgttacttggtgttggagatatggagtgctaatcactcactcctttccttttttttctggattctaatggaatagaaacatgaaatcagagttgaatggtgattggtatataagttttataaactgggcaagtccctagcaactgataatgcaggggttttggagaagctagatttcaagtaacttgggttcaagaatgtccaatgggttacctgcttttggagttactcccctcctctctccagttgaatgtagagtaggcctgagcaatgagagcgtatggtctgagacaaaaatcagagagcccaccatcctcagcaatccatgagtgggccatgaaaggataaaatgggattgtttcattcattcacaagtaaagagcataacattttgtttcattggatgtcagattcccgctggctagatgagcaggttctccttttatggagatgattctgtaagcaggtccagagaggaattgaaatgattgctccagttctacccctctcaactgggaaataagcagtatgacccttctctttggagaaaaggggaaggttgcaataatgattattctctgaacaattgtgattgcaatacatatactggaatatacttacaaaccgaaataattttgaccagaaaacaactatcaacgtaggatgtttctgagagttcattgcaattgtgagtcatctagacatctgccaaatgaaatagtaggctgtatttctacatgtgtttaagagaagaatgcatgttagtccaacttctatttatcacccatcaataaaaaaggtatatacttatgaaaaaacgtcatgtcctaaccttgatgtgtttaaaggctaatattctgacttccattgtaaactcaggagcctttaatgtttcaggttcgtgggagtaagggagaagttttgtacattttggatgctaccaacccacggcactccaactggcttcgcttcgttcatgaggcaccatctcaggagcagaagaacttggctgccattcaagtgagcttatttgcttctcatttgtactatgcactgtgaggggggatgaattaatatatgactgtactccctgttttaaatttgtttcccaatgacctccttcaaataacagtaactcataaaagcagagaaatctcatctagtcagcatatgtaggaaagggcaagcctagctgtaaactaacaccagggtacttactttatgagaattcctgagggaatgaattacacagtctgatattgtccttggcagatctcgctttcaggtacttttatttcattcagtgaatattcattgatattttaatttgtttgatagtttattttgttcatagtactataccctctgttagtgtttgggaaaggctttatggagaaggtttacttggggatattccctgtgaccaggctttgagcttgtcggaggtggtgtgttagtcagggtttcccagagaaacaggtgcagtggctcacgtctgtgatctcagtattttgagaggctaaggtggtaggatcacttgagcccgagaggtcaaggctgcagtgagccatgaagatgctgttccacttcaacctgggcaacagagcaagactatggctccaaaaaaaaaaaaagaaaggatatatccttatatatcctttttttaatataaaaaatatataaaaatatatatatggttgtgtgtatatatgtatttgtatatgtgtgtatatatgtgtgtatacatgtatatgtttatgtatgtgtgtatatatacgtatatataaaataggggattacctcacaatgattataggagctggtaagtttaaaatctacattgctgatgtaccagtttaagtctaatggccagaagctgctatagaaccaggaagagctgatatcccacttggaaacccatcaggcaagaagagctagcgttccaggttgcaggctgttaggagaattctctcttactctggggtaggtcagccttttgtttgattcaggactcagcatgattggatgaggcccacccacattatggagggcaatatactttattcaagtctcctgatttaaatgttaatcttttccaaaaacacccttacagaaacacccagaataatgtttgaccaactatctgggaccctgtagcctagtcaagttaacatgtaaagttaaccatcactggtgggaaccgtgttttattgaattccatttccctgtatcctagcatactgctggacaaaacattaggttttgatacaaactatgagttgaacttaggtgatccctcagtggaaaataaggcaagaagagaaaacgatatagtttttagaggagccctatagttagggcttctctaaaacacattgatcagatgaccaaaagaataaggaaacattaaattctggcagataattgactgattacatgtgaaagctcatcttcctggattctaaacttcagaagaggaagtaaagctatggttggcaaaagtaagaggggaagggaaaagaataagacatgaacagtatttgagaatctaccatgtacactgttcaagaagcttcatatacatgtggtcatttattcgtagaaattctgatagtttgacaatttgttgacattacactgatttcattcaattctcaatataaaatcaacagtagcaagaaggaaaaggcacagaattaagttttaaagtaactagcaaacagtcatctagactacttaatttcctaatgtcatctaaacaatttttttcagtacaaatgagtattagataatcaatgtgactactgtccctttttgcatggatacatgagagatgactcttactaaacagctgaggtgacatggaaaataggatctctggcagccggggatattcaagccacttttccaattattcatgatggccattgatccaaccacaagtttaaactgatgttttttttttttttctttttcaacatgtagacattatttttttccaagtgtttatatattttttcatggctttctgaggcaaactcatccatgagaacatcatttatgtcaatattttaatttacggactcagtttgtttctttgtaaatgttactattattaaaattgcctatagagccatgaatttaccttaagccaacccattgttttggtaggttctccatcattgtgattgtggagaatattatttatgctagatggtttttcttttcaggtgtaaataatgattttaagccttctccaaattccttcagtttcagaaatgtcttcctattgcctattatttctgtagaatcagtaggtctctttctttgcctaaacttacaaagtgttatgtgagtttcatcttatatttacttaggtaatacttgtttaggagttccccttaactgaacatcttacttgtaatgatccctttagttaatggaaaacagtgtcaataagtatttataccttgatctttcaccatttactctgctactctactatgccctgtatgttatcatattgtaggcacttcgctcattttcagtaatcacattgtctaagacttacagttttcatgttcatttagtacattccacgcagtacttttcttcctctatatcaactgtgttttttccttgaaagaaaatataaatcacaaaagatgacaggtactccaagaaattattaatgacttaacaagaggagtgaggggggattagaacaggacttatgtaactggtgggctctctgaaatttcactcttgaattataatctaagtatgttcagaagccactctgagaggcttttggtgcagagcaatgacagtggctttcatttcttttaacactgttttgcactttcttaatagggatgcagtgcactgctaccatattttttgtcatagattacaatagggatctttgttagctcccttgaggtaacatctttcttattttgaacagtagctggagtagaggattgctgagggttcaaaatcacatctgagctaaaggcagagagcataatagttgggtcacgtggctgaaagagatttcagccttctaattggttggaatgatctcctaaagattgcattccagaaacattgagttggtaaggtcatgatgtttcctgcataacattatgaatcacttgcattccaaattgcatctgaagtttggggtattcaggaaattttttatttgagctgtatatcccaggagtggagtaaatgagaaacatttgtgactatgtggcttgctcggtggaaaacgtcaatacttggtccaacttttttggacaagggattatgaagttgaggtctgttttggcagataattggaactccttcttggagacttgattatatttctagttttgcaatttatttgattttgaaaaatttgctttgcaaatgatgacttaagtatctgaattatcaaagacggatctagtaagcaaacagttcttcccacatgcacacttttcagaataatcatttaactgtatgttcagacttctgaaaagtttccaactatggctagaaaattctaaatgtgaaagttgtggcttaaaatgaactaaaatatccttaagctccataggaagtgggtgattcttattaaatgctaattttgttgcactaaaggaaaaaaatgtatatgtagcttaaaaatatttttgacctagtttgtgttttgcaggctcttaaaaatttctgttcttttgatagaagatgaatattttatgccacttacagttgaaactattaattatttgaacatttcagagatggagtgctacatctcatattcttaagcccatattttcaggcatgtcttttctgtgactagttgccatacttatcgatttacataaaaaggtaaaaacatttgggtaaaaacatttgggtcctggtgcacttcatgaggggtgtcaggatgtgaggatggtctaaatgaggtgagaaggcactgggtattgagccaagatattctcacagctctgccccaattctgctgtcagtttagaatgctcattaccagcagttattttgtcacagatt

SEQ ID NO: 112821 - DNA, 1367 bp, Homo sapiens
cagcaaagtcatacagacatgaacaattatattgaagcataaaagttttcattttcacaagaaggtatctttccctttcctactttattttattttactttgagagatagagtcttgctctgtttcccaggctggagtgcagtggcgtgatctcggttcacagcaacttctgcctcccgggttcaagtgattctcctgcctcagcttcccaaatagctgggactataggcatgtgccaccacaccagctaattttcgtattttttaatagagatggggttttactatatattggccaggctggtctcaaactcctaccctcaggtgatctgcccaccttgtcctcctgaagtgctgggattacaggtgtgagccaccttcctggcatgtttcctactttagctaacctttttgtgtaactactgtaggaagcctgtgcaaatcaaacaggttttcgaactgaggtggtttttactacacgatgagactgttgacttcatcattggccccaggtatgcagaagatgatcctaagtcagatagtaaccaaatacacttcatttccaagaaaattcaaataaaagaagatggtatttggaagactaagtcttgacagtaacataatacactttggcagcaaaaattagggagatgctgaaacatggtactaggaggaattttcagtcttttttattccttagatttaaaaaatgttcaatttattacctcagggttcagtatcaaattaaaatagataaatggagactttaataatagccagctgtctggagttgttttgatttggtgtctctgggaagaggaatgatggattagattacttttggatgtctctttcagatgatatgtcagcaaggcgaactctgtgtttagggtagtgagataaaagtcgtgtgcacaggtaatctaccagctttggtggagtgttgaagactagactggtgcaatgaggaaatggccagccacttgaaagctggagaaaacaggcaggccccagagagcaaagactctctaagaacttaaaagttgtttgggtaagcatatttggaataaaatgggcagtgattctgttaatgaacaaagaaagttatttcaaatatgaatatgtaggtaatgtagtatattgctggttgtgatagtgttgttctgagaataaagataaatcagcacataaatttgtgtgtattaaaagtgatacatttcagaatagttttagtataaaatcaaattatgtatttcccttaagacggaatattgtgtgagaaagtgatagacaggaagtgcatatgtctaatggactgaaaaggaaaataagttgctaatactgaataattgaacatagttggggcta

SEQ ID NO: 112822 - DNA, 1040 bp, Homo sapiens
aggtgggaggcagagggacggaaggtagaagggagttataagtagataagctacaatggtgtgtgtgtgtgtgcgtgcgtgcgcgcgcacgcacgcgttcataagcacacacaagcaaatagtaattttagagagaatcctttgaacaatcagtgggggaataaaacccatgcccttttcttggaaactataaatcactacagtttcctagctatgatcattgctgatttctgaaagtgtgtctccctttggtttaaatctgacaaacaatgtgccgtcagaattgactacttgagcacacttgcttttttgtgctcctaaagatatcctgaagtctggataattaaacactgaaggcaaggcatatggccttactttagttaaaaacaattgcagaaagaatgcctgtaatttaaatacaaaaacatggtggcattttatactctaaagacatccatactctaaattttagtgcttaaaactgctttctttgaagagccttgttgaaagacaaaaagggaaatatgttttatttaataaataatactgtaacataacgtattgtaatttttcattaaggatattattgctgtcttttttggaactgactgtatttgctgccattacattttaccatacattaaatcaaattttatctatcagttacattttgccacttctggggggcaaatctggctgactggctttgctcttggagccttgatggaatgtatatagttagtgaaaaattccttaggcatttgaaatgattgaaggaaaataatagagtaagcaacattgtagactcgtctttgaaaattaaccatccaaataataattgagcttctctgtctatagttgacccaatttaacaaataaaatatttaagtttagggaaagaagatttgtatctctctcccctgctccctatttccactttcttctttcatttacacgttagggttttctgtaattgagctgagattttttgtggtttcctctgtctttttctgggtggaaacacaaaatcaactatgaca

SEQ ID NO: 112823 - DNA, 2655 bp, Homo sapiens
ttgtttaggtaaaaaagcccaagaactatagatatttccataggagagacccattaaaggaaagtataatagggttacaatatgtgaataaagcagtagatgttagagtcagtaagaaactgttaatgaaagtaaaatattatgcatattcatgatacagaacagcataatacccatatttaaaatctgtcttgaaggagttcattggcagcgcccaatgttgttcccatttcactcagtgaacacatttggaaggtgaagttgggtccagtttgcttgtcattagagtttaatattagggtttttgtatgtgctcaggccaagtttttctcacttttgtgctaacagctgccaatgaagtgagatatctctggacaaagaaggtgtttttgtcactttgtaattttagatgacttattttaaagggtagtttgttgcaaaattaaaaacactcccttggggaaagccccagatttgtaagcatactttaaaaaactcaaactaaagttacataataccttttgagcatcagttttcccaactgcttccctttattgtgttctacatctgtatttttaatggtttattatgtctttatgaggtgaaaagagcaatagaaaaaatatttatggtcaatagtttccttatgtgttaaattcttgatacaagtttgatgtctctatatacactggtgaaagtgtactcagaccattcagtaataaatgaaaaaaatatataatttaagccttaagatttggagaaaactgatgaaatgggaaatgtagaaacatatgttttggttttttaaaattttattttataagaggaactgattttctctatttgtaatatgagttagtattaaaatttatgaagatcatttaatattccctatacaacatttttttttcttatctcacagttgtgtgggtgagaagtccaggtaggttttctgcttaagggtcttaaaaggccagatcaaggtagtggcagggctgggttcttattaggaggctttgaggatcaatttgcttccaagctcattcaggttgctggctgaatttggttccttgagattgtaggacttaggtccttattttattgctggcttttggctagagactgttttcagtccctaggtctgcgaatggcccctctcaggccaccctgtgagcccctcaatctcagcaatatgtcaaatcctttacacattttaatatctttaacttctatacttaccagccagagaaaattctctgcttttaaatagctcatgtgattaggttaggctccccaaagattatccctatataacatgatcataggagtgatatcatattcacaggtttctttcatactcaaatgggaaggcattatacaaaggtgtgagttatgggaagtcagtcttagaattctgcttaccagttggcaaactagtgaccaaggtagtgagtgtattaaggtagtataacatggtgggctctggaatcacatcatcttggttcaatccctagctccagtaacagctgtgaaacctttggaaagttattcatttctgtttctgcttcagttcgctcatctgttaaacgtgcttaatatgtagcacttacctcatagagttgttttgaggagtaaattatataatatatataaaggtgtttaacaaagtgcctggcacataataaacactcaataactattagcagttatactgttagtatttgttttttaaagcagatttcttttctttcatgtttcacttttcatagaataaatgagtataaaatgcaaagcacatgtttgtaaaagtaacatgatgttgacccaaataggaatctttcatccttatggaatctgactcatgtgagaatctctcagatgaaagtgtgaagcactgttcccctgctccaggcagtggatgtgcattcttagatggctagggccaggtgtgtgtgcaatgaagtgtgcagtgaagtgggaggaggtacagtgatctgagctgagacagacaagtcagcatgtgaagggcctcttttgtcatgcaaaggagtttggaattctggcaaacagcattggtatgaggaggtggaagaattgcaaagagtactctggcaatagtgtgaaagatgaattcgaagatagattttgagttgatatagaaaaagagtcaattacaaaaatgctattgttattcaaatggtggatcattgattgtcataacatgccccaaatctaagagtttttcttgacatcttaacaagaaaagttgaggaagctctgatgggggtgggggctgggtcaggctggagaagtcctggtggatactcttggtcaggaagaggcagagaattagaagcaagaccaggtttgagtgagattcaatttctagagtagatgagaaccccggagatcagtgtatgaggacagtgtaagtgatgcccaggaactataattcaccattcaggttacccatctcagaggagtggaactgtggacatgttgaggaccagggagtgccagttggcagagatctgggctagcagtcatctgacctcgagcaaatccaaccatgcatcgctataaccctgtcaccaaaatgtcgggattgaagaaagagtttgatgagtagagtgactccgtggggtgtagagcagc

SEQ ID NO: 112824 - DNA, 1551 bp, Homo sapiens
atcatatggctctcagaaaccttaatgtggttgggatgtgcctggtgaatcagagtttgagaccagcaggcctccactttcctcctctttcctgcctctccctcccttcctctgtctcctccgtcttcccttccttcctcgtcctttatctcgctgtttctccccttctcctccgagtccttctctctgcttcttcctcctatgtcctcctctcctattcttcctccttcctctctcctctacttcctcctctttttttttctttgttcttttttgaactgtgcagtctccttacacagtgctctcatgtagactttggcagactttaaaaattctgtagttcatgcatgggttaattgaggctgagtatttcacaagatctcagatgcatgagtgctaacagagattccagacctctgtgtgttgacatgaggttttttttcaacatggcaaaggaggatcaaagacaccttgttcaatttctacacatttgcctttttatttacttgtctttctagtttttctgtatctgtgccagtctcctgatgccaaccatctgttgattctttaatattatagcaacacaggctctgtttgtattcatggtagtttacagttttatgtttgccaagaccttttgttgtttttatgtactaaattaaatgtgaggacaacaggcaggctatgagtgtctttatgagcagcttgatttatttgtatcagattatataagctgtcaggaggttaccttttggtctgtttagcaaccaattgtaggtctaatttatgtttaatgtaaaaaagtgaattcaatgaactttttaaaagttaggtattgtattttctacaagtgaaaaccacttgcatgaatgtaactacattgcacaatggaggctctgcaaacactgctgaaaaagtatgcataatattctacctgagaagttttgttttctttttatataaagaagattaatgttcatggacttgaataaattccatttaatgatttggtctataatttccttgccctatgataaatgactactcagaagtactttgaagaatttttagtgcagcttagataattaatgttttgatgtgtatatttgttacattttaacttttgatttaacaatcatgttttttaaaaaaaatctgtcaggccatagagatcgatggaaacatatatatgtatattcttttgtctgcatttaaggtagtagttttatattttataaatctcagacatttcaaatcccaaaggagggctatgttgatatattgcccaggacttgcaagttgtttccaatttgcatattaatgagtagattgtaggtgacatggaaaagaatataatattcataagtatggaagagactgtaaatgccttatttttatctataggcttcatttttaggtcaaagagagtgtagaattagttctccataaacaaaatctgttttcttaggagttgtcctgaacagtagtgtcaggacatttaatcatctaatactcctttgtgttacctactatccatgccaccttttacag

SEQ ID NO: 112825 - DNA, 1203 bp, Homo sapiens
atttttgaatttttagtagagatggggtttcaccatgtcggtcaggctggtctcgaactcctgacctcatgatctgcccacctcggcctcccaaagtgttgggataacaggcgtgagccacgcacctggctctgtactgtttcaatagcagttgcactattttacaatcctatcaacatggcacagaagttccaattcctctatattctcaccaattctttcttttttttttttttgaaacagtagccaccctaatgtatttgaaggatcgataatattttaagatacttagcattcaaaaagcttttagtaactagagtgatggattaaatgcatatatgatgaaattcagagtaattttttaagtttacgatggaggatactagacttaatattgacctatatgcaaatatcttacttgattttatacggacattttggttagcaatattatttggtggcaataacaaaaactcagaatgcaataaaagaagtagagtggtcagattacagggagagaatagtgctttggtactgtgtactggtcagaccatatcaggagggtcgtgtcaacatctgcctgttagacacagacctggaagttgataaacatctgacgtgccacagggagccatacccagaaagggtctggaagctgtgacctgtcagtcagtgagggaactagggctcaacctgaggaagaacagaagcagatagttgtcttcatatgatttaaagtggtgtcatgtggaagacggtgaaggcttagctttcctgttcgatgacagaacaacaacaacaacaacaaaacattatgtggaactagagagaagtgtgtttctaatcaacctgaggaaaaactttctggcaggcagaagggtacaactgtgaaacctgctgattcacagcctagagagttccctcttcccatgtggagagggaggtgttcaaggataggctggatgatggcgggagcatggctgtaaagtatagtcttctactggaggggaaatctggcaagatgaatctatattctgtgcacaagagagtaggagaaggtagacaaaacatagttccagaggcaaaacctctaacatatagtaggtggtcattcttgcctgcccaggctcaaccctacctagactctgaataaatctccttcttaggaggaatctgaaactctgtcctgactgctgagaatcc

SEQ ID NO: 112826 - DNA, 1040 bp, Homo sapiens
agaagggcgcattttgaatattctaaacacaaatatcagataaatgtttgaggtgatgtatatgttaattaccctgatttaatcattacacattaatatatgtgtatgaaaatagcacaccataccccataaatatgtacaattattatgtgtcaattaaataaaaaaactggataaacatttaataaagtgtacataatagcccaaaatgcatgaggagctaataaaaaaacagctatttaatagtttctatctactatcccagaaaaattatatacatgggtgctgaaaaaataagtaccttttcttgcagaaactttctattattttttgagaaatcatggcaaataaaggcaaatgaagcccctagtggggaaaaagtagattttggaaattatgaagttcttcagttacaaaattttggaatgaaataaccgacatattgttggagagtattcagaacactggtaaacatgagaaatctgtaggatgtttttaatggtcatgtaaacccaggagagtccaatagatataatgacttttgatttgagtgaaatgtttgacaatgactattgtaaatttttgtgggaggtgaagaaatgtggattgtgtgatagtaaactttgaagtactgatggatagttggccacttatagccggagtgttgaattttaattgaaaagcaggctctgtcttggctcttcctgttcaattatttctatcaaagactcatgaaaattgagcacatatcttgagcccactgtctgtacaactagagtgaagggaggggatagatactgtttttttctcttcttaaaaattgtggtcagggcgtggtggctcacgcctgtaatgctagcactttgggaggccgagatgggtagatcacttcaggttaggagttcgagaccagcctggccaacatggtgaaatcctgcctctaccaaaaaaatacaaaaattagccagatatggtgtcacatgtctgtagtcccagctacttgggaggctaagtcatgagaattgcttgaacccatgatg

SEQ ID NO: 112827 - DNA, 1028 bp, Homo sapiens
tcattagttttcagtatatttatagagtgtgcagttaccctcactgtctaattttagaatattttcatcactccaaaaagaagccctgtaccctttagcaattatttttgaatattttatatatttcattaatatcttgtgcaaagtttcatttgaagagctatgattctctaagtaatcttctaaacacattaagtccttatattaaaatttcagttaacttcttttttttattatactttaagttctagggtacatgtgcacaatgtgcagacttattacacatgtatacacgtgccatcttggtgtgctgcacccatcaactcattatttacattaggtatatctcctaatgctatccctcccccctccccccaccccacaacaggcaccggtgtgtgatgttgcccttcctgtgtccttgttaacttcttagaaccagtttcagataagtattttggattcttagaaggatctccaagagatgaatgtgtgtacttttagaagtaaaaccattagcagtgcagaaaatttttgtgtggattgatatcagtttttagtatttattgcataaataaaaataagagttgcattaaactagtggtagtcaggtttcctatgtttttagatttctaattgtatactagaaaaagaaaacatttagcaaaataaacgaaaatcaactttaagaaagtgcaatgtggagatgattaattgatctttattgtaccttctaacactataatacttaataattctgtttgctttacattgagagaaaaaaatgaaggcagaaggggaaaatgtaagtaatgtgcttgcatttaaacttttcatgtttcctacaataacactttaaaagaaactaatttaaccttaagcatacaaatggccactgtccactatggtagcaactggttacatatggctattgagcacttgagatccagcgagtactacaggggactgaatttttaactttattttagctttatttaattttaaaaactgaggcaatgtaaaatatg

SEQ ID NO: 112828 - DNA, 1040 bp, Homo sapiens
ttctgatcacaacttatagaactggaggaattttttttttttttctttcggtgatagggtcttgctctgtctcccgactggagtgcagtggtgtgatctcagctcactgcagcctctgcctcctggattcaagcaattctcctgcctcagcctcgtgagtagctgggatcacaggcatgtgccaccatgcctggctaagttttgtatttttagtagagatggggtttcaccatgttggacagactggtcttgaactcctggcctcaaatgatctgcccacctcggcctctcaaaatgctggcattacaggcatgaaccaccatgcctggctgggtagaactagaggaattttatcagatagatgtagttgattgcaactccaactccaacttgttaaataatgaggaaggacattatgtcaaataagaggaagttcagtagtcaagcaggcttcagggctggtggattaataacttaatgttacccaagttttttccacctcttcacctttctaccttggtggaggcttaatcctcaagctagtggcaggtatcaggtaggttgcagacaagatagtgtctgtaaggaataggggtaccttttgaagaatcttcttctcctagtagatctcctctaatatgccagaggtgggtaatgtgtcgtatgtcttttcttttcttttttacttttttttttttttttttttttgatacggagtcttgctctgtcgcccaggctggagtacagtggcgcgatctcggctcactgcaagctcgccctcccgggttcaggccattctcctgcctcagcctctcgagtagcccaccatcgtgcctgggtaattttttgtatttttagtagagagggggtttcaccatgttagccaggatggtctcgatctcctgacctcgtgatccacccgactcgctgggattacaggcatgagccaccgcgcccggccagtgtttctttttttgaactgggaaagggaaagagatgaaagagattgcttttattccagtcaggcataacctagagct

SEQ ID NO: 112829 - DNA, 1037 bp, Homo sapiens
cactccagcttggtcaacaaagtgagacttcatctcataaaaaaaaaaaaaagaaagagaagagtcaagaatgacttttaagtatttggcttaagctatatgagtggaaggtgatgacatgtctgagatagggcagttatataagactgagactgagagggatgacaaggtggggtagactatgttgtagacttttgaaggaagggcattgtctttttattaccttattattatctttactccccaggtctttgcagagtatctagaacataaatataattgaataaaagttcatttcatattcattattcaacaaatcattcatattgaataaatacattgcataaatgtatagctatttttaccattggcgttcttaaaaaataagttacttaaaggttaaaaaaaggaaacaactgattaacttccttagtattttaattctctgagccttgcctactttatagagatttttcttttctttttcatgatgatgttgatttgactgaaatatagtctttaaaggagcagattggttggatattaaactggacattttgtttacatgtttttctcattctttgcagttattatgtgattacagctgtcctgctgttgggaacttggttcagtaccaggtttccaatgtgttttagttttgggaaaaaatgttttcaattgtttaaaatcttttgttttctttattgtttatggaagtccttttaggtgtttggaacaaataattctttttaccaaatgtttttcttttgcagatgataacattttgttatggggtccaaatggaaccacttagtgtagaccttggtggaaaaataccacctatgaagccttatagaatgctggaactcctaaaacaaatgtcatagtgcattcttcctgacattagtcctctagttagggaaaatgcaaagcaatcgaatgtttcatgtcttctggaagttctgtgttttgtggttgtcctttatctgccattcataagatgggtcctacctaaatatgccagccaatttctggtc

SEQ ID NO: 112830 - DNA, 3509 bp, Homo sapiens
atgatttaattatctccagctggccctgccatttacacatggggattattgcagttcatggtgaggtttgggtggggacacagaggcaaaccatatcagccattccctgctctgcccagttgtgcagctggacaggggaagggacagattctgtggtaggtcttctagagggaacatttcaagaacaacacttttagaattgcagagttattgcttgctatctttaatcttgtcccttattatgttgagtgagcaagctgcttccaaaccctgagttataccattgaaagtcctttatttttttattattttagctttggaggtgctaggattcagaaagagcacagatacaggagaataactggtcctgttactggtcctgcttctgccccttgtggaactgtttgagtctttccaaagggagataatgagccttccctcctctggtgggtaaatttagattggttatgggagtcatttctgctatgccccatatctatggtgctaaccacaatgaagctctcaaatgagtagtccttctcaaaaaaatagttacatatgttgtggttatggaacatgaaccagaacctggtggtagtgtctggaaaatgatgtcatgtgagagagcatgtggcataactccttctcagtttatacctgtattctgcttatgatgccagtggttgtggtggacaaggccaagagcccctggggagccatttcataccaaagaacttggagttaccagtcaggattgagcctcctggtaggtgtgagcctttgtgagcttgggacagggtatgaagggatcttagggtcatggggagcactaataatatctactgccacctctctctctttgtccaaaggtgcagcttagaacttactgatgcccactgcttcagagtgctcactagtacctcagttactttctgtattggccatcaggttttgagcttggtctctgaatagactgagtgttgtgggtctttaatccttcttgatcacctcagatttttacttttcttttaaaattaagtgcttaagcagaagaactctggatttcttgggcctcaggcatattacaaagcttgaggttaggaaccagtgtttgactgtaaatgcttcccttggacaatttggtggaatatacccagttttctgcattgtattccattcttctcttaattagaagtctttctgtctactttttgccaggtggtttggagcttgagatacatttccttcaattctctactaattcagactcattctatgacctatgacctatgttctatttgctaaactctcaataattctttgtttttacgtctccaagacatcctctttctataatattttcttagatatttcaaaccacaattcaagtacgttttctccaggcactggctctgtgcttccagcatataactttacattttggcacctgtggaatgcagcacagtttgtgcatttccttgctacctgttctgaccatgatttagttgttctaaagtggctactggtgaatccagtagcagctggaatcctccaaacagctcttttctattggctctgggcctttctttccatttcaaaagtgattctctgggatgcttgcaacaggttttgtgtagaaactgccctgataagttctcagaaacttggtgttgtcctatatttccagtggagtcattcattcttgaactttacaactgctccaagatcacaaggtctctgcctcactctcctctttttctctcactcatgctgagtctgcatttgcctcttagtctttgaacgtttctgtggatgcagtgggtgttcagtggtgtgatctgatgcaagtggagtcatatgctatgccacagttcagtacactgggtggtccctctggaaagacagcttttactgtgtgcagaatcctaaagaaccagatacaaactaaaatttcaagtaaaatatcttaattctgggtggcattttcataggaaaaatttaagcctcttttacttaaatacattatatcatccataacttatgctaaaaaggtatttatctcaacacaaggaacattaggacaaaaccaaaacaaatagaggttgaactttgcttttttaaaaagtctgtggcctcgtaagggttccagatgtaacacaatgtgggatacccagagcactgtgagagccgtgtgcgtcacctgcagcagcctgacttaatggcatttaaaaagttttacatgcatttattttcctacgtctgtctcctggatcattcatgagaaaactctatgttttacatctgaggttagtgtattaccagggtaattagtcattacaacctactagaaaattgcatattacaaaatccagaggatcaaattatcatgattttatttatttttgtgggcagtttctgattttgtggactggataaataacatgttttcaaaatatagccatcatggtgggaacagggtgagggataaaagactgtatattgggtacagtctatacttcttggttgacaggtacactaacatctcagaagtcaccactgtagaattcatccatgtaaccaaaaaccacttgtacccccaaagctactgaaataaaaacaaaaaatttaaaaatttaaaaaaggatggaagcttgtacataatctatcactcgtttatttaaatacatgaggacatatataaaagtgcttaatgtacctaaaatagaagtgaatgggtaacaatagctgtctctaaggaaaaggaatgggtgacaagaaatagaggagagagggagacttttttattactatataatctttttacctttaaatttttattgtgtatgggcattacctgttgtgtgaaacaaacttttttttaagcaataaataccccccaaaactccacaaaatatagcaattaaaagacatcattataagatttgcagctgtttttgtatgattgtgaatctcttacagttatagcaaattattatttcaaaataagtgtacatagcagatgagttggggctccttctgttattgatggggtttaagacatccatttatcagttaaaatatatatggattgtttttggaaacttcttttccaacccttgactcccctcttcacttacacactggtgatggttcttagttaataacctctgtttgtccttggttattaatttgaaccaatgaagaacagataggaaccagatgaagataaaatatctactttattaatgagcatgtatgatattatgaaatctatatttggtcctcatctacttccttgacatttaactcctaaaatccttggaatccctagagtataagagtgttttttgtttgctaatgagatgactggaggctggagtcccctagatagcctccaggatgggactgtttgccaggggaagcaaccacgtggtgattagagggttggaactttcagccccctgtgtccccctcacctctagggagaggagggtggctgaaggttaggt

SEQ ID NO: 112831 - DNA, 1049 bp, Homo sapiens
gctgtggtcttgaggcagaatagcttctccaggataccttagtttttgctcttaagggctgtgactaaatggatgagggccacacatgttatggagggtgatctcctttacttacagtaaactgattgtagatgttaaccgcatctacaaaatacctttactcctatatcagtatttgattgttagatgttaaccgcatctacaaaatacctttactgctatatcagcgtttgattaaataattgggtactatagcctatccatagtatacataaaactatcagtgtattacctgtaagcaaaatgcatttttaagcatcacccgtattgttgaaactgctgggggtgaggagtggaggtgactgagaaaggattctgaaaggtttcttcagtgcaagtgataaaaaatggaaattcataatatagtcctcactataatttaagtgggaaatgttattgatattgtctgaatttagcctgctgttttgtttacttttatgtacttaaacattttaatggctttcactatgtttctacaaggtcttaatttcctcagcagttaattcttttactatgaaggtttttcagaaaccatacatttatgtgaaccaaaaaaacctgataacttagtaagtcataaaatgataaaaatgctacatttttaacaggttttttcttttttaaaaatgttatttgtataaatttaaggggtacaaattcaatttttaacatgttattaatagtttatgttacttgttttgttatctgaaaattttagtgtgatgatcatattaatgttttgtgtagctataaggtagtgttaaacagataataatttttattttaaaaggaagacttgcatataggaaacaaagtcatttttgtactattatatagttgacagttccacagtacatcatctagttttgcattatctattcctgtagttctttaatgtctttgcattattattttgttttcacactagttgtctccagctctctcactctgctacccaaggagctattgattttatacatttttatgct

SEQ ID NO: 112832 - DNA, 1032 bp, Homo sapiens
cctctgagaatgccaagcccacgtccttcttgtccagaatatggatgaatttatgatttttatggaaaccaggtgattttctgcctggtgggcttgtctctcaagtcagacaaaactcagtgcttttttcaacatcgcttgccagaggctatgaagaggattgaaacatatgaaatacaatgtccagtgccttgtcagaatttgaaagtaaatgatttaacccttttatgttgctcctatgttgtggatttagcgttttaggctaaaaacagattaagttggattgtaaataaacattttgtgttgggtaaattagttaatatttcaaaagcatctcttctttgggcatgaagatttgcagaaaaacattccagaagaaaaaagtcgtttattttagtatgttgatttattgtactaatccttgttcaatataatcattgctactcagggtgaaaagttcggaccctttgctggagagaagagaatgcctgaagacttggatgaaaatatggattacaggttgatgtgggaggtgaggatatgacttattttaatgttaaaaatatatttgtattgtaccatttaatgcatttttaaggctacattaattgatattgattccagttaagtatttaagtattgaaatgttttaggtttttttttttttttttgagatggagatttgctcttgttgcccaggctggagtgcaatggtgcgatcttggctcactgcaacgtccgccccccaggttcaagcgattctcctgccttagtctcccgagtagctgggattacaggcgcatgccaacatgtccagctaattttgtatttttagttgagacggggttttgccacattggccaggctggtcttgaacttctgacctcaggtgatctacccgtctcggcctcccagagtgctatgattacaggcatgagccactgtgcccagccaaaatgttttaggttttaaaaaaagttcagcttttttttttttttttttagagaaagtggactgttgagatatcttact

SEQ ID NO: 112833 - DNA, 1046 bp, Homo sapiens
cctctttcctttataaattacccagacttagggaagttctttatagcagtgtgagaatagattaatacacttctcatccctttaaaaaaatactctggagttatggttttatatgtgaggtttcctggatctgttctctaaatatcatatttttatctggtcatggttttcacttgagattttgtttttgaatttgattctaaatatcatatttttatctgttcgtagttttcacttgagatttttttttgaatttgattcttatctctttctttcaattcattctgtaaagatatttaattgggaagttaatggtttttaactcttaaaagtttttttttttttgagtgctgtatttgaatctccttaaattttcttagataattcaggtattccctttagttgaggtattctgtctgctgcagaacacagagcgtgggtctaattcttctgccttatcttcctttttctagcagctctgctcctttgtatgggctgtatcccttggttgactcattggagctcaagactgttattgaatagtcctctgtggcgtcagtcctgcaggtggtagaaggcaaatgggtctctcttcagtgggcctgcactggcagataggctgtcagttccctgtcagtcagctttctggtctccttgtacttttgtgggcatcaagagcaggaaagattgtgggctgtgaccccctccatctctgactttcaaattctttttgggattccctggttttcagtccttgtccctggttactctgctgtcctctactttattactaagtctactggagagaacacctcacaccagatttctgccagaacctaaggcttcacttgcatccatttgcccacagatgctagtagtagttgttttgctcaagagaggaaagtaacaggtttgagggtgaaggggaaaggtgttgcattcaggtcaccatatacccacaattctttttgtcgcatctcttctgcatttccgttttgtattatttcataagtgatgcatttcataaagaataattccattttatt

SEQ ID NO: 112834 - DNA, 1028 bp, Homo sapiens
ttttaaaaaaaacataagtttacaaaaataagaaaagagtaaactcacttcatcatctcacacttctttcgacggtatcttgtggaaattcctgtatctaccttggctctgttttttttttttttttaatgtctgactatagtctatgctgtggatgtgccataatttttatttattcaggtcttgttttacacattcatttaacaatctttatcactctatatgccaagacctgtactattcactttggggtacaatagttaagaaaataggtattctggctcttggggagcttgcagtccagtgagggaagacacaagataacagacctataagataaattttatactatgttaaatattataagaattatagaaaaaagaaaaagagctaggtatggttgacttggcagaaaaggtgtgtgggtgtgtgtgtgggatgctatacatgttagatgggtcagttaatcctcactaaacaggagagatttgggcaattatttgaagggtggtaggaaattagccaaacatatatctacgggaagagcattctaagtgcagaagaggcagctacagtaaaggacctaagacgggagtttgcctgttgtggtccaagcacaaggaggtcagtgtggctggaatgcaatgagcaagcagttgaggaggaggtcagagggctaatgaagggatgagtgttaggggaagatccactgcttagagccctttaggccactgcaaagcctttgacttttactttgcgtgaaatgagagggcactgcagagttttgaacaaaggagtgacataagtttatcaagcatgactctggctgttctgttgagaaaagtttgccacagggcaagtgtgtaaactgggagagttaggattctactgcagtaatccatgtgagaggtgatagcagtttagaccaagatagtggctactttggtagtgtggggtaacagaacatgctgataggattggatgtgaagtgtgaaagaatgggaaggattcaggatgattccacggat

SEQ ID NO: 112835 - DNA, 1050 bp, Homo sapiens
aattttttgctgagttaacagacatcatctaattggcacatcctcattttacaggtgagaacactgaagcccagagagttgcagggagtcttgcagctcacagttgcctctcagattcctatgccttccacagtgtcaactccctcctttccaaaccaaggcacacaccttgattctcactgagggatttgtactaaggtcatttggtgaggtaaaatcctaagtaaaaaaaaaaaaaaaaaaaaatacctgacgtaaaggcttaaaggtgagtttgtaaaaatacagtaagattttaaaacaaaagtcaaattttacaaagttaaaaaaaatcaaagaaagaaaaaagctgaaacagataagtaaataaaagcctgtagaggaaaaatcaccatgcataaatgttaatacaggaagagcagactttgtgggataaggtgttgtgttgatcagtgtagaaggtgacttgtctgaagaaacatggatttgtatcctagggctaaaaatctgccagccaatgtttgcttacatttcctggtggccgatgataactaatctggaaacataatcagaggaaaagtaatcatgaagcctgccgtatatgctatctcttccctgtgttcacacattcacacttctccatagtgactcaaggcagctttgtatttcctggtgttattaaacattttttaaactatgtaactactctaacattttctccaaactatattttttgtgataatggcagctacaattaattcaataagtatttattgaactatggcagtttttaggcactgttttagttactagtggcagaaaagcgagtgacagagacaacagtcactagatgctttacacagtttttagtgaagtcctgcaataaacctgcaagggggctgttagtatccctgttttatagatgagagaggtgatgttgaggaaggttacatcagtcataagtggattaatgaaaatttgaactcaggtcattccatatacacttttccttaaaaatgttttttctctattctgataaaatgctatatc

SEQ ID NO: 112836 - DNA, 1004 bp, Homo sapiens
ttagttatgatcccaaaatattcagtcacaaggtcatggacaggtttgttgatctcagaaatgaccttaaagcaagcttcagttccttttccttccaaaatctgaggacgaagacaaagctaaagccaaacagcagactttagctgaattgtgaggctgcagctgagtatcaaggcatcccttacctgcttatggaaggcaaacagtccctcaattcttaggtattttccaagtaaccttgtactaggcctaattctggacataaatcaagggatctgagaagagagatttatcagcagctacattaagaaccttacttaaaagtttttatgctctctattctaaacaaattttggaagataccacttttaatacatgtgttggaaattacagatgttttgccacacttttataacacatatgcttgtataacactcctgttttaaaaagtgcttgcaattcaagccatctgttgatttcaaattcagagaatctaatccagactgaggttggggaatcttgctagaaaccccaccctcattacattcaccaggttgagatgggattttcttgctggtggtacctcttaatcctctagtcctaccccttttcgtgcagtgcttcctagagtggtggtgtctttgcagcagaatcacctaattccctggctttaccttagtcctactagatttttccttggcaattatccttttttgctggtctgttgcctctgattttttttccagtataaaaatctgtatagtgacaactcaagaaaacgaaaagagtcagttagaaagcttttgagaagaaaaaggagacctgagttcattcatacttttacacattgtgatttgctaataatcagaataaggaaaaataatgaaattgacactttttgcatgctgtgtgccagaccctgtctaatgcttgctgtgttttctcgggagcacagttgaatgcttcagtgaaaatgtggcattttaggttgcaaagtattatgc

SEQ ID NO: 112837 - DNA, 1021 bp, Homo sapiens
gcggggcaaggtttgaaaacccagagctggacaaaggcgggaacgcacgccgccgcgccggggctaggggtgctgacggcccgcgcagctcgcgggcctccgggtttgaggccctggggtcagccctgctccgggcttcgcgcccgggcgcgggtcagagccgccaacttcgggccaatcagcgagcggcgtcccggcgcccgcagcgcccaggcccgcgccccccgcgcccccgcagcaggaatggcaggaacggatccgggccgagcccgacccgggacgaggaggggctgagccgcgggggatcctggaatcggcagggaggtggggattctgggaggaaaactccatttcctccttccctgccggtttctcccctctaccctggcaccccaaatttcgatgtgccgcctgccgggcgctaagcgccggtgttgagagaggcggcggccgccgcgcccgggaaaatgctgggcatgtacgtgccggacaggttctccctgaagtcctcccgggttcaggacggcatggggctctacacggcccgcagagtgcgaaaggtgggtgacccggcggcggcctgcgcgcccctgcacctcgcgcgccctgtgcctcccggagtcgccctgccgcagggcccggggcgcggcgggcttcaccccggtcgcccctcgcccgggccgggccaggcgtccgtgggaaggccggggaccgcggggcacggcgggggtggcctttactcgctgcgccacccgagcaggcagcgccacgtaggtggcggcggggtgcgctccgctgccggccggtccaggggcggaactgccaccggcctccctgccgcaagatgtctttcctctctcccgcaggaagtgagcgcggcgggagcctccctcttcctcggttacgggtgtgagctgcgtctttgcgttggcgaaggcacgcgtgggcgggtgttttcccccgcgcgcacgctgctccgctgtcgcctcttttcctttaggatgaattaatgtggctagaa

SEQ ID NO: 112838 - DNA, 1068 bp, Homo sapiens
tcaagacgtgttttttgctgccgaataaaatgttgcaaccagtctgagaaactggcttacactatttgaagataaatagaacctttttaattttaaaagaacattcatatcaattatttcatttaatctcataacaatcctgggaataattgtctccattttgtagatgaggtaattgagcttgaaggggattaagaggctcactcaaagtaccaaagccgatcatggtttaatcaggaccttttcaacttagatctttgactcagatcttactctaagttgagtgatctttttctattttgctttggcagcctttaaactgtttcaaaacttgaataaatgaataaatgcatgaataaatgaataaatacacgaataaataataaaaattacataatcgttggtggggggatggtgggggagtaaagaacagaccaaaaaataaattcaggtgtttgcaagaagactcaatcctgaattgaagaggaactcagacatgagaagaggtcacctgagacattgagctatgagctaggagagaagagacagagaaggaaaaggaaatgatatgtttattctttctccaaatcgtgagattgtggacgtgagggcgatctggctgcgacatttgtcaaccctttgatcgccagggttgattcagctgatctggctggctaggcgggtgtccccttccttcctccctgctccatgtgcatcgctcccgaagctgtgcacttggccaaagagaatgaccatccccgatgaaggaggaccggtctttggtcaacggtatatgagtagctgcgctcccctgccagaacctccaaacaagctctcaaattactaaattatcaggaaccactgtctttggagaatattttctaacctttccggaggtgtttttgtgtgttttggggggccttggattttacaagagggctggtagaataaatacatacttgaagactgttccttttaagttactttcttttacaaaaacaagttaactgcatacttgtgtgccctccccttttttctggaaataatatttccagggcgtggaaagag

SEQ ID NO: 112839 - DNA, 1445 bp, Homo sapiens
caaagcaagatttcaattgagcagaagcttttagtttagcatgtttgtggtttggctggcccaaaggacactagagagtttacccatgcacttttagcttgaaacattaatttatcatgcatgtctgcatgtgagacaagcagatgcaaagcatgttctgcccttctgtctcggagggagagccatgacagccctgcagccccagcactgcccgtgttagctgatatataccaagtgatagaaactattctgtctagaaggcttgatttgactatagttgttaaagttgcctgattctttgtgttaccagagggaatactgagtgtctgaggttacattggtaggaaactccctgcataacattcctgatgtgaaagtcacagagattacccacttgggagaagagtcttatgaataaaatttgttgccagttatttagttttaaaattttctatggcttctgtgagtcatggaggttaatggaatacatttggtttcagggagatacatctggggactataagaaagctcttctgctgctctgtggagaagatgactaacgtgtcacggggaagagctccctgctgtgtgcctgcaccaccccactgccttccttcagcacctttagctgcatttgtatgccagtgcttaacacattgccttattcatactagcatgctcatgaccaacacatacacgtcatagaagaaaatagtggtgcttctttctgatctctagtggagatctctttgactgctgtagtactaaagtgtacttaatgttactaagtttaatgcctggccattttccatttatatatattttttaagaggctagagtgcttttagccttttttaaaaactccatttatattacatttgtaaccatgatactttaatcagaagcttagccttgaaattgtgaactcttggaaatgttattagtgaagttcgcaactaaactaaacctgtaaaattatgatgattgtattcaaaagattaatgaaaaataaacatttctgtccccctgaattatgtgtacatgtgtgtttagatttattattaaatttatttaacaatgttctctctttttaagctaataattgacagtggtgttagttgagaactgaatttacagttggtcttttgggcagtaagaaatgcaaaccatagactgaatttccttcatagtacatgatttttcctaaatataggaaagatcgaaggggtctctggtttatttgcaccatgtttatttaggcatctattaaagcaatgcttgtggtgctacttgcttagtagaaaagctaattataaaacttaatgcaaaaattcagagtactacctttctctttcctctttcctattgtgaacttgcctcccatttactgtctgtcactttctttgagataaataaaaaagacaataattttttctagaaagaag

SEQ ID NO: 112840 - DNA, 1065 bp, Homo sapiens
ttagcttacagctctttagcctctggtacttttgtgtttttatagaagtagagctataagcaggaagcagcacttgatttttaattacttaatcctttacatatcaaaatagcatttgaccattgtattgtttattttcttagtgaaatctattcgaagtatacctgcctaccttgcagagaccctctattatgctatgaaggtaagtggagaccatgaaccttctatctaatacatttctctttctaattattattcttcacttttgtttatgttttagatgatagaccttgggaatttttcccttataacattcaacccagttctactaaattgttataccttattgattcacccgcacccgggagcatttgatcctatgtttgaagtttttaagcattttgcttctctctttttttttttttttaaagggagctgggacagatgatcataccctcatcagagtcatggtttccaggagtgagattgatctgtttaacatcaggaaggagtttaggaagaattttgccacctctctttattccatgattaaggtagtagaacctttctttaaattacgtttgggaatccaaagcagactggtatgttgcatgaaagacaaggataagagaacctgattcttgtgttaagtttaaaattttagtgacacgattagagcaatgagttaaaaagcttagcataatgtttcctgaagtagagatgatggctcccaagtgaaagcatgggtattgatgtggctgaggctcttggtgaactcagaagcattatttagtagtggtaacagatgactcaacaaaccaaaccccttgcctatgataataatgtgttctttctgtcttttatcaattccagctgtctttattagtccttcttttatttcatatcagcttttcctttctttatcgtctgttatcaccttatctctgatgctggtttctaattcaggaaagagccaaccaggtcatattgggagtaaagagcccctaggtattagtatcatttttgttctttttaaaacaaggtgctctgtggcctataattaca

SEQ ID NO: 112841 - DNA, 1194 bp, Homo sapiens
ttaaacgacccacatagtatttcagatgtttggcttaaattttctaaaatatattttttgttgacaaagtacaaggagtaactgcgtgttttaacagcaagaaaaaataatttgtacacaatgttacttttcctgataaatagccactggttgtaatcagttaggatttatttttattttaaattcactatcaggtttggcaaatacgtgtagacctacatttattaaatcatgatggaaatattattgatgctgccagcattgctgcaatcgtggccttatgtcatttccgaagacctgatgtctctgtccaaggagatgaagtaacactggtaagctcctatgtgaaccaggatccttgatatgaatgaatgaggagggtcttaaatgtgcaggcaacttgtttttagtgaagttatgttgtagatggcaattgggtcgtttctaaaaatttgtttgtaagactgaaactgcatatggtcaaaattgccctggaaatctcttaaccgttcctctgttgaaacatttgtcagtaagaacataccctagcctggttttccagaatagaattagatgactattttggattgaacattagatgaagtggttgacttatgtttaggggccatatgtgtgaaaaatacatgaatctcagcacagtgagatgcttaccctgcaagaggcatgcaatagctgaaaagcactgaggaatcagcaggttcatatttgtctccaggacttttgttcattaggcaaagagatgacgaaagtccatcagaaatacctggagggcttgttaaaacgtatagccagactactcccaaagtaaaacagggctaggacttaagattttgtacttctaactttgagttcttaggtaatactgatgttgctggtccagggagcacattttgaaaaccattgacctacgttgtctttatcttttgttctgagtatgtcagttttgatttatataaattacatgctagaatagtgaaagtgcactgtagttgtagtttgaatcctgaagttgcaaaaggacacatcagatgcccagattttctaagcaatgattcataattttgattttgggcagtagactgaagcagaaccattaaaaagtgagaaatagggacaaaggtttattaacagtagaggtaatattcttttagaggagggagtttatataaggaa

SEQ ID NO: 112842 - DNA, 1261 bp, Homo sapiens
agaattgcttgaatccgggaggcagaggttgcagtgagctgagatcgtgccattgttctccagtctgggcaacaacagcaaaattccatctgaaaaaataaaaaataaaataaataaataaatattagccgagcttggtggtgcatgcgtgtggtcctggccacttgggaggctgaggtgggaggattgcttgagcctaggaggtggaggttgagtgagctgagatcgtgtcactgcattccagcctgggctacggaatgagaccctgtctcaaaagcaaataaaaatttttaaacatccaatagtagacattatgtaaaaagatagttttacttgcacttttagaactacaattggcagtagttctgaaacccagctatatatcatattcacatgggagcttttagaaaatagatctccatatagcatacagtgtagatgattaaaagcttctttagtttgaattctagttctgcccccatactagctgatcttgggcaaatgattttatatctttgggtctcactttctttatctgtaaaatagggaatgatgttattgccaacaccttgttgttataaggatataaatatattgcacagtgtctagcacacatttattaagtgtgcaataaatgttagtttctggtatcatcatcatcatctttaccagcatcacaagtactacccagattacccacagaaaaaggaagttagtgcatcctggagcatatatgtgtctgtggcctcttctgtggtatcttttatactgttgtataagaaagtttttatgtctgttcccttgatgtgacagtccttcacatatcttaaaacaactttcacatcttgccttaatctgtgtttacattgtattcatgtttggaaaagtcaggcttaaattataaaggtagaaaaatttcatggttttagtttcattagagaaaactatttggtttattgtctttaaacaacagaattcacttttataaataggttctgagatgcagtaaaatcgctggtgtgaaagtagcagaaattacagagctaatattgaaagctttggagaatgaccaaaaagtaaggtaagtaacttttccagaactaagtggtcttttattttcattttttaaatttttattattttttttagtataagcaagctttattatgcatgaacttgatttcacatacaaagttagaatggcaatttcaattaaaattgactcattaaaaagtgtaaataccatggtatagttatgtta

SEQ ID NO: 112843 - DNA, 1034 bp, Homo sapiens
ccttcagaagtgtatctttatttggtggtttttgcagtaacaagattcataacacttggcattataatattaggctatatgaaggatgtgtatactgaaattagtttttgtaaacactgtactttgttagagaaaacacttaaaatacaagatagagatgtgagtcatattctgttgatggtataacattcagcttctattcagttatcctggaaaaaacagattttaaggaccaatttaatttagtactataactaaaatgttgagagaatctgtctcttcacatttcttattaattgcatccataaaatcttgcctgagttttttttcttcttcattgttcagccatccatagtgtagctatattaagttttttttcccctaggaacttggggcacacttgaatcaatcttacaagaagaaaactttcattctcatcttcaacagttcatcaaatagcaatatttttgttactcagttttcttaacttgttaagtgtttctacacctgtgctatggactcctggaactgcccaaattggagagggagtagaaaactcctggggtgatcttgaagactctgagaaggaagatgatgaaggcggtggtgatcaagctatcattcttgatggtataaaaatggacactggagtagaagtctctgatattggaagccaaggtaggtgacactttatggcacacttactatatattacatacatatagtattaccgtatagttatatatataatgcataaaatgtgtgtatatttatattatcactgtatatagtaatatatagcatattagctatatagagatgtatagtggataaataacatacaggatactatatagagagaatatagatatgtagttatatatagggatgtaagtattgcatttttagaggggctaaatattgtgatttaaatttcaactaaattattgtggctagctgcaatactaatgctactttctaaaagaatatgcatatctttgtagagtagtggaacactggcataaatgatagtg

SEQ ID NO: 112844 - DNA, 1854 bp, Homo sapiens
tgcacaacagtcaataagagaaaagtacaaaaattcaaagtaagaattaacttggatattgaagcttacttttctagattatggttcagagatctttgacattttaaccttattcatgaatctgccatagcctccttgagaagctgttctctaaattggttatgtgtttgaagaaggttgtagttcatgctttctgccctgggtctgggggagaagagagaaggaagggggcatgcatgtgtgtttcagggaccagacagtgtttctaaaaccatcaagtcggtcagacagaaatagcattttttagttcccaatacatgagtacaaacattattccatgatctcctttacccagtgagtgtttactaaaaatgctttttttttccctacttacaggtatcatggtgtttctctcctcaacccaccagagacactaaatctgtaacaatgaaagactgcctttgttttctaagatgtaaatcactcaaagtatatggtgtacagtttttaacttaggttttaattttacaatcatttctgaatacagaagttgtggccaagtacaaattatggtatctattactttttaaatggttttaatttgtatatcttttgtatatgtatctgtcttagatatttggctaattttaagtggttttgttaaagtattaatgatgccagctgtcaggataataaattgatttggaaaactttgcaagtcaaatttaacttcttcaggattttgcttagtaaagaagtttacttggtttactatataatgggaagtgaaaagccttcctctaaaattaaagtaggtttaggaaaacagaccctcaaattctgacattcattttcctaagcaactggatcaatttgctgacttgggcataatctaatctaagcatatctgaatacagtattcagagatagatacagtagagattccccagactttttcgctctttgtaaaacctgtttgtttaggttttgcgaggtaaactcaacagaggttgggagtggaagagggtgggaagcttatatgcaaattaacagacgagaaatgctccagaaggtttattattttaaagcacattaaaaacaaaaaactatttttaaaatcctgctagattttataatggatttgtgaataaaaaatacccagggttctcagaatggaataaatatcccttttaatagttatatatacagatatacaactgttagctttaattggcagctctcttcttttttcttcttttcactggctttttacttggtgctttttcttgttttgcactggtggtctgtgttctgtgaataaagcaaagtaagaatttactaagagtatgttaagttttggattattgaaataagaggcatttcttagttttccagtaggatctaaaatgtgtcagctatgagtaagactggcatccaagaagtttatattatagatttaggtcctaatttttataaatcacaaggtaaaaaaatcacagaacagatggatctctaatgaaaaagggatgtctttttgtttatagtcatgtggcaagatgagagtaaaaccagagagcaaacctctataagtgttgagtatatgtatacatttgaaataaaccagaaatttgttaccttattttctttggattcttgtctggttccaaaatgatcatttcttcttcttcactatctgagagtattatgggagcatctttgtttttttattaatttaaaaaaaaaaaaaaaagttaagcaatctcttgcaaaatttatttctacatgaatttatttctatcagacgttctaaactcttatttctggggctgggcgtggtggctcacacttttaata

SEQ ID NO: 112845 - DNA, 1050 bp, Homo sapiens
caagagattgcttaacttttttttttttttttaaattaataaaaaaacaaagatgctcccataatactctcagatagtgaagaagaagaaatgatcattttggaaccagacaagaatccaaagaaaataaggtaacaaatttctggtttatttcaaatgtatacatatactcaacacttatagaggtttgctctctggttttactctcatcttgccacatgactataaacaaaaagacatccctttttcattagagatccatctgttctgtgatttttttaccttgtgatttataaaaattaggacctaaatctataatataaacttcttggatgccagtcttactcatagctgacacattttagatcctactggaaaactaagaaatgcctcttatttcaataatccaaaacttaacatactcttagtaaattcttactttgctttattcacagaacacagaccaccagtgcaaaacaagaaaaagcaccaagtaaaaagccagtgaaaagaagaaaaaagaagagagctgccaattaaagctaacagttgtatatctgtatatataactattaaaagggatatttattccattctgagaaccctgggtattttttattcacaaatccattataaaatctagcaggattttaaaaatagttttttgtttttaatgtgctttaaaataataaaccttctggagcatttctcgtctgttaatttgcatataagcttcccaccctcttccactcccaacctctgttgagtttacctcgcaaaacctaaacaaacaggttttacaaagagcgaaaaagtctggggaatctctactgtatctatctctgaatactgtattcagatatgcttagattagattatgcccaagtcagcaaattgatccagttgcttaggaaaatgaatgtcagaatttgagggtctgttttcctaaacctactttaattttagaggaaggcttttcacttcccattatatagtaaaccaagtaaacttctttactaagcaaaatcctgaagaagttaaatttgactt

SEQ ID NO: 112846 - DNA, 1055 bp, Homo sapiens
agtaaaggctgggtgcggtggctcgcgcctgtaatcccagcactttgggaggccgaggtgggcggatcacttgaggtcaggagtttgagaccagcctggccatcatggcgaaaccctgtctctactaaaaatacaaaaattagctgggcatggtgatgcatgcctgtaatctcagctactagggaggctgaggcaagagaatcgcttgaacccaggaggtggaagttgcagcgagctaagattgcaccactgcactctggcctgggcgacagagcaagactcttgtctcaaaaaaaaaaaaaaaaaagaaagaaaaactaaatttaaaaatgaaaacatgaaacatgttttcctaagacttgtatttcctaaattttcagctacttggtgaactctggcattgttcccatctcgagaagtctcatgcctttcatttacttcctttgactgaactggggaaaatatctcaaaagtcctttattgatttgggccttttaattagcaattagctatccagtctctactagaaatgatgatcaagtgtctggaaatgcagttggtgtggattttggattcattccatattctgctaatgggatttcagaactgggataaggaagcttgcttctcttttaggactgattacttaaaacttttttcattgtagaaagtttgaagaaatataccccccagaagtagcagagtttgtgtacattacagatgatacctacaccaagaaacaagttctgagaatggagcatctagttttgaaagtccttacttttgacttagctgctccaacagtaaatcagtttcttacccaatactttctgcatcagcagcctgcaaactgcaaagttgaaagtttagcaatggtgagttaactttcattttgttgaatggtgattctttggtaataattaggggtaagccctaattcctttgtaaaggaacctagttcctttgtacagcagtggtgaagagatttagtattcagagggagattaatgctgcagtatggaagaaagcctactgctggcaaaagataatctata

SEQ ID NO: 112847 - DNA, 1036 bp, Homo sapiens
ctcagcttaaaataatcggaagcgtcgggccctaaatcctacctctccccgccccgcgcaggcgttttctcccgccccagccagtttgtttctccctcctgccccgcccctgctcagtttcctttggtttacccttcactcgcctgcgaccctgtcgccttgaatgacgtcaaggccgcgagcgctttcattggtccatttcaatagtcgcgggatacttgaactgcaagaacagccgccgctccggcgggctgctcgctgcatctctgggcgtctttggctcgccacgctgggcagtgcctgcctgcgcctttcgcaacctcctcggccctgcgtggtctcgagctgggtgagcgagcgggcgggctggtaggctggcctgggctgcgaccggcggctacgactattctttggccgggtcggtgcgagtggtcggctgggcagagtgcacgctgcttggcgccgcaggctgatcccgccgtccactcccgggagcagtgatgttgggcaactctgcgccggggcctgcgacccgcgaggcgggctcggcgctgctagcattgcagcagacggcgctccaagaggaccaggagaatatcaacccggaaaaggcagcgcccgtccaacaaccgcggacccgggccgcgctggcggtactgaagtccgggaacccgcggggtctagcgcagcagcagaggccgaagacgagacgggtaaagggatgcgggatatctgcaggagggtgggtcgagcagggtttggcattggcttagcaggcagagaagagtggcgagaaggcatgtcctgggcttttggaagggggccagggtctggagtgcagttggtgctggtgtgtggtttgccacagtaggagttctcccatattagcatcaggaccccgccaacactgtgtgtatgctgccggtctgctctctatagggggcatctgcctgtacataatggggtcaaaccaagctctaaaacgtgtagtcttcgctcagctccgcgcctttctctccacttttaaaccccaggc

SEQ ID NO: 112848 - DNA, 1083 bp, Homo sapiens
atgaatcttttcctttgttcattacacagatcccttctaagctcctccctagacttttcctcctaaactgtggctagttaagcctcatgttgttctatcccaatgactgtttactccatttgcatgtggcccttccccttaactggagctctaagcaatgctgtagttcagtctcagcagaatcctctctaactcttggtagttaagccataccactggctcatgatcatccttgtggtccccaaaatgctaatgctctgcagcttcctttttattttttatgtctcccctaatgtcttactgaaagttacgtgtttactggcttcacacattttgtctcttttcattaagactaatatgttctgcaatattagtttctcttctcattagtataagaagtttctcttctgattagtactttatgtaactgtaacaagattcctgtgttaagattattttgtagcctaccatgatatttaaaactctctattaatattgctagtatgggaatgagtagatattttaattttggggttaaggataaataatgtggaatcatttagtcagtcatagaagcaaaaattttgctccctttgtttttattttattaactcaaccaataaaaacccattttgtaaaagcaaatgtctcaaatttttgtaaacatcctaacgacctcaaatgtttatacttatatttgacaaatttgtatgtgtttttctccaggaatgagttggaacatttgcagtataaggtattgcaggaaagagagaattatcaacagtcttctcaatcaagcaaagcaaaatcagcagtaccttcctttggtataaatgataaatttacactaaataaagatgatgccagttacagccttatcttagaggtacagactgcaatagataatgtcttaatacaggtaagcaaaatgtctaatttcttagttttatgactggatctattttgcaaaccagtcatatgtactaattattattgaacatttttagttttagacagtaattttattttatttttatttttatttttatttttttgagacagagttttactctgtcacctaga

SEQ ID NO: 112849 - DNA, 1058 bp, Homo sapiens
acgcatgcctgtaatcccagctacgaggtaggctgaggcaggagaatcgcttgaaactgggaggtggaggttgcctgagccgagatcatgccattgcactccagcctgggcaacaacagcaaaactccttctcaaaaaaaaaaaaaaaaaaaaaaagaataatcacattcctgttattttgagccagagtatagtaattgaaccttagttagtgcttacatttagaatggtgaaatcaggacattacaagtatgatccattctcttacattttagtagaaatgtgggcatttttgttgtatttttgcattctcatcattgaaggaaacagaaaggtgatttaatcaacttcgtttattaaattcaccctttttttcccttaatgatttctgttgcaattttataaatctctgattctaaatttaacctttgaaatcttttaggcctttagatgttgttctggaaaaactttagtaatggatcaaaggaagaatgagagtattgttcctagtataactcaattagaagattttcttacagaacacaattccaatgttgtttggctccttgttggtaagtggaatatttttcttctattttattgtgttttaagtatggattaacagctgccagattttaaacagtggttgactgaagttggaacactaacactaccatttatttatttttaggaaggaagattgttatttatatttcttgaacatttgttctggaaactgctctgaaatgctctactttttcttaggctgcattctcatctgacttaggggaagtggaaagagaagaagaacactgcacttagcttatctttctggtttcaggtcacctccccaacttctcgactcaacacacacccaaacacttttgttttgttacagaaataataaatcctcaaatataattttactgtaaaaataattctatttttatagtaaaatagaattatatgcctaatcttttaatctctttcctcattccttgtgcacttggcagtgagatctgctattaataattttttggtataatctagaagttttc

SEQ ID NO: 112850 - DNA, 1086 bp, Homo sapiens
tctagttacaggtggcctatttgatatgcctttatactaaattccgacttcttttacttaaagcacagctttaaaaagcagaaggtttttctttaaagcagagattttaaaaatcattacttttcttcctttacaagtggctatagcttgtttcaggaaataacttgggaatgaacttgtgtatagatgagtttttggcctaataaaggtgaatttgtttcagaatattcagaaatatggcctttcttctcccaggccatattttttacataatgtttattaactaaaacagtacaaagcagtgataaagtaaacagaaatgaaagcaggcatacttgaaacattgctctaatggatctgatcggaatttatgcttttctggattatgaatgaagaagaggaagaaagctggataaagtataatcaacctctggttttaaaattccaagtattaaattgtaagaggacacattactgtgtagaagtaaatcctattatttctgatttttttcctcccaacagctaccattttgtcctgtggatggattatttacctcacatattataattcccggaatgttggtcttattttaacactagttcttaacagattatacaagcatggctatatccatattggtgagtttgagttaacactgaatttttttcttccttataatcttgagatgttgtcttaccattttttgttgctataactgaatgcctgagactaggtcatttataaagagaagcaatttatgtctgatagttctggaggctgggaagtcccaagttgagggggtgcatctggtaaggacctttttaccagtggggactctgcagagtcttgaggtggcacagggtgtcacatggtgagggggctgagcttgcttgctcaggtctctttttcctcttgtaaagccactgatgtcccaacatcatggcctcatttaatcctgagtacttcccaaatgtctcacatctcaaatactgtagtcagatttcccacccttctaacactgttaaaatgagaattaagtttcaacgtgagttttagagggaacaaacattcaaaccatagcagat

SEQ ID NO: 112851 - DNA, 1109 bp, Homo sapiens
gaaaaggtcttcctctgccacccaggctggagtgcagtggtgtaatcatagcttactgtaactcagcctgaggcatgttcccacctcaggccaagtagctaagcctactggcatataccagcacacccagctcattttttaaaatttttatagagacatggtcttgctaatgttgtataagctggtctcaaactcctggctcaagcaatcctcccacctcagcctcccaaagcactgcgattacaggcatgagccaacatgccttgcctcaaaaggtgctttttaaatgcttacagacttgctatttgttcaatacttttctaaggtgatttttggaaggaaaagagtgatttacgcattttgttcaaccttaaaatttttaaacctatttattatttttatttaataatttaacaattatttattcaacatcttctatgtactagtcactgttttaggcaccagagatatggcagtgaacataggaaaaattatgcactaatgcagaagggtgcattctggctgcagaggtgaaaataaataataaaataataaatgagataataatggaataaaagctgaaaaacaggataaggaatgttgaggaggatcttacaatattttagtattcagtatttagtgtttatcagtgttgtcaacgtacattcagaaattaatacctttctctttatgccttggcgtctccaattaatgaagccatatcttatcatagctgttatattgaaaggagagaatctgtcgtacatgcccagcaagttagagacggatttgagagtaatcctgttttcatttttatacagtcaccgtttgtttatgcatcactgctgatccaattaggggcaggtccaggctcttaatttccctcattgctgcttctgcagctcaccaactggcctttaaagtgtatgcctaataatcaggacatttgtatgcaggtatcattagtaaactattgcttatgtaaatttgaaaacaaacaatttaaaagagtttcctggtaaattttgattgagttgtttataaccttgaagaatctcataagaattaatttctactggtataggtctatctgggaatagaaacatatc

SEQ ID NO: 112852 - DNA, 1050 bp, Homo sapiens
ttaaacattttactgcatatattttggtataaaaatatggatatattagggtaaaggtgtacttttactctttaagtggtactttactgttcttagcataaaaatctttaaattttttcagtatataactggaatctagaaattaaagttgtttttagaatgctaaattaaaatataacagaaacatcaagttttttctttttttggccagtgttttgtatttattttattaatatgcttctctgtatcatggaattctattttaaaataaattgaattactttgggtgtataaaaatgtttgagtaaaaactttgaagttcttaaaaagttgactaaaaatttttttgtaattggtgtctttagatccaaaggcagaaaccaggttatacatcacagtcaatgactttgaatttcatgtctataatcgctcggatctttatggacgccttcaagagttgtttggtttggagccaacaataattccacctaagaaagatgatgataaaacacgggaaattggaagaacaagaacccaatcgaaaattgaaaggttcagtatcatacttgaattttattaaactctagcatttaaacatttgcctttattagaatatcattgaggctatgcacctaaacagagcctaatatttctttgcaaattaactgaaacttttagtaacataaataattatataattattttagaaattgagataatatagaatatgtaatctaaaaaagtcccgttctattcccttgcacacaaatcctacttttctccgtattaataactaatgttatcaatttagtttttatccttttgaatgtatgtacataaatgtatacatacatatttaaggtgcttataaaatacatgattttgttctgtgtgtttctaaacatatgtgtttagaatatgtgcctcatatagtgtgtattgttctgtaatttgctttttatgtagcagtttgtctgtaagattgttccatatctgtatatgtaggtctgcttttaaaaatacatatctgtgtatgtaggtctacctaca

SEQ ID NO: 112853 - DNA, 1173 bp, Homo sapiens
attttttcttgttagagttaaagtaaaaacagaatcccaagaccccacatcttcatggagatcacttattccagtcataaaggtcaatgtgagcacagtaagtaaattctgctacaattactgtttcatggggtagtaatgtagaacttttaatttttgcaaatatgattttaatgtaagaaaattaaatagttttgtggagttttttttagttcccatttctgtatagtgtgagtgaaataattattttaaaatactgttttctgataaatttgtgtttaaatttctttaagtacttaaattttcttttaactactggtttaaattgaccagtggaatagtttaaatagcacatagtcctaaagtggaatcattaagctgttgtttgaaaatgtttgttattagtttagctaaagaaagaaatatggccagaatagcatgatataatatctcttatctgtttatttttttttttttagggacgtttggcctttggaaatcactaccagccgcaaactctgtgcatcaactttgatgatgctttcttaacttatactacaaaaccaccttcaagtcatcttgaccaattcatgcatattgtgaaaggaaagcttgaaaatgttcgagtcatgcttgttcctagtccaagatatgttggtcttcaaaatgatgagtaagaaaatcttataaaaataataaaaaacttcttataggtaatacagatacagctagaaactttaacatccttttactttttttgctacaagttgtacaaaaattaggtatatttctctattaaagcagttaacaatgtagtccttctttataggataaatggatatgctatccagtgataaactctaattttaaatatttttctgcatgattataactataatttttttatccttttctccttctaattgtattttggaaacttactttgtgcaattagttcctgtttgtatgttaggagatacacattacaggtaggtttttgtttctagaagatgtgactaaagagtaaattgaacagattcattgcagtggaataccactttgagttattgaaagtcgaaaattgaatcgaaattactcttggaaaatttggtgaagttaagatggtatagttttgagacccacttgacatttctttaagttccaaactgtcag

SEQ ID NO: 112854 - DNA, 1733 bp, Homo sapiens
tcatatggagagttttcagtacagtgtctcagcttttatctttgtgtgtaggtaccttatgaggttttatgtgaaacatgattattcctttttagttgtaactcttggctggcctggtattcgattttccaggatttggctagaatgatagaaagagggtttttcctttttgagtatcgcggtgactgtgggtcttcctggcctcactcttcaagatcatggacttggttaagaatcttctggaatgtggactgtgcacacaaatgtgtatgagtgaaggtataatactgaataaatcaggatttttttgaaaaattatagagagtaagatgaaaaagtgtcttgctattaataatttgtataaaaagatttaaaattgtatttttcacttaagtgtggagattacatgatgatattaaacattaagctttgtgatttaatacatatttagaaaaaaattgcaagtttttgcatttaatatcatctaatgattgagaagttaattttgatatgcaagaagatattgtgatgtatgtatgacaaagagaaaagttgtttaatcaaagcaagcaaagattaatggtttctgggaaattattgatggtagaaaaacgttcattccagagttagagttcacgatgtttgctctagatttatttcaagttgattaaatattcatggaaataggtaataagaagataaaaatgataacttttttattatttaatgtttttgaatgattatagtttaatatacagatagataaaatgatacttattagttattaatattaagtggtcaaattttaattttgttgtaaatgcagaatatgatcattttattccagtgatcatcattccattgtatttaaactttgttttaaatcgatttctctcattcaaaactgaaaatgaaaaatataaaactaaattttttctttttaaaaccaaatttttttttcttcttgaagtaatttactgataaatttttagtatcattttattattaagtccaacatagaataaaacatggaacaatttcttaggatgattgttcattggaaagatgtttttctttcttttcaggatgctacttgttatgtgcttgttagtttttttttccttttcttttcacctattgccagcattaactaggatactgaacattttatattctggagatttgtttagtttgctttcccctccaccttcttatagaccaccgagattaatgggagaaggttttgtggtgatgcagtcaaatgatgttgacatctactactacatggatgagccaggtattgttgttgttgttgttgctgttttttttaaagtgacagagtgagactctgtcacacaggctggaatgcagtggcgtaatcatagtccactatacccttgaccttccaggctcaaacaatcctcctacttcagcctcctgagttgctaagatgacaggaatatgccactatgcctgactaatttttaaagttttgtagagatggtatttcgctatattgcccaggctgatctcaaattcctggccttaagtgatcctcctgcctcattctcccaaagtgctgggattgtagtcatgagcccatggtgcctggcctgtttttttttaaaagtatgtttcatagctacaattctatttcttctatgaaatgctgatatctagtaatattttaaatcttcttgcttagccatcaggaaatggtaaatgtagataag

SEQ ID NO: 112855 - DNA, 1077 bp, Homo sapiens
tgccatgcactgctaagtgttttccatgtgtcttaccatttaaacctctgagcctttgtatgagacaaggtatattattcctgtgttacagaagaggaagcagctcaaattttctggggaagattgagtaacttgtccaggttggaatgatgattttaattaagctatcctctgtcagttctttgtttgccatttgagcaatttatatacttgtagagagtctttagtttgtcgtagtaatcttgaatagtgcaaattttctcttatgtctcatttgataatagtatatctattgagtaatcaaggctcattgatctctggaagtgttaaatactacagaaaacagtctaattgtcaaatgtgatagcaatgataataaaaaattagaatattgattatgttcctttatcagaagtaattttgtttgaataacatgtcattattctttctacctccttaatgtagagattgtttgtggaagtttttctttccacctgactatcaagttctgaaagtttctgaaattgcacagcctgggagaccaagacagatccttgcttttgaattacgaatgaatattattgcagatgctacaattgatttgctgtttaccaaaaatagggtaattattataataatatagtagaaaatagtatttaaaattttgacattatttttcagagttttttcctggtgactagtcccatacttggattaatttatatgagctgttttcccttgaaataattttatgtattttactatcatcataattttgttaaatgtcaaataatgggaagaaattaatagtaatagaccttcatgctatattctggctcattttctcctttatatctggctaaattgttttagtgtatttttggtaaaaatttgaacttttgttcttaggaacttgtaatacttacttaacatcaataatttcttctgtaataataactgaaaagtaaagatgggagaataattataattaatgttttatatgaattaatttttttcttttggtaggaaacaaatgctgtacatgtaaatgtaggagctggctcatatttagaaatt

SEQ ID NO: 112856 - DNA, 1098 bp, Homo sapiens
tctcaaaacaaaaaaaaaaaaaaaaaaatgccaaactgcagaaatactaatgttactttgtgtgacagtacgcatcacactctatcttccttcacactgagcctgtcacttaacagatgaggcttaaggagaaattagggatgtcggttgttaccccattggtttatctggagtgcagtatcaacactgtagcctgatttgttgttctgaaagttttttgaccacatcttgacttaatatttcaaggagctagatgtagccatggatattgaccttcagccacagcaatattaaagtctcaaagggaccttctgttcagctcagtaggaaaatgttttaattactcactagcgtgtgtaacttcatttctaatgctgttcacacagtgtcacattttaagccttaattacttttacctaacatttgttttgcagttccacatcaatgccagctacccccgaatatggaacatgccgcagacatggcagtgtgaattagaggtttataaagccacttaccacttcatctttgcacagaaaaacttctttacaggtaattttctaatagatataaatacagtgagatttatcacagtgaacttgtttacatttgataagttttacttttaaattacatagggatatgatatgattcatattttcttcaacatttcattttgggctgaaaatgttaaagagaaaatttaaatatagacattttgcattcttttctaacctaaacaaggaaaatataaaccccaaattgagcttagaaggaaatgaaagaactcaatttaggctgctgctttgtatcagtctagttggagggtaggatggagatgatgaatcaatttctctctcttcccaaattaggcatcagcatggcttcattattttgttttaataattataatacacaacagtatacgcaaatagctaaatgttatttttatacttggagcccttatttaatcttttctgttggcatggataattgagttggtgctgtcactagttggaagaaacattcctttatttcttgcagcatttattgatagctttgcatattttgtgactataagaacacatattgttggtc

SEQ ID NO: 112857 - DNA, 1047 bp, Homo sapiens
tagtaaaatgataaagtcagaatttaaacccaggactgtctaatgtcagtctgtgctataataatactgtttccaattgtttctctctctctctctctctctctctctagtgtcaaagtctgtgctataataatactgtttccaattgtttccctctctctctctctctctagtatcaaagtctgtgctataataatactgtttccaattgtttccccccccttctctctctctctctctctctagtgtcaaagtctgtgctataataatactgtttccaattgtttccctctctctctctctctaaagtctgtgctataataataccttttccagttgtttctctctctctctttctctgtcacatacacacacacacacacacacacacacacacacgttctaattttatgtacatggtattgtgttatgtactgtgagtatacaaaggtgagtttgacacctctaggaggagcccttttattgaaagacattgctgggagtgtacaatgcatgtaaaacattgtggaggccagaagataaagttgtacaaactgctatggtagatggtagatcagtgctaatgtctttaaagagcttttatttattgggattaaaaaaacttaaagtaccaaagggtaaacagacaaaatatatgaacacaattttaaaaagcagtttaaacatacagtgaattggcaatgaacaaatatgattgattataattctaagaaagtcaagtctatgtttcattcaccattgtagtcctagagtctagaacagagcctgagacacagtagacagtagatatttgtttaattaataaaacaacatgaaaaattgttcagccatgcttgtagttaagaagttcagtgaaagcgagataccatttttcagttattaaatgtcaagtaaaacaaaacaaaaaacagatagatgatagaaagaaatagaatgcagaagaaagttcagtgaaataggtagtcaagcatacctttccggtaggagtgtaaatggactcacttctcttcgagtgcaatttataat

SEQ ID NO: 112858 - DNA, 1010 bp, Homo sapiens
aaaatatttgagttcagtgaaagaagcaacacataaaaaatgtgcatataggatagtgtcagtctgtgtagaaaaataactggaagaaactgtatccacaatgttggctatttgggtagtggaacagcaggtgatttttttttaattttctaaaattccttaaaaatagatatattaatatataaaatttctcttatttggaactgtgattagtaagtaaacatctgtttactgtcaaattatttaaatacatcctaatcaccttttaaatatttcagtataaaatttttttagttacacaaaagaaaaattcatttttgactggtgttagaaaatctgtgttttacttttctgagtttcaactaactttacaatttctattcactaccccaataattttagatttaattcaagactggtctagtgacagtcctccagacattttttcatttgttccatatacgtggaattttaaaatcatgtttcatcagtttgaaatgatttgggctgctaatcaacacaattggatcgactgttctactaaacaacaggaaaatggtaagacattaaaaaaaattaggttaaatatttctctcattaaggcaaataccaactaagaaaattagtattgatttgatagttttaacagatactagaagttatttccccccattatctttgtgagactctcagaagactgtttcagagtttgtattggactaaaacttaattttgtttagttgtgcattttaggcaattttataattgaaatttaatggacattaaaagtaaatttactttttcttctttttttttttttttttcttttgtagtgtatctggcagcctgtggagaaacactaaacattgatttttctttgccttttacggactttgttccagctacatgtaataccaagttctctttaagagtatgtatagttgaatgcattatttattccacaggtgtattagtaaatttgatttcccaaagcttatcttcactctctt

SEQ ID NO: 112859 - DNA, 1518 bp, Homo sapiens
caggagtttgagactagccttggcaacacagcaagaccctgtctctaaaaaaaacaaaaaacagcacattcctctagtcccagctacttggtaggatcacttgagtgcaggagttcaaggcttcactccaacctcagtgacagagtgagaccattaaaaaaaaaaaaaaaaaaagataaataatacaataaaataaaaataaataaaatttgttaattttctttcaaacttatttccaagattgttgtagacaggtttgcccgtaagtattaaccaacatatttatgcactaattttattactttggcttattataattattttttagggagaagatgttgatcttcatttgtttctaccagactgccaccctagtaaatattctttatttatgctggtaaaaaattgccatccaaataagatgattcatgatactggtattcctgctgagtgtcaaagtggccagaaaacagttaaaccaaaatggcgcaacgttactcaggaaaagtgagtacgtaaaattagtgacacaggccaggcacagtggctcacgcctgtaatcccagcactttgggaggccgagatgggtggatcacctgagatcaggagttcgagaccagcctggccaacatggtgaaaccttgtctctagtaaatatacaaaaattagctgggcatcatggcgcatgcctgtagtcctagctacctgggaggctaaggtaggggaatggcttgaacccaggaggcggaggttgcagtgagctaagatcgcaccactgcactccagcttgggcaacagagaccccatctcaaaaaataaatcaattagtaaaataaaataaaattagtgacaagtattttgtgcttatatgtggagaaattcttctttcaaaaaataataataaaatttgattatctgcaactggtatctctgtacaattaaaggaatgagtatctgactagaaactgtctgttttactcttcaaaggtctggttgggttgaatgctggactgtcccaagtgtcatgcttacaattgattatacatggcatccaatttatccacaaaaagcagatgaacagctgaaacaatcatgtaagtgtttttatataatttgtgcttttatacagctgctattatgattgataatcatgaaaaataagaagcaaataaattgaaatgcatctattcttgtgacatagtataaatatagtcttacatattttagattaattgtagctaccttttgagcatttactttgtgtcaaatgttgggccaagcaattttctggcttctattatcttctattatgtttaatccttataacaactctgtgagaaagatattatcattatttttatcttaaagttgaggaaatatgctcagaaaaggtaagtaatattctcaaagtctgccaagctagaagcagcagagcctgaatatgaaacaaggtatgtgtgaatctgcatatttaaggtgcatgattttgtgaaatgttagtttctttaatgcattttg

SEQ ID NO: 112860 - DNA, 1025 bp, Homo sapiens
tacattttgttgataatattcagtaactacaaatgtattaactcatgaaagaatcctagtgttttataactcctttagagcaaagtcactgacacatttaataaaaattagcaaatgttctctgctatgttggacattcagtgttccctaaagaatttgatatgaattatttccatttcagataattaaatggagattgctttagtagcaaattgaacattagacccaagggtatcttttttctttttactgtaataatctacaggaatctaaatttttttaagatttacaatgataacagactacaagggaatttttaaaaaataagagatctgttggctaggatcattaaaaatgacttaaaatgagtgctggtaactgttttgttggtacatgttagtatgctgaaacctaatagtagttgagtccttagatcagctgtttggggagaaggtgggacagaggtgattttctgggggccatttacagatggaagtatcaaaggagtttttccactttacacttgaccctggactctgcctactgcaaactttgtgaacagtcatcaggactggggtggaatgtgtatttcataaaggcttctggaggggagaactactgctttgaacatctttaagttttgtttgtttgtttactttatttcaatagttttggggaacaggtagtttttggttacgtggataagttctttagtggtgatttctgagattttgctgcacccgtcacctgagcagtgtacactatactcaacgtgtagtcttttatccctcaccccccccatccttcctctcgagtctccaaagtctgttatatcattcttatgcctttgtgacctcatagcttatcccccacttatgagtgcaaacatatatttggttttccattaataagttacttcacttagaataatggtctccaattccatccaggttgctgtgaatgccattatttcattcctttttatggctgagtagtattccatggtatatatatgtgtgtgtgtg

SEQ ID NO: 112861 - DNA, 1088 bp, Homo sapiens
gactgattttcagtgaattgcttcccccaaaggatgtcctcggtattgcctgagaactctgaggagcagtgattgaaaactgtttaaccatgcaaaccttcagaggtctctgaggacctaaattacaaggttttgctgtaattggggcaatgccatgaagtttttctataaaataggctctgtaactttttgcattttttgctactgaatatttgccaagcagctatgtgtaagtcttaacatatgttttcttttgtattttaagacaataggcctgatgcctttttattaaatataataggttaaggaaatgcataatttacaaatttaggctcataggtgaaaatatatttacatacctcttttgacagcaatttgtgttttcttaatatttataggaaaactactttggggaagatgacatgtatatggattttgaagaggttatctcaagtcctgttttgtcactgtcaacatcatccagctctgggtggactgctgttggaatggaaaatgacaaaaaggaaaatgaaggttcagccaagtcaattcatccacttgccttgcgtccttgggatattactgtacttgttaatttgtacaaagttcatgggcgtcttcctgttgtaagtgtttacacatgaaagtagtctggaatatattataacatccacctgtgtatagatgtgaagcattcagcacacacttagaaaaagaaaatcagatttagaaacttctaaatttattcttttactgttataaaactcatgtattttcttcataatatgattacttgatcattggtaatttttattttctatttttcttctaatttaactttagctccttctttgctatatgtgtaatgtcaggacatcgtgtcatacattgagttgttgggtttataattaacctgatgggtgttcaaggactttacattttcttagcttttatctctagaccccagaccagtttggggccttatggtggacctgttataaaatggagtttctggcttgaccctgggggttgaattatgtagtttggatctagcacggtatcctgggtcgctctaaggacaacctgtg

SEQ ID NO: 112862 - DNA, 1044 bp, Homo sapiens
atttttttcttcatctgtcgttatactatctaatgttctttcacagtgagagggttcacactgtgtctactcccaaggctcaaatctgggttacccacttgtagtttatcctgggtagcatcagtctcttaactcaaggcttcaagatgaaggttctaaggtgactgatggactactgtgtcccattatgacactatgcactttttactttgtggtcatcttatgtattaatttcatagggatgccgtaacaaagtatcctatgctaggtgacataaaagaacagaaatttattctctcacagttctggaggttcaaagtcctaaatcaaggtgttggcagggtcacattctgtctgagctgtaggggaagatccttccttgcctcttcttaggctctggtggttgctagcaatctctggtattcactcaaatttctgcctccatctcgactggctgccactctctctctgtgcctgcatgtcccactttttctcctcttatagggataccagtcatattggattagggcccaccatcaatgtaaccttatcataacctaattatatccgcaaaaatcctgttttcaaaaaagatcatattcacaggttccagggcttcagacttgaacatatatttttgagggatgccattcaacccacgcatgatgcaaactgtaataacatttagaatataatatttattggtgtatcatgtaggctataccttaggaaagcccaagatccacatgtaattttgagattaaaaaatttcataaaaattttatactgagaattattgagtctcagcgtcagaagataactttcttgaccactctccccagttccctcagtaaaaaaggtaaggaaattaatgcctggagaagtcaggtgattttatataaagtcacacagcttggatgaaaataaaatgaaaattggatcagaagagcttctagagtgattattgtagtcacaatttgaatttttttaaaaaaagtttcttatgaattagagttagcccttatccttaaaaaaaattttttt

SEQ ID NO: 112863 - DNA, 1017 bp, Homo sapiens
aggactactgtaataaaactaggttgagaaataatttgcgaactgcctcaatgtatactggtatgttgaaggctctgtgaacacttgctgtgaagaaatctgtctaatcagcagcatctactttttgtggtcactgttaggtgcagtgatacttagtacacaaggcagaaatggttattaatgaacctgggggagaagataaatattgagaacattaaaattaagataaataatttcaagtgtaaaaagcgccacaaggtgaggtaggcagtgctctggtagcatttaatggtctggaggcaagaacaggatcagatttgtatgtttagaagatctctgtgattactcatagagtatggagcagagagatgtaaaaagttaatgccttgaaaaggtcctggcaagaggtgatactatttggaccaggatgagagcactgaagatgaaaaaaagtcaatgcatttgtcagagactgggaggtagttttaacagaaattggtgactgatcagtagggcattcccaaacttatttgattctttattcttaataatgtgtggaactagtgttccatgaaataatctgttttatgacatatcctttatttctctgaatacgttagaaatgttccctttgaaatacgtgctgctttttagtagtgagtatgaaattattctctgtaagaaaactctccttgtatttacatagtcctcagaatctatatggaagtttacttttccccaccattcttcattgtttggtcttaatggtctgagttcttcaatgttgtcttccttttaaaaatattttaatctcatgattcttagatttcttacaaaagactggtctcttgtattccctgtcaaagtactactgtagtttcttgttattcataaaggcagttaccaatcagagatctgtctactatttaagactcagctatcttgctttttataatagttggactctcataggtattgttcattaaagatgcttaactcagaatacctctgcgggta

SEQ ID NO: 112864 - DNA, 1049 bp, Homo sapiens
tatgatatatacttacttaagcttctatttacataaacaaaagtgctttaatcttcaaaatacctggttttaaaaaaactgtagctcaatgtgatatttagatactttttcacataaaagtttggtttatgattggagaattttaggtgcttttctatgtggagatttcagttagctatataagagggaagatatataaccttgaataaaaggatttgcgttaaaagttgctgaagtgaaatttttcagttgcaattagttttcattttgacagtgcattttgtcattcataaaggaaaagtaacataagcatgtaaatgatattaaaggtagaaaaaaatcattggctaacaagttgcttatttagcagaagttttaagacagtgtttgggttctttcaagctacgttaacattcttcagaagcttttgaactctaaacccttgtttagaatgctaacagtgttgtcaacttgtcactgattatctgtagctggcatgcctcttggagtggggacagacatttgtttttcatgtggtatgtcgggagtatgaactggaaagaccgaaatcagttataatatgtcagcatggaattgatcgtcggttctgtgaatccaaggtatattaacaaatatgttagcaatattataaacatttatgaattttaaaaaatggaatattgagatatcagcttcaagtcaaatacacatagccatgcagcaaactacagttttttcagttaataaaattattttttaaattcttacccattttagttttaagtatctaaaatatgagataattattaaaacatacaaattaaaaaagaaacagaattataaaaattatattttgcttacatttttactgttaacattcatgtcatattgcattattatacttgttgggatatggctatatatttatgtagaagatttagaaattgaagcaaagagaaggttgaattcttcacatgacatggtttgcagaccactctggacatgccgtttctcccataatgtaatagcaaggttggtcatttgccagg

SEQ ID NO: 112865 - DNA, 1019 bp, Homo sapiens
aaatctgtgttttaggagtaaaataaaattaatgtggattgtcttagtgaatttgtgtgtgtgtgtgtgtgaaaatacatctgtgcgtatggagtacctgtaagaaaaccttacaactctaaactcatacaattcttgtaaacctgtggcactgttttacttttcactttactttgcttatcctctctagtttcagtaagaaattgtctatgtattgtccattagacttgctatttgccccttctgaatgaaaatggtgcatgcttacttattgttttctaacgtatagttttctaattgataacactttaactgctgatttcatttattattataaaagaatgaaattagactgatttttaaaaaatacatcaataactagattttttgtgtttatttaaagaagatgacttaagtatcaaaataataagttgatggtgatgatttagatgtacaatccttttttattttagttgagttgtattcctgggccttgtccaacttcagatgatttgaaatatactatgattcgtttagcagtagatggagccgatatttacattgttgagcatggttgtgctacaaatataaaggtaagtgttttgcttggctggtgtagtgctttttcgtttttactaaaccaaacctctatttcttgaaataaaacacacatttatagtttgtcatctcacagacagccacaaaattttaggagaaaactttctaatttttactaatccatgttctcttccagtattatttttttcaaggcatactttcaccagttatttactctgagttattgtaacattgctttatgggaaggatataaaatagtaggttacttttatgtcagggatataaactggcagtgcttttaaatgatttgatttttgaatgtctttaggattcatacatttatattttctgcctggctcttgaaaacatttgtttcccactcttttatggattgtagtgcaaaatcaagccttgttaagtttctactatttcattattta

SEQ ID NO: 112866 - DNA, 1053 bp, Homo sapiens
aagtcagtaggtcaatctcctcttagatctcccttgaaacgacaagcctctgtctgttccacccgtcttggaagtactaagagtcttactgctgctttctatggggacaagcagcctgtaacagttggagtccagtttagtagtgatgtctctcgaagtgatgagaatgtactagactcaccaaagcagaggagaagttttggttcattcccatatacaccatcagcagactctaattcatttcatcagtatcgatcaatggattccagcatgtcaatggctgatagtgaagcctacttttctgctgctgaggaatttgagcccattagcagtgatgaaggccctggaacttatccgggtagaaaaaagaagaaaaagcaaacccagcagattgactacagtaggggttccatatatcacagtgtagaagggccacttactggacatggagaaagcattcaggattccagaactctgccattcaaaactcatccttctcaggcttcatttgtttctgcgttaggtggagaagatgatgttatagaacatctatatattgtagaaggtgagaaaacagtggagagtgaacagattactccgcaacaacccgtgatgaattgttatcagacttaccttactcagttccaggtaattaattggtcagttaagcacccaaccaacaaaagaacctctaaatcctcattgcatcgtccccttgatctggatacaccaaccagtgaagaaagttcatcgtcatttgaacagctttctgttccaacttttaaggtataaaccaaatcattagtttccattgatatcttgatttagaaaaacagatttttaagaagttattttcataattactctcattctttttagctacctttctgagagagagactttctgaagccatagctttatgtatgataggtcacagagttattgatgaatattagaaatttaagtaaattaaattgagaaatggtttatgagttgccactgcattaatctaatcaacacatattctgtgtctgcattatactctaagattag

SEQ ID NO: 112867 - DNA, 2194 bp, Homo sapiens
gaatggaacataatggaagtggtgtagaagcggttgggaagagaaaaggggttcggtggaaacgagctttcatgaaaatcttccttttcctgcaaaagcacataattttcttcgataacttatactattaagattcttatgatatgtcatataaatgaagaacacaggaaatcttcttcagaagtttgttaaagaaaagatcattgcccagtgtggaacacttcatcttggggtgaaggtggtgatgtggggataacctcagaaatgtttcccttgtataatttctaaatatgtggcttagacattctcatttcaatgttgagcaattgttgtacatattcagatggtgctacgtttcatgatatgtttacataaactaagttgtagaatcaacgacatttaaatatttcatttactgttttttcccctcagatatattgaagcaatggttcattgtgctagtacccgacatccagctgcaattgtagatgatcttcatgctaaagtcctcagggaagctgtccaaaatagcaagactaccttttcagaaaatgtaagaactttttaattcaatgggcatagcaaattgaatatttatcatggttacagaatattcaaacttgaaaaattttctttacaagttaaatcagaatatttggacatgttctaaaagcgtttatatgtcattggctctgtaaaagataggacatataactgtactatagatggaatagtagtaaaaatatttatttaaaaaatatattaatagctttctttgtttcttttatttcagaagcagcttagttccaagccttttctaaagtgctttggccctaagtgaatgaatattctttaggactgacaccttgcttttctaagacagctgtttatgttttgattttcctctatgattagatgacttgtatcttaatattacttttgagattttcctcgttcacttcagtgaatcaagtcactactctcattgtatgatattctacttacattgtggttccagccacgaagccagttgcttagcagtcatatcccagtgctcttccagagcttctccatttgattttcaaatttatctggattatacttagagtagggaccagaagagagatgaaagtgagactgattattttagttaactatttatttaatatatattggcatttcatgtgatagagtagaagagtgaaaaaaagaaatttgaaaatattcctagccaaaaaggggccaattatcagaaaccaagtttgttttcaagccagaagagtttagtgatcttaaaaaatgcctgtaattactgtaccattttttctgtctgcttctctgtaggctgatttcaatttaatgtgtattacttttctcaaccatgatgctaccagtctttttcctagcttatcgaaagtttggattttaaggtgggatataaaactagaacgcagctggcacatagataggcatagaggggcagcgtgaataagtgagttgctgttgtggatgatgtggaagttatgaaaagcttgtgaaataatttcacttacgatctttttagttatcttccaaacaagacattagaggaacaaaaactgagcagtctacaataggaacgactaaccaaggacaagcacagacaaatcttacaatgaagcaagataatgtaacaattaaaggtcttcagactaatgttagcataccaaaggtaacaatttaatatttaaaaattttttcctgaaagaggagagcattttgatggtgtttgtccttttcagttaccaacgtgaataatggtagaacagtgtgtaatattaaaaaaatatgttttatttctatgatctaatgtagatctaatggaatgtaaatagtttacttaagcagaatattaggtaatagtagaatgttccacatccatccagtaaaaatttaattatgattattttatgagaatctgtattcataagctttgtcttcactgtcaaatacatagatatgccattcttaacagtagtttttcatttttgtgcatattttatgtttaagtggtaatttttcacttgtcagttctgaaattttgtgtgtgtgttaggtaaacttatgtttgttacaagcctcagtggaagaatctccaactacggctcctagtaggagtgtgactcatgtttccctagtggcattgtgttttgac

SEQ ID NO: 112868 - DNA, 1050 bp, Homo sapiens
tatgccatataggatataaaaactgtaaattctttattcagcgaaaaatatctacttagaattatatttgcttttttatatattcttgagtaatagctcaaaaaggaaggttgaaatgtgtataacactttttttaggtttagtaatatataatatagtaactactataaataatagtagttgtatatgcctacaattatttacctgataattcagtgatacattacttttatagattagggcaaagacttggtgagaaaaaaatagtctttatgaaattttatacagatattgtagagtacagcattaagacacttattcaccatttataataaatgcttttttttatttttataggaggaagacagtctggtgctgttttatataacagttttggaattatgggtaaagctagtgacacagaaaggggtggagtgctgacatccaataattcttctgattctccaaccggcagtggctataatactgatgtctctgatgataatcttccatgtgaccggacaagcccttcctcagacttaaatggaaattctgtttcagatgaacaggttagtgactttctaatagtaataataatggtgctttagaaaaataacaaagaaaactacatatgcaattcaaaattagtttctggagtgtatttgcctgtctttccctattttggatttatgatatctgcttaaatgttagtcaaagtgtgttggtgaatatactactagaatataatttccaaagtatatcatagatatatttatatccatcatagtcctagcattatgccttgctcaaattagatacctaataaatatttgttgaattaataaattaacaaaatttaagagaaatccacctatagggtgtggaggattttagcaggcagaagtcattttgttattggtagtattttatgtcagttctaaatatttttgtcagtgtttgcttatttcagttaagagttctgaatggcaccttatattcaactcactttttatttttattatggtagaattacatgggtggtgatgagta

SEQ ID NO: 112869 - DNA, 2530 bp, Homo sapiens
atatgaatgttctctggcacttccacaaacatgctatgtataactttctgaagtttcaatatactatttactgctccttaggtatgaatagtgcttcatttccaccatctatttgatatacggtgctatgtggttttatgtcttgtcaccagattccctcatcagattaagaagggaattaaagatccatggttaaaataagtggatgtgcttcattataatattgataataaaagtggctctttgtcttgtactatagagttgcaaaacatttttacctacatttaaggacgtatgtaaaaaggattcaccacaatcctagtatacatgatcagttttggtattaatgtgcaaagtagctagcagttatagcaacagtaatagtaatagtggttgtagttatcagctgtcatttttatatacataagaaataaccctaagttacactttctgtagggcattcacccatatcattctctgagctataccagtggagacactgccactgattctccagtgcatgttggacgtgctgggatgccagtaaaggacagtccaaggaaggagagcctactcagctacctgactggaagcttcccaagcctgcacaacctcctggaaggtactcctcagagaagcagtgctgctgtgaaaagtagctccctaacgagaacaggtacgtcctctagatttgataattacatgtttatatttacgggggaattgagatgaaacaggacttaagtttagttagatatatactttggtagtacaactaatctctcataccttatctttgagaaaaaattttaggaatccattgttctgtttgtaacttttcggagtcttcatgcccttagtttgcatttttaaattgcagctctgacgaatgtcaatgtaggcatttggtgtggggtactgtctagaccagcaacatagaatttcccctgttataataaaaataagctatttattaatgcattaatatccaaataccaacattatgcagtgagaattcaaaaccatctgcaaacatacattttaacttgattcttcaaatataggtatataaattacatttttttgctccttagtatataaataatattatactcagaaacattttattttcaggaaatacagtagccactgatatgttatctgaacatcccttgctatctgagccatcatctgtgagtttctataattggatgtcaaatgctgtgggtaatcgaggaagtgtgttacaagaatctcctgttacaaaatcaggacacaatagtcttcccacaggtattgagttatcacattattttgcttaactgtcttaaggggaacatataccaaaatcttatttttcaggggatgggttaaaaatcaaacaagtactgtttggttgaaattggtccatttatatttttaaatgcctttgataatattgtaattgagagagtagtaagcagtcactcagtgttcttgttgaaaggcaaatatgtcaaatgtgagattgtatataaagagtttaaagcttccttttaatgtggctggtttaagtggtaaatgaaaaaatgcaaagtgtaattacaacatcatatacttgatattacaaaagatagttttaatttatctagatccctctgagacctaataactatcattctaaacctttagttacttaacaaatatttaattaaatctaaaacagtatgtatgtataaggatagataaggatgacatgtgttctgaaaagttaatttcatttttcactaataaatcatgtctgtaaaataacctaaaagtatgcattattttttttcttttcaatttaatcagtcttgaaatggtactactatacaggcttcaaaagtttaccctgctgtacacttttatgtgtttctattccccaataatttacattttattcttaaaaatttactccattaggtgttgcacccaatcttccaacaataccctcagcctcagatttcaacactgtcttgtctagtgaccaaaatactttggatgggacacattctcagcatagcaccagtcaggatgatgtggcaggtgtagaagaagcaaaccaagggtttcctgctgttcagcttgctgatgcacaggtgagccagcctgctttttcctaattataataatacctccttaggcattgcttagcaactggaacctccaatagtacgcaccttggaattctagtgaggctataccttacctatctgcctacagccttcatgcaaaacaggaggagcctttaaaaagtacatggcttagttataaatgcaaattaattatctatatgtaatcattaaatagaagagtctcatatagtaacctttttgttattcgtaacaaattggctaagcaacatgaatagataatcataccctatggtttttagtgctacgttaagactttattgagcgagcagtggggaagcattgatgattttagagcagaggaataaagtaaaaaactatagatgtagaaatattatatgagtagcaaatgtatt

SEQ ID NO: 112870 - DNA, 1474 bp, Homo sapiens
gcattgattgtacacttcctgtgagtttatgcatttacataaattacactacaatggggcatttttcttattaattaagaaatactagtattcattaaggaattattgctctgtagttataaattctttaagttaaatgcaaaatatcaaagcagcttctgatttttttctttttgttacagaaaaaactcccatgtctgcacattcatagtgtgcatggaagaagagggaaaaatacctttttacagttttggtgcttggggcttattgttattattggtagctggtttatagaaatttgagatatttttgactttctatattaaaatttactataatagtcttacatgaaaatctttagataagcaggaggatttgccaaaataatttttttatcagattttaaggttttgtgtgtatttctaatttttgtttcaattgcttttcctgtctgctttcaacttagcatgagggcttcctatctaatatcaaataaaattatgttaaatatgaatatattagatacagattgtaggagggggggatggttaagtgaggtatcctaattgatctatacttaactctaaattccaatactctacggcaataccatcaaatgacagtaaaagttgtgttatcacttcagtgaaatcatttcttaacataagaagactgattttgacttactagttttagaataagattaagtaagaagacttaaaggcccacctttgaactcataaaaagcctggcctagtgaaaaagcatattttactggtttgcttgcttaaaattatttaagactcatattttaccttggagatgattttgcctataaattaataaagatgtatgtttctggaaaaatggaagaaaaaccgtgtcctttttttatttcacgtttttaggcaaggccatgtgaatcttcctccacttgagttcaaaccagcattaatgttgggaacctttagcatcagtgctgttgtaatggaaaagtccgtgtgcacccctcagaactctaccagtgccctttcttttcatgatctcagcaagcggtattataacacctttcactgcaactttactatttcctgtcagtcaataagccagcatgtagatatggctttggttcgtcttattcatcagtttagcacaatgatagatgacatcaaagcaactcagactgatattaaacttagcagatatacagccggatctgcttccccaacacctaccttcaaaaccagaaaacatcgggactttcgttcatctgactttagccgcagttctagaggaagtcttaatggtggcaatagagtaaataatgcaaagaacaaacggaccaacaatgagaataacaaaaaggaatctcgaaacaagaattcattaggaagatctgaaagaagaacatcaaaagtgtctaggaaaggttcaaaagatgtggtggatcacatgactattcatatggatgact

SEQ ID NO: 112871 - DNA, 1088 bp, Homo sapiens
gactgttcatcatgttttcttaatgtcgtaagtggataattgaaatggagagaaattgtctatcaccagggaaataaaacagtaatggaattcagatatcctgccaccacatttcccaaccttttaaactcttacgtggtatgttcttaaaggatttagacagacctgatttaaaatatctggctctactattcactttcagtaggaacttggaaaaatgttgaagaaatttttaatcattttgttggggattaggagaaagaggactggttgggaatgtgaaggaaagaaaggtaagacaatgtttggaatgtccttccatttttcagtcttcgtatctaaaattgtatattttcatttacttataaaggagttcggagccctacagagccaacatgtaaagttgtgtttgagaatgaacaagacaacagcagtttgactaagactcagaggaaacgtagcttggtaacttctgaacctcagcatgttactctaatagtgtttgggattggcatggtgaaccgcacacacctagaggcagatattggtggactaacaatggaatcagaactgaagaggatccatggcagttttactcttaaggaaaaaatgaaaggtatgaatgatttttctaataaagtgctatgtatacataataattagtgctacttctctgaagaaaaccactgccatgtctccaaaattcctaattggcaaattttttttttcccagaaaaactggacttcccaaattctgaggtaccaagaactttgttgtaattgagtatcagtgaattgaggcagctttgatgtctaaatattttagcacataaatattgagtcgatgtacctatactcggtgacatttattctttgtcttttaatatcaactactaagatgtctctaaaggctgaacattttaccaaaataatgaaatttatgaaaaatttgcttttgttaactaccatagaaatcttataatctaatactaagtatctctataaaaagaagtccctttagttgatataaaatttcctaggttagtgaaaacataccatttatcttgagaatgattacacaaggtatg

SEQ ID NO: 112872 - DNA, 1026 bp, Homo sapiens
cacatttcctaagaagtcttttcaagaaaggcaggaaattccggtggttgtgagagatgagatctttttttgttcattcaatataggagaaggggttattattatgtattaattataatattattaagtgcctactgtgggccagaagcctcacctagattattatatttaatcttcactgcaattttgggaactggagtggtcttatctacctttacagaacaataaattgaggttcagaaagatcaacatagtgcctaaaatacttaatatagtcagtaagaagagatgcctgaatctatactctttcgaccttataatgcttctactgaaagtcatagaccatggattccacgaatccttcatttactctaaatttgaagtaccatgggtacgttaccttcagaaagtaaactaaatttctttaggtgtcccatgagttttatttactctatcctcctggatcacttctcttcattatttgttatctcttaagagaagggcttccaatagtctttaaccttgcaaaacataatgtttatagaacagatttttggtaaagtattatatagctgatatttcttgctcttttttcccccaagtaaagatcccttaactgttttatttgaaaaataaaaattatttattagttactgccaaactcgtagtgtattctttggtatttcattttcaattgcaatgaagaggaaatggaatggaaaaaaatggttcaaatggtactttaaaggaacattttaagagtgggaaattagaaaagctttccagatgattggtcatattgtaactaatttgtgcatgaatgtttatttgcctcctttttgttttcccactttctcttgactcttcatctgtagactggaggattttcctacatctcctacaagtacagccaaacaagagtttctgtatgtcatattattctttttcatggctttgtaattactgtagtattgaatagtttttaaaatatttaaatttttttcatggctgtgaattatttagtta

SEQ ID NO: 112873 - DNA, 1391 bp, Homo sapiens
tatttgtttgaataattatgtgctagattattgatttaagtgtttaaggtcaatagtaaactaaaattcataacatatccttatttgatatatggtcccatgaataattatgaaggtcaaagagacatatgtttgtataattttatactttatgaatgtttcagtgagtacaatttaattgatttggcaattttagctacttccacactgaatcaggatcagtagacatattgttaactacctactattctctgtgaataaagcactgtgtggactggggaaatttttttaacttgattttcttgttacaatgcttctgtaataagggcactttatttctgttctaccttctatgaaataaagaacataagtgtttttctagtgcctaacacactgccagtcttaataaataatacttgcttaataatactggcttaataatacttgctgattgacttgcgtatttaaagatagggaatattttataagcaactttaaaatatcctttcatatatttcaagataggtttgggaatatccatgcatttttcttagataccctttttggaaaaagtgaggaatgaatgagtgaatgaacactagcacaaacaataacttttctcatttcttacaggtgcacagacaagatttacatttgagctgccaaatcacagattgcgttttacttcaaaagtttctgccacagatatgtcaaccattcctccttctgccagtcttaaccttccccctgttaccatgtcagggaaatatataatggaagaacatgatagttattcggatcaggtgtggagtatagatgaactgccttctaaacaaggttactatttacagggaaattatctgcgttgtgtggcagaagtaagtttactttaaaattttcttactcttcgtaatttaggagtcttcaagatttatatgtaccaaaatatgtagtaatccaaacttttaaggtaaagtcttaaaataatttgttttcacagaagaattctataccaaatcaagtgtgtgtgtgtgggtgtatgtgtgtttttgtgtctgttagtctgactaccctgtagttttatttacacatgcttttaaaaatatgtattagttatgtattccatctctgcaatattttcatagttcaaatgattattaaaagcaaatcacagctaacattcattatgtgctttacacgcattgacttctgcagtgcttaagtaaatcctatgaggtagaaatatttgttctcattttgtaagtgagcaaactaagccttagcaaggtaacaaattcatacaggtatacataattattaagataatctaaaggtcatattgaaagataaattagacttacagattaatttctttactaaggttaagttga

SEQ ID NO: 112874 - DNA, 1028 bp, Homo sapiens
tttttgtttttattttgccaaaaattattatgtagattttaatcttttttcctctttgaagaaccaagtagaaaaatgccagtcacagtttcaaaactgaatcgctgcattaaagatacgaggaaaaaatgaacaaaaatttcttgtcatctcttagaggttctaattattctgaaatatttaatacattgccatttagaatatggacctcatcctaacttttatataaagtttatctatgacttcatatttacttcttgcatggctattttgtatattaatttcaagtgtttatggtacagagtataaggaatatacattaacagctgaatttgagaaaaatgtattatagtttttttggtgaacaataccattaataatgtttagtttcatattaaaactttttccattattttattttattgagctttaaattttattttaggtttatgaggaagctggttctgattttcatcaagttgcctattttaaaaccagaattggattaagaaatgccctccgagaagaaatcagtggttcttcagatagggaagctgtgcttattactttgaatagaccaattgtttatgcacagcctgtggcctttgatagaggtaagataaagtcaatcactactatcctctgggatctaggaatgctttgttaatgctagataagaatcttgtagtttactggtgtaaatgcttgacagctaaatggttcctaaatctgaaatgtgtgtatccaaaaaaaaaatcttgctttttgccttcagtttttaaaagttattttacattttaaagttattttgtcttctggctggataacataagagtgtctgcttcagattatgtaattgtaatgctgattttttttgttttgataattaatgcacccatttgtgttttggcactgtgtttatttttatattctataaacatttatcaggtactgcctagaagtggaatacaaaaataaacaacagtatccctgccctcaaggacctgtcagtccagtggaaaagaaaa

SEQ ID NO: 112875 - DNA, 1019 bp, Homo sapiens
catgaaacaaagttttgacagcattttggctgcagtctcacatgagttcagatgtggaattttccacttgtagcatcatatcaacattcagaaagttttgggattttggatttcggattagggatgctcaacctgcatttgcttttcctcctacttctctggcctctccatctttatgtcctttttagaggcccctccatctatacactgctgtgaaatgaaggttttccttaaggtttgtttctgtttaacaaactcaaacatctttgacttttctctgtaaatcagatccttttaatggtatgttcctagcattatgtaccttaaagaattttaaaagaagtaacagctctacagatgaagttaagcaccatgtctgttttcatttgttattccatcccagtatctaacatataataggcatttcacaaataagttagagggaatgaacagacctggattttcttcttccttgtgccattatgtggttgcctgctttctgttttattttttcatttgttatttaaaaaatggtgactatatgtcctcttagatctttcctaattctaatgctacagttttctgggtgtaatttttattaagcaacaggattttgcagcttttgagttttacttaacatatagatttacagtgttgattttaattttctttctgccctgtcttaattatcaaaagctgtgctgttttggctgaattataaggccgcctatgacaactggaatgaacaacgaatggctttacataaggatattcatatggctacaaaggaagtagtagatatgctacctggtatccagcaaacatcagcccaggcctttgggactctttttctccagctcactgtcaatgatctgggaatttgcctacctatcacaaatactgcacaggtacaaaaagtcaagtcatattccaggattaagagccaggcatttctacataaccatttctaagtatttagaatataacagtacatttttcagtgtaacagtttataactg

SEQ ID NO: 112876 - DNA, 1032 bp, Homo sapiens
aattaacctaattaattctgtctaatgagctaaggtcatggcaattcctactgtagctataggatggtggatcaacttggggtcagggagtgaacctgtagttcatagggaaaaagaaaataggtgctatacagaggaaacagtagatgcacactgtacacatagagaaatcaatcctgtagtctgatgtttctgacaagtttagcagtgaaagacattagttattatatgtggccattattactttgtaaagttatttcaatttctatacccaggacttaacaaaaatgcaacttctttatttaaacagaaagcagtagtgctggaacctggacactcaacgtattgtggaaaatgtgtgggattgatgttcacatggatcctaacattggcaaaaggcttaatgctctgggcaatactcttacaacactgacaggagaggaagacatagatgacattgctgacttaaattcagtgaacatagctgacctgtcagatgaggatgaagttgatactatgtctcccactatccatactgtaagtaaactcactgttagaatttttcaggattggcttttaccctgagacagggatattttttgttcagtgttatttagtatattatagttgctatttgtggaggaagagaagggaatggtggttcactgtgtctacatttcataatactgtcttttaatcgagttctgtgctacatgttgactgtcatccaacttgtgctttaacctataggtaaaataataatattaaaactgaaatgagtagggagtggggcagggtggggaatgggaagaaattgctaacaggtatgaggtttctgagtgatgaaaatattcccaactaagattttaatgatggttgtacaactttgtgaatatactaaatgggtgagttttatggtacgtgagttatatctcaataaagatgttcaagatgaatttcaaagcaaagtgcatatacaaaatgaaatgatacattttaaaaatacgtattttcatctatactatacactct

SEQ ID NO: 112877 - DNA, 1050 bp, Homo sapiens
gttcttgggaagaaatttttttaaatttaatattactgtttattacttagagttcagatggaagttcaataagtggagatggccacaaactcacctttgggcagcgacttgtaaatcacctactaggcctgacacccccaaatcagcgccattctgttcctgcagagtatctgtgtgacccagagatgtggggctcccctcagtctagccagtcccatttgaaagcatgcagagcacactcatggggaaacgtaggtagcaactaaatagattccttatgaaattgaagggatttaaatcaatggagaattccaaccttaatatagatggttttgattcttgcatgctttgatttaaggtgttaattttgtgatagtatagatttgctgtgtgacttgagggtggtattgacagatacacttttgacttttcaggaagccacagattatcgaagacaggcagcatctgctagccagccgggagaacttagaggaagaaaaattatgaagcgtatagtggatatcagagaactgaatgaacaggccaaagtaatagatgatctgaagtatgtacaatgatttttaatttaatataatgttccctaattttagaatcataagatgttaaaagtggaagaaactgtatttggtctaatacaaactctttagtttatctgtgatatcaccagggtccagagttgtttaataatttggtcaagattatacactcattagtgataaagttaggcatgaggctgggcatggtggctgatgcctgtaatcccagcactttgggaggccgaggcaggtgggtcacctgaggtcaggagttcaagaccagcctgggtgacatggtgaaaccctgtctctactaaaaatacaaaaattagctgggcgtggtggtacatgcctataatccctgctactcgggaggctgaggcaggagaatcgcttgagcccgggaggaggaggttgcagtgagccaagattgcgccattgcactccagcctgggtgacacagcgagactccatctccaaaaaaaaaaaaggc

SEQ ID NO: 112878 - DNA, 1021 bp, Homo sapiens
gagaaactgaagagctcccagaaatccgtgtggatgcagcatctcctggacctagagtaacttttaatatccaggatacagtaagagatatataatttgttagagatatacattgctaagtagtttttacaaattacaaaattatggtattatactatttcaaaatactgatttcttactataatcaaagtatggattgtgatgactgaactgtgcatattaccaagtagtgggcactgcccttataacattttctgagagccatgaagcaggtgttagtattttacattttacatgcacaataaaggctccataactgctttctcttaagtagaaaggtttttgttgaataatttttctttcaagtgagaatccatattaaactacatcttacacaaatgtaaacgtggaatattgatactcatttatgtattttatttatagatagcagaaattagaaggaagaagatcagcttcaaagttgtattctaatttcatagcatattaaacattatattaaaatgtttattttgttttttgtgtatttacttttaagtcattgttatttttcatgagttttttttttttttacttttctcattattttaattaagttgaaaaatacagtatggggaagtacaccacaatccagctgtcctggggaagggtattttcaggtacttactaagaacaatataaattttgctttaaaactaatcaaccacactgaaaatctactttcaaaatatcttcctctcatttcaaacttaacttagacctcagaaatattttacataatggtttaagactgtttgaatctcataacctcttgcatgcatttgtcttggtttttacttctgtgtagtttaatactattaaagactaaatcagctaatcaaatcaattcaaccaaatcataaaaaaaactacaatttattatttcctaatccctaagtgaagcagtttttccttatattcaactacaaaatgaattttttcataaacaaagatcagttcaaac

SEQ ID NO: 112879 - DNA, 1043 bp, Homo sapiens
tattaaaatgagacttagtgacttctttgtctaatatagccatattctggacagaagaacatcaaaactgcaggttcccacttcatttatgtagcattttccatgaaagtttgatggaaagaagttcggttttttaataaattgatattcgtaacaaacttgctaaaccttgctagtgcaacttcattaaacaacagttttttagattctggaattatagaatcatagactattcagttcgaaaggacattaaagattatctgaaatgacctttttattttaaaaaatgaataaaagcaaagaaacttgccaggatcacaaagctaacttttaaaagttaaaacagtcttctgacttccaatgttctttctaccacatttttctatatttcttgattttcctcatcttcataattttaattttaaaagtttatttatttcaatacagttgcattacaattccaagacgctaaagactgaatcacctaatgcctccaggggatcttccttgccaagaacactgtccaaagagtccaagctgtatggtatgaaagatagtgcaacatctcctccttctcctcctttaccttccactgtccagagcaagactaacaccttacttcctccccagcccccacctattcctgcaggtatttaaggagtatatactttattttttgtcattttaaaaatttttagttattacctacttgctcttttgagactttccaatgcacatgtttaagaaaaaaggacatacatttgtcaataatgactctacagacttcatatatggaagtgtgggccaaccattttcacctgtttttgaaattgacattactttagaatatctgttataaaataaataatataccaaatagtttacgtaattaaatttttaggtctgtatatataaaaagagtagttttatgtagctcaaatttgggagcttatgagcagatggaaatatcaaacttgagagtacattgggtttaaccacatttattacttctctgttgtataacacattacccagaatttagt

SEQ ID NO: 112880 - DNA, 1682 bp, Homo sapiens
taaatacatgcaagctaagcacaggaaagcctgaaaacagtgacgtttttcttcacttgccactaaatattgttaaagttctctatatcttcttaaatggacaaaaggactaatgctaatgagagtctaaccaaaatataaagctgaaaaactggaccaaaacttgtgacgcagagcaagtaggaataaccaacttattatatgttattaatcgcctctgtattctaacattaacatatcattcctatcaacctgctacttttattattttcttgtaaggccttaaatgtgaggtactttgcttgattaaactttaatataattcaaatttctgtttaattggaactttttataaaatccattaaatggaatttataaatgttctagccaaaggaaaaggaagtggaggagtaaaaacagccaagttatatgcctgggtagcacttcagtcattgccagaagaaatggttattagtccctgcctattagactttctggaaaaagctctggaaactatcccaattacaccagttgaaaggaattatacaggtaagcatccttcttatatacctccccataacatatattttgggatcttattatatagaaggttttcttaatgctattatacattattacataatatatgcaattataaatgttaaagaattataaactgtaaaagaacttgagagatcatctaattgtcatttacaaatgaagaaactaagtcctggtgaggttacataactttcccatggccccacctagttaatgacaaaattaacataagttctacatccttagtgtgtcccttggactggaatctctttgagggcaaggatataatcactagtttctttgtacagtgtttggtatagcagcaggaaaatttgagtttgggggaatgagcaagaggtgcgaacagggaaaaacgtatagaatgaagggctacagaagcaaatgtttccgggtgttcatacctttcatctcactctagtataaacaataaggatcttttaataaatagtttgcctttgatctaataataaaacttaaccaaatattttaaacagctgtcagctcacaagatgaagatatgggacattttgaaataccagatcctatggaagaatcaacaacatcactagtgtcgtcttcaacatctgcttactcttccttccctgtagatgttgtggtttatgtacgagttcaggtgacatacttcatttctttctttttgttttaaagagaaatgtttttcttaagtttatttgaacatttcaacattattactgtttaaaagttttcttaacctcaggttcatgaacctttagtatgtttgtgatggcttggaggttgccagaatatgtgtgaagtatgtgtaaaattttatgtatatacagatgctcaagttatgatgctgttctgattaacccatcacaaactgaatagcgtaagtcagtaatgcatttaatacacttaacttactgaacatcatagcttaaactagcttaccttaaatgtgctcagaacacattactcttcagttgggtaaaaccgtctaatacaaagccttttttataataaaatattgaatatctcatgtaatttattgaatgttgtactgaaagtgaaatgcagaatggttgtatgggtcctcaaagtacagtttctactga

SEQ ID NO: 112881 - DNA, 1049 bp, Homo sapiens
ttagatccctctgcttaaatttttacctcaagtgattttaattcatggcatattacagtatattagataattttcacctaactagacagctgtgtgtatatatgtatatatagatgtgggggttgtgtttgtttgtttgttttaaagggaatgtggatgaggagcccacttcagtcactggtcgaaaagattcactcagtataaaccttgagtttgtaaaagtgagtttgtcacggatcaggcgttcaggaggtgcctcattttttgaaagtcagtctgtaagcaagtctgcaagcaaaatggatactacgttaataaatatatctggtactcaattttatagtttttaaattaaaatactgttttccaaaattaaataatggcctctgttttaatagtgtttaaatattaagtcacttaatgttaagctttcagtgataagttgatataaaggagaggaatgcccagcctacggtactgtgtcaatccaagtaataaatgttaggaatataatttctagataaatagacatatcacccaagggccaagtatgcctaattaaatcagtaaaagttgcttcttttcttcactttttctccaccatgaattggtacagtttctttttgttcttctaattgtaaatgcttaaaacactaaaacgggatgagtgatgtttaaaaatgtttacttgatgtcagaaaaccttgaattgtgtgcatgtatactgctggttttataaacatctatataactatgggcaagtcatttcctttacattgcgatttgagtgtttaaaagtaaatgcaaatagacattctgaagaatccagaatactgagtaaaaactttcataattatgaatcaaataaatatggtatgttcacttaacccaatattctgaaaatatatattaagcctgtgttttagggtaaacttttacctgagattgctaggtgattgaggggagcaggcatgaataagacaaggtcttatgtgtagacaaataaatgagtccaggataataaatgctataatggagctttctacaaa

SEQ ID NO: 112882 - DNA, 1789 bp, Homo sapiens
agtagtccctgccacacagctatttggtttacaattccttttgagaaaatttgtataccagctcatcctgatgattcattttccataatagaaaagactgctgtgttaaaattgaaagctggctatcagactgatctttagaacttctctgaggatttcatgataaagtgataatagaattccaacttgccatcacctcaaaaaagggaagtggtactaacagtgttagaatgtgctgtttttgtaatttgtggaagaatgtaacactaatcataatatgtaacttaagtataattcagctgtgtaataaccctgtcttatacctaccatgtgaaaacattaaaggttttagaaatctgtactaacaaatgttatttatgtatcagctgtttgtgatatagggtctgcctcctttaaatatgatatgcgccgactcagtgaaattctggcatttccaagagcatggtatagaagaagtattgcaagacgtctattccttggagaccaaactataaatttgccaagtaagcttgttatgtaattttaattttggttactgtagcagcaagacctacaattgataacacaaacgtgatcttacttggcagggtgtaccatgtgatgcgttcagtcattcaagaaatgtccattgggcccctctaatatgccaaccacaagggatatattagcactgaggatatatcagagaaccaaaaagacaaaaagttttgtcttctttgagattacattctggctgaataaatatagtttattctataactatcctaacaaattagtaaatttataagttagttaatttgttagtaaatttattctataatgattactctgtaatccttttaaatatccaagttaatcatggttagcgaagcatgggaaacagaagatgctggggacatgttactagcttgcctgcatttgtctgctggatttagatattgttgtaggtaatgaaatcaagagatttttggaaatgaaaactagagtcagttacatagaggtaaatttgagaaaccctaagtctgagtgtattccctcacctgtaaactgagaccagaggtcctgttttgctcttttcatggagtttaaacaaaacactggcatgttctttgcaaactgtaaattgctgtacagctgctaaatagagaactagaaggaatatgtaatgtgattagaaatgatggatgggtgaacttattttataacatagggattttaccctgttactttggattttttgtttgttttgtttgttttctactagcatctggcccagggacacctgattccattgaaggggtaagccaacacctttcccctgaatcatcaagaaaagcttactgcaagacctgggagcagccaagtcagtcagcctccttcacccacatgcctcagtcacctaatgtgttcaatgagcatatgacaaacagcaccatgtcaccagggacagtaggacagagcctaaaatccccagcttccataagatcaaggagtgtatctgattcttcagttcctcgaagaggtaacactgctctttttgttatcagtagccctacagtgttctcaggataaaatcttagttactctcagatttcagccctaactataggaaaataaattcttgaggtttttatgacacgtcaaaaaaaaaaaaaaaaatccccaacacagtaaaaacaacaaaacaaatatttcaaagtattgccatcaagacagctagatggccagtagctttacaaatagataaggggagaggaattagcatatt

SEQ ID NO: 112883 - DNA, 1565 bp, Homo sapiens
ataaatcatcaatacaggggcagaaggtggccaggagcggttcagtaacagctgtttctccacgtataaggaaatagcaagaatagggaaaaaatggttctcccttcaaatatgtttagcacatagcactcagtaaattttagcctttttctcccattatgccacatgcttatgaaatctactaaaattaaccagatgtccttttatatgtttaagataactgtataacaggcctaaaatattcaggatgaaatatagtaaacactattgctgtgtttaggttgtcaaagagatttataatcatacatatattattttttgaatgctattattatggtgaatccaggaattatgggctcatttatacaaatgtacctactgaaaatattttgtcttgagtatattatagaggcttagtgatgttcttttcctaccattagaaccatgctttagggcattacactccttaataataactgtaatttttattttagattaatttcttggactggaagaaagattgatccagtaggtgttgattatattcttcaaaaattgggctttcatcatgctaggactactattcctaaatggcttcaaagaggagtcatggatccactggacaaggttctgtcagttcttatcaaaaagctcggtactgcactacaggatgaaaaggaaaagaaaggcaaagacaaagaagaacactaaaaaagtaatttgatctgtgaacaaattatgattgtgtctgttttattacactggagtgtttttttagtataataatttgaaatataactttaaaataattctaaatttgtggctataattaaaagtttgtaagttaacctgttctagttccatcattctgtgtacagtgaagtattgcatgataatgtaaattttgtgaaaaactagattaaaatatataactgcttgttatggtttataattatataatgtgcaatacaattcctgcatctttaaaatgtctgcagaataactgtgaatttttttgttattggattggccgtaacttttagaaaaaaatcttgttgatgataatgtgattttggggaggtcattaattgctttttcttttttaaatgtagacttatataaatacctgtttgtatatagcttgagtaattgtgatatgattgtataccactaaaatattgttaactattataataaagtcacagtaatggtttaagtctgtagtagtttttcaatctttttctcctttttataattaatagatgcccatgctgtgtcacagctgatcagatgctttcatagaagatgatgatttatacctatattagagttgggccataggttctacctctgtggattcaatgaactgcagatcgaaaacaaacattcaggaaaaaaaaaatattccacccaagttccaaaaagcaaaacttttgtatttaccaagtacattaagtccacatgaatgaagtgatgtgtaggcattttattaggtattgtaaataatctacagatgatttttaaagagtatccaggagaatgtgcgtaagttatattcaaacact

SEQ ID NO: 112884 - DNA, 1152 bp, Homo sapiens
taataaattttaggtaaaatatctttttttttctttagatagaggctctcactctgttatccaggctggagtgcagtggtgatcctcccaccccagcctcccaaatagctaagactgctgcaggcatccaccaccaggcctggctaattttcaaaatgtcctgtagagaaggagtctcactatattgcctaggctgacctcgaactcctggcatcaagagatcctccaacctcagcttcccaaagtgatgggattatgagtgtgagccagtgcacccagccaagatgtgtaatatacataagaatcatctgggccacttgttgattatacaaaattctctctgatttagtaaacctggattggaacccaggtgatcatgaagaaaagaacttgggaaactgaagtctgagatgttatggggaaagcagtttacccagaagcagtcaggagttgcttgtaaaacctagatgtacatattaaagagttaatgtaatataattgtgagtatgtgaggaaataagagtggggtttatgtgtggcagcattgtatgtagccatctgtaaccaaagagtggagagtcagattcctaaaggcctcctaaagtctaaatactaacaagcaaaacctcaaacagaagaatctttgacctgtaaatacgggagacaagacaattctatttcattttttatccaaatataaaagctaagtaaataaattgtgatgactggacattcagtttaattctttagtttatcattatgttttggttttctcttcctctctctccccacctcctctcccactccccaaccttcacagctgtaatgggttgagttgcttataatgccctgatagtacacagggtttcttcaaagagatctcttatattctggagcttaaaagtatattagggcaatccaaggggtgggggaaattcagctttctttgttttaaagttttaaagacgtttgtatttaagttttaaagatgtgagatgttacgtgaaatctccacattttatctctcactagccgtttgacagatagtggagtgtttaccattgccaggcattatactagacactcactgttactccacgtgtgatcagtactctactactggccctattgctcacactgaatctggagctg

SEQ ID NO: 112885 - DNA, 1055 bp, Homo sapiens
taggaaaaaaaaaaaaaggagaataattgctctttaggagtgttgggaaggaaattttttagcttcaaaaatattaaaatataggaattaaaaaagactttgattaacttttttaaatttcaagctaaagaaacagtattggggctacttttcagcaatcaaatgctgcctattttctataattcattttttctttcttctctagtgtatgtctgcctcctatcaagaagctaaatgtaagttgaaatcctacttacaacaacatggctatggatcctggattgtgaaatctccctgcatagagcaatttaacatgtgaaataggcaatccattatcacattaaaaatcttgttttgtttggtgtgttttgactagtaaaaatgtttttaaaatattggtggttttcaactttcagaatcagagtcttattcagcaatgtgcaatgattgctgaaaatttctaaatattcctgccaaattacattgaaacattagggctttttactttttcattttctcagaaaatgacttacctgtttgaatatgtagccattttgtatttattttgatagatattgtaaagccattttcctttttgtagtttaatagagatttccttttaagtttttgctttaaagctgtccatatggctaccatattcaacattgtatcctggcatctcactcagttttttaaaaattaaatattggaagtcaagaataaaaataatgatttgtactcattgatgaattcaacaaacatttgactgcctaatatttgccagtcaccatgctaggtgttagtaaagaaacaatacctgaaacagctctcatgttaaaggagttcatgaatgcaaactgcacatataaatgtagaaaaatattaaccatgttaaggaatagtttgataaagtagttattctattaatagaggattatcgtatgtgcattaaataagattgcccattttcaactgttctacaagatctatctgtaccaaatgtgatttaattatttataatttagattaacagggatttctaagtcagtaaaaga

SEQ ID NO: 112886 - DNA, 1089 bp, Homo sapiens
aggcgtgagccactgtgcctggcctagatttctaatttctaactaaaaacatttggtcatcaaaatgcataatccaaaaagtggaaactgacttacagaatgagagaaaatgtttgcaaatcatagtttgataaggatctagtgtccagaatgtataaggaactcttacaacttaccaaaaaaagactaactgctctatttttaaatggtcaaaagacttgaatagacatttctccaaaaaagatacacaaatggccaatgcacatgaaaagatgctcaatatgaggaaaatgcaagtcaaaaacacaatgaaataccacttcacattcactaggatatctataatattacaaaatattacaaaagcaaaaatggaaagtgttcagtatactggactgaatatttccccccagttcatgtccttctagcatctcaaaatgtgatcttatttgaaaatagtttctttgtagatgtaattagctaaagtgaggtcatactggattaaggtgggccctaaatccaatgactggtatcactggattataagaaggctgtttgaaacagaggcagaggttagagttatgcagtcagaagccaaggaccactaggagcaactagaagctggaggaagcaaggaaggattcttcccttgatccttcagaaggagcatggacctgccagcattttgattttgggcttctagactccagaactgtgaaagaataaataagtattgttttaagctacccagttgtttgtggtaatttggtatggcagccctaggaagctgatgcagtgaggatgtggagaaatcaaaaccctcatacattgttggtgggaatgttcagctgttatggaaaacagacagttcattcaaaagttaaagatatttgctcctccttttcatgcctgtggctggatgtcccacagcactataggaaatgtgagtcaggccttttgcattaagcaaccaagaactacagactccaccttttcacccaaatcatgaatgaccagtgaaaagcaacttatttcagaggaagaagcagcccttgaaatgttaaggcttgggcttgaaagttgaagagc

SEQ ID NO: 112887 - DNA, 1025 bp, Homo sapiens
tgcttgcagatacctgctgcagacagtcaatactaatccacagtaggcattttaataggacagataatactgaaggggtaagcaaaccagatggatttcaagaacatgttacagctactcacaaaacttacagatgtaatgatttggtagagttggcagtaggcttgagtcatggagatcacagcagcatgaagttagtagaagaagcagtacagctgcaatatcagaatgcttgtgtgcaacaaggcaactgtacaaaaccatttatgtttgacatttcaagaattttcacttgctgtctaccaggcttacctgaaacttcttcttgtgtttgtccaggatatatcactgttgtgtcagtatctaataatcctgtgatcaaggaattgcagaatcagcctgtgcgaatagttctcattgagggtgacctcacagagaattaccgccacctgggatttaataagtctgcaaatattaaaacagtattagatagcatgcggcttcaagaagacagctcagaagaactgtgggcaaatcacgtgttacaggtgttaatccagttcaaggtgaaccttgtcctggtacaaggaaatgtgtccgaacgcttaattgaaaaatgtataaacagtaagcggttggtaatcggctcagtgaatggcagtgtgatgcaggcttttgcagaggctgcaggagcagtacaggtggcctacattacacaagtgaatgaagattgtgtgggcgacggggtctgcgtgaccttctggagaagcagccctttggatgttgtagataggaacaacagaatcgcaatcttattaaaaacagaaggaattaatttggttacggccgtgctcactaacccagttactgcacagatgcaaatcaaagaagataggttctggacatgtgcctatcgtttgtattatgctctaaaagaggaaaaggtcttccttggaggtggtgcagttgaatttttgtgtcttagctgtcttcatattcttgcagagcaatctctgaaaaaagaa

SEQ ID NO: 112888 - DNA, 1035 bp, Homo sapiens
agctgtacaagtcacacacctgtgaagctggccctgattagtagtactgtttatgttcttctttttgcttgtcagtattgcattgcttgtacgtcttactttggtaataagaaaaatgataaactaagaaaagaaagggcatcaaatgtgatgagagttttggaatatatacgtataaatatagatatacataaacatacacatatagatataaagagatagataatttttttcctcattgcctaccctctttatttcttgcctaaataatttggtcctggggagtaggttagtggcccagcaccagatggtggagcccaggaggaatgagaacagcatccgcattgagtagggcaggcagtgctgtcatggcatgtgcacccacgcaagataaggaaagcatccaggcagggggcagccacctatgatgggatgctggaggctgaatgaggtgagcactgatggtgggaggagattggtcacattgaggattgatccaataaatatttttaagtaatgggaacaaagtttctcatttttagaaaaaggagttacaaatatggaaaaggagaaaagtggaataaactcggtggcatgtaagactaaaatagaaatattttaatcagtggttttgtcttttccataatatgtgtgtatacatacatatatgtagacatatattatgtattttctagctctttccattgggcaggcctgagagcaatgccattgcaataacactgagcatacctagtgtccagatctcaggggttttgttttttgttttttgttttttttgagacggagtcttgccctgttgcccaggctggagtgcagtggcacagtctcggctcactgcaacctctgcctcccaggctcaagcaattctcctgcctcagcctcccaagtagctgggattataggtgcccgccaccatgcccaacttacttttgtattttagtagagacagggtttcaccatgttggccaggctggtctcgaactcatgacctcatgatccgccctccttggcctc

SEQ ID NO: 112889 - DNA, 1006 bp, Homo sapiens
atgtcaaaagaacataaaagccatcctgaaggagtctctactagccaaatctgggacaatttcaccatcaatacagaatgacagaaacacccagctacttgagagtctgaggcacgagaattgcttggacccgcgaagcagaggttgcagtgagccgagatcacgccacagcactccagcctgggcgacagagtgagactctgtctcaaaaaaatttttaaaatttaaaaattctaaaaaagaaacagaaacaaagaaaatttttttttgatttaaaaaagaatgacagaaatagatattgcctattgaataaaataatcatctattaatccatgaatccatactatgaatttatactattaataactaaaggaaaaagaaagcttttctttacaatataatatgccaactaataaacagggtaggaatgatggaactaaaaaaaagcaattggcatcatagtggaaaatcatatatgcttctatgcaaagaacagacaactttcaatggtaatttacaaaggaaaaataactggactagtaacagacttgttatctacaaccttggttgaaccagataatttgcatttacatttacagtacatggtatattggcaatatccctatatcacgaaagttatcacatgtgagatcaaactaaaaaagtttttgcatattacaagggttctaaaaatattctacccgtatatctctgtgagaaaattctctaaccaagtgaaaattaaattttatgaaaggaaagataagaaattcaagaaacattgatgaataatgactcataatatttacaattaaatctaaatgtgctgggcatggtggctcgcgcctgtaatcccagcactttgggaggccaaggtgggcggatcatctgaggttggaagttcgagaccagtctggccaacatagtgaaatggtgaaacccatctctactaaaaatacaaaaattagcagggcatggtggtgcacacctgtaatcccagctactt

SEQ ID NO: 112890 - DNA, 1024 bp, Homo sapiens
acaaagaaaatggtcaatatatatgttctcctttgttcctttaaagatatatgttacacgacaaggccgggcgctgtggctcacacctgtaatcccagcactttgggaggccaaggcaggtggatcacaaggtcaggagtttgagaccagactgaccaacatggtgaaaccccgtctctactaaaaatacaaaaattagcctggcatggtggcgggtgcctgtagttctcagctacttgggaggctgtggcaggagaatcgcttgaacccgggaggcggaggttacagtaagctgagatcgtgccactgctctccagcctgggcaacagagcgaggcttcatctcaaaaaaaaagaaaaaaaaaaaagatacatgttacatgatgaatgtgatgagcagaaaagaatgagtagaaggtaagagtacctgactgagatttcttatctattcttcagctatccagctcatggaaaccacagtggtccatctctgtgcaaaatgacaatctttcccttcaagactgcaagtcaaaattttaaacttttatagcctaaagttgtttcctgtctctacggaaacttaaaccagggagtattgctttgaacattggtgttttaggcacttttcggataacattgaaatgactatttcctagcatttggcagacttaaacctaacaaatcacaaaacaagaaatataaatgtccaaggaaaaaaagttctaagtaatttttgaattctatagtaattttaaaattcaaattaagccaataatgaattaccactttttgcacgtcaagttgtctgaagattgttttaagacaatgcctaatggtgaagagaatgtggagaaagagactctcatgatgattttggggaaggtttaagtcgacacaccttcttcagactacttgataaaatgtaacccaaagtttaaaaacattcacttgtttaacaaaagtatttatagaacatctatgtcaaaggctggaaattacattctatcaaatgactagacattaca

SEQ ID NO: 112891 - DNA, 1006 bp, Homo sapiens
ccgggtgcagtggctcatgcctatattccctgcactttgggaggccaaagcaggaggatcgcttgagcccaggagttcaagaccaacctggtgaaaccccgtctctacaaaaaaacacaaaaaatagccaggcatggtggcgtgtacatgtggtctcagatacttgggaggctgaggtgggagggttgatcacttgaggctgagaggtcaaggttgcagtgagccataatcgtgccactgcagtccagcctaggcaacagagtgagactttgtctcaaaaaaagagaaattttccttaataagaaaagtaatttttactctgatgtgcaatacatttgttattaaatttattatttaagatggtagcactagtcttaaattgtataaaatatcccctaacatgtttaaatgtccatttttattcattatgctttgaaaaataattatggggaaatacatgtttgttattaaatttattattaaagatagtagcactagtcttaaatttgatataacatctcctaacttgtttaaatgtccatttttattctttatgtttgaaaataaattatggggatcctatttagctcttagtaccactaatcaaaagttcggcatgtagctcatgatctatgctgtttctatgtcgtggaagcactggatgggggtagtgagcaaatctgccctgctcagcagtcaccatagcagctgactgaaaatcagcactgcctgagtagttttgatcagtttaacttgaatcactaactgactgaaaattgaatgggcaaataagtgcttttgtctccagagtatgcgggagacccttccacctcaagatggatatttcttccccaaggatttcaagatgaattgaaatttttaatcaagatagtgtgctttattctgttgtattttttattattttaatatactgtaagccaaactgaaataacatttgctgttttataggtttgaagaacataggaaaaactaagaggttttgttt

SEQ ID NO: 112892 - DNA, 1054 bp, Homo sapiens
agtcgatttagtggtgcagcagtttttcaaacggcctctgagggttttataatctaattgaaggcatagcatgcaaattcaactatggaaaaatctctcacactggaaactcaaaataatctttatcctattgagcaatatggcaagaagcatatctgtaaatataattgagctagttatttcaatgtttactcatcctcattcccagacttcttacctcttcacattattttctctcctacttgctagtaattgctgacaagcccgcttatactgcaacagtgtcactaataggagaatcaatcgttttatcttccagtgtgtgggtagacacaggtgttgtacccactgatacttatcaatgaccaaacaggtgatcaaagcactaccccagtcagcatgacaaagcagaaagctgtgcgatttggaggtgcacattctgggtttaagtaccaggttctgccatgtgcttagccaggcattaggcaaattgccaccaaaaatatttgcttcttagcttgctttttgtgaataacgccagctctaattactggatagatgcgttgatcaaagatgaaactaatttgtaaacttaagtaccaaatacttgttatattttttcaataaaacaaattttgttgcacttaatggtagatgttttaggatctttataaatagtaattaatcctcctaacaaccctttgaggtagatagcattattattcctattttaaagatgacagtagtgaggcacagagagaaaaatttacttgccctggctctacacctttcttactgcactatgctaccttgaagaactcctgctggttctgttgttataattgaacaaaactaactgaatggtagtgcctataaagagagactatttacacatgaagtccgctattcttagtctttatggactaagaagtccatattcttggtggaataagaagtcaactattcatattcttttagaacatgaactattgatgttttgttaccaacaactgaagttagagggataaacaggcaatatgttgttagcttcaca

SEQ ID NO: 112893 - DNA, 1008 bp, Homo sapiens
tgacaaaattcctaaaacattccagaattcccttattcatcttggactcaacactatgaagtctgcaaatatatgtataggtcgaccagtgttgcttactagtttgaacggaaagcaagaggtaagagtctttttcatttccttagtttagaaatacaaactgaacattgcaaatccaagaatctaaactctgaaatgcttttgagtgccatggtagtcaaaggaaatgctcattggaacattttggatttcagatttgggatgcttagccagtaaacataaggcaaatattccaaaatggaaaattcaaaacgctcctggtcccaaacattttggataagggatactcaacctgtgtttgagatgtttctgattttaattttcaacacaagcaggaataaatgaaaaactgtattttaaaagacattaacatgtatattaactctgttcctttgctgtctatgactctgctgggcatagtagcccctaaaatgttatgtagagagaagtgttgcctccggcgatagtgacagtatttctccctgtcagttagttatatttctttataaaaatattattttgggggtaagaaggtcacctgttctgtatataaatattttactattctcccttgtttcagctgtttctccttgctgtcatttttcatacctgagattctaagcctggaacctttcctggatcatttttggcagcttggctttcttttctgctaccagccccttatctttcatggcttcctttgatgcttctctgatttgctggggatcctttggaaatactttgaaattttttgtctgctgatggcacccctcctattcttttcatttttctggcttatgctttaaaggtcctttactgtgtcttttagaagagaggactataaatgtgtgagcttaagctagaaattttcgctcctccctcttaacatttaaatctgataagacccaggttctgacaaagctcttgttctgtgtccctcactatttc

SEQ ID NO: 112894 - DNA, 1019 bp, Homo sapiens
gtttttgcctatgacaataaaaaatggatttttcatcagattctttgtatatacacatccatagataatagtgctcatatgtgtgcatgtgtgtatgtatgtgttagaagttaatgttttacaaagcagtatttaccctttctatattcagtgtaccctgcatttcttattctattaacaaagtgctgaatgaggctgactgaaatgatttcattacccttgtgttttgaagaacattgatttaggccactaaggcaccagattccaaatgatattttcatggctatatgtttctgaaaaatgcccatcatttcaaaattgtatacattatttattttaaggttgcaggtggattattcttttgattaagtctatattataaccatatacatgtaattttacatcacagtttagtttctggtgtacctaatgctgatttctgttcccttcttatccttttacagtgacaaagatatggaaattaatgaagaagaactgactggttgtatcctgagaaaactaggtgagacaaatattttaaattgttttcttaagttttaagctgcaaggcatcagcaaataaagtgtctttgagggcttatatatgcatagtagttttcttcaaaatagctttgagaatattcccctcaatgaatgaatatacttttaagatagggatgtgctacttttcctggttaattggcagttgagcagtggaaagaatatatgacttgtctgtggaaagagtcagtggtagaattgagacttttaacctttgcattcttgccctttccagtgacagatgctatcttggagtgttggtttgggtgtgccattttcatttagtttattattgaatatggaatgcctggctatttgttgatgtgattgatagaatctgagatctactgagtgtggaggatttcagagaatcatttccttctgtctccagatggtgttataggggaatattaggtcctcaattttttatgacaattattttattaatactctgtctt

SEQ ID NO: 112895 - DNA, 1898 bp, Homo sapiens
gacccatgataataacacttacaagagaatcatgtataaaatagtgtcctagtttgtccatttacagtaagagatgtgactgttaagcagaccaaatgtttgtgtttatggatgaccatattttcaccttgatggcaaatatagagagctgtcttataattacaagggttcttggtaggtaggaaatcagatgaaaggcttagtgttggagaatcttaattatttcaatctgctgtctctttctctgccactgggataagcctgttgtggattagtattcttgcctttgggcaaggaatggaaacatgtgatactgatgttttagtctgaatatttttaagggtctgtttttgtacttctaaacttataattcatagattcgctgtagtccatgcattgtctgttggcacattcagtataattgattaggtttgagctttttttaaatttttttttttaacataaattgcattccagttatgcttgtctctgggtcatctgaatagaatattggataatttctacaggtggctgatcatgatcatagttctttattatttggttttcctaatttcattttcagagagtaaaaatacctatatattcaaatgtggctgatacttggatattggttatattgttgactcttattttcaggaatttaaaaatgtatccatattaaaaaaactagtctataagcgaagactttttagataactttctaatagaatcttgttctatttgagtattatatgtgtcagaatcctgactttcaagtaggggaaaaggactgtttaaaacaattaaaacaattatatggtacatattatatatatgttattttttatgagaatgatacagttaagatgtgagaagtaagagagatgtcatagtagatggagaggtgagtattgtaaaactttctacaggaggaagcatttaggctgaacactgaaaaatgtataataaaagtaataaatgtataataaaaatgtattactaataaaagtaattgataggtaatgaaagcgtaagaaataggacttagtagcctggacagttagatgtttcatccttgtctatacagccagtgtgtgcctctcacttttttttttctaactttcagaaaaataaatttattttcattttattttgttaggaagtaagtgaaggacaagtgttggttcttggggccacaaatcgccctcatgccttggatgctgctctccgaagacctgggcgatttgataaagagattgagattggagttcccaatgctcaggaccggctagatattctccagaaactgcttcgaagggtaccccatttgctcactgaggctgagctgctgcagctggcaaatagtgctcatggatacgttggagcagacttgaaagtcttgtgtaatgaagcaggtgagtgtggtttgctatggtgagtctctattgatgcacttatctccagtttacttacatacaaataatttatattttacagatttcttaatggaagtagctttgtttctaattataaaatgtgtaatttttatttgaaaaaatttttattggaaaaacctagatgattcagaagactataaaaaaaaataaaaatcactcaatcctacctctaaaggataaccaccattatagtgtatacagtcagccctccatatccttgggctcagcatctgaggagtcaaccaactgtggtctgaaaatattcaggaaaaaaaagttaaaacagtaaaaaataataaaaacttaaaaaatatagtatcacaactacagttgacccttgaactatgagggcttgaactgcatgggtccacttatatatgaatatttttcaataaatatattggaaaattttttggagatttgcaacaatttgaaaaagct

SEQ ID NO: 112896 - DNA, 1652 bp, Homo sapiens
agattgtggacctgcatgtttgtgctttttatatgttgtgtctctgatgattttccctcttctggactgccgcatagtgaaggaagctctgtactttttaacaaaagttgtgcacgtatgtctagtaatggcatgaattgaagtgattcagaatttcttagaacatagtgagctatgcttcctgattgtttctgtaatctaaaggttattgtttgtaggatatgaatacaaaacctctgtagtgtttgtgtagattgtacatgccttttcagaggatagaaggtttacaatccatactttgtgagagtgataatgcgtcttttacagtgtgcttactctcaacatctctaatcttttattccaggttactaagtattttccatatcttttaactttgttcccataatgaatatgaaaattggaagcactacaataggaagtgttgctttcaacccttagatctcacattatctgagcagataacaacgtttggtgtttgtgattgggtgtgaagcttattttcaaaagttatattttctttataattaattttttagctagagtgtggtttgatatgtcgtgacttgtccaaagagctaatgttttgtagttcacctttttaaagcaaagagcagctgcattttgaaatgttttatctcaaatgggcaagttgtttacaagctagactctaacacatcctgacatttagtgtctgtgtttgtattcctgctgggattaggctgcctttctaattaattagttgcatagccttttattaattccctcaaaatttataatgttttaaattaacaacatagataagcatactgcattttttgggaaaacatgaaatattaattatgtagcagtgacataagtttcgtaaactctgttgaatgttagaagatgcttacaacaatgttttccaaatatagggatttattataaacttatccttctaaggctgcctgtgccatttcaggagagtgaatataaatagatcttgatttcttcaagaagtggacttagtcattttgtttatggtgaaaggaagtatttgctttgcgtctctaagaattgtctttagcatccttgttaattacacatcatttcaacatgttcttaccaaattctcaggccttgataaggtagcataacagaacaggaagaattaaaactcatatttaaataattattttgttattacagcacttaaatctgtctagtagcaataccgaatctaataattgtaactttttctgagatggaaaattttatctcttgtccagtgttctgagatatttttagctcatttgtccctccacccccaactagcttactttaacagggatttatggagcatctgctatgtatgtaatagtccaactcttatgaaaggttctgtttctaatattttttactattttttcaattctgtcaacgttgttttctaagttagaattaaaatattgatactgtagaaatttgatattttaaaataaagtccagggaaataatgggacttattgcaaagcttatggtgagctctacattcagatgctatcattatactttatcagctgataaacattgagcaagctattcaacctcttgggttttatatcctcaccagctaagtagggataacacta

SEQ ID NO: 112897 - DNA, 1217 bp, Homo sapiens
tttaattattctgattagaaagtactctaaataaagatattttcctgttttagtaataaaatattaaggaataaacttcattgtatatgtacatatggatacttagaactgagttttttcattttattaaaatttttttaaattaatagactttttttagagcagttttaggtttacagaagaataaagcagaaagtacagataatttccatgtaacttcccttttttccagcttctcccattattactgtcttgagttagtgtggtacctttgttataattgatgagctaatattgatacaatgatatttcattttaaactgcagtttataatttctaaaactaccatccctcaatgttatttaaaccagctctgtgttgttgctttatttatagtttttttttacttgcgccacactttttacatacttttttaaaataaacttctttctcaatgtattgcatgtatacataagagagcataagctaaaatatccatgtgttttccaaagtgaacacacttgtgtaaccaccactcagatcaagatacagagcattactagcttcctggtacctctctcagaccctttcccagccctacatgctcacctcaacccaaaaggcaaccactctcctggcttcgaatgccatagatcagttttgcctgttttgccttctcttctttcacttgttttatggtttgggagcttcatcattttattctgcatagcaggagttcatttttattgctgaattcgattgtttaagtattatgagtaatgccatgaacattcttgcacatgccttttgctgcacaaatgtatgcatttctgtctattatttgtctaagagtggaattattgggttataggattcttgttactaaatactgccaaaacgtttttgtagtgattttaccaatttacctttctacctgttgtgcgtgaaaattccagtttcttctcgtgggtgctgacatggagtttatagcagtatttcattgtggttttagttccctgatgactgagtctgagtactttttatatttgaattgaccatttagatgtctttctttgtgatgtgcctgtcaagtatctattcaatttttctgtagggttactttttaaaaatatattgatttgtggaagttattaatatagcttagttgtgagacctttgttagatatatgtattttaaatatcttctactctgtggc

SEQ ID NO: 112898 - DNA, 1042 bp, Homo sapiens
gagccttctacacttattcctccatccctgacccctcactagcctccccttttagatctctcccttgctataatatcaaatcttacatgtatgcacatcactctgaagtttgcttcgctcttgtatttcaaaatcacatttccaactgccacctgaatgtttgcttgcaggtgttttcccagtaccttaaaactttgtaattctagtttgaatgtatttaccaaaagggcaggggcaaaagcatgttttaattttaatattttactcttttaaaagaagttccccaaacaaattattttgataaatctttttggctttttttatggatgttgttttgtaaattctattttatatttgtaaataatgctttctcatattaagtatttgtcatattttcattgccaaaactaagtgcttggatttttacatttattcttcacattcttccacctctcttccaacctctcatcccctcccctacaaggacaaaatgttttaaatgctgtaatcttgcatggggtttgggttttttaatatttttattggtgataattctgtcacaggatccttagggtgtcacttttccagccagaaacctctgtggccggtggcacctctgcccgagttatatcctcgggcccactgggcttgttctgcccacttggtccagcaggctgtacttggcttgtgctattgacctggatcctacacctgccaagggtgagccaggcgcagagcagtgaagggggtgtgagtgagcccgaggtccggccactgcacacagccaggcatgctggctgcagtggagtggacagccccaggtgcaggcacaggcaccggctctgtgtgaggatgtggctggaccaggcataccacaagtgttttccaccgtgggcaccaggtaacgtggtggtacctggaagcttggagatgttggaaacagcagagccccaaagagagtgtcacagctctggtatcacagctctgatcacagcccttgcatctgggctccccagagggccacagctcctcttcttctcat

SEQ ID NO: 112899 - DNA, 1652 bp, Homo sapiens
taactttggtctgaaatcagagcaggcaaaaagtttttctgggactggggagaggccaggcagtagaagcaggcacttcggagcctgttggggcagggggtgcttcctgggttctcgagagtggagggatacctgggtccacagccatggctgggcagctgcagctgtgcctgggtgagtggggctcacaccccaccaacttggaaaagagcagggctcctgcctgttcccagctcccactggcttcgtggagtatgcagccctggccacgcctcccccactgcagccagtgtcttcactgttgccactccagatgggccaccggagccatcaattcagtctgtatttatgaaggaaaagacaaatcttgtgttactttcctctctttataggtctctgtgccttgcggagaatcctgaaaaaacagcctaacctccctgatgtcaaggtggctggactggtgaagattactctgaaggatttcttgcaggcaatgaatgatatcagacccagtgccatgagggaaatagcaattgatgtcccaaatgtaagtcatttatgtcccacactagctacactgtttgaattaaactctgaaaaaaatttagagttcagggagactgacttcctaggctaaactttaaaaaaatatttttcttaattgaaagttttattgagatagctgtaaattcagtgcagttatacgaagtaatgtagggagattctgtgtatcctatacccagtttcctccagtggcaacattttgcaaaactgaagtacaggctgggtgcagtggctcatggctgcaatcccagcactttgggaggctgaggtgggcggatcacttgagcccaggagtttgagaccagcctggttaacatggtaaaaccccatctctacaaaaagtacaaattagttgagtgtggtggtgtacacctgtagtcccagctacagctgaggtgggaggatcatctgagccctggggaatgttgaggctgcagtgagccatggttatgccactgcacttcagcctgggtgacagagcgagaccctgtctcaaaaacaaaaaacaaaacacccaaaaaactatattacaatactaaaaccaggatacccctattgatacaatccattgatcttactcatattttttcagttttacttgtgtgtatgtgtttatttagttttatacaattttatctcatgaaaaggtttgcatattcatcacagatactaagtaattccatcaccacaaagatccctcatgttgtcttttataatcacacccacctcattcctcccctcatttctaaatttttatttcagaacctttatataaatggaatcatactgtatacaaccttttggaattagcttttttcacatatgagtaagatcttttgtctttctgtgtaccttaacttatttcagtaggcataatgttccccagattcatccatgttattataaatgacagtattttcttctttttataaggccaaataatattccattatgccacatttctttgtaccattataccacattttctttctctgttcatctgttgagggacacttagattgattccctatcttggatgttgtgaatagtgctgtagtgaacatgagagtgcagatatcgctttgaga

SEQ ID NO: 112900 - DNA, 10043 bp, Homo sapiens
ttggggatactttatatgctaaagataaaaatgattgtgtgttctataaagatctacaaaaatatgcttggaagtagttttgctaaaaaacaggtataagaaattagatatatagatgagaccttggatgacttgactcaaaccactttcagacagatgaaacgtaacttctaaatctttctagaaggttagattttacgatatgctcaatcatttaaacagttatttatatgagacttacaagcagaatttttttttttttagtatttttacaatatgcagttcacattttatgtactcctaatttacttcttgttattcttggaattttttaaaggattttcctgattcttaaatggttctattcttttttgcagttcttctgttaatgatatgttttttatttttttttagttctctgtttgtcctggcaaaacttatatttggaaaatgttctatttttcaggtatcctggtcagatataggaggactggaaagtatcaaactgaagttggaacaggctgtggaatggcccttaaaacatccagagtctttcattcgaatgggtattcagccacctaaaggagttcttctctatgggccacctgggtgctctaaaacaatgatagcaaaggctttggccaatgagagtggactgaattttctagctataaaggtagggtgttaaattttttaatcgctactctctcttggcctcccccaacccccattctctgactcctacctttaggagaacgaataaaggcatcttaaggagcagtgattcttttttttttatttgatgttgatggcaatataatatagggagatgagtgataagaaataaattcgtgcatgtaatcagcaaatcatggtagacattgggaagactgctttatttagtttcttgattctggtatttcttatatccatgtgtaacagaagctaatctttttttttgtttgtttctacatttttaattatagacttttgcttaaccaggacttaaagataaacatgacagtgaattcaatatttacatacctagaattttcaaatgaacaagacacttgttatggtacactaaattctttaaaaatacttttccattcagaaagtatatgtgcattgtttttattctgaaccacacacacattttatttgttcattgcttcgccccgattaactgggatagataatctttcatgatatgtagttgtacacttactttaggaccagatattaattttatgtaacattatgatatatccagatacttaatccacacatataaaactgtaaatccatttctgtggactgtatcacaaaaatatatacctaaatagattaactatcaattcatttcagaaaaggcacatgatcatctgttttgatattaccagggaattttttacataacagaatgcattttctttagcgtgatcttggctcactgcaagctccgcctcccaggttcatgccattctcctgcctcagcctcccgaatagctgggactacaggtgcctggcaaattttttgtatttttagtagagacaggtttcactgtggtcttgatctcctgacctcatgatccgcctgcctcggcctcccaaagtgctgggattacaggcgtgagcgactgcgtctggcccagaatgcattttctgtcttagaacattgaaatcattggcagtttgaaagcacaaaacttcagagtagtttgtcaacttttggctttacttaagatttttatagaatgatacttaggtgtgattaagctgtttgttctttaagaatcagtatcttcaacatattttttattttctggaagatattggagagtaaagatgggggaggagaccatttacagcatgatcacttatggggaatcacaactacagttttaaaggtttcaggtttatttgttatttttttgagacatggtctcactctgtggcctaggctgaagtatagtggtgtgattatagctcactgtaacctcaaattcctgggctcaagctattcttctgcctcagcctcctgagcagctaggactacaggtgtgagccatcacaccagctaactttttaacatttttgtagagacagggtctcactgtgttgcccaggctggtctcaaactcctggcctcaagcagccctcccaccttaccctcccaaagtgctgggattataggagtgagctgctgcaacacagcaaaggttgcggttttaagggttgaagtaatgagtgattttgtcacttcccaggacaacttgatttctccttggtccttgtccttttatcatgtggtaatggggatggctgtgtttactggcattttctagtctttttactctcatctccattttttctgttcttaccttgtatattctacaattgtatattcatagtattagaatttttcttgtctactggaaatctaaaatttatttaagaacctgtgagcgaagtcctcatcagataagttttcgacttaactcttaagagcacacttattttcttacaaactagtatcttactttttctgtgatccaaggtaataattttagatactactaagactgctttctggactatcctagaattacttagaaatatatttattatcttttttgaacataaacatttcataaccttagacaatttcatttttagtctttttttcactatgaggaaattgtaaatgattctttgaaaggtttaactttgtacactgctatataaaataaccaggcacacattcatttatttgagctttttcattagatttttaggtcacagacagaaaagccacatgatgttaacaaattatcttcatcaattgagttcataactcagagattattacatgtcctagttactaattttgatttagtgtggatttttattcagtttagaatttagtgtggttcgacagtattattcaatttttgaatctgtatggaggatatacttaatgaatgatgggtttttatttttcaaattgaatatcccttatcaaaatgctttggacctgaagtgtttagattttgaatttttttgcattttgaaatatttgcattatacttcccagttgagcatccctaatctgaaaatttggaatctaaaatgctaaagtgggcattttctttgagtgtcatgttggagctcaaaacgttttgaattttggagcattttggatttttagatttagggatactcaacatgtactattcgttcaactctcctataggtttaaaatttttttaaatacaaagttgggaatatgaaaataatttgtcttctactagcattttcattggtccttttattttcatctattcagtgtttgtgaggaaagttttaaagtaacaataccatacagcttatgtatgagaaaatggagccaaagaagttgggaattcatactctgttctctttttttttgagacagagtcttgttctatcgcccaggctggagtgcagtggcacgatctcagctcaccgcagttcccacctcccaggttcaagagattcttgtgcctcagcctcccgagtagctgggataacaggcaagcaccccaacgcccagctaattttttgtatttttagtagagacagggtttcaccatgttgcccaggctggtctcgaactcctgagctcaggcaatttgcccgcctcaccctcccaaagtgctaggattacaggcgtgagtcactgcacctggtcctgttctgtttaattttaacttcctgtttaaaaaacttggcaacttttgttcaacccaaatgtttggtttcaacctatatatttgttttctacaagctttaagtgttaaaagttagtttgaaattttgaaataacaaatcttacacattttgaaagtgatcagaaaaagtagacatacactagaattctctagccagttaggaaacacaagtattttaaacagattgaaaggaaaaactccctatcacttttcacaatggtagttactacttttaatcttcaagatattttgatagacttacacttcttcctctaagtttatgaaagaaccttttagcttcctctatgcatcttttctgaacagggattaaaagatacgtactgtactcagggtggagacttcagcttggcttgtgtgagctcttaatgccctctggcatatatatgtgtttttgtgtagattgtgacatttgacatactgtgtaagtttagtttgttatctgggacagttacgtaaaatactttccagttgaaatttcctttctgcttctctcttgcttttgtctggagtgctacaatagattaattgccctgggatagctgcattgctttactatatgaagaactgtcactaattctgcaagaaatgtggttaggtctttgacagggattttcagcaaataattattctggtaaatacaggaatgtaatgagcttagtatatccttgactttttgggaaattttcttctctatacttgtctcagagaggaattgtataaaatagatttcatttccagaaaaacctgtggtttattcaaagtagtgcacaattcagagtacaggtgctccccaatttaagatggatttacttaagttttcgactttacaatggtgtgaaagtgatatgcactctgtggaaattatacttcgaattttaatccttttttttttcctctgagacaaagtctcactctgtcgcccaggctggaatgcagtggcgcgatctcggctcactgcaacctctgcctcccgggttcaagcaattctctgcctcagcctcccaagtatctggggttacaggctcccaagtatctggggttacaggcatccacgactatgcccgactaatttttgtatttttagtagagacggggtttcaccatgtaggccaggctggtgtcggactcccgaccttgtgatccacccgccttggcctcccaaagtgctgggattacaggtataagccaccacgccaggcccaaattttaatcttttactgagctagtgatatgcagtacagtactccctcatgatgcctggcagtaacagtgagccacagctcccggtcagccattgtgatcatgagtgtacacagccaacattctagaatgtactgtgttgccacgtcactttttccaactgtaggccagtgtaagcattctgagcatgtttaaggtgggctgatctaaaatatgatgttcagtaggttaggagtattcaatgctttatgacttaggatattttcaatttttgatgagtttatcaggacataacccccttgtaaatcaaggagcatctgtaattactatttgtcatttaactagatatattaatattctcttatcaaaggtacaagataatctgaaatttaaaaattccaaattcatctttaggcttctgttttttaatttttgcatgggaagctgcatagctcttttaattacagaatgctttaagattacaaataaggataatgattttaagaaggttaagtgacttttcgaaggtctaagtggtagtgatggcactgaaatttagtctcagaactttctgactcaagagtctgagctcttaaccactgtattatatatatgctcttccatttccctttttgttttttttaaaaaaatagaactagtgtccaatggcttttttcattaattacacaaagttaccagggaagatagtttaagtagtttctgtagggtaggtttagagaagtggaaagatgtttctgggaactggtttgaaaaataattttgtttctctaggacaaagaaaacagaaaaataacatggctttggtctaggagtaaaagttaataggaaagggcaatcacagccaaagatacaggaaactgttcaatgaaatagaagtgcctggaaaaagactgatggtgggataatggggagcttaaaatttacctgttagtatataatttgtgcccttgatattgagtatgtcacgatgaaaagaacactaagctgggattcacattgcttggatttacttcctaaccttagcactttttagttttgcagccttaagcaagttctgtaagtctcatttttttcatccagaaaagtataacatttgtacattataagctttggggagcattatgcttaaaaaggcaaatgaaaaagtttttggggggcataactccccactccttgagtgtgggcttctttccaaagaatttaatatcaaaagaggggaggggaagagctactgtacaatggtgaaacctgacaagccgtgccacagccagatgatcaaggttaacatcttcagtgataagtcatgttgacagtacagttgatgctttgaacaacacatttttttaatacatttttttttcagtatagttgcccttccttattgtaggttccacaaccaaacacagattgaaaatataatatttgtggtatatggaaactcccaaataaggagggctaactatgtgtcctcagattccacaggctgactacaggacttgagtatgtgtgcattttggtattcacagtggtcctggaaccagttcccgtagataactgataaatgactatatatacccttggataatgtggtgataatagcactttacttctgttgtcttcctcctgagtgctcataacccctctccaaccatgagaaaaattttaggcaaacccacgttaaaagacattctgtaaaatcactgactagtactcctcaaaactgtgaaggttatcaaaaacaaggaaagtttgagaaactgtcaccaccaagacagtacccaaggaagcatgatagctaaatgtaatgttacaatatcctgtgtaggatgctggaatgaaaaaaaaaaaaaggacattagggaaaaattaaggaaatctgaataactatggtctttagtttaataataatatctcaatctgggttcactgattgtaacaaatataccatgctaatatgagatagtaataataagggcaacagtgtacatgggtgggtgggcatatgcgagctgtttgtactatctgctcaattcttctgtaaatcttaaactttgctaaaaaataaaatatatttaaataaattttgaggtcagtataatagatctgggcatattgtagatgaagtaattgaagtttaaaaggctaactctgagttctgtactgcagtgaacaggatgcatggagtaaggcaaagaagagtcatgaagaagattgtggatttcatgggtgagggctttgatgacctctcctattcatagtccccctgcccataatgatagtggaaagttactgggaaaagccctgagaggaacttggctggggaacctgggtttggggctgccctgaacttgcctgtttcactgcacttctcagttgaagcctataaaggtgtgtgttagttctggccccaaacccagaccccaacactataaagaactctttctcttagtgttttggttattttttctttcaccttgggtgcagcttccagtttagtctcaccaggaactatgtcatttcatgccttttgtggatcctaagtctgtattctccttctataggtttattactgtttgggctcatctagagtctgaaaccttttgagtttctatttaatttcctttagagttttgtttttttttaactttaaaaattcccttgacttcagcaaatagtgttgtattatgtgccttatttgcttaaatcggcagttattaacatcaatattaaacaaagacatatacttagttttatccctgtttgaatgactattagggaataactaatagtaacctgttattcttgggacaagtggaatagttattgtgccattgtcagttttacaaggttatgaagaagttagatcagatttacttacatttgtcattatttgtacagtatactatgttaaagttgtggcatcatatgttaagactatatatatgttattttttttgagttgggcttttatcagttgataaagctgatatataaaaaaaagtcttgatgtgaaaatattccataaataacatttatctaaaagcagaaaatgacaataagaactataacaaaacctttagcatttggaatctaagaagacctagagagatttagaaaaagaaggataattttataaggaattttataagaaaaaggataattttaaacttataagaagtttaaaaataagcacattttattgttgggtttaattttttattcatggataaattagctgatgtagagaaactagttttttctttctatctcaattcctttttgaatgaaatttagaggtgaaataaatattacaatgtcatgtctgtaatacttttaaaaatatttgtaaaagttttacaattggaatagcaaaaataacaccttctgtgtgtcaggcactgtgcatagtaaacaaagatatattagatgggctcctcgttatgtatcaactcattatttagtgggagagatatttgactcaacaactaacatgaagaaacagttaacagaatctgcagctcttggttgttgattgtatgtgagaaatgagaaagaaaagcagtcaaaggtgataaaaatttttactgtcaatgactggcagatggaagtatcctaactccagggagaaaaggagaaacaggttggaggtgagagagaaaataccagtgttgagtttgaaaagcctttgggacaaaatgttgaatatgtcctaaaggcagttgtatatatggatttgtagctcaagaggatgattatttcgagagatgaaaatatggaaattgagatgaaaatgtggaaattggaaatcagtgtttgagattctgcagacaagtcagcaaaggagactgagagtgacaaaagtagtcattaatagcagaaggggatttcatgggcatgtaaatatgtgtaaatacacattttacaacttgcctaattgtagccagcatggtccctgcaatgtaagttctgaagaaatgtgtcatttttctttttcctgaatagaatgaatgaatttggggaaggattgtattatactttatgagaggaacagctcgaattctgttctcttccctgccagcccctcttgcatttcagggtttttacttgcccacagcattcttgcctagtaattaaaacctattttcaaactctttgaagtgctttcccagaatggccttctgtatgtgctgatactgtactttttattaattttcaagttcctttactcacattacatatatgtaattctatcttatgtgagtttggatttttatgagcatattccataacatttaaccatagttaacacttaggttaacgtgccttccccagacactttagaacttataaaaacttcatttgaattgtaataactaaaagcaccaggcaggtgtcagacacatttaaaaagcccttgggaggactgaaaaaaacccagtagtgattaaaggggcaaaattgtaagaacatgaggtgtaaatgttatactcgagtttgtgactgatatgatgtaaaataatgaagcacagtaaaaagataagtcaggtttacttctcactagattaatagaacagctggacaaatattttcacatgtgtttatgatatttttgttattttgtaaacttggatacttgaaatattggccatggaatgttaaaagtaatgctattaaaaataactcaattaatggtacttattaatggcagtttttcttgatcattcttatcagtaaagcacatgctatctaggaggtaaaatatgtggcaagactaacatacattcttaaaagtaacataacttatgagcaaatacgggactgagactatactatatatacctaaactctgtagttagatataaatggtctcttgtttataacgggtactaataaaattcttattttcaaattagcctatgctactatctattaagaaagaattatacttcacctttgccactcgatctgctcaccagaaatacatttgaatttgaattgctggtactgtgtaaaatcttgttttaaatt

SEQ ID NO: 112901 - DNA, 1032 bp, Homo sapiens
ttaatcagtgggaaaaattacaagtgttacataacttttaaacattttgtcaaaacattaagaacgttcattcttggttataaatgttgaggcagtgcattttggctgtataacagatcccttgctagtttccctacctcttaacttatttctttgactagcccttcattcacacactgacagcctagtactccattttatgaggacacaacaatttatttactcatttttatgttaatgaatttttaagacacttccaccttttatttttattgttgttataaacagtgctcagtaatattcttattcattttcttttgtatattggtaagagtttctgtagggtatacgtatctagaagaagttgttattgttattggacatgtacgcttcaacattactagatagtttgaaattgctttttttgtgtgtcattaattttttttgcttaatttgtatcaatcaattttttaaatattttgaagattgttcactccttagcaattatgtcattgacatttttgatgacttttgatcttatagacaaaagtgaactctttcaaattatatgagattaatctacatcagaggtcatagtctttagacataatctggcctgcagtgtattttggtccagctccctagctaagaatgaatttttcatttttaaagggatattaacaagaagaatatgtgacaaagactttatgtggcatatacagcccaaaatatttactctctggctctttatatttcgtctttttagatcccacaatacgtggaaaactgccttcaagtttatttacctcagtgacggctgtgggtgtaaacattgtgtcgctgttacatagtctaacctgtatctaaaaataagcttgtaaaattgatttggtattgtttctttttcttcaaaatccttagaagtatgagaacattttgcctcagcataattaatgtttcattgtttgtctttttttaagttaaatctgtttggtagttgcattatttaaaaaattgagatatggaagtatt

SEQ ID NO: 112902 - DNA, 1086 bp, Homo sapiens
ttgtgcatgcatgcatgctcgtgcgcacacacagagagagggagagagagacacacacacatgtctcttgttcttcgggatgtatgaggaactgtgtcagaatagccagatgctcggagaaacatccccacaactgaggtcatctatcattatgggacaatttaattcataacttcttgtggtgactgtttatcttaagagagtagatatgtatgtggtaaaaaagaaagtctgctgtgtttcttacaatatttgatattctaggtacttgagaaataagaaatattaaagttcagaaatattaatgtcaaaaaatgtgcatcttcagatctggtaagtagacctgcttagagctagccagtggttaggcctgagaaatggctgttccatcttctgtgcctagcaccacatctgatatagtgtaaaaatgtggatagagttatagacagatgatgaataagttgttaaaatattatgattagtcacagcctttcctttgtattgatgtgtggtttttggaatgtagaatggctttaacttttaaggcacaaataacaaacagagaaaataagcatgctaaagggattaataagcagattttgtttattttctcttttgtgtatattttttctacttcattggaagaaatatacatgattgcatttataaagacactgaacagttgttttcttttcatgcaggggcctgaattaatgaataaatatgttggtgaatctgaaagagcagttagagaggtaagaaattgtgcctttagtggcactcagcacaggagaatcacacttctgtcctgtgcagcttcccttttgttttaggtaacagactttggcatttccgaagtcagatcttagtggtatttttttttcttcaggtaaatattattttattatttaaaaatgcagttttgatcatctgcaatacttcagttttgtttttaaacatcatattaccagcccttttaaaactatcattttttctgataataatagccagcatttctgttaaaatagttaatgctgttactaatagttaataatacctatcatttattgagctcttactgtttca

SEQ ID NO: 112903 - DNA, 1051 bp, Homo sapiens
tcccaggttcaaggtattctcatgctgcggcctcctgagtagctgggattacatgtacatactaccacacctgactaatttttttattttttttagtagagacggggtttcgccatgttggccaggctggtcttgaactcctggcctcaagtgacccacctgcctcggcctcccaaaggttttacagacgtgagccactgcgcctggcccgagtttatttcttaaaaacttatatttagtaatttttttgtggtcaaaggacatgaagttagaggatagtgtgtttagaactggctttgtaatggacttggtacgtaaaccaaaggaaaaaaaactagcctgctttctttgcctgtttctcaagaaatcgggattgtggtgattacctaccttctgatgtgttttaaaaatattcttaatatttatgaagaaacatcagaaatatcctagttgctgtggatgcgtaatgagttttttatttcacatagactttaggtttcatgtgaggaatgggtttgcatcttactcagttttttattctaatttctgtcaacatatttaccatgtagaatataaacattgattgaacaattctctatgtatttgatgaactattttaaataatcttatatcttgttttccagtgcttttatttctgacatttatttaaatatttttgttttggaatgaaaatgaacatggttgatgatagaggaaaataaatgatttgaatacagtttgttttgagatatgataatgcagtaaataaagtctcaaatgcatacttcatatttgaaaatagacatgatttctcttgttatagactatagaacctttaaaaattaatagataatagtatttgaagataagtaaagatattttttaaaccgtactttcaaaatcagttctttaggtgctgggaatgtagccgatcgtgttttggctcagctcttaacagaaatggatgggattgaacagctaaaggatgtgaccattttggcagctactaaccgtccagataggatagacaaggtaagagagaaggcattgt

SEQ ID NO: 112904 - DNA, 1689 bp, Homo sapiens
tgccctgggtgaatggaatcttgactgcatatgccccacttgcactgcagctgagggcctctggaaagcaccctgttccaggttttatacactgagtatgtgagactcactgggctaaagtgttggaggacatcctgtttttaggggaggactggagtagaacctgggctgttccagccggtccctccctgtctcaggatgttgcatttcctgcacatgctacagttattcttgagagctacgatgggagagagagaacttggtcattccaagaccacccagagagctgtcctacaaaggatcttaaactaaaggaaatgaagagaacaaaggaaagcttttatttacatttttattgcttatgattcagtattaatgaaactatttcataactcttcaatatctactccccaatcttgtatcttacttttagcatatttctctagagaattgaagttttgaaattctttgtttcatctaatttattcttccagagttttcaacattttcatctatacgaaggtacattctagctatttagcaagtactagttagactccagttgccatcaacacaagaactttgaagaagtactgtcctaattgttgtttttaaagtaattagaataaaaataatggattcttctatttttttaagaagttagtcaggctgtcacattaaattaagtagtataggtgcaaaaccagtccttttaaactattactaccactttttccctaggtcataatttaataaaggagttcagtaatttaagttcctcatctatatctaatatgtaatattttataaggatttaagttgagtaaacatttgctctcagagcgtgaaccagtttctcttttttgttgttgctggcattattgccttgtgtatgactttatgagctactttcttcctgtgtacatatacacattctttcagttttaaaagatgtgatttttaaaaaagacccctttgaatgtaactattatgtggcaagaaagccttgctttggttaggtattttgctgtgtgataaagatcctttggtaaaattcaggaaagctttggaccttaaaaaatcattcccttcctgatgcagtattttattagaagataggtgagttctgagtatttatagaatctgggttggtgttaaggcatctctgaagtctatacaaagtataagactgtatcttaacaaggactgtagaaactgctgaaagagcccttaaagtttacctaattctgcctctggtttcacaaataaagggtgctgaatccagaaaaatctttctcctggtaagaattcattgtatttttatgatatttatttcctggtttccctgtggttaataagctctaaaatgtcttaggatttttgtcactacggcttaatctaatagtagccttctttggcttcctaatgttgggtgtcctcgatattagatatatttcttgaagtaggatgtaaggcttacagtaaacttaactgcatttttctaaatcaagctgtctgacttggcctgtttagtgcttgtattgttgttttctttctgtgtaacaaattaccacaaatttagcagcttcgcacccatttgttagttcacatttcttaggttagaatgtgggcacagcatgactagtttgtctgctcaggatttaaactaaagactgaaaacacagtgtt

SEQ ID NO: 112905 - DNA, 1047 bp, Homo sapiens
aaatatctaactgtatgattaaagttgaatcacttataaatttgaaaaagcttcttgtcttctattgttaatgctcctagaatctcatgtttgagaacgaatgttcagtgtagccaaaacctaaatctgggactatatgttgaatgttttaaagtcactagtagaagggcaatttggtggctaattttaaagtacataaagagtattaacaataatgaagtgtcattttgttcctggcattctgtgtgtgtgtgtgtgtgtgtgtgtgtgtgtgtgtgtgtggtgtcaaaaaagtatctgaaggggcctgtaatagaaaacctagttcctttatgatatacacaatctagcttgaaattttaatgcattaaattcataaaacatgaagagtttaagctttgcaacacttaattgacacatgcgtcagaataagtttggaaaaaaatgaaccttcatacattttgacttctctgttttctatttgataactttggtattgcagttactcttttttgacacaagatggtgatgttcacctgaaatgtttcctgagtacaggctctactgcgtttagaggctcccccttatttatccaaagagcagcttaaagaaatgaatgaaactggctttgctttaagagataatagttgaagaaaagcaagagagtgtgtcctcttttataactgatttaacaaataatgattcaaatttaagtgtgggtttgtgtgagttgaggactggggagcggagagcactgggaaaaaggaaagttgaacagtggagaattagcagtcattaggtatgcagtatgcattaagtctatgctatgtgttttacatatgatgtctagttaattttagtcaaatatgagcactttacatgtattttacacaatactagtgcattccttgtttaattgtgcaagtttagaagtacggtgtgtgtttgttctttcttaaaaaaattatgacgtatcatcagccagtgtagtagctttattcataatttaagtgatactgtttcatttttaaaaatacacaagtttct

SEQ ID NO: 112906 - DNA, 1077 bp, Homo sapiens
ttagagaatttgatttcttaataaaaatttggctaactagatattttacatgtaaatcttttagagaatttattcagcaacaaaaatcagttatgtgtgtattgacagtttctaatctaattttcataaatataactaaaattatgaaaatgtacttaaaaaaaaaagctagattatactcctgtctcctagaagggacagtgcaggtaaaccagaccagtgccttgtatcaataattatgtttcataccaagtaataatgtttacctttttgttatgccagtacaatttatggcctaaaagttacatgttgtttctgtttacatcaagatatttgatgacagacttagtcagaggtatgttttgttatgaaaaagacaatgataagccagttgtaaaacgagtgccttttggaaatcttgattccggaacttttttttttgtattagagtacaaaaaagaatatttgtcataggattttataaaagtatagtatattctatctaagtagaaagttgaagaaaatagaatgctaatgttggagaaggtgagcaaaattatatttttatgaatgtttaggatattttgggaatttctaagagttcagcctctttaattctatagtttggggcttaacgcatttttttttaaatatgtgtgtttttttagaggctagtagaggcctgacattttgagtttaacaactttataaggtttattcttaaattctgtatcagacttaatgtctttgaattgtgtatttaataatttgatgtccttttgctactgcatttataaaccagaattcagtctttgatgattgcattatattactaagtgatttgggtaaagacagaggggaaaaagagaaagagggaagatggaggagggtagagggaggttgaagtggtatatgtgtgtcggttgttgtatttatgttttatctttgcttgttagacaattagaattgaagttaaacactaggaaatagatgataagtttatctctatactcccaggaaaatttaacattagaattaaggcatttagctaaactaagccaagattggaaaactact

SEQ ID NO: 112907 - DNA, 1032 bp, Homo sapiens
gccatcaatttgaatggtttatattttgccgtccttgttgagaagaaaaacatggatgtatagatatacagtgatggatggactagcagcttaagaatcattttggggacattttttaaaaaattttttgagacagagtcttgttccatctcccaggctggagttcagtggggcaatcgtggctcactgcagccttgacctcatgggctcaggtgatcctcctgccttagccacccaagtagctgggactacaggcgggtgccaccactcccagctaatatttaaatttttatagagacagggtcttgctttgttgtgcaagctggtctccaactcccaggctctcacagtcctcctggcttgacctcccaaagtgccaccacacccaggctattttgaggacgtttctcttttcagaaaagttataagtattttgaccctgcatgaaagtttggaatgatggaatcatataaacaaaaacaacagaaagcctcaaaagatttttttaaaccaaacaaaaattattggaaccagcttttacctcaagcagtgaatgagctacacagaaagttgatttttcttttattaatgattgctagtaatgagaattttacactttattcttctcaacctccctccaggtcagttttggttgttacagctggaggaatgatactggcatccagtgggtagaggtcagggatgttaccagacatcctataatgcacaggaaaaccctccctgacccacaatgaaacattgttagcccaagtaatgctgagattgagaaaccctgctgtaaagtgtggatttttatcttgatgggagtttttccaaatagctacattgatgtttacaatgctttataaataaagggaagttttgttctgtttgtttgaattactaataagagataaaagaggctttagagacagattttgggatttatagatgcaataaacacataaacacagtcttcgaaaaatgttcatggagacaatatggtgatcttgtgatacagggaaatggaaa

SEQ ID NO: 112908 - DNA, 1058 bp, Homo sapiens
atgtctttattagcagcatgagaaggaactaatacagagatcaaatcatatttttgatagccgtcagataatagttgtttcatgaattttgcccgttaattaaaaataagactacatggccaagtgcagtggcccacacctgtaatcccaacattttgggagcctggggcaggaggatcacttaaggctaggagtttgaaaccagcctgggaaactttgggagaccttgtctctacaaaaattgaaaaatcagctgtagccctggctactcaggaggttgaggcaggaggattgctagctagatcctagaggttgaggcctatggtgatccgtgatcttgccactgctctgtagcctgggtgacagggtgagactcttgtctctaaaaataaataaacataagacacagaagctaaatatttaaatctctttagttttcacaggaagtcaataatgaaaccaggatctgagtagaaacagttattttaaaatcataatatcacagttttatcatatcagtttttatagttgtaaaaatttcacatcagcagagggcagtcaaaccatagttcattcaactatcttatgggaaattaaaattttctctgtgtttttctgcttaggacacaagctgtactttatataatcagtttgtaaatacatttcaaagctcttcagttggtaagctgatagaattgtattactgtttagccacggaaggtaaacagttttttttaataaatttaaataaaaggaattaatttttttagatcatgaaatgctttattatttggtgtttttgatggatggccactttacatagaaatttgttttttctgcctcagaagcagtatttctgttaaattgcctgttattaattaggctattttttattcaaaaatattaacttttatggaatacctttattttcccctatgaacttgagaaaaatgagtttttattagaggctatagtataacactaactaaaatgtagtttggaaagttttattgagtttttcttccttaaccttttctttggctggctgcaaacaacta

SEQ ID NO: 112909 - DNA, 3113 bp, Homo sapiens
ttttaagtaatctagcgatcatttaaagtatatgggataggcataggttatatgcaaatactatgccattttatataaaggacttgagcatccatggagtttagtatcctccaggttgcctggaactaatccctcatagatactgagggacagctatatatagaaaatcctaaggactccacccaaaactgctagaattcataaacccaataaagttgcagggtacaaaatcaacctacacaaaccagtagcattttgttttacactaacaacaaactgtctgaaaaaaattaagaaaacaatctcatttacaatagtatgaaaaaataagtaaaacaattagtaaacaaggaagtaaaagatttgtaatttccaaatatttggaaatttttcagtaactcagtgtctttaactaataatttaatcattctagtaagaaaacatgctttgtatgattttagtctttacatttattaatttatgtaaattaatatgtgggttttatgatcacccacgacattgtcctaacttgtcgactgttctgtgtgctcttttaaagaaggtagtctgttggccgggtgcggtggcttacgcctataatcccagcactttgggaggctgaggcaggcagatcacctgaggtcgggagttttagaccagccgaaccaacatggagaaacccggtctctactaaaaatacaaaattaggccaggtgcggtggctcacccctataatcccagcactttgggaggcctagacgggcggatcacgaggtcaggagatcgagaccatcctggctaacatggtaaaaccccgtctctactaaaaaaaaaaatacaaaaaaattagctggggtggtggcaggcgcctgtagtcccagctacctgggaggctgaggcaggagaatggcgtgaacacgagaggtggagcttgcagtgagccgagatcgcaccactgcactccagcctgggcaacaaaagcaaaattccgtctcaaaaaaaaaaaatatatattagctgggcgtggtggcacattcctgtaatcctcgctacttgggagactgaggcagaagaatcgcttgaacccaggaggcagaggttgcagtgagccgagatcatgccattacactccagcctgggcaacaaaagtgaaactccatctcaaaaaaaaaaaaaaagaaaaaaagagaatgtagtctgttgttgggtgcagtgttttatagaggtcatttagtcagtggtccccaacctttttggcaccagggaccagttttgtgaaagacaatttttccacaggtgtggggcgggggttggtttcgggatgaaactatttcacttcagatcaggcattagattctcataaggagcacacaacgtagataccttgcacgcacaattcacagtagggttcacacttctatgagtgcgcatctaacggtgcggctgatcaggcagtaatgcttgcttgcttgtctgctgctcaccttctgctgtgcagaccagttcttaataggctgcaatctggtactgatccacaacccgggggttgatgacccctgatttaggtcactttggttgattatgctgctattcatgtatttgatattcttgaagaatttctatttggtctattcttttggttcctgagagagaaatgatgaagtctccaagtgtaattgtggatttctctatttctcctttcattttcttcagctttgcttcatctgtgttgaagctctattcttagatgcattcacatttatcaattgttgcaccctctacatctcttggtaatttttgtattctgacatctaacttcctcagattttaacacaatcaatccacttttcttttgctggtgatcacgtggtctcattttacattcttttaacatgtatgtattattttattacagttgactttcatatagatagcattcaatttgtatcttgtttgctgtacagtcttaatcaggtttcttaaagttgtgtttataccatttagtataaatttccatatgtttgggtttatgtctgtgactttattgtttgctgtttgcttccgtttttcattcttcggttttcctttttctgccttcttttgaattattggaatattttttattactttaattcatttactggcattttaaaatttctttgttttgtgtgttgctctagcaattacaatattcacatctaagttttcacagtctacttagagttaatattttatcacttgaagtttctatacattagtatagaacccttacaatgatctaggtcaagaagatagggaaaatggatatttgatgacagctgggtgtctgccacaaaggacaacattaagttgccttttagcccacacttctcttaatcttttctgtactgcttgttatgcatcctttaattatttgttttattctatattaatttcagcctatagtgtgcaattatatggaaaataacgttatgtccatgcctcctttcttgggatatttcctaaattcagtatgagattgttgatatagataagaaaactgacttgcaaagagatttcattgccccaggtaacacagctaagtggcagagctgcaatttgtactctgagtctggttttggggtctgcacatttgaccacaatgctactgcctgtattttacttaagataatagttatgtttatgacaaacctctaagtatgtatgacttctaaatttacacattctttgagtgttctaatttcattgtcataaaagcttactattttctcatttttaagacatatttcatacttcttaagatagctcttaaatgtattccagaaactttaaacatttttgatattgttgaactagttttggaatcaaaacaatttgtgattcccacataattgcagttaaattttttcagtgtaattttaaaaataccttatgggaaaatactactgcaagttgtgtaacactttaattatctattttttgtaatcataacagcgtacacttaacatttggaaaaaaaataaatatattcaaaatatactttttcatttttttaaggtaatatttggtatttataggtcttcaagcccaggagcctacaaccgacagactgg

SEQ ID NO: 112910 - DNA, 1706 bp, Homo sapiens
ttttttatctgaacatgttgcagcaccattggaaccattgtgtcactttaaccaagcctccaatatttttattctttcagatcacaaggggtggatgccaaacctctcatttttttccctcatgattacactacaaggcaaagcgcacagggtttgagttcgttgcagttgctagggacatacacctagggactgactactagggcaacctatgctgtcatgtcacattgttcataagtcttccgtgagcaaagatctgtcccaacaaatgccccatactcctttcacttccaagttattttctatcctaaacaatttttccttcctttatactggaaactccaagatctataacattttatgataaacttgatcttattttatattatatatttgtgttcccatttcactcttctgttatcttactctaacacttaaatgctgtatgatcaaagttaactaatttcttaaatttaatgaatctctttaaaccaggagatgtcatgtcttggttgtgcatggtatacataggaatgatagtttaaggaaacccatttctagatctttagtgcctaaaactgatctgcttgagaattcacttgtgatgggggtggaagtttctcttctccaaactcctctttacctctgaagcatcaaacaagtgggcagtgggaaatacaggtattacgtttgagagaatagatggcactaaagccatctattattaaactggtactcagtaccagtttactgagtgtggtctgaagatcataataattaccatttgcctttttcattcttattttctcagtagttacaattaaaaaagattttcagttgttatctgtcatcattcctgatatataatatagacagatttcaaatacttgaggaatatgattagaacagaattacttctcgcttatttgtatgaacaaggtttctctgtactttattccacaaattttttttagaaattgaaatagaatctaaaaaattgaattgtagcaataagtaatagtttacaatgtctataaaaattcactggggagggagactaataagaggattccagctgtctcattaagaaacgaactttctataaccttaatgtttaattatattttccaaaaatcattaatacatttatgtaattgtacatgaatcattgtaatgctcattcaatccagaagaaacgtaatacttagaaccttatgttcatatgagtgaacactttttaaaatttcaaaatatgtgcatatttttctaagaattattacaagatgatcagagaaagaaggaaattctattgggatagtagagtagaagtacaaattcaaggagaaaaaaagagcagtgtaaaatttctcaaagatatcttttaaatagatggtagtgttaaatcactgtatatttaaatctgttgaatatgttgaaagagttgatgtaaaggtcttattttaaaatctcaatatttacaaaactctggaaattacatcctttaccactatttaaacatgggtacatgtgagaaggcaaaaatctcaattttcttttttaagtatacatacagttcctttttagcactaagagctacgtgtgcataatgattgagaccagaactccacattttgttgaaaagtggggagtgagggggagagagagaaatgcttttaaaattaaacaatgaaacttttccggggagt

SEQ ID NO: 112911 - DNA, 1117 bp, Homo sapiens
ttcatctctcttcatcttgacaagtgaagttcaggtgtggtaatatctattatgtaggggctccccaaagaacttcgggtcaagaaatacagagtacataggcagtatataaacatacttattattgcatctagtctatggaaaaaaaatacagaaagaacatttgagcacaataaatctcccctaaagagagttattacttgctgcaacctgtctgcagcagtcagaggaaggaagtcagcaagaaagggaaagaatgccaggttgcaaataccaaacggtcccatcatttgcaattcaagactaagagcagattcctaaaactcaaagttcaaattcagctgctaaaattacaatggtctcctagattttagaatcaatttttctaccagtaaaggtgatcttaatctaaaatattaatagcgaaaaccacagaggatatgtggtaaaagagactgcagaaattatgtctaaccttcttattttcagatgaggttaacatggattagagagtgtttatttgactcctagtccagtgttctgtccattacattttgttaggaagaattataattctaacaaattacttccaaatgccaggtaaatcaggcctgattaaaagtatgtcttttatagctgttaaatggttctgaaaaactaattctgaaggatttatagataatttattatttcgttttcttttgtaaaagttttggcaagtttttaatctgatattatgatgcttttggaagctaacagatgttgctctgaaagtcatatttctcacttaattacagttttaataaagcagcctgggtaatgttagttgggggagtatttaggacacataggagccaagtcagatagaagtcatagaagtgttgcagtcaagaggcgtttgattataaggtgcatcattactttgtagactactaagaaagaaaatgcagccaattaaactatgatatgcattgtctctgatttctgcatttaaaaaatgaagaaatatgtttcctatagtcattgaaatacagtaagtcgttggttaggaaaggtaaggacctttctaaaggggaagaagcagagtagaggtgagagtgcatagcatgtagagcct

SEQ ID NO: 112912 - DNA, 1599 bp, Homo sapiens
tgtctcaattcttgcattgtattgtacactccttaaggataaaagccatgtttcttcagaatcttatcccaaaaacttagcagagtgcctggtacataatcagtggtcactgaattttttttgattgattagatgatggagatttatgtatgtctagctataaagtttatgtttatcatatacaatattggcttaataagatattctttggcctcaaaattagaacctaataggaagcttaagacataaaactaatttgatgacaaggaagcatgaaataagtgctctaaaaagaaactcaagaacatttaggaaggatataccgcatccagcaggggtgactaagtgataataattacactaagtcttggggaagaaaggatgctatttcaggaggtggaggagaggaataggtagttattccatatggaaataatactctaggcaagggatacagacatgaaagcaaggaatgtatttgaaggatggtatcttctaattgcatagttcaaaattctaaataggaggtcagtggctaatagagctaggcaaggaagttgaaatcacattatggaaaagtttagaatttagtaggcagtagagagacgtaatttctgaatagaaaaaaatactgtcatgagattttacaaaggttaatccctgctctgactggattagaagaaacagaaactgtaggccaggggtgcagggttcttcaggaaagaaatataagacaagaagttaaactaaataaaaataagacaaggatatatatgagtgatattgtaatgtataaagaaaagtgtctcattagacttgcaagctggtccatttacatttgatcatatttttagagaaacatgaacaagccaaggcaagtccaaaggagagtaatcaggatttgacggggagggagggatgagggtctgcaagtggtgagttcctggttaatcagctggggaaaaaaaagaccaggaaggaggaatgtgataggcagcttcagttattcaaaggactgtcctctagaagagacaacatccttattctgttacttcagagaggcaagaagagacactataaaagtggattgtgtccggaagagtgtgaccaagatatggaatgatttggaaactgtgtcacacaagaagaataaaagtattttttatgataaaggagaattttaaggaacttgaacaccaccttcaaatacatgcaaggaaaaatgggacttttgaacattcagttaactccatataacagaaccatctaatttatagataagcaacttttctctttaccaattatagtgggccatctgtcaaatattatagagtacatgagtatgttggaaggaaatgttgacagtgacaaatgtttttaaaagggaaaattaatagtgtacactacatttattttattagtatctctaatatcagatggaaaagaaaggagaatcaatgggcccactgatggcttagaacttatgtctataaaatttactcatattattgcattaatatttcagaattcatagtctcaaataaatacaaaatatagagagacatatcaggaagtttaggttacctatgtataaataat

SEQ ID NO: 112913 - DNA, 1128 bp, Homo sapiens
tgacctcaaatgatccgtccgcctctgcctcccaaagtgctgggattacagttgtgagccaccgcgcccggcctgttctatattattttaaaacctaaaccctttcctcttaaacaagcagacatctgtaatatatgtaacctaattgtaaaatagataaacgtaacagagagtatggttggtatagtttctggttagtgctaaatgattggaacaaagaaaggagagattactctggactggaatgatcaagaaaagctatataaggatacaacttgaggtggactgtgaactctgggtagaaacagagttagggttcgttttggaggttctaacaattgtaatatttttagtagttacaagtagagctctgtcattcccatcatctaattataatgtgcaaagactgattgcatgtactctttgactacagttcttggcactaataaccctaaacaaagctggaggcgctaattacctccttttcctaatctgaattttgatgtgcttttgaactagtaagtcttctggcattctaagaagacttaccccatcactggggagacatttacttcagcattcagaaaactagatttttgaattaaagttttttagaggagtttttcacgcagtagcacaaataaattaatcagtgtctttatttttctatacccctatcgtcattgcctgcatataagaaggagataagtataacagtttactcatgggatatgtgtactttttgatagaaaacatggagactatgaaaagcattcattttgtctcctggttgtcagattctgtctgtaactgacagtatgatcctatatcttttaaatgtgctattacctgagtttcttttggtaacactaaaggtagaaagaaaaaaagttaacttagggtaaaggctatttgttcctttttcattaaaaaaccaggaaattcttttttgattggtgacatcgtattaatatttagtctgatttattagcatgaggcaaacagcttttttccccagagtgttgacttagagaatgtggacttatataaaaataaagataatttagtttatgatttttcttcttttttcaaaattcagtttctttcttaactttttgttggactttt

SEQ ID NO: 112914 - DNA, 1382 bp, Homo sapiens
atgtgatagtgtgctatgtagattgaaaactatgataattcattttcagcagctaaagtcttaaaacaagtctacacttctgcagaaaagtggtaagggaaagagtgggagaggacctgtagcccagcatcttatctatatttactactcttgccttgtgggaggtgggggaagggggaggaggaggaataccttctttaagcttttcctaaatgtcttacatttcccccaaaaggaatgagctgttgtaatgatagcatgttgatgctggttaaaataaaacatgcccaccagtgtaaaatgatagcattaatatttcttgtgggaacttgatttagctttaaatgtacccaaaagctttcgaagtacaaaagccctcatattagctccagagaaaccaagtttattatatcttaaggaaaagatttcttcatgaaccttaaatttagtgtctgtgtaatcatgttattttgtcatttactttttaactgtagaaaagagcttgatttgatttttttttttttttttttgagacggagtcttactctgtcaccaggctggagtgcagtggcacggtctcggctcactgcagcctccgcctcccaggttcaagcaattctcctgcctcagcctcccgagtagctgggactacaggcatgcaccaccatgcacagctaatttttgtatttttagtagagacggggtttcaccgtgttggctgggatggtctcaatctcttgaccttgtgatccacccaaagtgctctgatttgggagaccttggcctcccaaagtgctgggattacaggcgtgagccaccgtgctggccagaccttgatttttttaggagtaaagagacttcctacctccactctagtcctcttatcagtgatttctttttaaaaaagtaaatgtccttgtgtcttcacttcatcttccttaataagtatttagaggcagtattttcgatattaacagcatagattctttaatttaggaaagaagaaaacttaactttgatttttctaactttctgctcagctcttccaacgtgaatatgtaggtctctgtctcccggggtcctcattatgctttactttgccctttccagtgccctttccagtgtttcaaccacattgagccgcatggccgcataggggactatgaagatcagctcatgcatttgtgaagcactgcctccttgtgtcttactgttctctttcttaatgggctgtgttctggaatggtgtcttggtgttatgttttaaaacattattttgcgtaatttatgtcattttatagtcagccaggagaaagtacactacattagttttatgtcatcaaattgtttaatcatctctataatttacatgaatcttcatt

SEQ ID NO: 112915 - DNA, 1027 bp, Homo sapiens
ggctggagtgcagtattatgatcttggcttactgtaacctctgcctcctgggtccaagtgattcttgattctcatgcctcagtctcccaggtagctggcaatacacgtgtgcacagtcacacctggctaatttatttcattttattttatttgtattttagtagagatagagtttcaccatgttgcccaggctggtctggaactcttgagctcaggcagtccgcccacctcagcctcccaaactgctgggattacaggcgtgagccactgcccccaaccaactcacacatactttaagtgggactttatttaatatcttcatatcagcgatagaacttgatgtggttttccatacatgtacacacacataataaatatcatccctttgacaatactataagaattagtgcctttatcattggatattctcttaaaatcattaacagaaaatgtgttctttctagaggaattttatcaaaaaatttataaggtgtttgaacatgtgattacaaaggaaagggaaagctaataaagaacttagtagtataaccatggccaggcacagtgactcctgcctgtaatccccgcactttaggaggctgaggcgggaagatcacttgaggtaaggcattcgagaccagcctggccaacctggtgaaatctcatctttactgaaaatacaaaaattagctgggcatggtggcaagtgcctgtaatcccagctactcggcagagtgaggcacgagaatcgctcgaacccaggaggcagaggtcacagtaagccacgatcatgccactgcactccagcctgggcgacagagtgagactctgtctcagaaaaaacaacaacaacaacaaaacttagtatgtaactatttatttagctatttttcaggcacattttagaacaaaagtgattttttttcaaacctctttaccctctttggtggtaggagacagatttcatattcatagaggtccatatgtggtacatatgttacttaaaacttgtggttgacactgtagt

SEQ ID NO: 112916 - DNA, 2145 bp, Homo sapiens
taaggctgttgtttatgcacgtacacattagcatccatagtgctaccaactttaaaaaatgctccagatttgagtacactcagaaagtttctaagatattgaaaacagtattcttaaagttcctctgttttctgaacattccctagtgtacaagattttatatatttatccaaatgaaacgttgaccttcaatgtaatattgaatataagattgcagataaactattattacaggttattcctaataaacttttagttgctgaatgttaacaataacaatctttacttttaaagcactatagacaaaagtgtaatttttatttagcaccaataaataaatgatttaacattttaaagtatttaataagactgaaacccacagcaaagctgttctctggtgtacaattactggagaagttcactaggtcagagtaaaagcgaagaagatgtattttaacatctaatatgcaatgtattttttgtttcttaatcagaatgtgaaaaagaacataaaatacagaattttattttcattacaacttaaaccagagtttaacatctataaaatatgcttcaaaaattagaagtttaagaatgtcatcacttatataagacaaaaataacacatgtatagcccatctaaatcattcttgaaaacagaccacacacagccttacatttttaagacaagagggctttaaaatgtaaaaggggagaaaatgagacttaatgacatattagaactaacatcccctgagtattgattgaaaggaaaggtattgtgtaataaggaacatgttcttccaattcttccatcagtctcagtttactttccactgcgtcctagggtgagaaagtaattaattctctgtacttattgaattataagtgtttatgaagcaacaacttgaaatgacttcaatccctacttaccggccataggaagcagtagtattggcagggagaaagcaagtttggacataaggactagacttcagggctgtccaatcttttggtttccctgggccatgctggaagaagaatggtcttgggccacacataaaaaacaaaataactctgacgatagctgatgagctttttaaaaaattgcaaaaatctcagtgttttaagaaagcttgctaatttgttttgggcccaggttcaaagccatgttgggcccaattcaaagccatcctgagccacatgttggatgaccttggactagagaaaaaaactcactgaagcctccatattttttatagtatcttttctgtgggatacttattaaattaaggttgagccatttttaaaaaacgtattttctctgtgaggaaaagcaaatctgtcttaatgagttacatgaaatgatatgaagttatatgaaatctaagggatttgaaaatttcaaaaagatttaaaggaaatacatcagaattttggttgcatttcagttaacagatttatttatctagatttttgaataaagtgtttttgaatacttaattcagaattgatgatctgcccatgaccttaataaaatttcctggtttcatggcaatggcaaaaacagtttctaggtacttgggtgagacacatactagcaggtgtagaagtagtaataaaaataatgatttattatcagaacaacacttcttacacctattcaccaattttctttcaggatatccccataatattattattcctaaatagcaaataaagaaaataagccaaatgcaagtcaagtcactttatatcttcctcatccttccattcatttcctcattcgttcattcattaccctccttgtttcttaaacatcaaatggtgccttgaggcattaaacaagttgataaaataaaacaaaagcatgaatacttgacatatttctctcatcactaagacaacatgccagttagtcaattaaaaaacaaaaataaatgtatcaaaccacgtggtattatgtggagaagacttgatcccaaatgttcccttttctcgaagttatttgctgttgtccatactatccacgctatccaagtttacctggataaatagaatgcaatcagaattatgttgaagctaatttattgataaaatatataccaaaatgtattacaaacataaaacttcatgaggtcagta

SEQ ID NO: 112917 - DNA, 1651 bp, Homo sapiens
atatttacctaaaccaggatttagttttcatctttactaaatttttcagatatacatatgtatgtatgtatttacttaattataaaacatgttctaaggaagtaaaagatatctttggatgcctttgcagaacgtagaactacttttgtttaattctgtgcccttacatattttttgtttttcttaattcataatgtggaacaaggccttctttttttctctgttccaaattttgaggtaagaggtatggcaattcacatattatgattgttttagagatgaacttaaattcacagggctttaataaacatcagccctgaataaactgaatatgtaaaacactagcactgattactctattccaaaaggaaagtccacattttctatgttaatacattttctactgcaattatttcatatggtactcagaatcatgcgggaagttgcatttcttttctctactcttcctgtatgtcatcttgggagcccaagcgaattttatattcaaaagagcaatttatgctacttattaatacatgttttttaacaatctttagggataataagttgacatagctgagagtagctgagggactgatggcatacgcaatctgttaaaacatttctttgaagagaaagcttgtgcttgaccatggttgctcggtggagagtgctcctatgcataccacaagcttggccttcagtttggaatagctcttttcattgtttgagtttggttgcactgagaaggcaagcttgttactttactgtaaaaaataaagtgcttgtccaagcttgttgcatgttggcagttgagaggctgctcttttgctggctggaacgtggacaactttttaacctctccaaggcaacgtagctgtgacaagatgtcagttaccttcaaaaagtaaataaatcacagcctttgagtttcagcataataataaagatccaatgtcctcacatgagtttctcattccacaattttgaatcatatttttttgtggcaaatgctctaccttcaaagtaaagcgttttaaaaatacagtttagagagccaggttccctgagaggaagattattaactcacaaggaaagaacagtgaattatctttaataaaataagctaagaaacaaaaacattaaagttttgtttgaaatttaaccttccttgcctatgttctttaccaaatcaggaaatactagtgtagctgtagtgtgaacatccttgtatttaagagagtgaatttaaatgtttcaaatactttgtaagacaattaaacatttgctatatgtaagttcaccttagacttacaaatttccaggaattattctaaattcattctatagaacactacctgacaagttggaaaatatggacgtaagagtctttatggcttaactgtgttaactggctgatgtttaacaacaatctacgtttcccaagtttcactccaaacccgtaagttgtactgtttcagaacatcgacaaaaacaccaatcactagatgaatagagatatttgattgaaaacaaactgttctacaaatatattaagcttgaatttgctaatctttatcaagtaattcccagtgctcaaatgtgttttgtagagtgacatactttgctgagcaaaaatggggtgtttgag

SEQ ID NO: 112918 - DNA, 1853 bp, Homo sapiens
atctgtggaatttggtatcctggtgggggttagggaggggattggaaccaatcctctgcagataccaagacaactgtatatactttgtaaagcttgtataagatgatactcataaagcatttaacagataatgtctcaataagtgttttaattgttatatcattacaactatcaccattataatctcaacagggaaagcctttcataatcacagctgattaaaatacctttttagtattcaggcatcccctgcttaacacttaatatcctaggaaatcagatgtcctacttgaaaattctaaccaggaacccattcccccaaatccccaaccaatttcctaaaagctaactaaatgcagtgaaatatctttaaagtaataaattataatttggggatgtaaaatgcttaaacagtggtttcctgatgacctaacaaatctagccttaaggaaccattgctaggttgatacactcagaggacttttcgaaatgtctacacatgatcagacctttctaccagttgtgtttggaatgtaacaggagacttccctccatacattcttttgtttaaaatgttatgttaaatttgaggaatgtaagtataaatttttcccatataaacatcagcaggaaaatgttgaatttagagacatatattgcctgagttatgggtgttaaaaccaagaggaattctatcagaaaatgttaaccacggagactctgtaagtgtgcccgatttttatttcctggtttatttactagatgaagtggatgtaactaacaggaaaacacctgattagtgctgcagactctgtgttcttatttaattctcatacaactttggaagttaaaagaccttaaattaattttgcaaagctgtacaactccttcatttctgagttgaaattcagttctactgcagtagctaatagctgtccaggaacagctattagaaaactggaaaagcatcaaggaaagcctactgaagtgtgttttcctttcgatccagtgtcttcttttctagtaaatgtcctgtctatccccccttcccctataggaagttttcttctctttcttcagatgctattatatgagatacaatttataaattcttttttttctcatctgacagtagcttttttctatacaatcagttacctttcactgtgtttttcacccatcctttttaaaatatttctgatatcaggatttgctgcaaaagaattaacgaaaagtatcaagaagtttgctagagctttctttctactcttgcttctctcatggaatcaagtggaaaattgggctttcttattttatttcattcactgagtaactgtactcacaagaatgtctacttcagtaaggtagttgaaccaagcatatcctgacagcctcatggaagcaatgaatcttttaatttatattagagaggaaaacgaattaatgaggaagaaaatcataagtagatggttaggcattctagagaattatatttaaaattagctactaggtcacttctgcatcagttgttctacgtaaaagtgatagggtatcccctcaaatgttaagtcacattctggccatcctttttcataggttgcactcaaattactttcaggttagttgtgtttcctttttttttttttttttttttgtgagacacggtctagctctgtcgtctggggtggagtgtagtggcacaaggctggagtgtagtggcgcaatcacacggcacattgccacctctgccacctggacgcaagccatcctcccacttcagcctcctgggtagctaggactacaggcacacgccaccacacccagctaatttttggtttagtttgttttgtttt

SEQ ID NO: 112919 - DNA, 1072 bp, Homo sapiens
aagagtaaatgattgaaatcttttaaaacttttagttacattgtttacaatttggggtaaatgtctagataagtcatgtaaattttttcacctaaactcataattttgcttctagagtcctaacgagtagtgaaatggagattaatcttgaaaatcccattaccttacatcactagaagcactttgtccacctgcttcctggacctagaagagtaaacctgtggttgtccagttctaggtggtagctttaagatactgcaggcgaagacatatatttgtgaccagcagattacaaacaagcaagaaagtgtaatcccattctgctatatttttaatggacaggattggatatatctttctaatcatagaagacgtctggaagaaaatggtttctgcagagggaaattaatgtattgaaggtgggaacaagattttggtttttacatacacatttctgtactgtttgttgttgctattgttttaccatgagtttgtattactcaataaaataacaaaaatggtgagatcaggaaggacaccttttcttgctatgtagattatttttgcctcatccttggttccttagtttccatttccttacagtattttccagttactcgtttttaacaatctgtggggtctgtccatagtttttcctttttcttgtcctgattaatagcctcccaatttattttctcatcgcctgcatacaactcagaccctcctattgaacgtgaaaccttctacctattcacccctctacacagatcacgcatcattttcttgtcttaactgtttcagttgttccgtgatttttgttctatgcctttgaggatttattgtttacaaagaactaaagtatttttagtttatttgtttaagctaccctcaaaagataataataggcaaaagaaacaccgtaagaacataccaaaattccactgaaagctaactagggaatgttggcttccaatcttagctagaaaatgatcaaaattcgatactggttgattttttaaaatatgaattgtgagtcatattcaaaaagagccacagcttgcagttgtagtcc

SEQ ID NO: 112920 - DNA, 2297 bp, Homo sapiens
ttcgtgattttaacaagaatcattttggtggagtgagagggacagatttgagtcagctgagaaaagtgtgacaaatgaggaaccagagacagagcttaaacaattctttagctatgagtgtggaagaaagagattgggcaatagctaagacaggataatgtgttgaacgagggtttttagtaggcaggagatatctgatggaaaagagcaaatagagaacttgaagatactgcattgggggatgattgcagtgcaatgttatgtcgtggcagaatgaggtgggattgggagagattgctcttagataagaagaattgctggtctgatgtaaagttaggcaaaatattttaaaacatactattaaagctaactgtcaattcttagcatcacaatgaaatcatgaaaaccccgcaggtgcttcgcagttcctacagggaatcttccttgttacaacaacaacaaagcaaaagaagacaccaaaccgaccaacagcaaggagtaatattgaatattcaaaaataaaatctattccttgacttcaaatcattaaagtagaactgcctatttaagaacttttatttgcacagtcctattaattttaatgcctaaagcagtgttaatcgcatgacccacgtgaaaagattttaaaaattgctttgttagaaaatgtaatagacttgtcgttaaagttttcaaactcttttttaaagatttgtaatatttggctagagttccatttattttctttaaaaaaattatgtacacacacacacgcacacacacacacacacacagtcactcctatcccgcaccctcagagaaagtttgagattatacagccacatctgtcagagctgtgctaacctatgtcatccatctgttctggttatattttccttccctttcctctctttttcttccattctccccagcctttaaaagaaaaaaagttgagagtaaaaacaaatcacctctttttatattgaaatttaaggtggaagaaaagtggttataaaagcatctatcatcatagcactgacttgccaagttaagtatttaggttggaaatcatgcctttccaactgcttaaaaacaggaagtatctctgctaagtgataaatagctccctgttgctggaaaggaaggcctcttttatttctttctacatttttgagcaataataaatgagttctgcattttcatacatgggtgtatgtgtgtgtgtgtgtgtgtgtataatgcagaaatccatttgcagtgtttatgtatacatatatacctcagtatatgtaaatatatgtgaaaatactttccaagactttaagcatagaatctcttctcataagccagcccaggcacatcttactcaacaattcaagcaaaacctttggatctgtcagaaacagcttataggtctgcattaggtgattaattgccaggagaatctggttctatattttgttacatataattattttcttttctaaaggtgttcttttattaagctcccaccataaaagaggggaaaataagcacacgtcttacatgcctgatgtttagcacttcttacaaaagaaagaggaaaactttaacataatccactgataaaagcatatttgtcttggcttcagacagttttctcctcatttttaccaaaactttaataatattttaacttgcttagaaattagtcttgggatagcagtatggaataatggaatatactttggttatacaatctgacggtataaaattaaaccttagttcacattctatccttaatgcttactaccactctgaccttttacaattacttaacgtcttcaagcttttatttccctttttgtaaattgactataagaatacatatctccttttgagtgttactgtgaggattgcactaattaccatagtaaagcacttattacagttctgaaaatatagtaggaacccaataacattaccattttaaacattattagtttgcttattctaagctctgccacttaatcatgtatgactcaatatcaatattacctccatgggcctcagtcttctcagtaaatacaggagtttagaaatggaagaattttttgtgagactaatgtcctgtgattctctaattatcttcatatcaaatgaagaaaaagtattttcattttagatacaaattattcttatccccataactgacaaagcaaggaatatggcttctacaatgtaatttctgctttacttttgactgagtattcataagacttcttttggtgttgattatggtctctagagcgagactg

SEQ ID NO: 112921 - DNA, 1051 bp, Homo sapiens
atatacaggaatgttctgggcctctgtaagagctgatccctctatcaggtttctgtgcagacaagcatgtttcttctatctattaggaaagggttatgaattgagcatttcagaggctatggtaagaagcagggagagaagggggcaagtagagaattgctgaatatcaattctttttaaatattgagatttagaaataaaaatcaagaatctgtattttgacttgacttttcaatctattattctaacctcgtagctcattgttccatttattcaaagaacattaacatctgccatatattaggaattcagagattgctaacattgcctatgttcaaggatctcataatcaagtactgaggataattatacaagaagagtaatcactataatagcatttaatacttactgaagcatacatgccatatgccaaacactgagctaagcacattatatcaatatagatataaaaacacctgctgatttgtccaaacacacagctaataagtttttgagctagaattttcctccagctaagctgattcttttgccctcacttttaaccttgtatgccaaattacaagtttaaaattcatttatgtacttggaagagtcatagaagtttcaataaaagagaagacttttaagctgagacttgaacaagaagtggagcttccctgatagacaaagagataaaatgtcattctgagcagagggagaaatatgtgcgaaaacagggaggcagaaagcagcgtggtgagttttactaactgggtgtttaggtgctcctaagcaagtccaagttcaagtatagcatttcaagtttctatgattttagtgtaactcctatcttatctacagctccttttcttttctcacagggtgagaaatgctatacttgaacttggacttttttctttgatgtgcaattaaatgattagaaaataggaagttaaggtatttgcagttaaaatgatcacattagccatgatgtagataaagcaaggaaaaagaaggaaagaataagactgcaggcagaaaaacaactagc

SEQ ID NO: 112922 - DNA, 1063 bp, Homo sapiens
cccaccactggtacttttaatggcagggatgagaagaggttactttaaaaaattattttcttttcacttggttatttattttgcccaatcagcattgttctatgaaagcttagaccagctcagtgtttgaaatagctccttctggtcaaagttactccatttttccttcgtggagagggtatacagagaattgaaacacttttgtaagcctcaggaggctctcaagaggaagtctgtcaccagctggaaggggaatacagccgttagggagcagcctctgaggggagactgaagcaggttgcgtcttttagccatctctgccacctgccactcattgtccctgtggctatggccctcattgtcctggcttcttgactgtagctgtcagttaatgaaaaaacatgtgccatttaaaagcagaagggaatttctctcaggaggaagtaagtctttttggttatcactattgttttcttttgctctgatttttgttttttaagttatttgtagcaattccacctcatttattcatttatcttttatcaaattatcctggttacttttggaagagttttatctgtaacagaaaatcaactgtcacaaatatatttacaaaaaaaagcaataactgggctcattaccccatatgccctatgcttgggaacacaggtgatgagtaagatgcataatttcttctgtgtatcagaatttgctgacataggccaaagactgatatctgtaaaattggggttgaatttttatttgaatttggatattatcctcctttcagtgaatcccttgggatcaccaatttgtgagggagtcaggcccttcttggccagtttgtaaatctcctcccttacatcttcagaggccagcttcagccaagtggggacactgcagtgacagggaggagccgattgggacaggcccttcctgggagcaggcatgcaactcatgatgtggcagtcaggagcaaaaaaaacaccttcttttctttaaaatgtaaaaatttgcttactatagtggtttttttattgcaatcttatgaatgtagctctag

SEQ ID NO: 112923 - DNA, 1001 bp, Homo sapiens
tatgattccccttgagactccagcattaggtgctatatggctgtacaaattggtttgggattgctttgcttacagtcatctcacctcagaaccccacttagcagtttctatgattctcagggaaagtgcttcagcagaagtagacctttaggaattagagacaagttacaaccaaaggagggacattcacctgcagaagcttataaaagcacatgagatacaggcatcgtagcctactcagattgacatctacttgcagattctggtcatcagtgacttcattgagcactgagagcagtttcattgaaggagcagtaagggcaaaaactagatcgtagagaactgaagtcaaaataatagttgagatttattgtggatatctcctttcaagaattttgaatgaaaaagagaggagagagattagattggtaactagagagatagtggtgggggcagggtatattcatagaatggaagagacttgaacatgtttataggttgaagagggagagtcagcagagagaatagagtgaaaatatccaagagaaaaatgagaaaggggataactaatgaaggaagatcacagaggactgtggtcatggacacaaagaaaggttttgccttcagctgaaggagactttattctcttatattattcagaaagaagtaagaatgattgtaaatatagacaatttcttaggtagagggctagaaaggtgaaaagggtggttaaactcagtcatcgctgatcctcaacttaaaagtctgttccactaatctttattttgtattactgaatgcatatataatgagctacgttaacattgggttttactgtacattatgcgtagtataatatatagaaagtctgatccctctttttaaataatatatagaaatccaaactttatcagtgtaaacatactgagtttgaggtgtctatagatcagcttaatggagatgtcatacagattagttttcatttttaaatttctccctat

SEQ ID NO: 112924 - DNA, 2050 bp, Homo sapiens
tgtattacattgagtaatttagtgaacctatctgagactctgtaaaatggcaatagtaatacttcattactatgaagtaatactttcataggcattatgaagattggaaataatatatagggtacttagtaaataatagctattggtgttattctaccactactttttttaaattaataaactgtgtactaccaccattttaattaataaagttcggttcctttacaaataaacattagttttctatccctgctgtaacaaattgccatacacatagtagcttaaaacaacaaatttattatcttatagttctggaagccagaaatctgacaaaggtcttattgaactaagattaagatgtcagcagggctgtaatcctttatggagcctcttgggaacaatccatttctttgcctttttcagctttctgaggccccctgcattccttggttcatggccttttcctccatcttcaaagctagcagcctagcatcttcaagtatccttctgtttctgacctatgcctccctgttccacatttaaaggacgcttctgattacgtttgacctatccagataatccaggataatctccctattttagggtcaggtgattagcaattttaattccatgtgtaaccctaattctcccttgacatgtaacataacatattcacggttccagggattagaaggtggatatcttgggggtggggcattattctgtctaccacaataatcaaaaaaagcatttgttgcatagtattgtatttgccttaataatcatgagaaactggcaaataaagatcagctggtaccataaattttcagatattaccatttttttgttttcatttttgttcttttttttaatgttattttagtatcttggttaaaagtactatcattttggaaattcacatttttggccactatagctgtattgtgttttttatttaaattgatatagttgaaactctaaagatacaactgcaagaatatatgtgggcaaatttttgaactattttgtggataaagggaaaaagggtaggaatcggatgtttttcatcagtttttaggagtaattacaaagctaacaggaaaatatgtctcccttctaagataaaaggaacctgaatatttgtccctaatattagaaagcaaatggctcgcaaaaattctcaaagatagtgtgaatcatattcttttataacactggataaagggggaaaaaagtgacatttggggtattaaacctgagatgaacatcctaatccagagagtagctgatctttagacctacaggctgccagtgaggtgttgtcagatgttggagtttaggcatagacaaatgcactgggaagagaacagtgccactggctagtcacttcacttctgggcctcagttttctcatacctattttgtggattatgtgggttgctaattaagacacccatctacctttgatgttctttaaagtagaagaaagaaatttaaacaaatgaatgacactaaaaacagaacagaaaccaccaagatgtccttcaacaggtgaatggatgaataaactttgggaagtccagacaatggaagattatccagtgctaaaaagaaaatgagctataaggccatgacagtgcatggaagaaccttaaatatatatgactaaatggaagtagccaatccaaaaaggctacatactctgtaattccaaatatatgatattctggaaaaaacaaaactatggagactaaaaaagatcagtggttgtcagggattaggggaagggagggatgaataggcagagcacagaggatttttagggcagtgtaactactgtattcactacagtgctgggtacatctcactatatacttgacaatgtaacaatgtaggttcatcacttataacaaatgtaccactctgatgtgagttattgagtatagtgggcaggctgtgtgtatgtgagggcaaggagtatctgggaactctgtactttatgcccagttttactgtgaacctcaaactaccctaaaaattaagtctattt

SEQ ID NO: 112925 - DNA, 1764 bp, Homo sapiens
tccataaagttgtattggaacacagccacactcattcatttacgtattgcccatggctgcttccacactgcaagggcagatttgagtagttccaggaggaactgtgttctccgcaagaccaaaacacttgctgtctggccctttacagcataagtttgcgcacccctgatgtaaataattgtttcaccatcttcccacctctgcaccgacacacatattcttcctatcatctctttctccttccttcccttcttctcttcctcttcacacacacatacctcattttgaatttggcaattatgatcacttacagtaaaggtaagcggaaatacattttaattttcctttgtcatttctctcctccctgtctgctttccctttcctctactgcctttatatagaatgtctgagggctgtgcccttttcccaaaatattttgttttaaggtgggggttagatcttggtacattttttgacttccatggaaagttttgtgttagtatgtggtcccatttttaacctatttgcagacacccccgattatctaaaatcactttcacatggggctgaggttaagctttatttcttttggcatgtccctaccacagcagacacttcctctttgccttgaaaggacaaaacgatgttcagctgtctgggcttaggcccagtatttgatttatacattatttaatttcctcctgaaaattggaagcaggactttcaggaatagaagtcagtatttttcatttgttttagaatacttctaggtgtaatataatcatcagtggtagatgtcagcatgattagggggtgacttaaggtaaagcaaataaaatgtgaatacaaaggaaaattatttgacaatggagaagttccgaagtttttgaataatcattattgtatatgttattaggttttgggggtactacattttggggcacctgtcttcactttacccattgaaggaaagatgtctattatgttatagttgcaattgttgggggattagaagtttgaggaaaatgtaatgtaacccttccagtaattttacagaggatttttggattctctgtcagctgctactgcatttgtcttcacaattaagttcatacgaatgccaggatgtgaatgccaaaatagtttgagattttaacagcagtgaactcaggaaattaaaaattaactctggaaatactatttcatgttttacaaccacttttggatagtgtgttcctttttaaaccttccttagatcattgttactcttgggttacaacctgtctcctttttaccaccaaagttcttaaaagtctagcacacctactgcctctacttcctcactcataattcgcttctcaaaccctggcagtatgggctttccctccctctgcacactgctaagctgacctcactatttccttctctccaattataataaccagctctaagtcctcagctttcctgacctttttgctccatctgtcagaattcgtaccctcttcctaaagccctctttcagtttttatgtgggactgtcctaatttcctctacttcttcctgtcttttatagacccatctccctagtatggagctgggcttaagtgtcccccaggttctgtttcttggaccatttttctccctacattcttaggctttcccttctcattttttctcattacctgagacacttcaggagaactcagagggctgcaaagagcacagtttgaaaatcaccccggtcctgtcagactacttttgagt

SEQ ID NO: 112926 - DNA, 1035 bp, Homo sapiens
attaaatggtatggggcaaagaaaaaggggcatatttccagtgtgttgaagccaacatgcctgggagtatagtgtatcactgaaacactatactctgaaacactgagttagtagggcaggcagttttcaaatcaagatgacacatctaatgttgaacactgtgggttgtaagtacccaacctgagctaaagatgaatatttcacagttatttgcataggagtgatacttaaaagacatgagagtaaattcattctttgagagattataggtaaagactaaaaaccaggggccaaggataatacatcatatgtctatggcatataagtatatgatcttaggagaattagaagctagtcctagcacattatcatgtacatgaaaagttgatgtaagagaaccatactggtttgcagcacctgtataaatacaaccatcctaattttcctattatcacttcctcaagcccatgattgctgcttctgacactttagaagcagtgtctgagctgatcttagtaccatgaccagccccattagcactgctacctcctttaccattacaacagagtatcagcagcagtggtgatcaccagaagactgagtgtgagtcagctccagtagccaagcttaggagaaaaggcaggtcagttcgatagcatgaagccacttggagatgtggaaaggtagagctgtgactagagctggcagaggcataagccttggaaggctggttggggcaaggtgaaaaatgggaaggacagaagcaggtaaagaagccagaaaaggcaaaattttaccaggttctttcctctttactggaatttgaattttgtcctacttgcctgtcttgagactttgactgacataaataaatcttaagacgaaaagggaacaaaagactgaaaacagctcaaatatcttttacttgaaactgggttaaataaactatgctcctataaaaggaatgagaaatagctctctatatagccgtgaagttgtttctagcataaattgttaagtgaaaaagacaaagca

SEQ ID NO: 112927 - DNA, 2469 bp, Homo sapiens
ccagctggtccgctgaggcccagccacactgctttctttaagttcagttcgacccaataatatcattacaataaattcctccttttggattcaaattggctttccatccctagcagttcagccctaatatacagcagatgtcacaactgatttcacatatttggagaaataggagtagctgagacagaatttagtctaccttgctcagagacattcacagatagtgtgaaaaccactcatgagtcccctttgcttaaagttaccctggtcatgtttattacagcatgtaaaggtacatagccttaaagtcttttcaggacttgggatttttcttaaagaaaacaaatcaagagtgttcattaaaagattgatataaaaaattaataattctgaagttaacccaaaacttaatgtaatcttccattggaacatttgttgatgtgtgtggggggtttaaattccacaaatattattaaaatgagcaatcagcagcaagatgttttaaaatattttgtttcagcatgtaaaatctcgttttattacagaattattttgttaaaggcacagctatgccaggttgctgccagagtgataggatcataacagcccagttaattttaaaagactcacaagtggtaggccttggaactactgatggcaacatgtacatcacattttagtataatgcttaaacttacaccacatcttgtgaatttatatgcatctgccaatgtgtgtgtgtgtgtgtgtgtgtgtgtgtgtgtgtctgtgcacgcatgcatgtagatacacatatatttatttcaaagagaagagagttggtgggaagtaggacagacttgtgaagtaattaagaatttctactggctctcacattcttcagtgtaacttaaaatgtgtacaaaagatatcttgaatacactgtgtcaaaactggtctggtttcatttccagttagttgccagcatgctaaaatggagatgcttgctaccaaggtgtagcttgtctaaagtttagtgattagatctccaaatgaaaaagtacagcctaaagaggaaattcttggcacttgtttcaattatctcctctttacaacattatagggtgctttcatgtgtatgtattatcattcatagtagagagtacattgactaagattgcaaaatagtttccattgtatcataatccccttgtgtccagttgactcacatctctgaaaaatttctgctcagttacaaatgtctgctggtctctttccaatgatactttgtttgtttgtttgatggttggaaatctgaagaaagttcacttagttaaaatggtgatgtaaagtatatgagtacagtcctaaaatttactaaatgtacatactcaaatttactcaactttaggtcttcagattttaaaaactagatgaataatctatcctttaaaaattcaccattaattcttcaagtataccaactgctgcatttctaataccaaaacaaccttatcaagtgataatttaattacaccttttaaatgaaattttaaaacatgatttattcatgaaaaacaagtagtttcatccacccttctttttctacaactctttgcatatctgtggcctgctatttattacagcctttctcataatttttagtgtaggcttaacaagcatatagttttaaatctttctttaggagactttctggcttttctcattgctgaattcgacacaaaccttattctcttattagcattcttgcaagggagtttaggtaataatagttaagaaagaatgtttaagtttgatagtacattaaataatagacaatgatcagaagaggaaaaaaatgcatgggtattttggttaaggttttcaaaacctaaatcatctttattctccaccttggcctgaacaaagaataactataatgaaaatttggcctatgtggcttttacacgtatgtgttatttccttccgttacctcacatatataattttttgttgttaaaatgcaacagctggatctcgctattggctttcagatcagtaaaatcagagattgccctttctttgcttcctttttagtggacctgcaggaaatagagttcagagtgtacctcactccttacaagacaacagcccatataattttgcagataaggaaacaactccttcagtttctaaatacccagtatatagtgttgttatcaaacatcaacacctgtatgcatttaaattcactcacagtttaaatgaaattacacatagttaatacatgccacttgtaaagtctaatcttatcttgggaacttggattttgcattccttaactagtgtgcttaaattttcagttgtattatcctatgttttttttgttttttttttttttagtagatgaaaataagacacaggtgtttaggtttctcttcatgtcgataaagatctaaacaagcatttagttatacttaggagcagctg

SEQ ID NO: 112928 - DNA, 1050 bp, Homo sapiens
tataagaggtttcatttttttccacagtgaagtaagacattgttcttattcttcatggcattcagaattctgcacaattgcctcttttgcccttttgcatttaaaagtgaggtaattagatttcccaaggttcaatggtcaagagccttctcatcccgcggagttgcttccccacactgctcacaagtggagctgtctcgcgtaatccagttattgctatattgttgttataaaggaactgctttttcagagagctagcatagcatgaaactttatactcacatgtccctttgctttcattgcttttttccccacatttgaaactaattactattttattcagtgtctgtgaggatttctaaacatttttgttaaaaatcttttcctacgtcctaggaattcatttcaaatatgcctaaatccttcacattgtgagatcctgcctttgttgttttatgtttttgtcagatattcgatcgtcagatctattattactgctgaacaaatggaaagaaaatttgtgacatgttggcaccaaataaattagtgtcatagccactgaaacaaaggcatgtcttcgtctagctctgacagtgagatcttgggcccactctgctatttttttgtcttattttctcattttcacaaacagataatgttttacctttgcaaaaagctgtatatatatatatattctaaagcttggatatcaatttttttttcttttttttttctgagatggggcttcactcttgttgcccaagccagagtgcaatgtcacgatcttggctcactgcaacctctgcctcccgggttcaagtgattctcctgcctcagcctcccaagtagctgggattacagacatgcaccaccacacccggctaattttttgtatttttagtagaaacggggtttcaccctgttggccaggctggtcaggtatccattttttagtcaaaactgaataagatgaaatactcagatttatagagctggccaaaacgtttttgtttttacagcctaatagcaaaagcaatcttgctggtagtt

SEQ ID NO: 112929 - DNA, 1002 bp, Homo sapiens
caaggtcaggagatcgagaccatcctggctaatatggtgaaaccccatctctactaaaaatacaaaaaactagccaggcgtggtggcacgcgcccgtagtcccagctactcaggaggcttaggcagaagaatcgcttgaacccaggaggcggaggttgcagggagccgagattacgccactgcactccagcctggtgacagaacgagactctgtctcaaaaaaaaaaaaaaaaaaaaaaaaaaaaaaagagagagaaaatctatagaagcaaatgtgaaggaaagtaagtgattctgcaaagaggaatgcccaggggaactgaccctaaggacagccttctaggccctaatgatataacatttcccactacctacatttatttactgtgctgtattaggctccctgaggttccagtgattacaggagtacaaccatttcttcttctgccagtttgattactgtgtgttgagagtgaaagcctgtctgacaattggttcccttcctcggatgtgccagcggggcaaaccgcccatctcgccatgtgaatcaaaacccagaaacgttgagaggttccaggcagccttttggttacctctttttttctcaaccctgctctttttccaacccccgccctggccaccatggtacacatgctcatctggccactctgttggatgtgtttccatcagactttacacatacccctattagcaagatcactgcactgtgcaaaaacagggagatatcagtcatatagcaaatgaaatagtacagtaattaatatttgtccactcacatagtaggtgctcaataaatgttcccaaccattatgtgccaggctctctattctctgagggagtctcagctatgaggggtgggggaggtatgcaggagagagaaagagagctccgtcacctggcaggaaatgtagtgctctttgcctcttccagtgattcttcagacttcttagccttgcaaccattgcttcaaattcttgtcca

SEQ ID NO: 112930 - DNA, 1115 bp, Homo sapiens
agggggagctccaagaagttaacatgtaagacatagtttagagacattagtttaggaaatataggaaatggacttctttctgcgttgttccttaaaccatgttttttgcctcaggttggtagtggagaatggacatttctttttcttttcattcttgaattgggtcgactctgtagactttagaaggaatttgtgtgaaaaatactctagttcaccactgaaagcagaaactttcatctttggcagtttgtgaagaacacataaattagaaataacttactattagtatggaaacacaactgcttatttttatctggatattagtgtgctgattttgttacaagaagaacgttgaatcagaattggcagtgcgtttgaaaatcaaggtctgtcatgtaaatacagatttttaaatcagaggaaatacagataattaaaactgccaggatttccctacactgcgttaaaggcctcacacttatttgtgcataaaacttactttgttttgtgagtgagcccttcagcttaaaaaaaatcctctcaggatttcaaatatgagtactgttatatatcattcactggactatacattgagtcttgtgtgtgtgtgtgtttgtagctccaaaacaccaagaatcgttgtgtacctgatacatttatttttgcatctcatagatgaataataaggtagttttaaaattctgatttatatagaaaattacctattattttgcgatttcattttaagagtctcaattttttaatgccttaatttttttcatcattaatctaatgcatataacagcacacaacaaaaaggctgtagcaccaaagccattctcaatttcttaaaaggtagacattttcctttatggaagccacctatgaactgataactgagctttctttagatgagagttattctcctgcttatactcagtattccctgcgaaggcatgctccattttaattattagattcacaaacaggaaggcattactttctcctgattctgcttcttaaaagttggaaaaacttataatgttcatggcatggggtctcttgtttatagtcttcctctatgatgtggtccccagcctctcctagaattggac

SEQ ID NO: 112931 - DNA, 1082 bp, Homo sapiens
tctccttcaaggttctttccccctcagttttgttgttgtcttactctggagatgccaagtgtattttttctttctatgtaattttagattcgccttacaatgtaaatcttcacattggagataatattggttggaccttgcccatcttcactctagccttcgtatttgtgaaggactcagccaccttccttcttcaccccatgcttctcaccaaatttttgttgtcattgagggcacttggataactcaagttgatatttatagctgatcaatctatatgtgtcacagaactatgctgcctaaagtgatcttggctccttaatggtccttttggccccttggatagttaacagctgagtaattctaatctcttctgtgttttccttgccttaaccacaaattgtggtgctttttgtatattttatgtataaatcacaaagttgaattctgactatttttaagacaaaagtctgttaaacttttttattgtaaagaatatttattatgcgaatctctattattttatggtatttattgcaaaagactgttgaaatgtactcatgtttgaatataacaaaatatcaatacttaacggaaaataaggtgacacgaagaaagtacatatgttaactataatgcagaaaatatattaattaatgaaactgtctctcgatttcttcatttattagcctgtactattatgatgatttttgcttatttgctttgactttttcttcttacacacccattttacttctttccctatagatgttgaatctagacataggtgagcccaaattatgaactggataattaggttggtgcaaaagtaattgcagttttgggtcatttttaatggcaaaaacacagttacttttgcaccaacctagtatttcctggaaagtgcattaatcaaaattttgtaatccaaattatcttttaacaaatgctcaagtgagttattttgtacagtaaaaattttttgtaatactctctccctactttgactattttgtaagcatgaggttttgtgtatattatagtttcttgaaatggggcatatctacagtagaagctttttt

SEQ ID NO: 112932 - DNA, 2011 bp, Homo sapiens
atttataatgatagttcataattaaaaaaataaaaaaagccttggagtccgtgcgcggtggctcacacctgtaattccagcactttgggaggccgaggtgggtgaatcacctgagggtcaggagttcgagaccagcctgaccaagacggtgaaactccatctctactaaaaatacaaaaattagccaggcacggtggcaggcgccggtaatctcagctacttgggaggctgaggcaggagaatcgcttcaactcaggaggtggaggttgcagtgagccaggatcacgccattacactccagcctgggtgacaagagcgaaactccatctcagaaaaaaataaaaaataaaaaagccttggctacagttcaagttggttgagagacctggttaagtaattggagaaaaaaatagtttcattcttttactatacagtgtaataaatattagattaaaattataaaaattccagaggaaaaatgtatgtgtttaattttgagatggggatgaactttcttttcttttcttttccttttttgagattgggtcttgtcttgctctgttgcccaggctgaagtgcagtggcacagtcatgactcactgcagcctcagtctcccaggctcaggcaatcttcttgtctcagcctcctgagtagctggcaccacaggtgtgcaccaccacctccacctaatttttaaaaattatttgaagagctagggtctccctatgttgcccaggctatcttgaacttctgggctcaaaccatcctcccgccgtggcctcccaaagcgttgggattacaaacataagccatcttgcccagcaaaggatgaactttttaagcatgaaagcaatgtagtaaatgcaatggaataaattataatggaaattttgtttaaaaagcataagtaaaatgatgaaataagaaaaatatttgcaaaaaacatactgtcacaatgttagttataaaaagaatataaagggacattataaatcagtaagaaaaccatgactatgaaaccaatacaatatttcagtctcaatagtaatcaaaaagattcagattaaagcaaaaattatgcctttaaaatatatagatatatgatagctatacattatatgtatctaaatataaaatatctaataggcattattagtaagaaatgaggcaatatacatagataatacttttggaaagcaattgcacttttggtagcaagacactaaaaatgtttatatactttaactcagtaatttctcctcccaggggaatgatcagagatggactggaaagtgtatgggaagcaactaggatgcacaattacagaaacagtataacccccttgaaaaatgagtgtatttatttatttatatatgtgcacatatgcatggtaaaagcactgaaaaagtggttattatatagataattgggattttaagttttgtatttttcaaattttacatattcagcatgtattgcttttataattggaaaaacaattgaacattatatttaaaagttaaaaatatggctgggcatggtggctcatgcctgtaatcccagcgctttggaaagctgaggcggactgatcacatgaggtcaggagtttcagaccagcctggccaacatagtaaaaccccgtctcaactaaaaatgccaaaattagctgggtgtggtggcatgtgcctgtaatcccagctactcaggacgctgaggcaggagaatcgcttgaacccaggaagcagaggttgcagtgagccgagattgcgccactgcactccagcctgtgcagcagagcaaaactccgtcttaaaaaaaagtgaaaggaatattcttttccctttccttgtaatttaagggctgtgattaagtgctatgatctctctttttctgtttttttcaccttatctcccaagacatgttttacattttctcataaagtcctataacgcttcagttaagaaaaagaaatgataatcatataattatgaatttttgctttaactgcat

SEQ ID NO: 112933 - DNA, 3318 bp, Homo sapiens
atttcaggacagttctttacttcaggagttttagcttctctagggtagatttgatttttattttttccatagtcacacattcaagaatcttaacaaacaatttgtgtatagatggaacttcccttcatatatgtctaatatattaaaattgaaatctacacagcagatatgtttttcttggacttctttgaataactgtatcatgcacgcttctagaatttatttactcctctaagaattctttgttttgggaataaacctgtgttggtctggcttactttgggaatgttgttaatggacatacatgtctcagttgtgcgaacgaaggcacaaaattttggagctggaaggctcatgacttttcagaattatgcagtgggtttacggacagtctcctttttggtggatgatgtggaaatcttcaagagggattggtggatattgaagcagcttgtgacagatttcctcttccaggtgcctccaaatgttagtttggtatcagatgatttggtcagctcctttaatttttaatttttatttttttgagaaagggttttggtctgttgcccaggctggagttcagtggcacaatcatggctcgctgcagccttgacctgccaagatcaagcgatcctccctcctcagcctcctgagtagctgggaccacaggtgtacaccccaatgcctggctaatttttaatttttttttttgtagagacagggtctcacttctttggctaggttggtcttggactcctgggctcaagaaattctccagccttggcctcccaaaatgttgggattacaagtgtgagccactgcacctggccagctactttaatatgaaatgaaaaattggaagataaaatgttatcattattctattattattcaggagacagatgggacaatttgcaagtagaaatggggatgacaatgattagggactaagtttttaaaaataatgagaatttatatatctatcaaaatcaacatgtccagatcttcatgtcacttcccccatcaactccatccttggttttcttcttatgacaaaataaagaatgaacccttaaaaataacaaacaacagaagacagaagacatttctcatgaatttttgacgcatgtttgttgctattattgtgctctatttcctatagttgcttgtttaagcgtttaaaaaaaattcattgaaatttatcatttttctcttaaaccaactcaaaatttcgtgtgtgtgtgtgtgtgtgtgtgtgtatgtgaaaaatgtccctaggatcagctctatttgcattggtatttccagtggaaatgtcaagtgtgacctttttcttgtttgggtgtctaatcctattttaaagccctgtcacgcccctgccaagggtcagtgcccttgtgaatagaacttcagcacctgctacccctttcttctcctcttcttcccctctgagtagaactggaggatgttccggatggcaaacaaaacaatactatgcttcaatgactgcagtgctagaaaataattccagacttgacaatttggcagagtaagttttgaaaccatgagaaaataaacacaaaaaaagcaaacctgaaaagaggaaaagaataaacgtgcaggaacattgcatttcattgctgcaaatatcaagactaacacccccttgaacttttaagctgatgagataggggctctgaaaaaagaccagctctagcaaatacaggctgctaaaatcagtgtcattgacatttcacctttggaaaaaattattaacataaaaaattgtgggaaatataatggaggaaattcagattattatagtaactgggtttggtttctccatttcctaaagtagaattttgaataatgatgcttagcagagctgaattaagcagtaaatgaatgtagacaatttgaatagcaaagggattgtatgctcatgcttattatcatttaaagataatgttctataaaagtcagctctgtttgccagtgcttcggttgaattataatttcccatcacagaaattattagggaattaaataattttgtgttggaacatagccatatttaaatgtgtagtttctcactgaagttcgttatcaacagttttatctgacaatatctcaccacaaaattcctaagggaacaatcttttctggccgcattaatgttctcactgtttttcctaaaatcatgctaattcccactttttcatatgaaataaagccttagtgatgttttctcatattgaaatccaagtgtattttctcttttactttgtaccatgctccgcaatctggtttggtacacagcgcttccatacacgtatctctgcttttccctcatcaccttatattctgatcctgcaatagtttcttgtgtgccaccacaagagtaaccattctaagagatcatatgacactcttcctcaaatacctccaaacccgaaattaaatataaatgtataattgattatgataaggcataatcaaactagattgaatgaaaatatgtagagatagggagtgccatgacccagaaagcttcagaaagcaatggaagtgagagtgacctagaattgggatgaggtggggcttgaaacaagccttgaagaaatgggagtatttggtgagaagtgacaatggagcatgtgtcctcttttagggaacagtgaccaaagacataaaagcattttcgagtatggctaatacagcagtttggctagcatggcatgtcataggagatgaatctaaaaagtaggttaggatttgcttgtggctggccatgattatccgtttacacatctttgtcctctggattttgggaagccatgaaagatgtttgggcagggtagtgatattatcatctaggaagactcactcactggaaatgtacaggacagactggctgcggatagaaggccggaggcagataaactggttagaagacagggatagaatgcccgaggcagagaaactggttagaagacagttgctgtaatctaggtgtgtgtattaaggtcctgattagggtgaaggcaacgagaaaagtggagataccgggaagaaattacttagagaattaggaaattaaacaggtatgagggaagcattaaaaacttactctagaatttcaggtttgaagactaggagaaaaagagcagccaggagaagaatctgaggttttgtgagtatgtgatgggtttttacatatggtgtttgaaatagctgcagttcatttccttgaaaacgtcacgtatgcagtttgggatgcaggattggagttccagcgacagtcctggctagaaatgt

SEQ ID NO: 112934 - DNA, 1014 bp, Homo sapiens
gctgcaaacagaatctgagtgagtggacgaccctcaaaggcaaaaatttcatttgtaagtgattttgtcttttgggtgagatacgatggaaggacagaacatcatgttgaatctcagtttgcttttttggttctcttatgctcccctactttcttatgcgtacctcactgtgtggtgatggtccatttccttgccaatctgatctcccccaaataactgtgagctcctcaaaacctaagtcactcatctctgaatcagaataccttatatgttcctggcacataataagcaatcaatattgcctgctaaataaattagggagggagtgtgtgtttgggggttagctctggagaggaggcgagccccgccttcctgcaaggcaggagaagagagggttgtagagatataattttaaaaactcgaatcaaaggaagaggctattcaggcaagatgatttctatttctttaataaagtagtatccaagcagattttctgagtaggagagatagcagggcctgaagaaagctgttgaatgtcttctatgagcagggtactgaataggcactttgcatacacttccttgaaacccacaatgaagcactaggaagttgttaggattattcccattttgctgataagaaaaccgaggctgaaatagctatacacttatttataagcccatgttaaaattcaagtctcttgactacaaaacctacttccttccgtatgccccattattagagtagttgtaggaagtgtgtagaggatttgagagatgaagacaaatatttagcagcagcaagggtcaagtgaaggtgagtgagcttcatcttgcttaaacccgaggtagtatgttctacaactctgagaagaatagagcaagcaaaaacagtggaaatccaggctttgtgcctgatacgatagaagaagattaagtgaggagggtataaccaaggacaattgcattgatggggatattcattaattatttcgggttgctaaatctagtctct

SEQ ID NO: 112935 - DNA, 1025 bp, Homo sapiens
tgattatgccactgcactccaacctgggtgacagcagtaagaccctgtctccaaaaagaaaaaaagaaaaaaaaaaagagagagaatttataacgcccataaaattaaatcctgttggccagattattgcccaacaaaaagtatattttaaagaccctttaacatctcttgttttgtattggtaagtttgtacccttctagaggaatagtataggacagatccttgtaatgatacaaatataccagtcagtaagcccacatgtgcacatatgttgctatacttccagtaggtagatgtacacgtgcataattatctcattctacattgttaattcatacatttatcatttttatttgctcatgtacttataatctcaaagtagaatcaatatactacatctacatgctaaagttttgtaatgagcattgtgaagtttaacatgtatttaaaatttttgctttaaaatttctaaaaacacaaaatgtttcacaaattgagctaggtaatagatggataaaataaacattgagttgcctgacaagtaggaattccccacctcaagtttctgaattttatactagaattattttaaacatatgtggttataagcttatcagatttccaaaaatgaaccttctataaaaatcacactgggcccctcagctgtgatttcttccattatttatagacaaattgaaaacaaatgtttttttcaaaaaaatacaatgaactgaaaacagctgtcaggatgtactttttctctagaattcatctgtaatacagaagtgtagtaaaccagcacttaagtctccggaaatcgtgccatatttagtggttgttttagcattaattcagagatataagtattgatgcttgctgcaacaagacctgaatatctcatttaactcagtgaagattatgattcaagcaagtgacatggggccaaatgcaaatattacattttggagtgtcttagttgcaaatatattttacaaaggacagactttttgaaaattcatttgaa

SEQ ID NO: 112936 - DNA, 1723 bp, Homo sapiens
aaatgtggtaatctttctggacttttacaacacaaaaaattggaatgcgttttatcacaccaaagcaagctggaaagggtaatttggatttcacttgtggcatgctccatagtcattttctgtaaacgaagatccaatttttagggtgggggcaaatatacaaggtccaatgatttgaaaagatgttttattatttttttctccatgccttccatcttttcagcccaatgggaatttcttcccttgaacagttctaaagaatcacagcattagagataggaattattaggttatttaagctatctttctgctgatgaggagctattcctgtagtacaatttataatgcttttctgagtgtggctttgaacaatgtgacttttatcagatgaaccgtggtggagatggagccctctgtttgtgtttagaacaggtctagcctagggaggaacgaggaagacctctcaaaggctcacctccgcacagcaggcctgatcggctggctggaactcagaagggcaaaaggggagtgaggctccactttgatgtggttcgcttgcagccccgttgctgtactgtggtgtgcatatgttgggggcagggcaagggtaataaataccagggacacttttgcaatgcgtgcctgtcagctgagtgctggacaaacatttttaccactggctatttccctgaggcttctgacagtttgtgcaacttgtgtaagacattcctgaaagagaggagcatttgttcaacttatataacttctttttacatcataagactaaagcagtccttccgggctcatgtcctgttgaatgtgatccaactgaaacttctttcctctgcatactcagaaacctgactacctgtgtaaattcctcctgatagcatagctttctgtttgccctcagtccttctctggccctctcagacacccaggttcataatgacattccttcttcctcttgtaattctattgaattgttaacaaaaaaaaaaaaaaaaggagtaatagctgtgatcgatttctacaatgtgttcttaaattgtgtgtgtgtgtgtgtaaaatgtgtatatttttgcacttgatcttagccaaaaggctgagaaatgaccaaaggtctgtatttttgaattactatataggagcataggaactgctgtgtgattctggaattgtaacagaggagtagctaatggagttttgagggatattatgatgtgcatatagctggggaaactgggtgctcaggagtatgaaccttcattcactcacttcctgctcccagtaggagattaagaaggcatgtgcaacttcttatatttggtatagcttttgtttcctgccaatctttttttttctttttgacaaaaatgctgattggttttgccttgatttatttgtatttagaggttttcaaaatgagttggtttaaggcattacgattgaatacaagttaatcgataatcacgattgtacaccagttcttcctaatacattttatcctgtggccctgtaaaatttccaatcgaccaaagcaagcttggttggtaagggaatgacttacacaggatctttttcatttaggggtttgcaacttacagtgcaccttcacataggtcttctcatttgacttgcgcaatagcccatgagtaaacagcacaagtgttattagattcagctgacagaagaggccaccacaagggctcagagaggtgaa

SEQ ID NO: 112937 - DNA, 2054 bp, Homo sapiens
tgtttataacaccctggtgttcttgacatgctgcttggagaagcctacttctgatatccatgatgggaaggccactcagctcttaacttggggtaatctttctttttaaaaaattgttgtggccgggcacggtggctcacgcctgtaatcccagcactttgggaggccgagacaggcagattacctggggtcaggagttcaagaccagcttggccaacatgatgaaactctgtctctactaaaaatacaaaaattagccgggcgtggttgtgcatgcctgtagtcccagctacttgggagactgaggcaggagaattgcttgaacttgggagatggaggttgcagtgagccgagatcatgccactacactccagcctgggagacagagcaagactccgtcttaaaaaaaaattgttgctactgctgcacctttggcattatctgtgagcaatcttagtgaatttggcagagattaggaccagcgtgcattgggaaaaaccagaagtggaaaatttgagtaaaaatcttcaggaaagtacaataaaatgttcctgaaagttaaaattaatcacttgaatatgtgtggcctatatttttaagtttaaagttgagtttcaaggtgtggccccttgtaacattcatgagactggctataaaaaattgccattatttttgaaactttctatttcaaatgatgttggtttttaaatgttccaaagtaaagaatgtgatatatcagacagagctacaactggctcttacaagtctaagcttttccacctataaatgggagtaaaaacatacctggtaagaggtatcattttaagttattggagatgctccaaaacctatcatcttaaaattaaaatgcatgattttcaaaagtatagaatgtttacaaacttatatcttgaagaatagttgactgaaaatcacttggcttatgtgaaaataaaaagccacggccaggcgtggtggctcatgccagtaatcccagctactttggcaggctgaggccgggaaatcacttgaggtcaggagtttgagattagcctgaccaacttgatgaaaccccctctctactaaaaatacaaaaattagccaggtatggtggcctgtagtctcagctacttgggaggctgaggcaggagaattgcttgaacctagaaggtggaggttgcagtgagccaaggttaagccactgcacttcagcctgggcgacggagtgagactccatttcaaaaaaaaccaaaaaggatttctctatgtccactggtttctttttgtaccaaaggaaaggtaatctgaaatcactcaaatgaattgtcccagagatagagactattcaggtgagtgtggtcagatgcagggacagggtaaactcacacttcctaaacgagtggacaaatcagggcttgctcaggaatacagaagccactctatgtattccagatataaagagtttaattgagaattaggaattcatgcaacctttgaatagctgggagggagggctgcactggtgcacaggtcataaaactacccctgaagatcaggggaacagccccaaaggtcagagtggttgacactgaagcctacagctccaaacacttggagtaattttcaaaagcttgtctgcaagctgctgcacctcttgagaacctctgagaagttctcgctgtctcagtctgctgtgcaaccttgcctgtgcatttgtgtacaaatgcctccagagaataggcttcacactccacatctaccccaagtcttctcccgtgaagtgactctgcaagacgattgtgtagaagtttccacacttaggagggggtgttggtggtgccaagttagcagcagactatccagcaacgaggcctgcttctctaaactctcacagaaaaatgaaatgtgatataatcactgaacaaaaatagaccccaacatgacttcattccttcactcattcattcatttaacaaagtatcctttgaatagctgggctatgtggtatgtactgggaaaactattgtgtagagatagattcatccctgcttatt

SEQ ID NO: 112938 - DNA, 1218 bp, Homo sapiens
cacaggaagtcaagctacaagagggtctagaaatgctgaggaacttgctgggcatggtggctcacacctgtaatcccagcactttgggaggctaaagtgggtggatcacctgaggtcaggcattcaagaccagcctggccaacatggtaaaactccatctctactaaaaatacaaaaattagctgggcatggtggcatgtgcctgtagtcccagctacttgggaggctgaggcaggagaattgcttgaactcgggaagcagaggttgcagcaagcagagatcgtgcggctgcgctccagcctgggtaacagagtgagactccgtctcaaaaaaaaaaaaaaaaaaaacacagaaaagaaaagagaaatgctgaggaacacaactcattgttcacttttacaggagctgtcaaacctctggccctattctccatttaatgaaacttagcagatagtataggcaggtcacaggtgggagtcagagaggccattttagctgtgagtgatttcttcttaaagatgaggaatttcaaaggaagagtggagctatggaagaggtacttgtaattatgatataaaaatagaaagcagatgtgtcagacattacagcaaaaaaggaaaagaagtccgtatttacaaaacaaagaactaatggcatttcttttcaatctcctaaggtatgacaatggtgcagccaagaataacaaagaacaggaactagaaaaaatgaattgcagtttctcttaattttcattcatatctaaatcctctgttcttgtatattcaaataaaaacagcaacaggaacttagctttgggctaaaactggaaacaattcaggttgttatacttttttgaaaacaaaatttaattttttcaggttcaaataaatgcaattcaaagtaatgaaatgataatcatgaatgataagtgaggggggaggacaacatggtaaagagatgagaagatagtaattaatttgggggaaagttcatatctgctatgtacaaaatgttagaattataaactcaagatgtgaaaattaaaagaaacctagaaaccagttgaacttctccctgcaggcagaatttcttctgtatccctaacaaacgattcatcttctatcttccacttgactatttctgggaacaaagagcaagctgccatcttggtcatcaaatgataaataaatgtagtttggtataactctttcttagtaa

SEQ ID NO: 112939 - DNA, 1048 bp, Homo sapiens
ccacagaaatacaaactaccatcagagaatactataaacacttctatgcaaataaactagaaaatccagaagaaatgggtacattcctggacacatacaccctcccaagactaaaccaggaagaagctgtatccctgaatagaccaataacaggctctgaaattgaggcaataattaatagcctaccaaccaaaaaaagtccaggaccagatggattcacagctgaattctaccagaggtacaaggaggagctgttaccattccttctgaaactattccaatcaatagaaaaagagggaatcctccctaactcattttatgaggccagcatcatcctgataccaaagcctggcagagacacaacaaaaaaagagaatattagaccaagatccctgatgaacatcgatgcaaaaatcctcaataaaatactggcaaaccgaatccagcaacacatcaaaaagcttatccaccatgatcaagtgggaaacatctatcttcttaaatgcagctgtaccttaccattgcctgccgaattctccttatgtgttcaacctcagtggaaggagcaatttgaacttccttgcctatcaaactgttttgtaattttctgtttacctttctcccccatgccactgtgagcacctctgaggacaaaaactgggtctttcattttgcatacccagtatacagttggcgctccatgttgtttgttgaatgtgtataaactcatctaaatattactttgttatatcggatagaatatagatcttaaatgactttttttttacttgcctactatttattccaacatcatttaaaaaaatccttctgactggacaaggtggctcatatctgtaatcccagcattttgggaggctgaggtgggagaattgcttgagtccaggaggttgaggctgcagtaagccctgactgtgccagtgcactccagccggggcaacagagtgagactgtatctctcaaaaaaaaaaaaaaaaaaagtcctttctacacccttatgtgaaaaatttactttgtcatatattaaatt

SEQ ID NO: 112940 - DNA, 1074 bp, Homo sapiens
gtacaaacctctgcttaaccgacacctctcacattaatttaatgatttttcacagtgcttccctctcccactctatagcccctaagtacatgcttagtgtcagtattccacattatactccagaagctggatgccatttctagaaggtcacatttcgaaagccaagccatgccacccactctgggaaagcactttctgttcaggctcttctgtggctattagtaaagcctagttgactttacttggctatcatgaagtaggttatactggaggacaggagatgggttgacagaggcaagagcttgtggtgacagaatcagagctactgctaacagatgttgtgtcctatttgaatgccatggaaaaatacattgctcttttgcgggcatatagggtcttctggtgcgtagctatgaaggcaaacctaaagagctagtggtcaggaaaatcaggcccagctctaagcctgtgcttaaccaggacttctagtgtaaaacaactagtgctgagatagtggaatcccattgtaacctgttgtccagagatgagaaaacacccatattattggcttcctctgtcacaatgagagggctcactttacaccactatgtacttggggatatgatttgatttgcaacataactgaatccatgagaaagccaagtgtgggactcatgaatttttactgtatttcttccatgttaaagcaacaaaaattcataagaatcttttctgcatcatcaaaaaaagtcaaaatgtcagccctgtataagcacgttcttcccaacatatacatgtagcctctgaacatctgcaaagcagcattgccattgaagagtttgctggtgttttggaacaagtgaatagcagccagatagcataaagagcaaggaaaactttcagcttgtagactcacagatgggatttctgctgaaatgattaacaactattgtcagatctgcaagtagtgaccacaaaacacctgctctcgtttcacgtgtttaaattcacatttattaaaatgggctgggtgcggaggcgcctgcctatagtcccagctacttggtgggctga

SEQ ID NO: 112941 - DNA, 1052 bp, Homo sapiens
caggcatggtggctcacgcctgtaatcccagcactttgggaggctgaggtgggtggatcacctgaggtcaggagttcgagaccagcctggtcaatatggtgaaaccccgtctctactaaaactacaaaaattagccaggtatggtggcaggcacctgtaatcccagctacttgggaggctgagacagaagaattgcttgaacccaggaggtgggggttgcagtgagctgaagattgtgccattgcacttcagcctgggtgacagagcgagactgactcaaaaaaaaaaaaaaaagaaaatcaagataaaactgaaagcaacttatgtatttcctacttatttaatacttttctatttgtttagtcataggaaaaaggcatatgcagccattaggcatatacatacattaccgtgcacattactttgtgaacctctattatttaccagcagcccaatattatttcacatttgaagctgtctgcctgagacaacggagaatggtatatcagtaacttatgaggtgcctatgtaagatagaaacttagactagatgagtgagtctcaaatgttgggataccacagaatcacctggggagcttgttaaaaatacagatatcttggctcaagagtatctgtattttgaccaagctcacctaggtggctggtgtgtaccaatatttgtaaaatattgagtttggtgacctataaaatctttttaaactctaagattatatgagcctacaaaacagatatatatgtgtcttcaaagacctcatgatatcaaacttaatcaattaaaagaaaacttcttttgaaagtctcttataaaggaaaccaatgttttagccattcttctttgttcctagttgtccctccagtgagtttgtgtcactcttcacagtctgtatttctcctgcttacatgtgattcccacatgttctacagagtctaaaggcatatgaggtaagctttataaaacagctcagtgtgttacggccaaacgtgcctcctttccattgtgtcaaatcaccacctgaaaagggatgaggcag

SEQ ID NO: 112942 - DNA, 1369 bp, Homo sapiens
ccaggctggagtgcagtggcgtgatctcggctcactgcaagctccgcctcccgggttcacgccattctcctgcctcagcctcccaagtagctgggactacaggcgcccgccactaggcccggctaattttttgtatttttagtagagacggggtttcaccgttttagccgggatggtctcgatctcctgacctcgtgatccacccgcctcggcctcccaaagtgctgggattacaggcgtgagccaccgcgcccggcctttattatctcttaacagaagtagggaataatgttgattggctcttggaccaaagctatgctgctttaacctactcagcttaaagctatttcattttgacttgtaatccctgatgagatttaaaaagggcaggtttttcaaggtccatgattttaaagattaaggtttcataatactatgtccttgatgcgcaccagtagaagcagttctacagttttgagcatacacatttagtcaaaccaagaagtatgataatttaaattatggggtttggctgggtgcggtggctcacgcctgtaatcccagcactttgggaggctgaggcaggtggatcacgagctcaggagatcgagaccatcctggctaacacggtgaaaccccgtctctactaaatatacacaaaattagccgggcatggtggcgggcgcctgtatttccagctactcgggaggctgaggcaggagaatggtgtgaacctgggaggcagaggttgcagtgaactgagatcgtgccactgcactccagcctgggcgacagagcgagactccatctaaattaaataaataaaaataaaaaaattatggagtttaacaatgtttagtgatcaaattaactggaaaacaatttaatctctcattcattttgtgttatggggactcaacttctagcaaatcctaatactctcttgtgcactaagaataaagattgttggctgggcacggtggctcatgcctgtaatcccagcactttgggaggccaagatgggcggatcatgaggtcaggagtttgagaccagcctgaccaacatggtgaaaacccatttttactaaaaatacaaaaattagctgggcgtggtggtgcgtgcctgtaatcccaggtactcaggaggctgagacaggagaattacttgaacccgggaggcagaggttgcagtgagccgagatcatgccactgcactccagcctgggcaacagagcgagactctgtctcaaaaaaaataaaaaataaaagaaataatgaagagtctaaagtaggctgtgtatcctaggaggaaaaaccatgggctatgctgtcttagtacattccattccattccgttttatttcattaa

SEQ ID NO: 112943 - DNA, 1035 bp, Homo sapiens
aacagataaatatcaaagcagaacttcaccttgttgaaatgggtcttgatcttctctgaaatcctttcttgaatgattcactgaagaaagtgtcttcaatgatacattcatcctctgatttacatagagtagtgactttccttacatgcactcaggtagaatcaaggttttcccagtaccctttggcaggtctgacggcacaggcatcttcagctcaacttgccacatatggttgttgaactccctcatgatgactaaagaaccaaacttgcctggtttttccaggcaaggcaacattttgatgttttttaatagtgtgaacacctgccaataggattttatgagtatcatggggagacgcatcctctgacctggcatataatctcacttctctggatgctgggctaattacatcagctccgctgggcatgggtctaaattggaaatgttctagtgtttgaaaaattccagattgataggacttaaccccaggatgctttatgatgtatccctagttaccctagttggcagaaattgaaaaggcctggaaatccctatttactataagtccctcttctcttaactggaaagatgggcattggaagacttgctactaagttttactttgagcacctctcttggcatcatttattactaaaaataatggaaaagacagagtaggtattgggaagcctgttttctagttctaggcctgctactaaccagccttggaccaattatacccacttccacccatgtgagcctcagtttcctcacctataaggaaataaaataagatttggaccagacctgtggttttaaaatcagagtaccctgctgtttaaaaatcttttacatctggagttttgtgtaaggttttagtttacagttcactgataaacactgtcataaagcccctgctctagaggcttgctgaggtcctgttcctcttcagcttgaaagatctgcaattctattaacacagttggtgatagccatgtgccttgggaatcacagttgtttcatttggctaga

SEQ ID NO: 112944 - DNA, 1029 bp, Homo sapiens
ctggggtctcccatacaggtgagaaatgactggaactcagctttggattcatttcttcagtggcagtagatggaaaactatggtctacctggagggaatgagggcctgaaatggagtgaccatgggaacatgggtaggttacagaagggaaagccaatgcagaggagggccgacaggattctccaggtgtgatgggatttgccagctggcgtgagggagtgggaggatacaaaaatcacatctagcttgggaaccatgtgaagaggatgctggtgatgccattgactaaagtaaggacgttggagttttagggaagaaggtaatgaattaggttttggacatgttgagtttgtccaacaaactgcagtttatttgcaccaggactggagcttggggaaatttgtattgtacatttctaagtaaatataaagttgacctttttttaatcttaatgtctcagatgctttattgggcttcataagttgttacttaggggactctgttaatcataatggagtaaggcaataggtttaccttttctcttctctgctggacccaaactccagagaacttctttcccaccattgggcttaaggatcctgagagtcatgacaaagatgatgttccaggaaaatgcctatttcttaaaaggacttttgcccagaatacctatgtgttcttccaccccaatgagctcaaatgtgaacaaagcagaaagctcttcaattgtagtccagaggcatttcttagtagcatcccttatttcctttttgctctgagcctcaacctggctccacttgatctttcctgtctcggacccattgtttgagtgcaacagactaagtgagggctgccccatgtattaaagagggatgtaagtagagagtcatagtcagcatccctaggtccaggagaaaagcttataatggaaatatggaagtgagggtgaaattggatggggcttggggacacatagcaaggttaatagtaatggtggtcaagagactaagaattaaggcaagggctctt

SEQ ID NO: 112945 - DNA, 1057 bp, Homo sapiens
aggccgaggctggtggatcacctgagttcacgagttcgaggccagcctggccaacatggtgaaaccccatctctactaaaaatacaaaaaaattagctgggggtggtggcagccacctgtaatcccagctactcaggaggctgaggcaggagaatcgcttgaacctgggaggcggaagttgcagtgagccgagattgcgccattgcactccagcctggacaacaagagtgaaactccatctcaaaaaaaaattaaaaaatataaaataaaataccactttactcatgtcaaagcattgttcaaaaaccgctattccatatcacttataaagtcgaaattctttaggttggtcttcaagagtctcaatacctgtgctgactctcccacaatttctttaaaccagctctgccttggcagtgtagacctccccttgtcaactaaaaatctatcttcacctttgttcatgcctttctccctccttttttggaatcttactcatcccttaatccttggcttaagtccatctcctctgaaaggatgtttgaatcaccctaatcttcagggatttctttacctacgtgcctgtcttctactaaatatatcattatggatggacgctgtgcctggtcacttagcacttaccatgtgctctcttaaacagccattcatctccgtatgcaaattttcctcctttcttcaactggcagacttcttgaggatggggctcatgacttttccttccttgtatttccacagctcccaacatgttccttggatatagctggcatgcagtgaatatttgttgatggatagatatttatagctgttttcttgaaaactggaagtatatagttatcccatgattaatggatgggttggagccctttagtagaaaccaatttatttgcatacaagcttatctatctagataagaatgctctgcctaagtatggaaaaaacttcaagagcatttcaaatcctcaaaaatgtgtgtgcactcagtgatatgaatccacatttgccataagcaggatgaatgaaaaatgaaactaaatga

SEQ ID NO: 112946 - DNA, 1032 bp, Homo sapiens
tctaactttactttttcttgcttatggattctttgctcacattttataaagccaagaaattttaaattttttaaagcccttgtgaagataaaagatacaagataatatgtgcttgcaattgctttaccaaggtttcaaaagaaataaaaacaaaatgaaacaattaagaagtctctgtcaaaggtctggaaaatacgacttttggatagatttttcaggagacctgttttgcattaaaataccaactaaaacaaaatgatggattgttttggcaccatttagattgagcttatgtgatgagaactgtacataaaagacagccagttattgtcgtagttgacagatttttgggtactgtctagttgttcagtatagtaaagtcccaggggtcagaagcttttccaaaattcttatgccaggaacgacacaaacttttgctgtaacagagactgacattctcttcctactttatagatatctataagttgtggtctttccctggcacatcaaattagttcctgtgactttctgtgtaatacattattgttcctgatgtgacttcatttttacatgcaaaaatgtttgaaatttgccttaaagtattggtcatattttaatggagataggtgcagaggttttcaagtggagcagacagcttaggcaaggagaaaatgaggcagagcgtgtcctaggaaaagcaagatgatgagtttggttggagtctaggttgtatctaggggttctctgagaaataatattggaaaggtgttttggggacctatttggaaggctttgagttcctggtttttaatttttaggcaatgtggatccattttcatctgataaaacacatgttcaagaaatttctaagaaggcccctggagtgacctagaggagaggtgataaggtttgaatagggtagcagtgacaacaggaagcacataatgacagattatcttaattttgccacattatactttatatgcttgtgatacaaggtgacatatgtcactgaaagatcctattaataaa

SEQ ID NO: 112947 - DNA, 1179 bp, Homo sapiens
tcttagatcccaccccagatgttgaatcaggacctgcattttagcaagatcccaagagataccaatgaacattaatgttggaggaatgctgatctcagcattactgatcactattattactgcttctattacgtcactacctctcaaaacctgaggagagctcccacttgttgtaccatgtgctagcgacttaaatacattgccacatgtaactccattttcatgataacattgcaatatagataatatcatccccattatatacatgagggaactgaggcttagactttaagaaatgtatccaaggctgcacagctaataagcagcaatgacaggagtagaacctaagcctgtttccaaggcctgtacacaatcaacctcaaggattcaagtgtggtttatttgagggtgacctcagaagatactgataggagagtgcagatatgaaatagagaagaacgggagcaataacgggtacattgttgagccagtttccattctgggcatctgcagcctaatcccagaagactctgggacatgatttaaaatacatttcagggttattcccctaagcaatgagggaacttgggtatcgatactgtcataggtaaagagctgcttctgggggtactaatatcctggtatttctgggcagctgcacatgtggaaaaagtgggcttaggcagtcagagaaagcctgtaggcaaagaaatgcaggtgctggccattagaaatctggccaggattagggtgagagaatatggctggacatcaacagtgtctactgtactatgctcgccttaccttacagaaatattatttagaaggacatttttctctttatttttatttattggaccaaatattgttatggaattaaaggatctgtatacacaaagtccttcttcttagggatactggcatgttttttagacattaaaataaaatttaaataatgaaaaagataatatcaaatcatcttaccttaacaagtaagaagctttcatttcactgtgttctctaacagtgctcatctatatgcatgcattattatattcttttgtttaaacttaatgtatcattgccactttctatgtggctacctaagcaggtaattatgcatggctgagaaacatcccattatgtggctgtcacaatgcattgaacaagtcctttatt

SEQ ID NO: 112948 - DNA, 1233 bp, Homo sapiens
caggcgtgagtcaccgtgcccagcctgtgagtttttaataaaccagttaaaatttgtttatccaaaggagaagaaatacaaacaatactggacacatgcaagatgtgttttttcttagcggcagctgctaaccatcctggcttcctggcagggagcaggttatcatctatcctgtgactacgagggcacaccctgcgttagccctgaggcaaagagataataatagcatgctagactggcagcctacactctggaagggtttatgaggaggaagtccgcaattacatatttctgggcaaacattaaccaagattgaaacccagatttgaagaaaaatagcaggctggaatcttcagacagattctgtagctgttctgtggattgaaacagtagtcagacacgctgctaactccaaaaggtaaggtaaaagattgagatggcagtatataaaacttggtaagaaaacttttccacacctgcccacagaatgtgttctgtaacacacagagcattgtccacatatgaatgatgagaaattatttacattcatgacaacagaaccgaagccacaacatagggtctattgttcacctcataggggtgaccgaatctatttatccatgtggtttgggagctcaccactgtgcattgaagggcctcctgttggcaacatcaccaagagcatttcagtcactgttactacaatctgaacaatttgggttccacgctgtggttttgtaatttctatttttaaaacttgaaccatggtgtgtccagtcttggttgggcatacttaaaatgaaactgttaagctaaaattagcttgacatcaagacgttgcatgttcattttccttatatttatagctgaccacagtcattatacagaagccatctagtctttactgtgcactctagggaacaggaggggcagtgggagtaaccaaaaaaagaactacaagtttttccaaaggcggttggtcgtaactactgcctgagcagagcggtgcctgcgtcttagtgaggtcagcccaagtgggactgacctcactaagatgaggactttcctttgaacagctgtttactcttcagttcttctgcagttaatcaacagtgatgggaccttttctaaaagttttgcttagggcctcagaatttaacttaaatcaccacgaaggaagtatatacaacaaagcttcctcttagtatttcttcaccaagtaattatctactg

SEQ ID NO: 112949 - DNA, 1086 bp, Homo sapiens
acacagacaaaaggaagtggaggcttaaacaattaactggtgactgcaggacccattgtttaggaatctggataattgagtcctaatttctctgactcccttcactttggtaaattatagaaagaaaaagattttgagactcagtctcatttttggcagttaaggtaagaaatccatctatgcttccgttttactgttttttttttctttttctctcctctcaaaacaattcaacatttccttctctgcttatttcaaatctaaatgtggtacatattttaagacatattttaaccacaaattttattggtgactgcaatcactgaaaggaaggtactctgtgaacacagaaattgttttaatgtttttaatcaataattcctataaacaaattttgtcttgaggaaatagaatatgcagctatttcctttctgcatttacagtgacctctgaaatatattacaaccactcatctgtatctaatcccacatgtgtggtgaacactttaagtaacttattgactagaatccttctggaggtatctgtggaggatgatgatagagatgatgttacagaacagtttgaaaaagacgccaattggcattttgaaggattaccaacatttctaataaagtctctgaagagatttctggctgcttaagaacaataatatgatagagattgattattttgaggtttcgaagttaaatacttgcatgtggtgaatactgaggcttattgtgaaaatgaaaattagacctatgtagaaatccttgtggagaatgagacggtcaggacttttatcaatgctgctctttatacaactgcctctttggagaagaagtcggttcactgtccttgttaaatttcaactgcggctgattctgaatcttgaggaccattatgatgtgaaaaaagaaaaaaacactcactaaaagttaatgatctttccctaatctttcagaaaagctgatactgactggtagatagtagtgctctgtcagaattgtagaatgaatgaatcaagctgatataattcactaaccatctacccaagccaggatctgtgttagagctttagagaca

SEQ ID NO: 112950 - DNA, 1027 bp, Homo sapiens
gaaacatcagggaatggtgctaatggtgaccatatcacaacttgtgttctttggcaactttcttatggtacatttccagttttatctgtccttctacagcatagcctccttggagtcagagtgagttcactaccctgtctgccacgtagtgatcaggacaggtcctcagttaatgttttggtacataaggtgaacagagtactaccccaagtggcttttccccaagtgttggagaggaacttaggtttctgctcccaggatatatataatttttgtatccaggaaagtctttagtagaatatatataatgtaactcaaaatcaaggtaaggtcttgcaaaggaccttatcatctcctgctgtctttttgcttgagcccatatggaaatatcaactgtgaacctggaggtattaagagagcctactctttaaatgcttcatttttcctcttctaaagaaccatagtcaaaggccaggatcgatttctgatttgttttaagcaacaatatggctcaggaagaggtgagcacattgtttcagaacttgggcttgatcagcctctgaaatatgcttgaaatcaatgtatctggatctgcaggaagggctggaaaaaaagaaagtttttggtgttaagtgatttttagttgaaaatcacctactgaatagtctgaagtcatatatcaacatcttacttgctttttcttttctaattatgtaagacatttatattgtttttatagaaaagtcagcaaatacagatgaatgaaaagaaaaaaaaaagcaccgtaaaaggagaaattacctataagaaaaacatcttaattcctgtcttggattaatgtcttttaaacgaaatatcatctactctttcactgttgtagtgaatgtttcttacagcactgatcaattaacatactgtgttatagtttctgtcactacattgtaaatttacagacagtaaatttacatcataagcttggcctgatgttttcaaagaaattcctttttattaaacaaattttaaacaa

SEQ ID NO: 112951 - DNA, 1033 bp, Homo sapiens
tgaggagaccccagatttggtaaatagatgatcagaccaattttatggggaaggactggagttttgccttaaatgggatctttcatagaccagaacctccaatttggcaacatacattgataaaaataaatgaataatttcttaatctccatttccctttggtctatgtcttaatattagttaattgccagcaagcaaatgattaaaagatgctgtgagggtttaaattcacttgtgagaggcacaagaggcaggctcagggcctgaagcgacaggatagatttttttttttttttctgaagaatacataattgattctttttttttggctttcttccttcaaacctacccattcacaggataatcataatcacagcagtttacatttgcataatgccttaccatttgctttcacagattttattcccacttgatcagagggtgtctgcattgtgctgagtacctaatcttgaaataaataatttactatatgaggatttaaacaggtcttttagataaaaagtgcattacatatttatgagcactgatttcaagaatcgctttgaaagaactattgatgttgctttatattagagatctggaacttaatctcatttgattcatccttgattttatttttctgaggttccaaatcatgtttgtaaatccctgagggtctttttcctccctgtgagaggaaaaatgtttaggcacatgtcaggaatttaaaaaccttctgccactattctcagtatattgggaaaaccaattttctgaaattaaaatggcagtccattttgcaaggcaataataatgatgatgatgttggtaataaaacttaggggttctaattcagtacagcaggagagagaagatttcaatctattaaaacaaagtcctttgatgtctgctgtgaagagggatctcataaatggttattatttacttttaaaatgcattattgcttgagcatctgtgatttacttttttatttttgttgtttataaaggttattgcctttaaaccagttctt

SEQ ID NO: 112952 - DNA, 1023 bp, Homo sapiens
aagactagaataaacattgtttcctgattgctacagttcaaaatcactaaaagattttgcttgcttaaataaaaaatgaaattgcgaggggaaagctttttttccctctctttaagaagggagagagaaaaaaaaaaaccatgaaagcagggggagctttgcaaggctactgatgcctgagtagaatcactaactggttccctcgctctgtgctaggccgtctgtattcactgtatcacaagcttgaaaccagacctcatttgacggagccaaaaaatggtccttttgttgctgtttttttttccctagtgtcatctctcatggttgcctgggcaaccagtgtgtatcctttcagcataggttactgggccccaggaaggaagtgctccagcgctggcctgctatttttatagaaccgttacataatacaatctattaaagcttcctcttggtgttttattgcacaaaggggaaattaagtttgatgactcctaaatgttggatggaggatgtcaggtgactctaggattgtttggctcaggtcacatagcaacagtattcccatatgcaattccagaagaacccatatacaatcatgcccttggcaatgttcgcctgcctggggatcattagaggaaactgagctctctgctgctcaggggtgtaagttttgtccgactacacaatgctccctctctggtaggatggcagcagacaatgaaacactattcacagttaagggcaaagagaattttaaaggtgtcgcacatatgcttttaataggtggggtgattactggcaaagagaattggattgaaagacagaggaccagggtctctctcaagtcggccactgcagcattgcatgaatgttgtggtcagttttgcttctgggtaactctcaagtggtccagggcagggaggcattgggacgggatggggcgggggcggggggtgtaataggtaaatggcttttaagtggagacctaagacctctgtaacacaacttcaggtattctccact

SEQ ID NO: 112953 - DNA, 1021 bp, Homo sapiens
gtctttctccagggatgggttagctgcccttccaggggctcccattctaccatgggtatctcctatcctatcctgtcctgtcctgtcctactttatgctatgttctctaataaactataagctacttgaggttaggaactagttcttattcttcatgataactgtagccctgaccatagtgctctgcacatggtagatattcaagaaatagttgtataaatgaatggcatttaagcttaagccaaatgctaaattagcatcatacctgggaaattaagaggggttaattttttaggggttaatacttgaatgttttttagaaagtccattaaggagctatgataagagagaagcagaggaacaattcggacagtgttattattttaatttgaccatatatttggaatggaaaatggattgtaatgattcagagcaaagaattcctttcttggaaatgaaaggctggaaaatgaagcatggagacatacttcttattgaaaacacagcaggggagtgtccttccccctaaaatcattcagactgtcagattaaacatatattatttcttaaaaaaatattcccagaggaaatccagcatctatctccccctactggtgtcatattaagagtgatgtctgactgttttcccttgaaatgaggaatgttctaattaagatgaacattttaatttgttatttggacaaaaaaaacttatataaaacttaagcattctacaatggacatttgtgttgtaatgagctttagcaatatttgagatatacattgtttcatcacacataaagaatggttaaatattctggctagttcatctgccattaacagatttatatgacaatggattgtaactgattgatacaatgaaagttttatttactacagaaaatttcaaacatatacaaaatataaagaataatataattctttacatatacatacatataatgggaacttccatgtcccattatctagctccaacaaacaagtcataactaatcttgtt

SEQ ID NO: 112954 - DNA, 1035 bp, Homo sapiens
gacttcacccaatgctccctttccttttgttgatattgctttgcatctgtttgtagctctaaatcatattcatgaatataaccatatgctgggtcctttgggtccacctagcaaatcatcaaaccgaaagatgctcttggggaccttagatagaaatatcatttactgtgatagtaggaaacataaaaaactggaaacaagtatgataaaagatatacaatatcattacatctaaaactttaaaatattattgagaacaattaaagaagacctaagtaaatactgtgttcatggattggaagattcaatactgctaatatctcaattctttctaaattaattgataaagtcaatggaataaaaataataattccagcagatttttaaaggaagttaaatttgataagctgattctaaaatttacgtgaaaagacaaagggctaagaataaccaggacaaacttgaagcagaataaagctacctaatgtcaagatttattttaaagatatagtaagtaattgagagaatatgacattggcataagagtggacaaactgaccattggaacaagataggaagtccagagacacacctacacatatatgttcaaatggcttatgatagaagtatagaggggaaaggattatctgtttagtaaatagtgctgcatttatcagatagccacatggcaaaaaacatatcatgtacacaaaagtcaattccagatggactgtagatctaaatgtgaaagacaaaattataaaacatttagaataaacatagatgaacatctttctgacttcggagtaggcaaacttgttaaaataggaatcaaataccctcacatgcaagaaaatagtgatacaatagagtaaataaaagcaggaccttctgtttctcaaaagactgaattatagagtggaaaaagtacttgcagtacacatatctaacaaaggacttatctccataatatgttagcaaatttcacaattattaagaaaaatcaacaacagcccaataggagagtgggcaaaa

SEQ ID NO: 112955 - DNA, 1069 bp, Homo sapiens
tgccaagtatggagggtttagagcaagtgcatgacaataccaaagcagagttcttttagaataatcaaatgctgctaactgggtgtgtgattctgagggagacagcctattttcatgtctgatagagttcctttgaatggagaatatggaagatcctgtactttattaggtggccctctctactttaattatcctgatgcctgtcctctgagtctttctcattctcctctcttgtcttaatcctgatttaaaaggaggataagaaacataagcagatgaataaaaatagcagcccaggaagctttgcattgattcattctacaaatagttgttaaataaatacatgtgccagacactattcctgatcttttaaaacttgtgttcttgtgtgtgtgtgtgtgtgtgtatgtgtatgtgtgtgtgatgcacataaataaactatttgatcatcaataacttttcacagtagtatcttctcacactagtgaacatttttggggtagttttggtacaggcatttaggttgatttttttttccttacaaagttcctggtaagtttggaggctgggagtttgattatagaaggtattattagtgcctgtctcttaattgatcagaggttttgctatactaaaatgaccgttcttaaaaaagtgtttccgaagatctctcaagctttataaaccttcatttttgtacatgttgtaactgtttgctgaaaaattcattctgtaggtggctgaaacctccagggggctatgcactgggtgagagaagtgaaataggatgtggtaggagagtaaatggcaaaacaagggagaggaaaaaacatcctagttttcttctgcctggaaataaacatgcaggaagctttaatatcagtagcagctgtagattttttttaagttaaaagttttggagatagttggaaaaacaaaaacaaaaacaaaccacatctggaaacatttcaagcaaaggcaatgtaaaaaatgtgttggatgatatattaggagaagagctggttgcaagtaacactaaaatttaaaatgagatcacttatttctctct

SEQ ID NO: 112956 - DNA, 1020 bp, Homo sapiens
ccctaaaaatgttaataatgttgatttttattgttttaccctttgttttccattttatgcaaccaagattttcccttgcaccttagaatgctttctttaaaatgtccttgctctcttaattttctgagttgctactttctcattttccttgctgattataaaacaactgaaggataagaaacacatgtttttctataactgtttttaattaaatgtttggtaaactgaaatgattgtaattactcttttgttatcttcaagaatctactcaagcttcctcagtttctcaaatcattcttgggcaacaaatgaacaagaaagaggacgtcttattatctggtgtctggcttgctgatttaataacctaggagacagtgtttgaagaacacaaactctaaagtccttcacttaaaaaaaaaaaaaaactttcccaaattgcttaccatttggaaaaattgccttaccttcttcagtcatctctgatgttgtcatcctcagagtaagaagtacgcattcataaggaaccataacgtccttcaggaaatccagtacaccctacaattttacctaaaactttgatgttgttttttctgagcattttaccttctagggaaatggatctcatgctgtttatcagtttctgaaagttgttattaatctcccctcatcccaaaattgaagaactttgcttaaatcttagaatcagaactttggctccagtaataaagacttttcaatatctttatctgccattgagtcttacctaacgaaataaagcctccaaagtgggaatttgaaatgttttagaatctttttttttccttttgacatagtgattggtgggatgctacaggcagttagtggttagggtccagaaatgccagacatcttgcagtgagagggatagtctgtacaaggaagaattctcacatgttctgactaacactggatattattacaggtgaaaacattggaatcttgtgaacctcaacctgtgttttacatatgtatacatgaagt

SEQ ID NO: 112957 - DNA, 1800 bp, Homo sapiens
aacagtgaagacgatcgcacatcatgcatagttcgacaagccttagaaagagaggattccattcggacattattagataatggagcttcagtaaatcagtgtgattcaaatgggagaacattattggctaatgctgcatatagtggcagtcttgatgtagtcaatttacttgtctctaggggagcagatttagagatagaagatgctcatggacatacaccactcactctagcggctagacagggacataccaaggtggttaattgtttgattgggtgtggagcaaatattaatcatactgatcaagatggttggacagcattaagatctgctgcttggggtggccatactgaggtagtttctgcactactttatgctggcgtaaaagtggattgtgcagatgctgatagccgaacagctttgagagcagcagcatggggaggacacgaggatattgtactgaatttgctacaacatggcgctgaagtgaacaaagctgataatgaaggtagaactgctttgatagcagcagcatacatgggacatagagagattgtggaacacctactggaccatggagcagaagtaaatcatgaggatgttgatggcaggactgcactctctgtagctgcactttgtgtgcctgcaagtaaagggcacgcatcagttgttagccttttaattgatcgaggtgctgaagtagatcattgtgataaagatggcatgactccactgctggtagctgcctatgaaggacatgttgatgtggttgacttgcttctagaagggggagcagatgtagatcacacagataacaatggccgtacacccctcttagcagcagcgtctatgggtcatgcatcagttgtaaatacacttttgttttggggtgcagctgtggatagtattgatagtgaaggtaggacagtcctcagtatagcttcagcacaaggaaatgttgaggtggtacgtactctactggatagagggttagatgaaaatcacagagatgatgctggatggacacctttgcacatggcagcttttgaagggcacagattgatatgtgaagcacttattgaacaaggtgctagaacaaatgagattgacaatgatggacgaatccctttcatattagcttcacaagagggtcattatgattgtgttcaaatattactggaaaacaaatccaacattgatcaaagaggttatgatggaagaaatgcactgcgggttgctgcattagaagggcacagggacattgttgaattgctttttagccatggtgctgatgttaactgcaaagatgctgatggtcggcctacactttatatcttggccttagaaaatcagcttacaatggccgaatattttttagaaaatggtgcaaacgtagaagcaagtgatgctgaaggaaggacagcacttcatgtgtcttgttggcaaggccatatggaaatggtgcaggtcctgatagcataccatgctgacgtcaatgctgcagacaatgaaaagcgctctgctttgcagtctgcagcctggcagggccatgtaaaagtggttcagcttctgattgagcatggtgctgtagttgaccatacatgtaaccaaggtgcaactgcactctgtattgcagcccaggaagggcacattgatgttgttcaggtcttattagagcatggtgctgatccaaaccatgctgatcaatttggacgcactgctatgcgtgttgcagccaaaaatggacattctcagataattaaattattagaaaaatatggtgcatctagtttgaatggc

SEQ ID NO: 112958 - DNA, 1003 bp, Homo sapiens
tccccagagtttgttttgttttccactctgcaacacattttagctttgtcataaggaaatcacgctttttatcactgactcaaaacaatcagaaagggaatattgaaatatagttttcttcaattctgaatgcctttgttaattatgctgaattacacacacccacacacccacctactcttgattgttcaaaatgctgtaattggaaatacaaactatttgggaccaatgttgtacttaaagtaaggaattgaaacttgtataatattttttgttctaataccttattttattcttaaagaatttataattaatactctaatgtttgaataataaatcttaacatcatagccacttaacattcaaaatgctcatgtgtatgtgttttacaggtgtgttctactccctcttctgggaatgaagcctccccagcaaagcctatacctgcttgttgattctgttgatgaagggtgtaacattactgaaggtgaacaaacgtctaccagcttatctgggactgttgcagcacttttagctggtcaccatgagttctttccaccatggctattgcttctctgttctgcccgaaagcagagtaaggctgttactaaaatgtttactggtaagcataattacttactgccatccttaaatgcttttcattaatgaactagtttcttagaggaaaaagtatgcagttgaacatctgcgtgttgcatttgctccttctatcagctattctcaattgtgcgttttgaaatttatataaaaaagccttagcatgtttttaagatcatttaaacatactttttttcaagattcttttcctaagtgctttagtaacaggagtatctcatgccatatttgctgctatacatcttggggctgcatttgttatgttgttgtatcatgatcaatttaaacctttttctgatgtttgagattacagtctatgtaatatataaaagcacactgtcagagtttctttttttttctttctctt

SEQ ID NO: 112959 - DNA, 1133 bp, Homo sapiens
agagcattggtctgttcagaagaacctcagaataccaactggaaagaagacaactcattaacagtgacttgctcaatattgcacatatggaggacatagttagtctcctgagttctgagtattctgactccctggtagtaccaagctatgtcttttgcgtttcaaagaaacgttaacaagtaataattttgcgttattttcatttttcatacagtaaaatttactgtttgtagagtacaggtttataattttgatagatgcatggagtcatggatccacctagttgtgatatagagcagttccatcaccccaacaattcctacttgctgtcctttttagtaaactccttcccccactccaacctatggcaaccactgatgtaaattttattcctacaatagttttactttttccatgtgtcatgtaaatgcaatagtatgtgcagccttttggaactgggctctttaacttagaaaattgatttaggattcacccatgctgttgtgtggatcaatagtagttgtttttccttttttgttttttctcttatgactgagtgatactctgttgtatggatatgccacagttagtttatcccttcactagtagaagatcctgtacactgtttctaatttgggggattataaataaagctgctgtaaacatttatgtcatttatgtacagattttcatgtggccatacattttcagttcattttggtaaatacttagaagtgggattgctaggacatgtagtaggtgtatctttaacttttttagaaacctgtcagacttttctgaagtggttgtaccgttggaaatggctatgccattgctctgcaccagcacttggtgttgtcagggtttttacttatttgcacaattctaataggtgtctagtggtatcacactgtggttttaatttgaacttctctaatgactgatgatgttgagcacgtttttatgtttatttgatgcccttctctcttcctctctaaagtgtctattttaatcttctgcccatttaaaaacaatttgttttcttagtgttttgagagtgatttatgtattcttaatatgagccttagtcagaaatttgctttacgaatattttctcccagtcttcagctttt

SEQ ID NO: 112960 - DNA, 1073 bp, Homo sapiens
agattgggttttttctttagttttccacatgtattgtctcatctctgttcttgaaacatccacaatcacataaactccagttataaccatggagttatgtgactcattaaaatttaggaaaagtgttgctgagctgtggaatcaggcgtttctccctcagttcaacaactaatacatagactgctgatcaagaataaggaaccaaataaagtcatgcacgttctgttgacagaggaactctgtggctgttgaattttactgtaactagttactctgtcttcagagtcaacttaatatacaagttatgtcataatggatggaaagacctgtgttgatgtatccagactctagcaaatgaagataaaaaacccgttatgactaatccttgggaagagaaagtctgcaaaatggctcaaaccagtttactgcaagggaagcagttttactgtagggagtgggttttccacaagcttcagcattgcctccaggagaaaagtaactgctgcaatagtgctgtcaatgcaccatcacttgtaatgaattctgggaataatgctagtggtgtctctggaaagggagctgcctggggtgtgttgttggtaggagggcctggcagtggcaagacggccctatgtactgaactcttatggccaagttcacctgcaagtttgcagagaggtttacatcgccaagctttggcctttcatttctgcaaagcccaggactctgatactttgtgtgttggagggtttattagaggtctagtagcccagatctgccgcagtggactactccaaggatatgaggacaagctaagggatccagcagtccaaagcctcttacagcctggggagtgcgagagaaacccagccgaagcatttaaaaggtaacaataaaaatgtcatggtgttcagatttctatgctgaaattaaattaatttttagttgtagttttttgttttaactttgtgggttacttttactggtgctgtacatttggccttaatctgaagttatgagtatacctgtttactttgaatatcaaaggaagtaaaatttaggttttggtattg

SEQ ID NO: 112961 - DNA, 1084 bp, Homo sapiens
cattaaacattagtttttgaactacatgaatataatgtttaatttaaatgaacgtcatattaacacatatcctcttcttgttatccattgctgatagccaacaattcattaaatgaagattcaaacagtaaacattttacttattactctaagattttatttaatttttattttatttatatttttatcatatctcatggttttgtggtttgggactacactgggtgcttctgtctcatgaggttgactggtggcacttcacagtatttacatggtgactgaatgatctggaggggccaagatgactttgcatgcctgctgccttggcagggttggttggaaggttcaggatcatcttggccccctctgtcctcaagtagtctcagaacttcctgatgtggttctttagcaaagtagttggactttttagttggtggttctcaactccaagagccacaagtgaaagctcccagaactctcaaaggtcagactcagatgtgccatagcagcacttctataatactctgttggtcaaagcagtggtgaccagctcagattcactgtgaggagaaacatgcatcactcgttgattggagaaatgtcaaagaattttgaccatttttattccactactagctctaataagaatatttgtgtattcttcatttagtaaatgtattttactttgcttaaatcctcttaaaattgagaacacaaatatgataacttgttcagagaggatgtgaaagaaatttgagttgcaacattttatcaacctagattgtccccttcttccatatctattctaaactacaagaaatgaagatttccaaaggttctagagaaaaactcacacacataaatattttatacccctcctccactttctataggctggtattaggtaaattagagttggttagatggctatgaaagtaatggagcagaagataaaatttgagacattaagaattatcagctatgggtaccagatatacggatatggtaatgagctgattcatgtcttattttgttgtttgttaccaattttcttttaacaaaatcattttggaaaactggtttt

SEQ ID NO: 112962 - DNA, 1923 bp, Homo sapiens
attttcatgtacaatttccaaatggcatgcttgtgtggatataattgcataatcaactgctaatgcaaattatcattcagtgaaattgtttaaagtgagcagtaaccacacagtggttgatttaatttttttcaactcatagattctataaggggaccatctcttttttcattggttttcctttctattgctatgcctttttgattccttctcccccaactcctattcaaagctctacaaaaaaagcatcctatatgaaataatgttgaggatcacaataaattagaaatagtaaggataatttgaaataataaagaagtttcaccctttcccatcttcctgctccccagccccaaccctcacccccatgccaggatgacatacctttcttttatatattgggctgctattaagattatcttttctctctttcatagtgatcttgagcctgaatggctggacagtgtgcagaaaaatggagagctgttttatttggaattgagtgaggatgaagaagaaagcctccttcctgagacaccaactgtgaaccatgtcaggttcagtgaaaatgagattatcattgaagatgactacaaagaaagaaaaaagtatgaacccaaactcaagcagtttaccaaaattttaagaaggaaaagacttttacccaagcgctgcaataaaaaaaatagcaatgacaatggaccagtatccattctaaagcatcagtccaatcagaagacaggagtcattgtccaacagcgatacaaagatgtgaatgtttatgtaaaccccaaaaagctaactgttatcaaagccaaagagcagctcaagcttctggaagtgctggttggaattattcatcagaccaagtggagctggagaagaaccggaaagcagggtgatggagagaggcttgtggttcatggcctgctgccagggggatctgctatgaagagcggtcaggtactcattggtaagtgttgctggtacacatccatccctgtttacagagatcttgattaatgatgacaccttgcgggaaatgtgataaaaacaattatatacagtctccacagataaagaactgattaatgacatttggtacagtagagaaatggttacacatggtgcactacaaggcacagtgttcttaaaatgaccagttcagtgtgttgagtatgtgtgtgccttgttcaggccaagaaatagcttacctaattttcaagttttgaattatataattttatttcatcttggttatatttgctgacaagaaaaaaaacgttgatcatagagtgataatttaggtttgaatggctatatccagtaacaggatacaaaaatatataatttatgaataaaaatacttttaaattgtatgtttgcacttgagtacactaagttcttggagtggttttcaactgtttcatttggcatattttgcaacagtggtgttatatataaatttccttttaagggcgtgtgtcataaaatatatctgtcataaaatagcccaccaattttcaagaaaaataaacccacaaattattctgaatatatattaagatgaacattttgtgttgctgataaattttaagctgttagatacaatgtttgagttagtagcaatctaattacttaaagataaatgagtaaaatttgaggatatattattactaaaatttaaaagtaataacagttctaaaagctgacagtcttttaagtttatctagcataagaggtttaaatgaagaacatttacagataaatttacaaatatttccaactttaaatctgaatttcatttgtttgttcactgatttgacagtttgtttttttagcatctgctaagtgccaggaatacaaagattactttactgatccaattatttcttgaaaggagctatgttttagtggaagaga

SEQ ID NO: 112963 - DNA, 1049 bp, Homo sapiens
tataaagcattttgtgaattatcttgtatgtctagtattttccatgatttaaaataaaatatgctcttttaaagtttgaattcagattagtttgtggtatacacagtgtttctaatttgacaaataagattttataatatcgtgacacttttttcttattatctatattataatttagttctgtattctcactttgtaagtttaattgctgtcttggcttggatttaatgatttcaccaaaaatgttgaatattgtcttttaaaaaataatgtaaaagtaattaaatttaaagactcttaatagttacttgtggtacctgtgtagctatgtaaccacaggggacgagaataactgtatagtattaacaaactataataaaatattagtattataaattattattaaagagattaaagtttaaaactgttttaaatgatttgtaatgtaaattaatcagtatcctacttagtatattatttgttattatgactaatttcggcagtctctaacttattttcaagtgtagtcttttacatgctagttaatgtgttaaaattccaagcatagttctccccttgtgtttgaacaaaactcccactgaagctgaaaggattcattttttgttcttttcttaacacaaagtttgaacttgccctgacaaagataatggttggaaaattgggtggtttgatcatttgtttcatttaacagcaggaaattctttatcattatccaatgtctgaagcatctcagaaacttaaaagtgtgagagggatttttctcacactctgtgacatgctggaaaacgtaactgggacacaagttactaggtaataatttttatttagctttaattctgtttttttcaagttcttttatttcaccctgacaaaatgctaaaacaagtatctggtatacaaatatacttgtatctacaatgtatgtattatatacattatagtctataatgtatgtatatacacgtatatatctatacattatagataacgagctctgcagaatgtctgcagatttttgcttcatctaa

SEQ ID NO: 112964 - DNA, 1028 bp, Homo sapiens
tatatcttacatattaaaggtaatatctgtggtatttctttaatatttcattacacatttaggaaaatgaccatattagtattatgaaagagaaaaacacacaaagtaatatttcaaaatgtgaaagtctccctttatctctccacaggtaacctcccttttgtatatttaatataatttttaaattagagtttactattttttagagtgtttggtggatgcagtggtgtgctgtccagttacaccttagctcagggtattcctttccaacacttgagaatggtggctgctaatgcctcacagctcccctagccttgtcactcccctagccgtgtcctacacggaaacttgttgactcagctaaggttacattcctccctgggaggagcccatttctaatgactaataaataagtgagtacaaaggcttggccccttgcctaaattgaagacaactctgaaaggccagccaagcttcagagtacacagtggtatcggctgagacttgttgccgctgcagcacagttcatcttctccctctgctcaatcctgctcagtcactacacccctacagctgtttttcccaagagtacttcctaataagtttcctcccggcatatctcactctcagagtttgggtcccaaggaacttgtcccataacactctctttagaaaataggtataatttcaaacgttcattgagtagggaattctgaggtaaaagaaactgagtgaggagagaatgtttagcaacttaaactgtctgtaattattataatatgaaatgttatatattcacttcttgtgcacttatgtggtgacacgcaggtctgcctgtgccttggcaggtatttaattatgacatcatgtgtgggatcaactggtgtaataaactcaattgcctacttttatttgaacaactagacacgtactaatagaattcacacacacacacacacacacacacacacacacagtacagagctaccacattcttaatcactgaaacactttacagtaagttcaaa

SEQ ID NO: 112965 - DNA, 1489 bp, Homo sapiens
atgcctgatgatctgaggtagaacagtttcatcttgaaaccatccctcccccagaaattggtctccaatgccagaaaggttggggactgctgggttaaggtacagctatagacacaagactaatgcaaattttttggcatttggttggttgattgcttgcttgcttttctatccaggatgaagtttcattgaatgttgttatctgttgaataaataataatgctgtgtacaattacaatatcagattatttaaatggcaggaaaagataggtgttgatttcttgaaaaggataaaacttacagaggtttacttgtgacgttatacagccaaaaaacctctctgaaaatggttgtaatgtatatagcaatacatgtgttagggatgccaaatttgtgaagaacttgggtttaaaagtggaagaacattggacaaggaataaggaatcctggactgagcctcacctcctatttccttagctatgaagcaagtgggctgaattacatcatctctccaggttcattcagcagtaaaattctgtgtcttgtaggatttttttttgagtcctcagaaattgttattctgtaaaaatactgtgtttgaccctatattcctgtatgctttgggttcttatgctcctatttccctttttaacattaactgataaatgttataaaggaatatttcatttacttatttgataatatttagtaatataaattagttttccccatcttatttaaacattgaggtacctactctgcaccagacactattctaggaacgtgggatacaacagtggacaaaacaaagtcccttccttcacgaagcctattttctaattagaaattagtatgctgagaagaattagaaaatagtatgctgagaagaatcagtgtcaagcaaaataataaaacatggtaaggattagaggtgggagtgactattttgaaaggtctctctgatcatgtcaagtgatacttgaacagagacctgaatgaagtgagggagcaagccatgtggctctctggggacagagcttccagcaaggggaacagcaaatgcaaagctgcagagcattaccgcctgaggtctgcctcctgtcaggtcagctgcggcattaggttctcataggagtgcaaaccctactgtgaactgtccatgcaagggatctaggttgcccacttcttatgagactctaatgcctgatgatctgaggtggaacagtttcatcctgaaaccatcccctaggggctgggagagtactggagcaaactgagtgagaagaaagtggaagaagagatcacaaaggtagcagggccagcttatgcatggccggatagactatgataaggactttgggctttgttctgaaagagatgatacattcttgaacagttctgcccaaataagggacatgatccgtaatttttttaaaggatcactcaggctactgtgggtagaacaggaaacagaatagcaagggtggag

SEQ ID NO: 112966 - DNA, 1022 bp, Homo sapiens
ttatatagggaaactttaaaataaatttttgatttgcataacctatttttaaaataatatatggttatatttctccttttaaattcattttcttataaggagaagcaaaataatagcacaataatataaaagtaccatggaacaaactttttgtttttctggtttagggcctgtatatcattgggatcaagaactcgagccattggaaatgcagcaaagagccaggtaaattgttaatgtggatgttttgacttacaggaagaattaactgaatattggtaactaagttccttaagttatattgttaagagtgaataagagagtgaggaaaataggacaggtactacatctttgttttgttttgttttgtttttttaagatataatttgctttgggttgtaaaatatttcttgaattttattttttaaaaatattttttagttgtgaagttagggtgtgctactatgtgacatcaatttttccccaaatggtccctcaggtgaccatccagagaataatgagggatattctgtctagaacatacatttcaatgatagttaagtaacatctttgtaaaataaggtaggaaaaatgaaagaactaatttccagagtaactcaacgtggctaccactaatttacatagaatttgttgaagtatttatatttttaggcttttgaaatctttatgattagaacgttgacttttaacattccatgttataaactgattttccttggactttcattacctccctgaactaaaagcccttaacaattatttcttgcattttatatatatctgggtcttatatctcatattctggctgaccttctaagtgtgtcacagataatcagagtctctaaaagcagcctttaaagtcatttctcctaaggagttaaagagagcaacatagtaattcagcatccctatagttttcatgtcataattgaagatcaaggtctgtttggctttaaaggtcactaggattatagcaactggatctcagtaatattctgtaa

SEQ ID NO: 112967 - DNA, 1016 bp, Homo sapiens
cgagactccatctcaaaaaaaaaaaacaaaaaaaaaaacagattttttaactttattaaagagttatgtgacctgaatttactgtggggatactatagatgaaggaatcttaggagaactttatcgtatttaattacacaacgttttcatctttttatgtgtgctcctcatgaattatttgtgtgcattatttttaatggcattagattttttgtctaattacaattggaagtctgccctagattttttgtttgtttgtttttgttttgttttgttttgtttttgtagcccagaggtcctttatttttttttttttttaacacctatgccatgaattcatagggaataggttccagcagctcaggctccttcccattggttctcacaaagtgtgctgctctgggtggagcaggctggcgctttagttgaacccaggtacctttctctttggcttctttctttttctgatcattttccttcacacgtttcaggaagctatctcggctcttagagtgcttaatgtgctcaatacgcacattaattctcttggcaagaatcttgcccttaacttgtttgtttacaacaatgccaacagcatgctgggtaacattgtagactcttccagttttgccatggtaacacttgtggggcattcctttttgaacagtacccgttcccttgatgtctacaatatcacctttcttatagattcgcatatacgtggccaaaggaataactccatgttttctaaaaggcctagagaacatatatcgggtgcctctcctctttccctttgtgttcgtcattttggcgaattactggaagatggcggttccagccgaaaggcgattttcttttattctattttaagacagtttctccctttttttaaggttgctttttgtttttattaataattactatgcatctttcttccaaattgatcagaattcaaccactagactttaaactacttcatttaaggactgtggctttttctttcaatctttccatgt

SEQ ID NO: 112968 - DNA, 1332 bp, Homo sapiens
ggccaggcatggggtgccgtggcttatgcctgtaatcccagcactttggtggggagcgggtggctcacgcctgtaatcccagcactttgggaggccaaggcggacggataacaaggtcaggagttcaagaccagcctggccaatatggtaaaaccccgtctctactaaaaaatacaaaaaaaaaaattagccaggcgtggtggcgtgtacctgtagtcccagctactcgggaagctgaggcaggagaatcacaaaaaaaaaaaaaaaaaaaaggttacagagacttcttaaacataatgatgtaatagttacaaatagattggaaaagatatactaaaaatctatcaaaagagaagtgacaatcagataaaattgattttgctttggaattaccttaaaattgattttaaggtaaaataataaagggagtgtgggaataaagagtaagcttttaacaatgataaatggagcaattcaggattataacagctctgaaacagcctcaaaatatatgaagcaattcacaatgagaagctgaaacccataagaatagtaataggccatgtgcggtgtctcatgtctgtaatcccagcactttgggaggctgaagcaggcacatcatttgagcccagcagtttgagaccagcctgggcaacatggtgaaaccctgtcacaaaaaaatctaaaaattagccgggcatggtgaatacatatataaaagaatggagcaaaatttaaaagctggatctaatgaaattatataataaattgtcactggactattaggtaaaacttttccaaatacacatggaataacatattcacaaaaattcattatagtagaccacaaagcaaaacttaatactgaagaccgtaatagtttttcagacaagagaaatcaccttataagacaagattagaaatcacctatgaaatagagatggtgactgtagttaacagtgtatacatttgctttacaatgtatttcaaagtaactagaagagagaactggtcatgtacccaacacaaatgataaatactcgaggtgatggataccgtaagtatcctgactttatcattacacgttctacgcatgtaacaaaataccacatctaccccactaatatgtacaaatatcagtttttagatgtttttaattttaaaaaattatgtagataatccaagacatgccaaatgtccatatgcttggattgaaagtattaacttctagaaatgtcaaatcatgttgaaaattagaaaatacttcaaatgacagtgaatattgttactttagcaactgtaccccttaaactccaactgctttttaatata

SEQ ID NO: 112969 - DNA, 1059 bp, Homo sapiens
tgaggaaccagatcactagggtgcaccatcaccctgagcttccagtccagcctggaagcgcaggtatccccgcacggagtcaacatgccttccaccctagacacctgctgcatcgaggtgtaatacccgcttgaattttgtcaaattccccactcgatccattttatcttctttttccagccccttcccatcttcctttctactgtgagtcatcacacataatctttaattttaacttttaaggattttaaagttggaaatctgcttggtaaaggatcatttgctggtgtctacagagctgagtccattcacactggtttggaagttgcaatcaaaatggtaagaataaactaatcaacttctctcctgtactttgcaagtaactagagaggtatcagagatgtcagaaactccttgtctactagcctttcctttgattatagtgtaaggaacactttacataggcagaagacaatagtgccaagtccagccgttgaacttaaaaatattttaggaaagccttgaccttgcttaagtaagttttatcttcattaatgttcagtagacctcgtatgtggtgtaattatccatacttggagtaatgagtagaaatcaactaacaaataatttgtttatagttcactgtgtataattttgtatttccctgtaacatacaaaatattattcttgattgttagaagtcagcctaataggagtaacataaacataagcaaattaagaattatttgtcagccgggtgggtggctcacacctgtaatctcaacgctttgggaggctgaggcaggtggatcacctgagctcaggagtttgaaaacaactgtgcaacatggtgaaacctcctctctaccaaaaatacaaaaattagctgctgctgggcacggtggctcacgcctgtaatcccagcactttgggaggccgaggcgggtggatcacctgaggtcggtagttcaagaccagcctgaccaacatggagaaaccccatctctactaaaaataccaaattagccgggtgtggtgctgcacacctgtaatcccagc

SEQ ID NO: 112970 - DNA, 1103 bp, Homo sapiens
aaaaaaaatcatttatctaaaccacttagaaaaagaactggaggttttgctctaaaatttgcctgaattgggatttttttttcttaatagttaggctagttgtgctattagattatttaaattgagataggatattagaattaattggtcaaacttttaccaagcaccctctctgccgagcactctgctaggtgcatggggaaaacagataacagtaggttgaccacaaagacgtataaaaggacttcagtctattttaaagtatactttattttcaaagttcacttttaagcagtttatatttgaaagtctgtcaacatttaaacctgttatttttagatagataagaaagccatgtacaaagcaggaatggtacagagagtccaaaatgaggtgaaaatacattgccaattgaaacatccttctatcttggaggtaagatataaattttgtagaagtgaccaaggacactgaatttttgtatattttaatttattatgccctttcacatttcagctttataactattttgaagatagcaattatgtgtatctggtattagaaatgtgccataatggagaaatgaacaggtatctaaagaatagagtgaaacccttctcagaaaatgaaggtaggtgtgtggttttttttgtttgttttgtttgggtggataaaagttttgcattttaaagtgtagttttgaggaatatgctattttataatatatagtaaaactgtttgaattattactttaagctagaaaaggagatttcctacatcccaagctgctaattcttaaaacaattcaattattacggtagtaaagtaagaaatttgttatccttctgtccttaaaaccacattttaaattaaattattggtagcagtttactgtgtatcttttcaaatgtagtaacctttttaggatgtcattggtgactataaagtagttctaaatcaagcataaatagccattgaaactgtttattatagaaaacatgaaacatacaggtagtgtgctataatgagtcccctgaacttaacactcagcttccaaaactagtgactcatggtcatattatttcatctttactgtttttact

SEQ ID NO: 112971 - DNA, 1429 bp, Homo sapiens
aaccctgtctctactaaaaacacaaaaaattagccaggcacggtggcgggcgcctgtagtcccagctactcgggaggctgaggcaggagaatggcatgaacccgggaggcggagcttgctgtgagccgagatcgcgccactgcactccagcctgagggacacagcaagactccgtctcaaaaaaaaaaaaaaaaaaaaaggttaatatgatctctttagaggggtgtgttggtaccactctgataattgctggtaattgaagtggctggtaaatctaagctccaagccactgttctactacagtgctctagaatatttacctgggtttcataatgtatactaaatactagatactgaatcttccagagtttctaaattgtaaattctcttttttaaaatcctaacagctcgacacttcatgcaccagatcatcacagggatgttgtatcttcattctcatggtatactacaccgggacctcacactttctaacctcctactgactcgtaatatgaacatcaagattgctgattttgggctggcaactcaactgaaaatgccacatgaaaagcactatacattatgtggaactcctaactacatttcaccagaaattgccactcgaagtgcacatggccttgaatctgatgtttggtccctgggctgtatgttttatacattacttatcgggagaccacccttcgacactgacacagtcaagaacacattaaataaagtagtattggcagattatgaaatgccatcttttttgtcaatagaggccaaggaccttattcaccagttacttcgtagaaatccagcagatcgtttaagtctgtcttcagtattggaccatccttttatgtcccgaaattcttcaacaaaaagtaaagatttaggaactgtggaagactcaattgatagtgggcatgccacaatttctactgcaattacagcttcttccagtaccagtataagtggtagtttatttgacaaaagaagacttttgattggtcagccactcccaaataaaatgactgtatttccaaagaataaaagttcaactgatttttcttcttcaggagatggaaacagtttttatactcagtggggaaatcaagaaaccagtaatagtggaaggggaagagtaattcaagatgcagaagaaaggccacattctcgataccttcgtagagcttattcctctgatagatctggcacttctaatagtcagtctcaagcaaaaacatatacaatggaacgatgtcactcagcagaaatgctttcagtgtccaaaagatcaggaggaggtgaaaatgaagagaggtactcacccacagacaacaatgccaacatttttaacttctttaaagaaaagacatccagtagttctggatcttttgaaagacctgataacaatcaagcactg

SEQ ID NO: 112972 - DNA, 2368 bp, Homo sapiens
gaaaattatgagctcttattgttttgttttttgtaactagaattcttttgttcaaaaaatgctattacaatcagagtgacgttattttgtgtcgacttgtgtttttagttatttactaaattgcttcattctatgtatattgtagctcatttaagaaaaactactgaatatgacagcatcagcccaaaccgggacttccagggccatccagatttgcagaaggacacatcaaaaaatgcctggactgatacaaaagtcaaaaagaactctgatgcttctgataatgcacattctgtaaaacagcaaaataccatgaaatatatgactgcacttcacagtaaacctgagataatccaacaagaatgtgtttttggctcagatcctctttctgaacagagcaagactaggggtatggagccaccatggggttatcagaatcgtacattaagaagcattacatctccgttggttgctcacaggttaaaaccaatcagacagaaaaccaaaaaggctgtggtatgtctgttatcttcttaagttactaaataacattttacttgagaatacaattcttgagaacatattttttagtcctctgtaatgtccttttactttggggtgtatacatgatcaactttattaaagagaaaagagactgggtgtttatggaaaaacagctcttatttccctctatcttcttaattatagtgacatgatactggtaagttttgaattttaaattattaatttaaagtagatttgaatgaaaaacattttaaaataatactggctatatgctggttaaagattattttgttcacaattccaatcagtgagctaatattatcctttgcttctatttttattgtttgtaaatttaatcccatctcaaattttaaaaaactggaaaatataacttttatttttttagcttctggaactaaagaaaaggcatatacacatttaagtttagagtttaaaaattattgtatgtgaattgagaatggtgtgtgtttttttaattctatctttatcctgttgtttgttcccattttacttcccatttcatccttgcctttgtttggcttgctattatcttttcaaagtccttattctccactctaccttctgtttgctttctgctcattgattatcacttcacacttcattatacattcttaactttgcaccatatggttcacagttgtgctcaaatatacctctgatctggactgttgtagtgaagcagctttgattttgacttcaatatttgtttctgccatggttaagtactcctaagtattatgtatgtcagagctgttctagtaaacaaaagaattattactgattttgggttttttttttttttaggtgagcatacttgattcagaggaggtgtgtgtggagcttgtaaaggagtatgcatctcaagaatatgtgaaagaagttcttcagatatctagtgatggaaatacggtaatgtgtagttactttattaccttgcaacttcaaattatcgtttaagcacgtttagcattctaattcattttacaatgatgtaagtttttttaaaatcagtttgccagtatgatagtgtctctggaattcaaaaattgaaatagcatattaaacatatttaaataaattggtgcagtgttaaaaataattatatctagtaagaaaatctaaacttttggtttaagttaaaaagcaaaaaaattacttttacagaatatttaacatttttctataaaataatatttaatgttacatttaaacactttgtatacgttttagcaagatatagtactggaacttaatggcatgtaattagaattttaaaaaaatcttttggcagatcactatttattatccaaatggtggtagaggttttcctcttgctgatagaccaccctcacctactgacaacatcagtaggtacagctttgacaatttaccaggtatgtgaatttaccagggaataaattttgatagtagatttatatgtatatacgtataaactctatatatagatataataaattataaatagcttcagtcaaactttaggtcatatcatattcttgtactttgtttctggtgagagttgtatgcctttaatgcaatgtttattattaatattctgtgttataatggtactatattctatttaaaaactaactctagaacattagtcatatgtctcacaaatgtaatttgtatacttgtttagaatgtggctatagttatgttaaaaaaaattcaacattgtgcttgcttcagagcacatatactaaagttggaatgttacagagaacatggcccctgtgactcacaaatttgtgaagcattctgcatttaaaaaata

SEQ ID NO: 112973 - DNA, 1086 bp, Homo sapiens
aggataagagaacagttttctgattttttttttttaggggtaaaaatacacaaaacagaagatttcattcaggtgattgaaaagacagggaagtcttacactttaaaaagtgaaagtgaagttaatagcttgaaagaggagataaaaatgtatatggaccatgctaatgaggtacatacctaattgtaggtttttcataccaattaataatgattgcaaatgacataggtgaaacaatgacagaagcactcttcttttgaaatagggtcatcgtatttgtttagcactggaatccataatttcagaagaggaaaggaaaactaggagtgctccctttttcccaataatcataggaaggtaaatgtctgaaaattttaaacatatggctaaaatgttttaaaagtttgatgtttatattataaacattctttagttttctgtaaattgaaagcttcaagggaatatatttggacttttccccttcagaaaacctggtagtactagttcacctaaggccttatcacctcctccttctgtggattcaaattacccaacgagagagagagcatctttcaacagaatggtcatgcatagtgctgcttctccaacacaggcaccaatccttaatccctctgtaagtaaatatatgtcacttctgtactttaaacctttcaatgattgcctgatgcccttcttgtaaaatagtttattgtggctttactatcatctacgtacttttccagcctcatcctgagccactttatcccatactatttatgtttgagcgtcaaaggccttctttcagttctttaaacaagtcaaagggccttttcacatgctgttcacttgacctggaactcttttccccaaccacttaactttatatgtgtaagtcttatttttcaagtctctgtttaaatgttacctcaatgagccctaatctcagccctctggggaaagctaagtgtattaacatatacatatgtagtttttttttttgtttttttgagacggagtcacccaggctggagtgcagtggcacgatctcggctcactgcaagctccacctcctgggttcacgccatt

SEQ ID NO: 112974 - DNA, 1450 bp, Homo sapiens
cctgcctcggcctcccaaagtgctgggattacaggcgtgagccaccacgcctggctagttgttttatttttactagtaaaatatcattaactgcctaaatgctcatgatagactcatgattaaatttattatatatttaatgaacatggcgatgaagattatatagcagtgtagaaaaatgcaacattaaagaaataggtgtgtatatttgtgtgtactcacccacatacacaaaaagaacatgccatgggataaaaagatgaaagaaatccaccaaaatgaaaacagcaattgtgcaggagggtggggggttcttttctgtatttttctaatttccaataatgtggttatattttcgttaaaaaatgtttgtttttaaaaaaattaagctaatgaaaaatctcataattgtctgcttttgctgaatgtggcttataaaaatgctgaggaataatatcttcctgtcctttattctttgtagatggttacaaatgaaggacttggtcttacaactacagcttctggaacagacatctcttctaatagtctaaaagattgtcttcctaaatcagcacaacttttgaaatctgtttttgtgaaaaatgttggttgggctacacaggtgagaagtttctagtacagtgcattttctcagtatgaatttcttttcattttcacactgataagacaattaccaaaaaatacaaattattgtaatgatatctttttacaaggaagtttttgtaccttttaacattggttatatcattaaaaattttaacttcttaaatttgtattcagttggaagactccagacattgctgataagaggttgcctgctaggcttgggtgacctacttttgccatttgtttttaaagtagaggtcatgataattactaattgtgaagagtagagtgtgatatctgggacgttttaaattttggaaattatttgtaatcaatattagtagagtaactttcttttttttttttttttttttttttttttgagacaaagtctcacactgcaagctccgcctcctgggttgacaccattctcctgcctcagcctcccgagtagctgggactacaggcgcccactgccaagccgggctaattttttctatttttagtagagacggggtttcaccatgttagccaggatggtctcaatcccctgaccttgtgatctgcctgcctcagcctcccaaagtgctgagattacaggcgtgagccactgcccccggccagtagagtaactttcatctggcaaaagaagaaaaggatttttccattaaaagtcatgtgaaagccaggtgtgatgtcacgtgcctatagtcccagttactcaagaatctgaggtgggagggtcatttgagtccaggagtttgaggccagcctgggcaacaaagcaagaccccatcttttttaaaaagtgaagtcaatattg

SEQ ID NO: 112975 - DNA, 1044 bp, Homo sapiens
cttgtgggggaaaaaaaccaacaaccaaaaaacttagaaatcctaatggaaattaatgggaaacaggattcactttctaataattttaatattgtaataccttagctattaaaggaataatctgaaaaagacatgaatattctcagtgctctgccatcgtagccccaaatttgtagtcacttagagagttttttttttaactgtggaaaacctgttaaatatgttaaatattaatacagaaccacaaaccctctactgtatagtaattttgtgtgctactactgctgtttttttttttttctgtgcctgttcttacccatgcttattatttttctagttaactagtggagctgtgtgggttcagtttaatgatgggtcccagttggttgtgcaggcaggagtgtcttctatcagttatacctcaccaaatggtcaaacaactaggtaagttcttaaaatactggtcgagattcagccctttgctataatttctctttctctatatgttgaaatggatgatttaataaagatacttctttcattttgacaatgatcgtgtgattctttaaactgttaattattcttagcaattcatgtagtcattaatgcatattttatgattatctgtattaactcagggcaattggtataaataatccactctaagaggttgggttccttgtagccttactgttccatagtgtaactcgatggcctttttcagaagtaagggactcctaattctaggttcaaataatataccaaacctatttacttaaaagaacagaaaaaagaaatctttaagatataacctgcttatttttcccaaatgaaaggctatatccccaatctaatgtaacgtgattaatgtttgaaagacttttttgaatgtgtatattcattctatatgaaaatatgtgtcaggcaccaagccaaaaataaagaatctggcaatatgaaaaacaaggagttatttgctttcctcatttaaatcagaacttactaaaagtagggtactgacgatgccaatgcaggcgttctctt

SEQ ID NO: 112976 - DNA, 1563 bp, Homo sapiens
tgcccaggctcgagttagtggtgcgacttggctcactgcaacttctgcctcctgggttcaagcagttctcctgcctcagcctcctgagtagctgagattacaggcatacgccaccacacctggctaattttgtatttttagtagagacagggtttcaacatattggccaggctggtctcaaacacctgacctcgtaatccaccccccttggcctcccaaagtgctgggattacaggcattaaccaccgcgcctgtccggggccttttaaatttaatgaggaatccagatttttggcttgcttttgaaattacgaagccagttcaagtttatctaattttccttctgttacttaaatgtgtttagaaaatggtctgttttaaaagaaaagaaactgtatgcttcacttgatttaggtatctaataaataattgttataatttttctgaggtgcctcttgttattgaagaattactgaaaaatataatgtgctttttgggactctcatgagaaccaagtaattcagttacgattttgtctttttttcttttgcttcacttaggtatggagaaaatgaaaaattaccagactacatcaaacagaaattacagtgtctgtcttccatccttttgatgttttctaatccgactcctaattttcattgattaaaactcctttcagacatataagtttaataaataacttttttgttgactttcaagtaaagtgattttttttaatttaacataaagtcttcagaaagcctttctatgaaagaattttaacctataatgtaaaggatgtattctgagagaacaaagcagaatgaaacttgagtcacttactaaatatagtggatataaaatagaacacctgactttgctcttagaccataacccccgaacttactatgttcatatatttgtattgaacaatcttttaaaagcaaaaatgtaaatgatgtgtagtttatttgtgcttttattgttttccctgcgtctcagacatgttgagaatcatggacaaaacctgctggaattttggaatttttgaagatgtaaataatgtgtatttatgttataagtaacatatgtaaacatgtatatttgttttatatttatttttgtaacaccagtgtctgatgaaacatttttgcaaatgcattttataaaaaaataaatatagtgataagttacattatcttttgattcatttaattaaatacttatttttaaataacttaccagtaaactcactttttaaattttgttgcctgttgaggagccaattaaattttaaatattaattttgcaaatgttaaatacattgtttctctattatctgaaaatcttggtatattttaatgaatttttttaaattatacattaagttctgggttacatgtgcagaacatgcagttttgttacataggtatacatgtgccatggtagtttgctgcacccatcaaccggtcacctacattaggtatttctcgtaatgttatccctcccctaacctcccatcccccacaggccccagtgtgtgatgttcccctccctaggtcc

SEQ ID NO: 112977 - DNA, 1120 bp, Homo sapiens
aagtagaaattaaattacaaataagtcttcaatggtcaaaaatggtgcccagaatttcttctcaaaataagttaatctattcttaaacagatgcaggtaagtagtttatccttgtcaaaacaaaaaattaacagatttcactttatgtaagagataaggtttatatgaacaagaagagtttatttttaaatgtaaagctgaacaagatagaatggagatgctttgtgaagttataaatcccttcaaaatatgaaaatcatcctttcaagtttaaatttgttttcaaaaacatattttctcttcttaaatatgtactactcttaacaatatatcataccttaaaatctcctgttgtcattttctctttatacgcaacttggcctactcaagaagacatcaacatggtgattttttttcctcaaactttatctccttgctcttttcccaatcccatgttacttcctttcgccttcttttgtgccaagatgagcaaggtataatcctccaaagaagaaaatgctccaaagaaaatgctctcaataaaaaggaaagtaagagtcatttgtgtaaggttaagtttatctaaattttaatcaatattataaacctttgaaagctgggaaacttttttctgttatattcttgctggaaacaggttattatgctaagacaaaagctccagtcagtgggcttatgttgcccaaatatttctgctagtaggactcactggtatagttaaattaccctacaattagtgattaattgaaactgcaactttctgggatattttcctcactatgaaaaatcaagtggttaagactgtggactttaaggatagactgttacttagacaagtaacttttctgtgcctccattctttcatctgtaaaacgggaatcataatagtattttcactccataagactgctgtaagaattaaattgtatgttacacattacctggaatgtggaaagcactccacaaattttgctcttatcattttcatcattaccattattcttgttatttttgtcatgcacactatgcaaaccaagggtagagtttactctttaagattagacgtggcccaaaaaatgtaagacagagaaagcagctgcag

SEQ ID NO: 112978 - DNA, 1441 bp, Homo sapiens
ctcaaatattagcattatccatactcatttattaatgtaggggttacttagtgaaaccctgaactaaaataaggcagaggtgtagtattagaagaaagactcatagaaggcaaggtaggatgttaggcacgctaaatggaaaatatgtgttataatttttatttcataagtgaacttgataatagaaaatgcatttttttataaataaaaagtaggtgtctgaataaaaatacctctacttgggtagaggtatttaaaattctataattttgttctgctatggctaattcttacagaaccctctttctggttccactgtatattattttaatgacacttctgcagtgggtattaagaatacagcttcacatttattcatcattgtccattcactcattagttcatgcaaccacaaaaaggtattataagaataatatttcatttctgaggtaaggaaattatcatctagtatgtttttatataacctactattcacaatgacatgtagaattctctctgttattcaacatatgttcttgttcttcaaaatctgcaatatctgtagtctgattcttggagactggctcaccgcaattgtctagcagagctttagaccaggaagtgccacacagcaagtagtttccatcacagtcttagctagtttattcctgaatcctcccatatcttacagaaagagcaatgagtcttttgtaaaccactcccaggagggtgatggtgagcactattattccacacaccaggctgaatgcccatcgtggtccccagtgagcatacacttggctgatgaacataggcccaagaatccgggctccacttccagatgctgttaaccagcccatgtatacaccctgttgggggtgaaatggaggacaagcagattgatattggggtttagttatttaaaagcaaagaaatggtattaccaaactacagcaaacttacaagaatcatttctgcatcttttacttttaaattaaacataaaatgcctcctataaatatagcatttaatattaagtcagattaaaaaaaataaaaggagtgtaaagggaaaaacttactgtctgctgaagccctgggaataataaaattgattaaaataccttttaaagctaacatttattttgtacctgctacatgccagtcactgaggtaggtgctttaaatacatcatttgtaatgttcacaagtttcgatgacaggtgttatgcctgtttaacaaaggtagaagctgaaactcagaaagtttaagtaacttgttcaagaggtttgaagccatatttggctgactccactgtgccactttacactctaccacaatgccactcctacaacttctgtatccaaaactataacccacataacctacccaagaatgaactttatagaagttgtgggatttttaaaaattttaaatgctg

SEQ ID NO: 112979 - DNA, 1052 bp, Homo sapiens
agcatttaaaatttttaaaaatcccacaacttctataaagttcattcttgggtaggttatgtgggttatagttttggatacagaagttgtaggagtggcattgtggtagagtgtaaagtggcacagtggagtcagccaaatatggcttcaaacctcttgaacaagttacttaaactttctgagtttcagcttctacctttgttaaacaggcataacacctgtcatcgaaacttgtgaacattacaaatgatgtatttaaagcacctacctcagtgactggcatgtagcaggtacaaaataaatgttagctttaaaaggtattttaatcaattttattattcccagggcttcagcagacagtaagtttttccctttacactccttttattttttttaatctgacttaatattaaatgctatatttataggaggcattttatgtttaatttaaaagtaaaagatgcagaaatgattcttgtaagtttgctgtagtttggtaataccatttctttgcttttaaataactaaaccccaatatcaatctgcttgtcctccatttcacccccaacagggtgtatacatgggctggttaacagcatctggaagtggagcccggattcttgggcctatgttcatcagccaagtgtatgctcactggggaccacgatgggcattcagcctggtgtgtggaataatagtgctcaccatcaccctcctgggagtggtttacaaaagactcattgctctttctgtaagatatgggaggattcaggaataaactagctaagactgtgatggaaactacttgctgtgtggcacttcctggtctaaagctctgctagacaattgcggtgagccagtctccaagaatcagactacagatattgcagattttgaagaacaagaacatatgttgaataacagagagaattctacatgtcattgtgaatagtaggttatataaaaacatactagatgataatttccttacctcagaaatgaaatattattcttataatacctttttgtggttgcatgaactaatgagtgaa

SEQ ID NO: 112980 - DNA, 1046 bp, Homo sapiens
ttaaaaattatttctgtcatataaattatcttattgttggccatgcacagtggctcacacgtgtaatcccaacactttgggaggccaaggcgggcggactggttgagctcaggagttcaagcccagactgggtagcatgatgaaacctcatctctacaaaaaatataaaaattagctgggcgtggtagtacatctgtagccccagcttcttgggaggctgaggtaggaggatcacctgagcctggggaggtcaaggctgcagtgagctgtgatcatgacactgcactctagtctgggtgacagagtgagaccctgtctcaaaaaataaaaataaacaaattctcttattattaaactactttgaagcctaaaaatttttttaaatgtttatttataaattttgctacaatgtaatttctacattactttaatgtcataagaaaaattagatgtataggtaatgtaatttttctcctatttccctatagcaagtacagatgaagctcaggttccccaaggaaatattgaccaggttgctgttgtggccatcaatgttctgttttttgtgactctatttatctttgccctttttgaaacgtaagttttattccatcttcatctgaatcagattatgttttaacctttatttcttaatgcaatgttaattaggcatatagatgttattgaaaatcttatgtaaggcaaatttttcttaccatgatgtaaaaaatgtatatacattttgttgcttgtaacttgaatgtagttaattatttgtccataatcttaactaccttatcttattttcttataaaagaatctgtttcactactctttccctctttcatctgagttttatgataaatacagttataaaactttagtgccatgatttaattatccttaagctctataatttcctacatatatgtatatatatatatgattcaatctggtaattttaactcaatttaatacctgaccttgaagaaaaacctagtatattacaaaatctctgccttgtgcaggctttattgacctttatc

SEQ ID NO: 112981 - DNA, 1043 bp, Homo sapiens
actgatttttagttaagtttcttcctggagatttaagatagaactgacaggacctgatgatcaactgatgttaagctacctaacaaacttacatattcatgtcaccccctcttccccttctagtaataacagcatcaaaaaatacatatgttctagtctttacaatgttacctgatagcccaaattaattttatgggaaaagcgttaaattattccacaaaaatatcatttacacactttaggaattcagactattactagtttcctttttattagggaagaggtaatgatggaatatgaatgtggcttctgagtaggtgaccatacatctacctttgcctgggactatctgggtatgatcctatttttccttacgtagcagtctcttcactacaaaagtgttctggcttgcacaataaagcatatggtcacattacttataagcctcttttaaggaactattatctcattattcttgtaaagattaaaccatagaataccaaagagactctttagaaaatgcttaactacgtaagagttactactactgtagctataagggaaaaatagattgaaatgtacaaaccttttggagatatggccatatggacatcatcactacagaaaaccctgtgaagaagcaaactaggttatttatacttataataatttaatcattattacagatacaattttctgaaccgtggcatggattttaaaatattctgaacctaaaatctatgcatacaaatgcctaatttatgaggcaatgagattttaattatcagaagaaaaataaagactaaaagaacatacaattacagtccctcatcataataacaaatacaaaaaagcagaggatctacttctccatactcatgtgcttttactgtaaatggaaataaccaaaagctttgttaagtttttatagcagaaatgaatggaggaaaggctattttgttagacaggaagtgctaggcttctatcctgtgttgtttggaggagataattgactgaagggaagagcaggaataaggaaaatg

SEQ ID NO: 112982 - DNA, 1041 bp, Homo sapiens
gacggggtcttgctctgtgggctagtctggagtgcagtggtgcgattttggctcactgccacctctgcctcccaggttcaagcgattctcctgcctcagcttctggagtagctgggattaacagacgtgggccaccagacacggctaatttttgtatttttggtaaagacagggtttcaccaggtggccaggctgatctggaactcctgacctcaagtgatccacccacctcagcctcccaaagtgctggtgtagaagcaaacagtcccaaatgtctcaataggctctgaggcccgttgctatactttttaagtacttacgtctgctttttagtttttctgacagactgttttcctcgcagactgttctgcatcatgtttttgaaatctggcagcaacagttgttttattgttgttgctgtcaccatactctttccaccagctttaatttggggcttcttgtttgttatagctttgataaccctggatctatgcttaatgtaactgtgtgtcattacaacctggtagttctgactgagagctaaatgtctttcctactagttaagtgcataagcttgagtgcgtggacttcatgacatttggttttctcagaactcagaaattctttttttttttttttttttttgagacggagtctcgctctgtcacccaggctggagtgcagtggcgcaatctcggctcactgcaagctccgcctcccgggttcacgccattcttctgcctcagcctcccgagtagagtagctgggactacaggcgcccgtcaccacgccgggctaattttttttgtatttttagtagagacggggtttcaccgtgttagccaggatggtctcgatctcctgacctcgtgatccgcccgcctcggcctcccaaagtgctgggattacaggtgtgagccaccgtgcccggcctcagaattctttttgcttcgtcctggtttttagctattttccagataattgcaggatccctgagttatgtttaaatgtggtcttctggtacattctgtcaccttgtac

SEQ ID NO: 112983 - DNA, 1050 bp, Homo sapiens
gtctcaaaaaaaataaaaaaaataaaaaaatacaaaaattagccaggtgtggtggcacatgcctgtaatcccagctactcgggagagtgaagcaggagaattgcttgaacccgggaggcagaggttgcagtgagctgagattgcgccactgcactcgcctgggtgacagagcgagactccgtctcaagggggaaaaaaaaaaaaagaaagaaaatgaattttcaggattggtgcctttaattttgagtcttgtatgtattaattactttctgaacaatctattgtttctcacatttttctgaaaaaagtgttcagtttgggaaaaaacaacagcctaatcgcttcagtgatcaaaattaaattttaatatggcttatgaactggatttgctaatttttaattactgttaatcagtctcaattataatgtgcttagtaggtgatataaaagattaattttttcctttttgtcttctttcccataatagactctttgaattcagaaagatgattggaaatcgggaaagatgccagaatctggtttcaagcgattatccagtacacattgataaggtattcaaatgagagaaacacagttataggaattgtggtttgacataaatatgtctaagaatagattacatattggagtataacaacaataaacactaaaatatgagtgccgtatggatttttcatttcatatttaaagaatactatttgtgggccaggtgtggtggctcacgcctgtaatcccagcactttgggaggcggaggcgggtggatcacctgaggttgggagttcagaccagcctgaccaacatggagaaaccccgtctctgcttaaaaaaaatacaaaattagccgggcatggtggcacatgcctgtaatcccagctactcgggaggctgaggcaggagaatcacttgaaccccggaggcggaggttgcagtgagccaagatcacgcctttgcattccagcctaggcaacaagagtgaaactccgtctcaaaaataaataaataaataaataatactatttgtgcgttaa

SEQ ID NO: 112984 - DNA, 1039 bp, Homo sapiens
ctgaggcatgagaatcacttgaaccgggaggcagaggttgcagtgagcagagatcatgccactgcagtccagcctgggcgacagagcgagaccctgtctcaaaagaaaaaaaaaagttacatggattcaaacacccattctggggagggtaactgcctatttcatagctatttagagaggatgtcaagttgcaagccacagataaatttggaaataacttacagtaaaggcattgtttgtcccccctttttgttagttacttagagtttttctttcatatttaattttagacaagccatctatgatgcatttgaccgcttcctccataaatacgctaactagttggattattatatgtaaccagtgtggccatgatgtttcttacaaaagggagcttcatcctgtgatcatgtgaaggacaagcagacagcactaatatatctaatcgctatcaatttggtctggaattcattgttacacatcagttaactataaacttcgaatacatttgaataatttcaagataatatttgaagtaaataatgttaaagtgtttttactattgtttattggaatcccatatattcagtgtttagtctgttgttactgtttatgaaaaactaaatttttaatcatgaataatttattaaattaaataaatttattcatagaaacttttctgggttttagtaaaattgctaaatcaaaccaagattttaatatatcagcatttactttgtacccttataacatttcactcttgacttgatttgagaaacatgtttattttttgaatgttcttgtgttcaactaattttctgctgtggaaataaatacttatgatatataaaatcagtgttaactttgaattctaaaatatcctgatagcttcatagataagtgcttttctttttcttttttttttcttttaacatgtacctctacttgaatgtaagtgcttttaataatcaaagtgagtggcagggtgcggtggctcacgcctgtaatcccagcactgggatgctgaagcgggcagatt

SEQ ID NO: 112985 - DNA, 1060 bp, Homo sapiens
gaagacctgttgcattaactgacggagtgcagtggcatgatcttggctcactgcgacctccgcctctcaggttcaagcggttctcctgcctccacctgagtagctgagattacaggtgcccgccaccatgcctggctaatttttgtatttttaatagacacgaggtttcaccatgttggccaagctggtctcgaattcctgacctcaagtgatatgcctgccttggcctcccaaagtgctgggattataggtttgagccaccacacccgacctgacattttatttttatttttttaattacatttttctatatgcttattctttggattgctaaccatctaactacccaaatacttaacagccttggcttttaatttcaaaatttaatagacacatatgcaattgatttgtcccatataaactttattttacagaaaatatttaaagttttatgtaatagctattaactctcttaaatggggtttatatggctcgatttggtgctttctttttatgttaaacttctctagctgtcagctaaaatgttaaaaaagtcgaaaatattttagggtattgtgtgaagttttacagtaggtatttttgagttttgtttgaaatctgtgttgtctgtgaattatttttaaatagggattcttagtctactaacgatatttgaattataatgtgcctttgcagtctttttaaaggagatttcatttgtcacctctatgcctctatcatcttaattttttacaaatatttaaaaattattaatgtgaagttattgatggtagacaaagtagtaacttctttcaaactactttggcataacaagccaacactgtacagctctttgagctataagcaattttacatgttcagatgagaacctttagttttaaccaaaagtataacatctactaaagttcttccacaaaatactttttaaaataaaacttgtcaactgaattacgattttcttatattatgtatatagtgaggttatatgattgaatgctttttgaacaatggttttagtaaaacaaatactttattattg

SEQ ID NO: 112986 - DNA, 1223 bp, Homo sapiens
ggtctgtggttgctctgcgttgggcactggcagggtgcgggcaggggcgacttgcgggacttgccggcgcgtggcggcggtagcgggcaccaggcccgggtaacggcaggcctcccctccctgtcagtcggaggtaatttgttccaaggtgtcattcactctgcctatttacagacatgggcatctgggaagggagcggcaggaagaggtgggacctcaggttctccttgcctgatgggggcacggaggtggtagcttggcggcgcatccctgctggcgcggttgcgattgtgttttgtccccagtgttagtgacttgggaaagtagctaactttagatactgcagtgcttcgtatgggaaagttttggtagacttttttttttttttttttacataaaaggattgaagcaagtcagagcaaggggatttattcgtaagtggaagcgcgattgtagtcttttgtgaaataagatgaaaaaaggttttcaaaacactgctgagcagtcatattaaaaatgagactttaaatgtggtttttaaagtgctttatggggggaggggggagggatagcattaggagatatacctaatgttaaatgacgagttgatgggtgcagcacaccaacatggctgcacatgtatacatgtgtaacctgcacgttgtgcacatgtaccctaaaactttaagtataattaaaaaaaataaagtgctttaagttataagtgtgctggaaaataattgaaataggatagttgacatgcgagcgtggattgcacgttaggtaaatggttttctaacattgtcagctctccttccctttagaggagataagattatgccactatatttgaatgctgaccaatgctgtatggccgtcggtgctttattttgattgtagtaactgcaacttaagaaagtaaaaatgggccggcgcggtggctcacgcctgtaatcccagcactttgggaggccgaggcgggcggatcacctgaggtgaggagttcgagaccaggctggccaatatggcgaaaccccgtctctactagaaatacgatcattagccaggcgtggtggcgggcgcctgtaatctcacctacttgagaggctgaggcagggagaatcgcttgaacccgggaggtggaggttgcagtgagccgagatcgcgccactgcactccagcctggtcggcagagtgagacccactctcaaaaaaaaaaaaaa

SEQ ID NO: 112987 - DNA, 1016 bp, Homo sapiens
gggttcttagaattatgctgattcacattaggtcataggaataaatatgtaaatcacctctttccatgaattcccaaatttctgaccttaataatttcctagtgataagaaagcctagtttctttaagtcaatggagagtagtatgtcaccaaaaatttgaagtggaaatagagataagaagcatagactgtgcttatatgtatctatgagtagagaaaagtagtgaaactgtatatcattttaatctcaaatttgaagaccttaaaattttaacaacataactctttatgatttctgagggatttgtatggtaaaatattctaacataattggtcttcttcatcaaagagattaaaatttctattttttttcctatctggaggttgaattttctaataggggttgaactgagcagaagtctacctttatgcaccagaaaacattgattatgggaatggtaagattacttctgaaacataggttttgcagttttatggatattgttagtattttactattaactcttaaatgaaaggatttcattcatcagaattgaaaggtcaggtacctgacaatgttgggtttttttctttttttaaattttaataatcttcacaagggcactgtaatgtagtgtttttctttcttttcttttttttttccccttgactcttagcaccactcaatgaaaattttaaaaagtgccacacataaaatatataatccttttttcaggaaacctttttaattacccagaactgtgatcctcccaaggtacaaaaaaaaaatcataccagagatgaaatgtatatggtgatttatctttggagagttcagttgatattttttttgttgttgttgagacggagcctcactctgtcgctcaggctggagtacagtggcgcagtctcggctcactgcaacttccgcctcctggattcaagcaattctcttgcctcagcctcccgagtagctgagattacaggtgtgtgccaccacgcttggcttatttttg

SEQ ID NO: 112988 - DNA, 1191 bp, Homo sapiens
tctagcgcaatggcgcgatcttggctcactgcaacctccctgcctcccaggttcaaacgattctcctgcctcagcctcccgagtagctgggaatacagcaatccacaaccagataattggttctgtttataattatgaaatcataggcaaatactttcatatctctaggcctttgttttaatcagtaaaatgaatcagtgcaatgtaatggatgattaagactattccaactctaaaagagtctttaatgtaatcctttctttattcaactttgtgtttttctttagtcttaaatttactgggccaaaataatactcacttgattttcttttacagtttggctgttaaactagcaattgagcataaaagcttgatattacttacttgtaacactgttttatgacatttaatttaaaaatgatagaaagttttttatataaattaccaatttcttccttcaggaatcagtgtctgtccctgaagggtcattaaatcagctatgttcttcagaagaaccagaacaagaagaacttgattttttgtttgatgaagagattgaacaaataggacgaaaaaacacatttactgattggtctgataatgattcagattatgaaattgatgaccaagacttaaacaagattttgattgtaactcagacaccaccttatgtgaaaaaacatcctggaggagatcgaacaggcacccacatgtctcgggcaaaaatcacatctgaacttgctaaagttatcaatgatggcttatactattatgaacaggatctatggatggaagaagatgaaaacaaacacacagccataaaggtaattgtttctggccaacatctttctactgatgctttgttttgattgtatgttgctgtttatattttctcaaacttgaggctctattttatgaaatgttgaatataaatacattgtatttaacttgaaaaattcctggaaatatacctgataattaccacctgaggaatcgttttattttatgaaagtaacagcgtgatgaatactgtaattacaaaagaaaattagtactcactgacttatacccttgtttttttttttttttgttttgtttttttttgtttttgttttaggtgacaatactgagaacgccctttctcgtatgaaagaataaaaacaagttactgtggacaggcttaatttatat

SEQ ID NO: 112989 - DNA, 1057 bp, Homo sapiens
attttgcttattatgttttcccagaatcaccatgatcgattacttctgctcatcataaacatctagttcctaagcaggatatgagaatctgccttcctgtgacctctcctgggctcagtgacactccagtcgccgccccaccccacatcaatgccacttccaagtttgacttgcatcttacaaaccatatttctgtttactttttttctgccctgggacatttttaataacttttagataacaacttcaacaaaaatttacctcccaccaagagaagttgtctttattgtgagaagttgtctttattcccaagaaggggaataacttactctttaagtcagttttattacaggtaaatttgtaccagctttttcctctacttgtgttaagacctgtctccaatagacattccaattgaggattgtggaaatagcaaattacattggtgtctgcccaccactgaaggcaaaaagctggtttatctaggccacaggcagagcccgcaggggaggcaggtaacttctcggaccaccagattatcttgatcttcagccagctttattgttgttctacattttaataaacactacatgtttattttattttattttatatgtgttatgttatgttatgttattttttttgaggcagagtctccctgtttctcccaggctggagcacagtggtgagatctcggctcactgcaacctccgcctcccaggttcaaacgactctcgtgcctcagcctcgcgagtagctgggactacagacatgcaccaccatgtccgcctaacttttctatttttgtagagatggggttttgccaggttgcccaggatgatcttgaactcctgacctcaattgatcctctctcctcagcctcccagagtgctgggattacaggcgtgagcactgcgcgcctggcctgttttattattttgaagattacagtataggtttctaggaagcctggatggaggttctcatattctaggtaatatttagctatttaataaaaatttattttcaaaaccttaaagtttgtggattacataca

SEQ ID NO: 112990 - DNA, 2174 bp, Homo sapiens
tatctttcccctttcttatgccctcataacatcagtttttaccacttgtgtgatgctgtcccagctgtttatctgacccctgggtcccttggaacagctgttctggtttagctgggtactgagatgggtcctggacttactcatttttaaaaaagatctccaagtgattctgatgcagtatccaactaagaatcactggtacagaacaccctcttgcaaagaattcccaagccttataagttccctaatcctgttttcttttgttcaggctttacatgtgtataaagaccagccatggtgaagcaattttagaatatttagataatattctaataatcatattttatatgattctaaaacagacaaatgccttttctctgtataatggaatagtgaaacaaatttgatcaccactgattttcttttgatgtatctttcagaaaaatatgattatgtaggcagactcctaaaaccaggagaagaaccatcagaatatacagatgaagaagataccaaggatcacaataaacaggattgaactttgtaaacaaccaaagtcaggggccttcagaactgcaattcttactccctttcacagactgtccggagtctttgggtttgattcacctgctgcgaaaaacattcaacaaattgtgtacaagataaattaatctcactatgaagatttgaataactagacattatttatgctgccaaactcatttgttgcagttgtttgtaatgtctagtggggcttcatcatcctgaaaagaaggagacagggatttttttaaagagcaagaaagtcacaatattacttctttccttccttttttccttctttcctttcttctttctctttctttctttttaaaatatattgaagacaaccagatatgtatttgctactcaagtgtacagatctcctcaagaaacatcaagggactcctgtgtcacatactgtgtttttattttaacatgggtgagggaggcgacctgatcaggggaggtgggggtacacatcaatttgagttgttcaggctactgaaacattaaaatgtgaattcccaaacttttctttttggctttgtcagggaaaagaaaaatatctttataaagaaatctttggaaattaggagaaggaatttcaggtgggtttaagtcagagctagttccccaacagaaagatcatttgaaaccagtttttatcccttctctttccttccctttccctaaatcaaatcaatattaattgtgccttatttcacttaacatagacttgaattatttttagggaaagcccctataatgaattcagaaatcactacaagcagcattaagactgaagttggaatattctgttgaccataaaaccttgatatcattctgtgtatatagaatgtaaaaggaatattacagtgttaactgccatatatgtaatatacacaaactcaattagcattgtaatggccaaatgcattcccccatgcttttctgttttcaaaaaaattgaaaaacaaatcaactcttatccccaacagctgcctaattttaggagtctgaccctccacatctcactggtgtgggtgcatggggctgtggagtgggtgtcagtatggatgtgtctgaatgtgtgaggccttggaagggactctttctgcagatactgtaaatacaagtaccattttaataaagcatgtacaataaaccaaaataagcttgagttggactttatatacagaactgtaagccagtgcattatgatacagttgtaagattgtgcatttgattcaagataaggaaaaatcttggaaatgaaaagcaggcactggttaaccaagttgtacacattgtaccacattcagcataactttaggaagaaattccactttgtggaacattctccagaaatccaagattattcaggtaagaattggtatattaaatgtacatctttttactttctattttgatgccaactgattatactagacaattagcactccaggtggttattgaacacaaaacagtaaaagaatattgcactgatagatactaaattattattttattaggttgaaaaagcccttactaaaagcccctcatatatcaattactttatttcattatgactacttaggttccgggctggggacaagttcacttaaaaaggc

SEQ ID NO: 112991 - DNA, 1028 bp, Homo sapiens
attatttttatttttttgatgccactattaacagcaaccagtaaacattatttcccctcaagcagactggcttctaaacctaaccacttaagtttcttcttctccctcattacctcacagtcttcattttgaatattaagtttggggatatctgaagtaattgaaattgagggttttaagatctaagtgaaaagctttacttgggtcaaaaggcagatttccaacaaatttcttttcttattccatctagtatctgtacatgttttgaaattaagggtatatacaaatgtgaattatgaggggtttttttctttgttgtgtttttttttttttttttttactttttcctttgagacattctaaaatattgttaggtgatctaaataatttattttcttttttccagcgggtccatatggaatatttgctggtagggatgcctccagaggactggccacattttgcctagataaagatgcacttagagatgaatatgatgatctctcagatttgaatgcagtacaaatggagagtgttcgagaatgggaaatgcagtttaaaggtatttttattttgttggattctttggaaaattaaatatttgttcaaagaaaatatatactattttacatgctttaagagcctaaggatgtcatccgttttcattgccatcattatttgataatatttttaaagatagctaaagctgggtgaagtggcacatgcctgtggtcctagctgctgatgggaatcccttgagctcaggagttcaaggactaacctgggcaacatagtgagacttgtccaaaaaaagaaattgcaaaaaatagctaaataaaaatatgattgttacatgtgataattattttgaaaatcaatatttaaaaaaatgacttgttacaaattctaagcctcaaaaattgtgatacttacagtcagcttcttcattaaggtttagttttttaaaaatacaggcttatatttaaaactgagttgattactgatttcaatactataatttattccaa

SEQ ID NO: 112992 - DNA, 1071 bp, Homo sapiens
gagtcggcttgtagtttctctttacttttattaatctttttcttccttttggttgtagttgagatctttttgtctttggggttttgctattttactaggatttgtccaggtatggatttgattttatttaccatgtaccaaactctactcaagtctgtggatatattgtccttttttttttttttttttttttcccagaaaatttgctgttacttattgcctcttccattatctctgttccttcctctggaactgttaatagatatacattaggttttcattctattcttaatgtctcttaatctttccttttgtaccatttcttaataattttaagcaaatttactttagttctttaatctgcttctgtatctgttatatgtgcccactcctccatgatggtttgtttcttcatgtagtttatattttttattgtgaacttattatcttcagtagttactttttttaattttggagtatttcctgtaaaattccatgagccctaagttgtgaaagaggtaaagtgctttgggtatgttgcaaaatagggcctcacgtaagttaaaacaatgattttttaaattaagtaatacatgctcaaaatagaaaattcaaaaggatatacagtgaaaaataagtctacttcccacaactagtcccagccaccatgttcccttccatagcagcaaagcaccagtctacgtattgttctagagctattttgggtgcaagtacaagcatgtggatatcttcctttccccccacactaattatagtatactatgcatacccttcacaatattttaatatcacaagagcctttgacatcagtatagagagccatcttattcttttgaatacatgcataatattctattttatgaataagtcataatttaacagtccactgttaacatttgttttcagtctcctgttattgcatgatgctgcaataaatatgtacatgtcattttacacatgtgtgtaaaattatgattataaagtaaattcctggaaataaaattaccgaggcttggggtatggatatttttaatttggattcttgtttct

SEQ ID NO: 112993 - DNA, 1025 bp, Homo sapiens
tcaggagttcgaaaccagcctggccaatataacaaaacctcgtctctactaaaaatacaagaaaatcagctagacgtggtggcgggtgcctgtaatcccagctactcgggaggcggaggcagggagagttgctggaacccgggaggtgggggttgcagtgagccgagattgcgccattgcactccagcctgggcgacagagagagactcggtataaaaaaaaattaaaaattaagagtcataggtggtagattgcttttttatggtatgtgcactgagggaggctcttgagattacaatggagaagtcagttttagattagtttctgccagttcctaggttctgttgaacagcctaagagtgatatacagttagtattctacagttgatcaacaacataacagatatttgaatattttattattgaaaggaaccttaaagaaagccagatcattttatgggcttagaatatgttgatattgcatattaatagaaaatgtaataagtagtacttttcaaaaaatcttaaagccaaatttctggctataaaacagatacaagttcagttttgcttttaatttttattttcatcctcataaattaagcagttttgtagcagaataattcagaagcagtaattgttagtttctatgcctagccaatatctaccctaatttcacaataatggttttaggattaaattttgtgagatttttccataatgctaaacatgtgtttatttttagtcatacatttttaaagttcaggctcttaattaaatattgacagtgtaatttggtggagtatacacattttggcaaacagttggcattaactgtatttgccaatattaaatttagtaacagatcaggcacttggccagcaggtgaggaaagtttggtcatgtaaaaaactgaatacaggaggagaaagaaaaccagattcgttaagcacccacaatatcagatccattaatttttttatctccataattcctcagtgaagttggtaagtattcctgctcta

SEQ ID NO: 112994 - DNA, 1412 bp, Homo sapiens
tgtattactccgtaaggccacgtttaggggcatgtaaagtcccaaccctccagtctctgaagtccagacgtataagcaacacctcggactctctttaaaccagttttagttcggagttgctttccatgattaacaaggtatgtgggatgagaacagaccagaatgcagagcttattaaagactggtaaggatattcaccttgagttttgggggtggagctcctatacccagcaggcgtgtctctggtttcttttttctttttttttctcttttcaagtacacgttgataatgacttgtgttttcacttagcagaactaaggagaaaaaacttagaagagttgtagatttatacccccatgtgccagttatgcaagttaaagatttttagaactttgttttgagagaactttgttttcagggaactttgtgtagggtagttgatttagacgccctttttttacagtgtggttgtagcatacattttggattatgttaataaaccccagactcatggaacctgttggtatatcatacagttgagcaacattgtgcatcctggttgtgcactgattaatactaagctttaaaaaaaagtggtgactacaataagaataaataattaaattagagacctaaagtgacctgttattggagagagtacctccaagccttaaagtcatagggttggcagtctggaagtaagctggttttctccttaatttaatctgtaggtgtataagatttattgacacttaaaaatatatacttctgatttcagtgcttgatagctggaagatattttagaagtgctttggtttgtagtttgttcattggaatagggataagaaataggagatttttggtgttgaattatgtaatttatttcttagttgtttgtacttctgtgtatatatacacatttaatccaaccaagtaaatacatagcttacagagtttttgcttctggttacataaatgtgaacacaaggtgtctgcctacttatatcaactgaaatggttaatacatttttgtttacttaagcacacgtgggacaagagaacagggccaaagtacagtatttaaacaggccaagcgaagtaaattttttttaaatcaaggatttagacagcattttatacctagttcaagcttttcccccattggtattaaaatgtgttaagtgattagaaatcctgtacaggtttaaatttttaatatagaccttacccagctaaaagatcagcttttgtaccctgtctgaactgccactgaagaaaacaaagtattagtacaaagaatcgtattagtcctcacacattatgccttggcagtatctgaaaatagctaagagagacagtcatagaaacagtttggcagcctccagtggcaaacgtttgttctgtgatagaa

SEQ ID NO: 112995 - DNA, 1032 bp, Homo sapiens
aacaatggttgacctgtcttaggtaccaaagtccctttaatttgtgatgatagataaaacttttcttaaagtgttcctttgagaatgtatcttgaaagtattaataattacctggaaggtaactgtggctgtagcaagtgctgggacttggagttgtatgttatcgttccagtatcagttctgacacttacttagctgtaagatttaggaaagtcacctaatctcatagacctcatttgtgaaatatgataataatacataacacacagggttgttatggggattacatgagattattacaatgaaagtgttactctaagagctataaaattggaaggtattacaactaaaggagcaggtaactgtggggttgcccacttaaccattatcagacaggtatttggagtcaaacgccctagagcacagtaaggattaaacattaaactgcagatattcgtcattgagattagcgttattaccatggtttaatatttaattctcactgttctctaggggaccagatggactctgtggagaatgtagacttagacattcctgactacttgcatcccaaactaaagtccatacaagataaaaacacctcatagacagaagagtcactccatgaggcattctaagaatgcactttctgcatggtgactagtttttaagtggccaagtggataggctctcagcaatcttgctcctctgggaagaataaaaacattacactgaaggtcttgtttgtgagttgtgcttttggacctaagtttttctgctataaggggtatattattaacaaaacaaacccaaccaaaaagttggaattcctggaaattcaccaaaattgcctggctgctgcagcccaacaattctttagctcttttcaatcatctttattttggatttacttggaatccttgatctttaacccaattttgagcattacactgtccctatttaacgcaaaaggaatattttggaattttaaaagagccacaaaatatcaaacccaagatcctagttttgggt

SEQ ID NO: 112996 - DNA, 1045 bp, Homo sapiens
tggaaagtccgggaggggcaccaagccagagacctggagcagctcgcagcccagccttatgctggagtaacctgagccctcagagagtccaggaggtgaggctacagtccagcattctatttttaattcacagtgtggagataagagttaaatataaagcagattaagacttcccttaaatctcctctataaaagaaaaactggaattaatctacaggagcactccatggatagctcaataccatcattttttaagaataaaattagaagcagaaaactgtgtccttatccttttgacatccaagaattattgccatgaaagtactacagcccatgaaattactttccaggttacactcattagatttagcattttcattctgtagacctgtggttttaacggaaaagaaaagaaaaaaaaatcccctcccttcatagtacaactgttcccatacactggcccattaatgggatgctaatgaatgcggaagtcattgtaaaatcacaaacgcagaactgagaagcagatttcaaacatcgataggcctagccttgttttggaaatttggatcatgagagcatgggactcaggtagagccctgcagcctgtgttttctgcacactgtagctaaagaggccctcaattacaggctcgatttttaaaaaatttttagtcatattatacaatcaccattatgggttagacattaaacagatgccaacctagctactacaggctttgtcactggaagtgttaaccacataacacggcagcagcagagcaaagagattaagagttcaggctctagagcagttggccagggtatgaacccaagccctaccaattactcactgtgtgaccttgggcaagttgcttaatctctctgtgccggtgtttccacttttgaaaagcggagataataatagtccgtgcctccagttaggattaattgagaaaatgtatgcaaagcactaaatcagttcctggcaccatagtgtgtgctcaacagcagttggtggttgttagtattttgttgttggagac

SEQ ID NO: 112997 - DNA, 1057 bp, Homo sapiens
agctatcagaatctggaagaggcaagaaacagattctccactagagccttcagagggagaagagccctgctaacactttgatgtcagcccagtgacacatcaaacctctggcttctagaccagtgagagaataaatttttgttgttttaagaaccaagtttgtgatatttgttacggaagccataggaaactaattcagatgtagcagtgagggatttgatgactggagtggcagcagctatcttgaaaccatgaggacacaaacctgaggataaaattaaatacaatatcctggagaagacagagtggaaaaatggaaagacctgttgaattagccacatatcactcaaccttttgacttcttatcatgtaagataataaatgtctttattgtttatggctcttctggttggatattctgttacctgcagccacaagcattctaattgatacagccctatccaaaagggtaggagagtcctggctgggaagcagcagtgggtactaaggaagaaatctgacccacttgccaactctgacaagagtgcataaaatgaaaaatgagcagctcccacttgagagaggagcagaacaggtaacttggagagagtcagaagattaagaaaatggttagggaaaagattgtagggataggggcatttgttaattatgcaacaggccttttcaaaggcagtaaaagcttaggaagaggaagataattgggaggtattctgagaaaaggtgtatgtgaatcatgacactgtactgttatgatgaaattatatagagtataggtggagtggggaataaggagagactcgcactttggacaatgaccaaaaaaaaaaaaaaaaaagggaaaatagatacaatgcttgttagatttaaccagccccagggttgccaagaaaacatttctaccaatgccaggaccaaagtagtttttgaactttaatgtttataaggttcatggagtttgttaaaaatcttaaacattcctaggccccaggaccaagatcctgactcagtagatctcagtagggtccagaaatctgca

SEQ ID NO: 112998 - DNA, 1580 bp, Homo sapiens
gtgcagctttagctctcactcaaactcaccttccttaggacagctttccctaactccccatgtgatttcagggtcctctgttatattgtcatggctttatccttgccttcacagcacctatcttagttcgtgattatataattgttgtgtgattgtttgactgtgtctgattgcttaccattggatccccagcatccagcatagttcctgacataccataaatatttttcaataaatgaatgaatggatggacattgtgagaggaagaggaggtggtgcagattaaaattgctgcaaagaatcttcagtggacaatcctcatgacccaaagaaaaatgactgcactactggagttaggggtgccaccaatgagtcagctgagcaacctatttccagggccacttggccagcattggtgccaatgagtgcaaggactgttaatactgactcacaggccaaagacaagctccttgtcctcaaactataagcatcatctcattattcacgttctatcaggttaccattagtcagatttcaactgtcaaaacaatatcctcctccagcagagctatgagcctgataatttattctgatatactttggctgctaccaattttttgtaacttaaaaaatactgggatactatatttgaaagtaaagcacattatttcaacacctgatttactcaatttaacatatggcttatatcttaaatgtgtttttaaaagattatatattctcaaattgatagaattataatttcccccatttaaggtttacataattaaatataggcatgtaatttttgtggaaacagatacaatatgatctagaacactgtaaaatattcctgctcagaaaaaaatagataaaattcaaaaaggtccttccaaatataacacttccattttttcagtaacaactttgagaattcctttctaatatcaacagtttttaaggactttccatttatagtaattgtactttcagtattcagttaaatgagaaaacacataagataaaagcttctataaacccaataatgttctgaaacttatagccattaatcagcatgtacttacatattcttaaaaataagagtacaaatatatttgcaatataaacaatgtttgtagtggaaacacacatttgcttcactatcccaacttccccaccatgctctccggtttgtttctgttatatatttggtggttcggtaactcagaaactgatccaaaatttagagtagaaaatggacttactgaagggggacggtcttaggcaaaatgcaaacatatatacatatatgtgtttgctgggtgtatttattatatatatgtcgcatattacatgtactcttgacaagagaatcatagaacttggagatattccaaagtttatctgggctatttcccataatgcaatagagtagtatctagatcattcataacagaaatagctgaatgatttgggtgcattcagcaatgaaagaatgttattattttatagtggctttaacataggagaaaaagtgttttcccaataattatgattattgccattaaaacctccaaggtttt

SEQ ID NO: 112999 - DNA, 1023 bp, Homo sapiens
ggtactaagtcttccctgacattttgtcagtaaaggtcaaagtcactggaaatggtcactgcacctaacctaagtgtcagtttcctgatctatagagtagaggatttgatgaatttatctctagaattctgtctacttctagtcagattcttcactgacatgaagtcaccactgtgtatctaccttactaaccttttttggttaacatgtgggaaatttaataaattcctgacatttttcaacaacatttataacctttggggatcagttcattttcaccaattcaattttagtcatcttgattgcttttgtcagaggggaaaaataatgtcacataattaaaataataaataacctcccaaataatgtatgtttattaatcttatgacagaacctccagctatattttgttagaactaaatttaaaacagcacataacttgcagctcttgcaagttctcacaatttaaaaattgaagatgtgttacaagcagagttcatgaattatagagctcaatgattatatttgataaagtatcctctgatctacaattacagactgatgagaacatgctgttgattcaaaaagattggaaaatcgcatgtatcacttgcagactgctgggaccagcgtaccgcaggctgctcaggtatagagacgcatcttctaggagtgccaattgccctactctctgggactgaactaactaatacccaacctctgaggtccttaacacctcatgtattcaatctgtggtattcttaacacctcacctctgagacagtcaacattgtgtcaggtgttgaagcctaagcctctgaagccaatgttatgctaagctgtacaggagctgaaactacaacctctggctcaagaacatcccaagcagtggcctgtgcagaaactcctgcaggaacaccccttcatcaggtctagtgagccaagtccttgcagcagtagggccagtaatcactcccattcccattgactttttttttttttaaatcagttaatgcttaaata

SEQ ID NO: 113000 - DNA, 2336 bp, Homo sapiens
gattagtgacaacaacaacaaaagcaacttatttttgagcctgtgaaaggccctcttctagacactttatacaacagctgtatccttattgatagccctgcaaggtaagtatcatttttcccattgtggagaagtactgaatctcgggagggtactgggccaaggtcaccagccaatcagtgacagataggaaattcaaacctaggtttgttgggttctttctactataccaggcaacaccatttgtaaatgtgaactcattctgagcatcaaaggacaattggctttactttgaagaaactcaattccatattggtttcagttattttaacaaattcaacatgcttaattatctcagaatttttacagaatagtaattgttaattccctggtagaattaggcttgcctgcaactatttttaattccttaacatcttctaggtattccacttgacccgatgcttttccttgatgtggtctggagaatgtgatctatagaaacaatgtataagaatatcctggccggtggctcacacctgtaatcccagaactttgggaggccgaggcgggtagatcacgaggtcaagatatcgagaccatcctggccaacattgtgaaaccctgtctctatcaaaaatacaaaaattagctggccatggtggcgcatgcctgtagtcccagcttctcgggaggctgaggcaggagaatcgcttgaacccaggaggcagaggttgcagtgagccgagatcgcaccagcctgggggacagggcaagactctgtctcaaaaaaaaaaaaaatatcctgactttctttataggcacataaataaataaggaaagaatcttttccccaaccctgaggagataggcagtaccactatatagcaggcttgcatgcatgcaaactttgaaagcaatcattgaacaaagcttgggcaaggttatggtgaataagaaagagaacaaagttcatgaagaggtgcgaagaaaacaggaagtaagtgttggtaaattttgcatgtacaatagtatttctgtcatagtgaatgtcttctcaatagattattctcactttcctcctatatatccatttattttgttggacaccaacacccaataaagataatgggaacaaataagaactatagctcttaatatagattctagaaagtgaaaactgctttttatagctctaaaaccaaagcttttggcttcaatatagattgaagatatctctctaccatttactacctgggtttttttattcgcttgtataaccatgttctatttctgttttgtttgaaaagaaaatgaaatagaattacctcctacactcacactgctattgacattaaatttcatcttcttttattatgatcagcaaagttactcataacactggaatttgttttttggttttaaagttatagctgctgctgttgttggaacaattagtattgctttggcactgtgttccacctaaactcatggcatttgtgtactatttacctttcagaaaagctattttccaagaagaaaaagaaaatggaagtacaaatttccaacagcacacattttctctgctctctccttggctctgaaagaggatgcgtgaaacagaatttcaggctgtaattaatgcagctcttcataagataagaggttcttttatctacagaaaaattgctgcactaattcccaacaagaagtgcaatgctccggttaatgctctttctacaagaagaattcaccttttctaccctctacatatttacagacaaatttgaatattttgttatgggaaactgaagatgggtaaacatacaatgataatagtactttatagggctaaatctaaaagccttaaagattaatattatgtttggataaatgctgaataagtttacataaagaattttcaaataacattgacgctacaggcatgtacttgtaagcacagaccttaattgggcacaacttagatccagcactctttgagggggagaataaacaaattgggaaatgcatcctcatttgatacagtgaggaaaaagagctatggttccttgctctgctttaaagtactgtccaaagaaggatgaagccccgctatttcattttgatttaaatatttccttgtagaatgcacattccaatttggaaacaatactttctatatgtatgtttcatgtatgtgcttggaataattggtaatgtgttggcactgtgttccacttaaatgcatggcatttgtatactatttaatgttttgttgttgttgttgtttttgagatggagtctcagtctgttgcccaggctggagtgcaatggtgtga

SEQ ID NO: 113001 - DNA, 2000 bp, Homo sapiens
aaaacattaggagggggtagctttggctttcaaaagactgcaaaacactttcctagtatcttcgtctgggaaaataatggtcttacttcatttctttaggcttctccctgagtctgaatcttatttgagaggtcctggtgactccttgtttccacagcctgcacaggcaacatctgttctggcctaaggatgagaacctcacctccccacccaacacagctcagcctcaggggtgaggggaaggaagcacacatgcagttgctctcatcctgaaaaactcctagtgaggaagaagctttcacactcatggttcacagagagatttcagccagaactagcagtctcactagttgtcagagcctcttgttgattcccaccttcagcaaaaatccttcagggcagcaagcgcagcaggaaacctgtcattaacaaccaccatggtgtcacatcagcgattctcaggagccctcactccactatttaactcagctatttacctcatcagggagagctttgtttgattgtcagaaaatagaacatgtacatttgtctgtcataaacacacacaagctctccagagcataaataaacaaaacgatcatgtacgttggtaaatgtgtttgcattatttaaccaaaccagatgaagcatgtgaataaccctgcatataaagtaccatcaagtaacttgcttgtaatctgtcttgtacaatacagccattgccactcattccactcacccgattcagaccctggaaatgtactatttttagttgggctttgtacaccactatttacaaagagcactgttaaatcctttgaatagcagccaagaagttgggtgagaacctagaagcctgccacacagatcagcatcctaatcaactctgggacagccagtgctaaagatctgcctttctttccttttcttcttcccctttgtctccccgggaatatcaatgtaaaagaggaaaggagacaaagagttgggccttatctgttcttgtcgttcaaatgggttgctttactcactctcctagataacagcccatttgtcaacatctttggcggtttaagccgttctttgtcaaaaccacttttggaaaagatttgaccatttatttacatgggagccaacgtgacggcagcaggtgcgtcatggaaaactcggacgtgggtgctgcaaagccgctgggattcggtcacgtgacagcccgcctgctgcccggccagcgggccaaatggccacacgggaaggagggacagaggagaaaatagtaggcaaagtgttggcgtgaggcaggtggtggatgaggcagtcgcaaagagaaaggattgcaacatcagggaggagatgaaaggcctcatatcattttgcagccaacaagaaacctgaaggaactaagtttggctctatttctacagcttgtgaaaagctgagaatggaagcaatgactgggctaattctggacaaaattttttaaaatgatttttgtcagaggagcccagatctttgcctcaattctttgcttttgtctaaattgctcatttttccaaatttctgtaagtaattttttaggtgatgtgaattgatttgcctttggtataccggacaagattttattttattttattattttatttttgagacggagtttcgctcttgttgcccagactggagtgcagtggtgtgatctcaactcactacaacctctgcctcccgggttcaagcgattctcctgcctcagcctcctgagtagccgggattacaggtgcccgccaccacaccgagctaatttttgtatttttagtagagatggggtttcaccacgttggccaggctggtctcaaactcctgacctcaggtgatccatctgcctcagcctcccaaagtgctgggattacaggtgttagccaccgtgcccagcctggacaagattatttgagacatctctggtggcctaaatcgtgaagggtttgccccctgtttccttttgtcca

SEQ ID NO: 113002 - DNA, 1020 bp, Homo sapiens
ggttgaacttatcaaaaggccacaagtgaacaataaagtcttccttatagagtacagataaatttgagattttcgataatcttgttaaattctctgtagttccttattcttaataccatgcctgagtttcaaaactgctcactgctttcataattgctgctttttgttgcttcttccaaatctgatctccagtaaaacactaggatggcatctctttcttttctctgctcccacttctaccttcctgaattcccttctcaactcccttctcctcatcacctcccaagcctctatacctaacagtagggccaaggacataaacaaggaaaagaaaatgcaaataagagttagatatttaataacagaagaggaagaagcatagtacacacttcaccccttttttctacctaaacaaatctcaagactgccgtttgctaggactgccataacaaagtaccgtagactgggtggcttcatcaacagagaaatattttctccacattctggaggctagaagttagagaccaaggtgtcagcagggttggtttcttctgaagcttctctgctttgcttggagatggctgctttctccctgagtcttcacctgctcttctctctgtagctgcatccgtccaaatctcctgttctcatgagcacatcggtcacaatgggttagaacctattctaataagcccattgtaacttaattatctccttaaacatcctgtttacaaatatagtcactttctgaagtactgggggtgagttgggactttaacatgtgaattttggggagacacaattcagcccataacagccgctttcacatacctttaccaaatagcatttctttgccatccatcctaccctgatgttgattttccctagccttggtgatctctgccattattttagtggctgattaaatttaattggcacttatgcgtactgtcttgagtagtttttagatgaaagttattcctctccccaacaagatccacgagcacagggctagttttt

SEQ ID NO: 113003 - DNA, 1044 bp, Homo sapiens
atatgtcctccgtagctggtgaagccttgtcttcttgtggggtcactgggaaagggttcctaaagaaagcctttgagagtgtgaagaatatcattaatcaccactgagcctccaagagtaagagaaaagtagcacttaaaggcaaaagatgcctcgagataggcattttaattttttgccatgataacaatcgttatcacaatttaatttatatttatttgcatttgcattatttaaattgaaagaaaatatgaccttctttctgaaatagattaaattagtatcagtacagaaatgactacgtaatatttttcttttcttattttatttttggagtagagaagcaacccatctatccattctttcatctggtttttcatacacctatccatctatccatatatctatctgtctgtctgtctccccaaatcattttaagtcccccttatgagctttatgtattctgtaagaccctaaacctgtaaaaacgagcaggaccagatcaacatagtcaccattcattatatatgaatttgatctaaaacatcattcaaattaagtcagggataaggagatcatttaaagataaaacctaaagatatgccttaggaggcatctctgtacttcttcagtgtactaatgctcgctggcattattgctatcactgataaatgtcaaaggggagagtgatatttttggagttgatttttttaccctattacaaaaatagattataaacacacatatgtcacagaaagaacttaagctaatatttctatatagggacaagcattagcatatttttaaagttcacagttacatttctgttgtcagttataatcgtctcttggtttgaactcattattttaagatagctatcaaaaatctattggtataatgtaatctgcttaaatttcacaagtgtgtgaaaattttacagtcaaagagttcctaaaggaagctgtgtaattcaatattttcatataaccatcttcataaaggcacagagctgacttaaaccaacaaaggatagtccctaataac

SEQ ID NO: 113004 - DNA, 1932 bp, Homo sapiens
tgtggacttgtcttattcttcttcttctttttttttttttttttagtgttttcttttcttttctttccagctcttttttttttttttttttttttgaagtggagtttcactcttgtcacccaggctggagtgcaatggcacgatctcggctcactgcaacctccgtcttccgagttcaagagattctcctgcctcagcctctcgagtagctgtgattacaggtgcccacgaccacgcctggttaatttttgtatttttagtagagacagggtttcactgtgttggccaggctggtctcaaactccttacctcaggtgattcatccacctcagccttccaaagtgctgggattacaggcgtgagccactgcacccagatttttcttagtgtttaatgtcataaagtctagaactccctagaatgacaaatgtgctgtggcaaatgatatttcacatcagtcattttgacttattatttccaaatgaagcaggattgtcatgagaaatacatatcactgtacaatgggtataaccatagttgaatacactgcaaatctaaaatcacgtgtttttcaaccactctaacaaaggtaaaggggtagaatcattgggaaagtatcccttatgtaactcacaggtaagttgtatctctactttcaggtcctgacaacatatgcttgatcccagcttattggacagcatgaatagagctgggacctctgttgtctgaaagggagggaagacccaggaaccatgagcaggagaggtgactggtttctggaaggcccaggtgatagggacttccagagtgtgcgggtgggcatgggtgtgcttggtggtgagcagaacatgaaggtggggcacatggcagggctctgtgcttcctttcatgccttggcttcctggaaggtcttaactggcaatagccatcttcaaagagaagtggctgctgcagccctagtgcagtgagacccgagacagagccttcagtccaccagcctgaacgactgatatttaaatgtcctaattagagatttgtttctttatgaggatggtatattttgaaaacattaaactattttatttgtaatccccctcgtctcccattatcatccccagcagcttaatggaccagacaaatgctaccttttaaaaaggagttataacctgagaaaagcctctatcaggtagaaaggggcaggggaaaaaggtccttttgtctcggaaaactatgaaaattaagcagttagcatggatgttctgatctgaccttctgggacaaaatcctggaggaaagagcaatgagatgggttgaggagaaatccaaaagcggagagagtttatactccactcttctaaccaggaaatccatgattcctgtagctcattagcaggcaagctgtatctcccactgtaactgctggaggagaccaccacgcttggtggctccactggaccaagaagcctcatgagcagaataaaaatggtggcacagcacagtctccaactggagaagactaagttggcattcctaagcttccttcagcagcctgaacacccaaagtgcccaggagttcctgccagttctggggctgcagaacgtagataatgaggctggcctgagtttgccatgagagaaggaaagagacttgggcatagggctgcagggcacgccacctaggctagggaagtgactgacactcaggtgtcacaaagtcagtgcctcaggcctgaccaagctaagattgaaacaggttatctggcagtttgcccgcaaatacagctgctaccatttcctcttctacctagatgtatgaagacaaggagtctgttttccttccccttgaatctggctgacactgcaccttgttttgaccaaaagattgtggcagaagtgatgttatgttggtttgaggacatagcctggcagatt

SEQ ID NO: 113005 - DNA, 1004 bp, Homo sapiens
ctgccttccagaattattgtaaagtttacctatgccctttcttataatccccttcttcattttttcccaaatgctatggtccaaacgagtctaaaactctaaaccctgttaaagtcctgaccctaaggcaatgatattaggagatgggacctttgggaaggtgattaggtcatgagggcaaagcccacatgaatgagattaatgctcttattagaataggctcaagggacttctttttttcaccccttccaccatgtgatggctcagccagaagtcaccatctgtagaccagcaaacgggcctttaccaaacaccgagtctgctagtgccttgatcttggacttcccagcctccagaacagtgtgaaatgaatttccgttgtttataagcaacccaatttaatggtattttgttatagcagcctgagcaggctaagacaccacaagataaggagagactaatctgattggtgatatagaaaagtactgaaatagctcagctcctctgggctttctctttagggctgcctgcctacaagccaagctgccccttagctccagcttccatgtggtatcccatatggtctggtgggtcacacagtgagaagcagaatatctacctccattcagctgcctgagtgtgtgcttggcagatccaatgtggctctttctatgggtctcaagaaatcgacttcaggcaaaggagaaaggccttgatttcagccatagacctattctccctttcagcatttttcagcaagaaagcagatatttggatctcaatggactcttgtgactatttctcatttggcacctcagagatctcaacacctcagagatctcaactagtgtgaacaggatttagtatgacctcatctcttctattccttctcactagtgtatagttattgtgggcatattattagaggaggactttaaccatgaagtacccgcagtccaacctccctcattctcccaaggagaatgatgcttggaagatatcga

SEQ ID NO: 113006 - DNA, 1866 bp, Homo sapiens
tataacctgctgatagagaattctatatgaatatggtgacagttttttaatgtttggtgctgggcatggtggctcaatcccagcacattgggaggctgaggtgggaggattgctgaggccaggagtttgagactagcctggacaacataatgagaccccatctctacaacaacaacaaaaataagcggggcatgatggtgtgtgcctgtagtcccagctactcgggagggtgatgcaggaggattttttgagcccaggagtttgagactgcagtgagccatgatggcactactgcagtccagtctgggtgacagagtcagcccctgtcctaccaaaacaaacaaacaaacaaacaaacaaacaaaaagtttggtgatttggtttccacagcagctattatttcatataaaagctacagataatatattaggagtgcttttggttaaagcagaaagactagaaaccagcacacacgtggacctggggctgagaggagaagctatcagatggtaccagcagggaagcccattcccacctctgggtccaggaaagattgcagtggacacacacagaagccctgtctatttcaccaaccccagagggcatcttgaaccactacctaatagtatagctgacgttcacagcaaggactcagagccatcaagaacacgttaaatgatgttcagtatacgctgtttaatgaggctgagaagaatataattcattttattacgatttccatgaaaatggctaaagcttataaaagtttggtgcttatactgtctaagcttcagttcactggaaaactcgatgctttgtgactcctcgctttctgacgatacagattggtgaggtattaatttaggcatattcatttggcattataatgtatgctaagactacaacacaacaattatttccaaagacagaaaagaagcattgttcagcaaatggagagtagaacagtactttgttcaaattaggaaatagacgttgatgtgacttcttcatggtgtttttttttttttaaacatctgtcagcattcagtgacctcctctgcttttagtccacatttgcctagggccagatattatcattaatcattttgcccctctactcagcaactcagcaagtactggattggccttttgtcctctttgttcagcaatttcaggctttatatcagcctccatagagggtccctctttagctagcctacgtcttgaactcctaatcttcctctattcttaccattgtcctccccacatggcataagtactgtcatcccagcttatcacatctaatatttttaattcatgaaaggctagcatattggtttctgtgtagagcacaattagtggttcttcagcccttcataccaccttgtctagtacatcatccaacaggtctagtttagttgtatcccaggttacaggcatccagcaccctgctctctaattcaagggtcatagaactgagtgacagacctgtgtactataatattctcttggtgattttattaagtttcaaaatgtttctatcagttatctaacatagtctaacactctccaaataccagccctgtactatatgggatttttacattggataaaagtatttctagatgcaacatggattattttttaaaaagtactgactttggtgtaagacttaagttctaggcctgtttctgtctcatggtaactacatgatctttgaaattttcttaacctctctgagctttagtatttatctctataaggaactcactgcaagcattatattagggttaatgtcactgcaagggttaactcattgcaagcgttaattcatgtatgtaaagcacccagtttagttcctaacac

SEQ ID NO: 113007 - DNA, 2154 bp, Homo sapiens
ggaactcacgctggcccacaagcactgcgcgcagccccagttcccgcctgcgcctctccctccacacctccctgcaagctgagggagccggctccggcctcggccagcccagaaaggggctcccacagtgcagccgtgggctgaagggctcctcaagtgccgccaaagtgggagcccaggcagaggaggcgcggagagtgagtgagggctgcgagggctgccagcatgctgtcacctctcagtgttataggtgcgcaccaccacacctgactaatttttgtatttttagtagagatggggtttcaccatgttagtcaggctggtctccaactcctgaccgtgtgatctgcccaccttggcctcccaaagtgctgggattacaggcttgagccactgcacctggtcacttttatatttttaaagaaagacacagctacactttaataaattatcctggaaatcatagttttagaacatattctcaggtcatcagtgttctttcttattaacttcagaatctgatccacatcaaggttaatgacttgattaataatgcttatcagagttccctcagaagagtggcaccatggtgggaggtaccgctacaaatatatacagctctgctactgtcagtataatcactataatcactatagtctatcagtatagttcaatcaaggaatttggcacaggcaataaatgtaaggatgtccatcttatgatcaacagaaatttgactttcattgagagaatctactcatagaacagacagaatgttatcagtagcctagtttggatcctagaagtctctaagctcttttaccggggagagaaaaggagaactgcaattttattttgtgatctattctccccagaaaccagactcttcttaagggaagaatgtttcttttttgcaaaccctaagatacctttagcagaaactctttgaaagtcatttgaggctgtcagatacctcttatttattacaacaaacagagatgtctacagccgcatttcctttggtgttattgcaattgtcactgggatatcagtggctgtctgcaatgctatccttgtagattgcatatcagcatctgattggcccttttatgtactatttcaaagtaatatagaaggtgtcctctgtcagctaagagagaccacagtgacttgcacacagtaggcattcagcaaatgttaattaacccgtcactacctcccttcaccacccccagcctcttttagctgtaggaaaatgtagaatcaaatgaccaggctgaaagagcattatacagtgaccagcactatctttgtttccagccaaaatagatttcagaggaactatacataaaacatttgggtggaaacagttagtgggccatttcaaaaatgaagccaaaatttgagaagaaatttaggaactgaggatacagattgtgagatcatttacctcgaagtttgtaatgaagctgtaaaagtgaatgagtttatggagatcacgtaagaaagaaaagggtgaggacagagccctacacttaatcgtggaaggaagaagagagccctgaaaagaaaatagaaaatcagtcaatgaactggaataaaattacttgtattttcttatttacttataatagaaactgtaagaagtgaatttccataaaggttgtgttaacaactacaaaacattcaaggtagataaagactgagaaaatgtaatcgatgattgggaagttgctagttaacctagttactagaatagttgctgccgaaaccagcttgcaagaattaagaaatgaatctagggcaaggaagtggaggggatgagaaaaacaactctttcaagagttctgatggtggtaggaaaaagagcattagttcagcgtctcaaatgagtggtggagccaggagttcccatgtggggcccttgctgagccatgacataagtactatgaatatgaatgtggtagattgcaaaatgagtgcaaaatccttccgtgtgtttatgttcctttgcactgtgactttgtagcccctcccatcaagatatggagtctatttctcccttgaacttagatttggtcacatgactttgctttggctgctgggacattaacaaacgtgacgtagtagaggcttaaaaagtgcttgcataat

SEQ ID NO: 113008 - DNA, 2103 bp, Homo sapiens
acaccactgtactccagcctgggtgacagagtgagactctgtctctaaaagagaaagaaaaagagaaagactaatagtttttgtttgtttgtttgtttgtttgttttaactggagttggagggcttctgccaaaattttctgtttctaactttttttggttttttgtttgtttttataaaatatattttatttttaaaatagacaaagtcttgttctgttgcccatgctggcttgaaattcctgggtgggcgtgatccccctaacttggcctcccagagtactgggattacaggtgtgagcaactgcacgtggcctgtttctgacatttttaaagttagtcttaatactgttttatgctggttttactttaaatatatatatatagaataaaagcaattacttaacaaatgtcagtgacatgcaaatatataattaataaaacttcttatatctcagtggttgatgtcaataaccaaataaccaagaatttgaataatctcttctaggtaactggaagtgaccttcacttacctgtaatttacacattctcaccagctcctctcctactcccttcatcatgaccaccaaggagagctagaggaccttagagaggaggctcagaatagtactgctttgattttggcaacatgcatattgtttcttcagctaactcagcatgcttgagatcattttaacagcatagtgttctcatgtggtttcagtagaaaaagtccctatgtaaaaatagcaccttcttcctcagcatgtctgctccctttaatgaaaataaggctttagcttagactgagccaatgcagctatcaaggcgtgagctaaaatctcatctgcttcaaatgctgttagccaaattcactaacaatggtgcttacagtcattgccaataagaaagacaatgtagtcagagtcatgaacaatacaggataattcatacccaatacacaatatttaaacagcagttttctagaatgaatccccagacaacatggtcaatgagaaaagtcacaattgctttacaagaatatttatggtggccgggcacggtggctcacgcttgtaatcccagcactttgggaggctgaggcgggtggatcacctgaggtcaggagttggtgaccagcctcgccaacatggtgaaacccggtctctactaaaaatacaaaaaattagccaggcgtggtgacagacacctgtaatcccagctactcgggaggctgaggctggagaatcacttgaacctaggaggcggagcttgcagtgagccgagattgcgctactgcactccagcgtgggcaacaagagcaaaactccgtctcaaaaaaaaagaaaagaaaagaaaagaaatatttatagtaatacaaacaaaccaaaaaggaggaaaaaaaaaagaatcaggagcattcacaaattcttatccaacccatttaagacaaaaagagtttaactaatataatttaagccatatggaaacctagtagtaggttgcttcttcttagagtggtgtttcattcattcttactagcctgcattctatcacaccatgttccattttgggattgggaaacttctatgtccattattgatatgaaaataaaacagagataggccaggcgcggtggctcacgcctgtaaccccagcactttgggaggcccaggcaggcatatcacaaggtcaggagatcgagaccatcctggctaacatggtgaaaccccgtctctactaaaaataaacaaaaaattagctgggcacgatagcgggcacctgtagtcccagctactcgggaggctgaggcaggagactggcatgaacccaggaggcggaggttgcagtgagacaagatcgcgccactgcactccagcctgggtgacagagcgagactctgtctcgaaaaaaaaaagaaaacagaaaaaaggaatagttttattttatatatatatacatactacacatatatatatatatatatatattttttttttttttttttgagacggagtctcgctctgtcactcagtctggagtgcaaccacacgatcttggctcactgcaacctctgcctccccggtgcaagcaataatcctgc

SEQ ID NO: 113009 - DNA, 1143 bp, Homo sapiens
ttttcctcaaatccagggcatactaactttggtaacatcctcctgtcttttgtcatattccagagccattcacttctgtgtggctgtaacctctggctttcccaatcaagcagctatggtgctctccttgcccaaatccatgaatctgcactcaagtctgggaagtaactttggccacaaaaggaattccatcttatagatagaagaggagaggtgatgtgagctcctatatattaacatctctatctgttcaagagcttctccaactacttttttctgttaagtaaacctgtctgtgagtaaaataaacaaggagttgattcaaattctgctgtgtgaggagagaatcttccagtttttgaggacaagagaaactaaattttatggtgatttacccgtagcaattgaagatcaccaagagagaagacttttatttttctgtttttggtgtgttttaacttgttttcatttatactgttttgaagatggattgggaggaggagagtgaagaatgaaaagctctatgttagaggaatctatatgtgcagtttccttattaactgtatgtgtcatcctcagagatgctgcatgacctggtgaaagaacacgggctttggagatagatactcatatatttgtacttatgcttgaatcccatctcggttactttctacctgagtataatttatagcatgacagttattatcaggagcacaaaggaagcactgttttctgtaaatgaagataagaactgttttgcaatattattgtgagaactaatgaaataattttgtaaaatgcttaagatagtacctgtcatatatttaatatttatttattatattaaatttattattaaataataataatatttaatcatggcagtctgcaatcatgacaaattctgataataatagcatttaggatgggcatggtggtttatgcctgtaatcccaacaccttgggaggccaaggagggaggactgcttgaggctaggagttcaagaccagcctgggcaacatagcagggccctgttcctacaaacaaacaaacaaacgaataatcaaaaaacgtagccggatgtgctggcgtgtgcctgtagtcctaggctgaggcaggaggatcatttgagtccaggagtt

SEQ ID NO: 113010 - DNA, 1608 bp, Homo sapiens
tcaaacataatttttaataacctcaagttaacttcaaaatcttggactaatattaaatcaagttaattaatggataacctttgcatgcctagataatttctataatagaatacaaaaacattaattactaagcatagtttaaaaagatatatacgtctttgtttcttattttactatattacagggagcatacctttggatcatattaatgaatgtgttcagttttgcttttactgtatttaaaactcaattaccaattactcatctcccacttttctctgtgaaacagaggctagttattgatttacagttatagttaatatgggtaattaagactataccaggagcattagtggcagtagggcaagcagtagtgtaaagaagtacaacaatgtttctaaagtgaagtaatttttttcatttctcaaggaaaaagtgagtagttttggtctaaaggcaaagtgtctgttctagaacatgaaataagatagggaaagacaaaacgtaaatggatagatgtagaaaattgtagaaggtttgcaaaaagtaaaccatatttgtcttgcttgtctgaaaagaagcaataaaatatgttaacatttggcaacatttcctcagctttgatgggcttattcaaaagataattttttaaaaaagaaacttggaatccattattgccaaatattgatttgatgcaaaaatagaatttggctttctctctattaaaatgataaactggtcttatagcgcttaacaaggggtaataaacagttattatcaccttttgaataatccatccgggtagaagagatttatactgcaccagaataattttctgtgctttgtgttgattttatcatgtccattattacgttttaaagaacaaagtcttctcacatctgaaagagctgagattcattaaaattgttttacctacttctatgcttatttaaaaatattatattgatgctttaatgaatagataactacactcttttttctcaggcactcgtgacactatcttaattgtggaccaaatgtcttgttaaatctgtggctttgggcttcttaagattacaccttaaattcagaaaaaatggaattctcaggatgtttttacacttgattaccttggcaactcccagagaacctctgggaaatcacaaagatgtgctctttcaacttaggaaaaagcgagtgatagaaataattaggtttgttgagtggcttgatatttttttaaagagctcaacacattgtaagagtagcttgggaaaagttgtctaatcagaagggatgccccgccttcccttggttaagttttataggtacaatgcaattaacataaatagctcagacagcctacactttacagaaaggtcctaatgattttgcaatgtctttatccataatatgtccttaccctcaagggaaacattgatcaaacccttacaagacactcatgcgtcagacaactttgttcccttccattctgatattgctcgttactgtaataaaggaaccacagccatgccgtcttccaggtcctttctgcttctctcacatgcttgcctgaaggctctgctataagttacaagccatagatca

SEQ ID NO: 113011 - DNA, 1376 bp, Homo sapiens
aatatattgattctgtaaatactgtttaggatgacagctgatgttgcctggatctgtatgccatccaaatttacattcttgacttagagatgtgatttgaaatatttaaaatatatgttaaggctgggcgcggtggctcatgcctgtaatcccagcactttgggaggccgaggcaggcaggtcacctgaggtcaggagtttgagaccatcctgaccaatatggagaaaccctgtctctactaaaaatacaaaattagctgggcgtggtggcacatgcctgtaatcccagctgctagggaggctgaggcaggagaattgcttgaacctgggaggcggagtttgccgtgagccgagagagcgccactgcactccagcctgggcaacaagagcgaaactctgtctcaaaacataaaaaaaaaataaataagtaagtaaataaaaaataataaaatatatgttaatcatgattataaaaaataaaaaggatgttaagaaatgttctatgatattttaagataaagcaaaagagagttgtatgctttcaatttcattgaaagcattgtgtagcaggcctgcttcgagatttttaaaaaaaatttgtagaagagtgtgctttgttttactttgttattaactattgattaaagtccagacattgtgaaggcacatgttaacttgcaggttttcacctgatagagaaatgcaaaacatttctctctggtggaagagataacctcaaagtatactttatgccctatagactattcagttttttctctaacttaaaaaaatctttttgcaatgtgccttttttgatggactatatgagtcccagctcctcaaacatttttaaaaaccagctttattgtctaattattttattaattaatgagttgaataaagttttgacttgtgttcattctgtattactatgaaagtcatgcttttaacttgaaaattgtatttgacaaagacgtgagtttaaaaagcgagatggtcatccaaatggctaataaaattaagaattcagaacattcattcagaacacatgttaattcagaatttggaacacacattgtacctttcactaatcagttgacatctgttgcatttgattaggttctgagcatttcacttttaacattatgttatccaaacagagacctacaagaagagggcaactaaatgggaggtcttaaaaacatgttagatggggctgggcacagtggctcacgcctgtaatcccagcactttgggaggccaaggtgggtggattgcctgagctcaggagttcgagaccagcctgggcaacatggtgaaaccccttctctactaaaatacaaaaaattagccaggcgtggtggcatgcccctgta

SEQ ID NO: 113012 - DNA, 1089 bp, Homo sapiens
tttatctaatgcttactatattttcatcttagattattttacaattgtctaaatggaaaaggtattgcctaataaagggtttacagtttagataataaaataaactacccattcctagtaaacagcactgcataattgggctttggaacatcggatgaccacatcttcagactcctgtgggctggtgttgaaattgggggactagctctttgttgctttgtgctacttacacatctgcctctcaaaaatactcaacaaagatagcttagtgtagatgaggaatatatgtttttacattttcccttaaaaacgctatttccatgcagcaagacaaattcgcatggttctctgttatgtgaggtgtgatgtgtggagacgtattaactagcaccatttaacaattgattttagtgatttttcagcacccctttttgataaatgctcacactgctgcctggtttgtctattccttaatgtagatctccagtgggtaaaagttacagggcagctgtatatatttctgccagtataagcaagacctcattaagaactagagcttccaataataaattgagctccttgcgaagcagagcgttcttcaacatggaatgttacttatggatttttttttttttttagacggagtcttgctctgtcgcccaggctgaagtacagtggcacaatctcggctcaccacaacctccacctcctgggttcaagcaattctcctgcctcagcctctcaagtagctgggattacaggcacccccaccaccgcgcccagctaatttttgtatttttagtagacggggtttcaccatcttggccaggctggtctctaactcctgacctcgtgatccacctgcctcagcctcccaaagtgttgggattacagatatgagtcacagcacctggcctacttatggatattacagaaaagaattctatactgtgaaggaagataaactggaataatatatagaaataattcatataaataaatgtaaagttcagttttctgagattttaacagtttatagaagactagccaaacaatggttttataattaacaagatgttaaaacaacct

SEQ ID NO: 113013 - DNA, 2509 bp, Homo sapiens
tgaaatggtggatgggagttgatgaatagcatctttctgcaaacaagcaaaccatgaatttcgtaagttttaggtcaagctgaaattatataaggccaatcatttttcagcatttcattaactgggtgggatctttggtaattttttgaatctgtgccagttactaagttttttctttttctttttgtttgtttgtttgtttttaggcagagtttcgctcttgttgcccaggctggagtgcaatggggcgatctcggctcacggcaacctctgcctcccgggttcaagcgattctcctgtctcaggctcccgagtagctggaattacaggcatgcgccaccacgtctggctaattttgtatttttagtagagacagggtttctccatgttggtcaggctggtctcgaactcttgacctcaggtgatccactcgtctcggcctcccaaagtgctgggattacaggcgtgagccactgcgcccggccctccagttactaagtttttactctcaactttaaatcccagtctttgatattctgctttgccagtggcttccctttaggctgtgtcaacagtgggtgcagagagactgctaggctgtgggaggaagaagggacttgatccttcctgtctgttttctcgttgcttcttgtttggcttcctgtcttcttgtgcatccggtgagctttgctccagcaacacctcttcctccctgaagcagcagttccttcccatagcagcagctgaatccaccttgtaattttccaacacctgcagaaccagcttcacccctgcctcaccacccactagcacccagctggtgggggcttcttccttacatgcctgagtttcagctttctctaagttttgacgttttaataattccaatatcttgcctggctctttccagccctagaagtgtatggtagccaagtgaatgtccctcatagaacttcaactataaggagtataattagggttgctggatttagcagataaaaataatgaattaaattacagttaaatttgaacaacaaataattttttattgtatgtatatactatgcaatatttgggacaaacttatactacaaatttcttcgttgtttatctgaaacttaaatttaactgagtgtcctacattctatctggtaatcctaattaccagatagtgtaatagtgtcctacattctatctggttacctaattacacttaggtaaccctaagtgtaattgaccaagggccccaactactgctctttgaaacccctccactgcagacctcgctctgaggccacacttcccagggcctgctcccactaactgagaacaccggggtactgaggcagattcctgggagacctggcactcctctgaccaacaactttggcccaatgaatttcctatggctttactgaaactttcttagattttatagcccctttttccttccctaggttatacttgcatctcagtctgtggcagctctcccagcctccctccgtttccttccacacaggtatttcccctaatggaatcctcataggtttaatctgtcttcatgtctacacagggtaagctatgcagggttgctacaaggtgctagcaacttcctatagtcactactctgtgatgctttcatattcctctttaccctctcaattacctagtaaacaacttaataccttgctaacaattctttatattaaatccactgtcttcaaataactgttgtggtttctgtctcttgaccggactctgactgggtacccctgaggctggcaaaaactttaaattgttccaggaaatgtaagacactaagccattccattaaagggatgtgggatgttattttcccttaaattcccttgttattttaccacagagttggcaaaacaggttgagcaagatgactgcctgttataaatgtggcatcagacatttgttatgttgtgttcgatactgagagtcacacttggacacattggcaaaccagaacgcctccgcaggaaggtaatcatgaaaatgacaaatctcgaagcgattcccaacaaggggtgtgcttatttaatctggagaagagaagaaaggctccgggaggatggggtggctgttttcaagtatttgaaggtcagtcatatggaaactggattaaacttattttgcatggctccagatgttagaactgaaaccaatcagcagagccagagtaaggcatgtgggctcataatttggcagccatgcaagcctgtatctcttcaatatttgttaaacatgtctctagcgagagtcagaagaattttttttctgctaataaaatgtatgcagctttttatgctcaaaataaagaatctattacatgtgaaaacataacattaaaattttaactttttttttttttgagacggagtctcgctctgtcacccaggctggagtgcagtggcgcaatcttggctcactgcaacctctgtctcccaggttcaagcaattctcctgcctcagcttccca

SEQ ID NO: 113014 - DNA, 1717 bp, Homo sapiens
aacagtattaagaggtggggcttttaggagatgattaggccatgagggcttcactttcatggataggattaaggcctttatagaacttgaaggaatgggttggtccctttttgcctttccatttcttctgcaacatgaggacacagcattcatcccctccaaagtgcccagcaacaaggcaccatcttagaagaagagattgggccctcatcagacatccaacctgctagtgccttgaccttagatttccagcctccagaactgtgagaaataaatttctattctttataaattacccaatctcaggtattttattatagcagctggaagagactaagacacacacctccttcaaaagctgtagcctaattcctctccctttgaatgaatgtgggctggacttagtgaactgcttctaatgaatagaacatggtagaagtgatgtcatgttatagccaatgctaggttataaaaaggattatttctgcctggctctcactctagtagatcacttgctccggggaaagtcagttgctaggtcatgagagcactcaagtagccctgagagagtctatgtggagaaaatctgagccctgcccccaaatccaagtcacgtgtgtgagccatcttgaaaggggatcaaaccttcagatgactgcagcctcagccaatagcttgattctagtcccatgagagaccccaggcacccacttaagctgctccagaactcctgactcataaaactgtcagagataataaatgtttattgttgttttaagccactaagttttggggaaatttgttatgcaataatagataatgaatacaggcagcaattagcagaggatactgttctattcttgaaaccctctaaatgaaaataacaattaatgtacaatcagataattatttttccccagctatttacattttattctcattcatttgaatcacagaaattccaccaaaaatgctcagaatctctacttttccttgcatctgtacacatttgaaaggttgatatgtattatttgcatgtgaatgcacggatgtgtatgaaataggaacaccaacaaataataataataataaaaagaaaggaagaaaactgaaagtgaggtacaagaggtacaagccccctattctctttaaatattttataccttttatcttttctgaaatacttttttgtcttggagaaaaagcttccaagcatgccgattgctgtggctcaaggtcctagcttactgtaggacctcttgctccttaaatgaatttctggtaagtcctcatcttttgccctctgacaaaagtatcttctatggcacagatctgagtgtatcaccttttcacttaaaaattttcaaaagttacttattgtatactagattgaggtctgtcattcccctgtaacacccaccccaatgcctgccccacatacatagttgtgtacagagctcaaaacaggacatgtctgggagaatgctttataagctgtaaggcatagacaagtatgaggtattcttctccttaacattctgtaatacctcataaagtctcccattttctaggagattagaatctgctggcagcctgggtttagtagtatctttctttttggtgataaggtttactggagtcttttgaattaactgctctttcctacatagcacaaaaccactatattttcctatccctttgccaatcttttttgttt

SEQ ID NO: 113015 - DNA, 1298 bp, Homo sapiens
agtgatctgagctcgcgtgctcctgccctcttgccatgtgatgctctccaccataccatgatacagcaagaaggccctcaccagatgccagcaccatgttctgggaattcgcagcctccaaaaccatatgctaaataaacttcttccttttatatataaagggaatttatatataaattaccaatttgtggtattctgtcatatcaaaagaaaatggactaagacactctgctcctaagaggataccagtttgagggtccttgttaatagtgctgctgtttgcaaattgttattttgttttttagcagacttgtttacttcctgagatttgttctctgaagctgactcctgacttcagctcagatacagagaaattctgataagccaagaatcaaagcaacagacagaagaaaatggttgcctatcttttagatctaaaagacagacaagttgcagatcatttaaaagggaaaggagaagcagcagcaaaacaaactgccacactgattatgatggaaagttaccaaagtaattagggtactgatcttttgttctcccaggcagcattctcaaaagtcttgaggacttttttgttcttcacttggctaaatgtagaaaagtttcttgtttgactgtaataatgtttcagttttctaggtaggaggtgtttttcctgatttctaataagtatcaaattgttgtaattacattatttgcagtttatgctcctcagaacttgttagggcttcttccttcctctgacactgaaacttaactttcaaaaattgttctttcttttgatatccaaggaaaataatttgaatgatgatgctacagtggtttggacttttaggttcctttttctctttggattacaaggttgacacttaaaaaaaaatctatgggccaggcatggtggctcactcctgtaattccagcactttgggaggccgaggtgggcagatcacctgaggtcaggagttcgagaccagcctggccaacatggagaaacccgtctctactaaaaatacaaaaattagccaggcgtggtggcatgtgcctgtaatcccagctactcgggaggttaagacagtagaatcgcttgaacccaggcggcggaggttgtggtgagctgagatcgcaccattgcactccagcgtgggtgacagagtgagactccatctcaaaaaacaaacaaacaaaaaacacaactatgactattgtgggccttcacaactctgagacatctcagagtaagttgacaagcttttgttggccaaagaatgggagttccctag

SEQ ID NO: 113016 - DNA, 1035 bp, Homo sapiens
tttggctcagggacaccaacttcaaaatttcccttgaagtatttaatagaattatggtagttggggggcagggggagtgacttaaaatggagagaaaaggccgggcatggtggctcatgcctataatcccagcactttgggaggtggaggtgggtggatcacttgggcccaggagctcaagacgagcccaggcaacatagcgaaaccctgtctctaccaaaaattgcaaaaaattagctcggcatggtggttcatgcctgtagtctcagctactctggaggctgaagtgggaggatcgcttgagcttaggaggttgaggctgcagtgagctgtgatgttgcctctgcactgcagactgggtgacagaatgagaccctgtctcaaaaaaaagtgtgtgtgtgtatgtgtgtgtgtgtgtgtattggaggtggtgaatgaatgtctcataagtgagaagacagatccctgagggtctggggacaaatgaaagcacactggtttagatcaagatgaagtctgaatttcttcatagtgaaaattgcaaaaaatttatgattaggtccttgaagttactgtttgtctcagctaaacagagccctttttgaggtattaactggtattagagagaataacatcactaaccccaacagatggtgtaaacttataaatcagtcttatctggagagacagaagatcagtatgacttggatcaatgctacctttattcttctagaacaaatgaatgtgtagaggccaagtgggataggatgcctctgggatccctcagtacttgtaagttcttacactcttaatattcagttttcccagtccttgactttgtcctttatgattgtaccaagcaccatagtgcctttgtcaccaagttccatgatttaaaagtagatattctgggttttttgccaatactaggcaatcttggttgcatttctctaagtacattttatttttccttttcaggtccaaaagatactaaattttcccccataattacactagacaatttatctccttgtt

SEQ ID NO: 113017 - DNA, 4181 bp, Homo sapiens
ctagtgatatttctccacaattgactactcttcatcaaacctaagcataaaaatacacaagtttctttgttacgtcttcatttccttatgaatgaagccccccccgtcaggtataagatattaaatacatttgtgtgtttttctgttgttaatgtcttttgttataggggcctcaaccaggaacatagtgatggatgaggaagagatatctcttttaccctataacattgtaggatatgcatatatcagaagcagtaatgtcttcaaataaagaagacaaatgagcaaattcattaattagagtttcattaatagttacatcttaggatagctatttgtttacttaaataatatcctggatcttgattaacatgtgagtatataaagatattatttgagcttttgtttctgctttaaaaatcttttatacattctttgaaaatgataccactcactaatgcttattaatgatagaattaaaagataaaaacaattcaaaaatggctaggagttaaagtctgtgacaatgtggtaaggtaaaaataagatcagactttgaaattaggtagacctaggttatattttgactctaccacttttttccaaagtctttaataatatatttaaattctgagctttggcttcaccacctttaaaatggggagattaataccacctcacacaattgtcaaaattagcacaatgtatttgaaaacatcttggtctctgctgaatacaccagaactcaagaaatgatatgataatgttcccagcttacctgcttaggaaacaagcctgtgctcaatttctgcatgcaaaatactcaaatttaaaatagtaaccacctttggattttctgaaataaacctaaaataaaaggcatccatgagggaaaaattaagactcaatttaccatgggatgcatacttacaaagaaggttataagtctttatttttacttatgtatttatttatttttacattttttgtagagctggggtcttcctttgttacccaggctggtcttgaactcctgggctcaagtgatcctcccacctcagcctcccaaattgctgggattacaggcatagccactgtgcccagccttagtctttagaagtcaacaaaagccaaatactgaactcaaatgtttcctctgaggcttgaaaagttttagaaaatatacaagtcatggtatcatgatatcatgataactatcatgattgctatgtagacatcaattttctaggtttataaaaatgggctaggttcagcagggctcagactgagctggtaagattggcttctgactcaccaagctcttctctctaaaatgactgctatttcatgaatttaaacaagtgccacaagtgctcatttccatgtgtgacatttttgataaacttccaggttttaaactggttgagagagccagattacaagccaaatttgcttagtgtgaacagtgaactaactccaacatagcccctctcagactttcagtgaaattcctcgaatattagccaattactttagtgtgaacacaactagctaatcacttttcaacatatataaaaagtataatgggtagaaaagggagttatttgtaacagaaagatctttggaggaacccaggagtgaatggagccttttagaagctccaagtaacaaaacaattatggtgtaccacctcatatgtaattcaaaataaagactattccaaatcatataaaaagaataaggaactctaacaaaattctgatttttcacatgatgatgactatagaggtctttttaaagaaatggcaaatgttaaatttaagacattttttccctctgtttcccttgctttactgaatgatgcaccaagttgtcaactgccaactccccaagaagccaccagaataatctgttgatcaagtgcggctgagtttgttgaacctcctgcaatgagggagagcatcaccttgacagagttctaggattatcccagaaagggaagacagaagcagaaatacatagggtgtagggtgatctttttttttttttcttttttttgagacagagtctggctctgtcacccaggatggagtgcagtggtgcaatctaggctcattgcaacctccacctcccctcaagccattctcctgcctcagcctcccaagtagctgggattacaggcgtgcaccaccatgccgggctaatttttgtatttttcatagagacagggtttcaccatgttgaccaggctggtctcaaactcctgacctcaggtgatccaccctcctcagcctcccaaagtgctgggattacatatgtgagccaccgcacccagcaggtgtagatctgatggacacagcaatgagagggtcctaaagcaagtcttgataagtgcatagttgtttgataagagaactatttgcccaggtaagtgaatttattgccctgagaagagggccatttgcccacatgagcaactttcaaataaattgattttcaggaatttcctgacacaaacagtgaaattatttattgctctacaagtttatcttcctgggcaagaatttactagagcaaacagtaagtcatgttgctacaggtggtctcatttctctgacctgatagctaagctaatggaaccaattctcattgtctaacatggacttgaacactagcaaaagctcaacattaaataagatattgaattaggaaaaaaagagggggaagtatggggccagtcaacaaaggaatgtgaaaaataatttcaaggaggcttggatagttgcctgccttctccagaacagtgggattaaaggacttcaaagttcaacttctgccccaaactgtccagatacacctaaactcatagaagcagagttctcttccagggagagaaggttcaactgcaacttatgtagacctgatgaacctatttgactggtctaagatgcttagatctaatggtgtgttcctcgagggctgaatctgctcgttcaattttgtatccctagcctaggacacagagacattaagtcctcaattcatgcaactggaaatgaatgagactatactaaaggtaatagattggctctgaatggggaggtaggtagatcatatataggtatagatttgcctggttgataaaaagcccgtgtttaagaagctaagcattaaccacatggggaattttggactaagaaaagaccatgaagatgcttaaaggacacagaaacagatgagataaaggaaagagcagagaagaagaggaggcacctgataatttaaaaatcttgtatttacatagcactttttaatgtatttttatttatgttattttattgatctgtacaacattcttgtaagcaaagtagaacaaggatcattatcaccattttatggacaagaaagttgcggctcagagatggttaagtgtcttgcccaaggtcacaacactaaaattgcagatgggctcttgggcctagatcttctaaagcattttgcaactgttaagatttggaagcagaactaaaactgtgaaaagagtgagagaagtgtttctctttacccctccaaccataaggaccaaggtttgccgagttgtaagttctgtaaatagacaagagtgtgctgtgaactgtaattgaatgggaactgccaatggagttgtcagaccctgtacactgtgcctgggtgccctgaacatagcctctgaaccaccagaagtctacactgccatcatttaagcacagatgactgtttttatgccaaagtcctgcgtggccacgtgtttccacaggcagcaaaattttagtatccctgtctggctgggcttaagtttttggcaagaattccctcttcccttgtgaacatcttggaaagcttttaactgagcacaaagatgtttattttgagaagcaaaagggactaactaaatacgtccaaaaccaatctctacctctcccaccagatgatccttacttttatcatgtaagatattttgctacctccaccatctaataggcagagtacacaggtgatactatcgggactgctctgaagaaaatggtgacttctagccctggagaggtattaagagtctagggtgaaaaagcattgagggaagtagaaacggacagcagtggtggttgtaggaggggaagagtggtactgttatgaaactg

SEQ ID NO: 113018 - DNA, 1944 bp, Homo sapiens
agttaaatatggcagaacaaaagatggaagtaggttgggtccctgacaaactatccacttccaaacttcctttctcttttttaaatatttattttatttttaattgagaaacaataattgcatatacttgtgggctcatgtggaataatcaaatcaggttaattatcatatctatcatgtcagatgtttatcagttctttgtggtgaagacaaaatcctcccttttagatattgtaaaacgtatagtacattattaactatgtaggttgtgcattgcacaagggcattttccctgagaaaggggcacttgtcttctaatatgcacaaaggagctgtctgatgaccaagcaattgcctacagttctacgtctgcccaggcactgtgtagaatagctgtatacttgtttgtgacagtaagactttaacctctactgatcttagttttctcactggtaagttcccaggacctgtgttttcttacctaagctaagaacactggaatagataggtttaggttctccacaaggtctaagaaattctgtcctattttctctttacagagactctgtgaccactcaatctaaaacagtcacccctccagagccattctttattataccattttattatcttcgtatatctggccattatctggatatgttctgttcatttattgtttacttgtttattgtttgtctccctccatcccacaccattctagaatatgagatacatgagagtagcaatcttatttgtcttgaacattgctctcttccccatcacccagaggtcctggtacatagtttccagtaagtattcattgacaaatgaatggatagttttgatagcgatatgaaatattttttaaaatttcacaaatacaaagtactattattagcagtaatttagggtaatttgtaaatgttatgttactctcatcaagacctttgctttcctttatgccacctatcacatttaccatggagacttttaaagtttacaaggtaagaagatgataaaagagaaagaccgaagtgcctgtgtataaatgaagaacctggtggaggtgtcttagctgttatgctatgcctgagttaaaacagcagttatgttattttgcccattcagaaacatcgttttaatacacatctggaaggccatcagttcaggctttttgccacagtagaagaaacctgtcacagaataaccaagagatcactgctttgctctgaatatagaatggaaacacacaggtgatgagtgaaccattctttgtttcgtgtggggaatcctccaggcacattcctcatttcgagaaaggtcagatttttcccactccctgtaacctttctcaagtagtcaggccaatcagaaactcctcttccatcccagctgctgcgtctgtttcactggcctcacagtccaggatccatgctggcttgctacttgtggagcagtcagggtacgaatttgtttttttcctgaatgctaggccctagtggctagggtcatccctttttaaatgacagctttcttttgatttcatataggtaccctgttcaggcttaagaagaacaaaaaataaagaggaagagttagaaaggaaaaaggaaaaccaatgaggggaacgtttggtcatgactgctgctgctgtgaaatattaaaatgccaatgacattatcctgctcataaacagaatagagatgcacaagcagcatttgcagcgtgtgataaatgtccttaaaagtaagaaggtgtaaaaatgaaatgagatagaagacagagcaaaaaggaaaagcataagatgcaaataaacagcagaaaagaagcccttccgatcactcacataacttgttaaataacattttaaaaacagaaatggtcgaatacaacttcatgtcttcagtgtcttgaacctttagttagaaaaagtgcaggccgagc

SEQ ID NO: 113019 - DNA, 1940 bp, Homo sapiens
gggtgacagtttttttatgttactgttgtttggggtcgtggaattttttcttctctgttttcaagcctttaagcaaaaagaaatggccttgaacctaagcactggagctttatacctccttacatacgtgtagctactttctgggtcattgcacttgtaggttccttttttttttcttcccaaagtcattttgatagctcatcatttaaaaacgactgttctcaaaggcttcttccagttgtcttttagatgactgattacaatcagaagaagaaaaaagtaaaataaactttaaaggggaaaaatccaaaccatttacatcagtgccataaaactattttagaaaactagctttctatattttaatgctttccatgtctgaggcatttctccagactttggtgctataattgtaacaccatcttgacacttctacttttaagccacaaagttttgtcttttcctttttcaaagaaaaaaaaaaatgttggagccaagtgaccactatgcatactcatgactcaggtaatggaggcgcagagaaaggtacacactgaacaagcagatctatatcctgtgtttgttgatggcacgtggactggggaaggtggccagggcactgaagaaagcagaatgactgaagtttggacctgttctgacagggcactggggacactgcctgtagggaagccagcagggaagtttcctttgtggaatttagaaaaatgggcccctgcaggcataggaattgaccctttagacctgttagaaaaaaagctcttttttccccccaagttgttgcaaaaggatttcagcctagatgtcagcccttgctctatccctgaatctggtgctctgtgcaggacacaacccgtaagatcacaggctgcaaccatgccttcatggcagccttgtaatttaccagtcctttggctgtcccaccccaaaaggggcatttgtctagttcatgtttgaaccatccagaaatgaccttccctactcagcctcattgtgacaggaattttgaggcataagcagcttgctttttttttcttttgagatggagtttcgctcttgttgcccaggctggaatgcaatggtgtgatcttggctccctgcaaccttcgtctcccgggttcaagtgattctcctgcctcagcctcctaggtagctgggattacaggcatgcaccatgacacctggctaatttttttttttttttttggatttttagtagagacggggtttcaccagttggccaggcttgtctcgaactcctgacctcaagtgatccatccgcctaggcttcccaaagtgctgggattataggcgtgagccaccgtgcctggagcataagctgctttctgtgcacatagtttgggactgttgaagaaggagatagggagagatgaagataaacaggctcatcttaagacctttaaaaaaaaaaaggagtcaaaaaaaaaaagctgcagtaggcagagctgggaaaactatttataacagatagaaaaaaggaaaatcatatttactaaatgcttctcacgtgctagatatagttaaatgctttatttatttatttatttatttatttatttatttatttatttatttttgagacagagtttcagtcttgttgcccaagctggagtgcaatggcatgatctcggctcactgcaacctctgcctcccgagttcaagcgattttcctgcctcagtctcccaagtagctaggattacaggcacgcaccaccagtcttggataattttttgtatttttagtagaaacagggtttcaccatgttggccagactggtctcaaactcctgacctcaggtgattccacccacctcggccttccaaagtgctgggattacaggtgtgagccatcgcgcctggccaggtgctttatttcttataaatattacctcttaatcgtc

SEQ ID NO: 113020 - DNA, 1550 bp, Homo sapiens
gctgtatcttcaagcatccactttcctctggatagagtccaagcacaagaaaattgaggcaagtcacagaaaggccaaaaattcgttcttgaaacactcccaacaattaacatacattgaaatatattgcttaaaagagctggcatttatttttcaatgtgctttttaacagaaatgtaagataaatgctgaatatgcatgtgtgtagatcaataaatttttacaaagtgatcataactgtgtatccaccacccaggtcagaaaacaaaactgcccagcagtgccctctgtacactgaccagttactaccccctcatctccactctaagccttatcgtgtgctctatcaaattcattttgccacttttaaaccttatataaatggaataatgcaatatgatatttttatatctaccttctttgtaaaattttatatctactaacattgtaaaattcatttatgtggctgcaattgcttttattttcattgctaaatagtatttcattgtatgactctcccattatccagtctcctgttgatggacatttcggttgtttcctgtttggggaattataaatagggctgttacaaaattctttttttttttttaactttaatttaattttaatttcttttttagagacaggatctcactctgttgcccaggactgagtgcagcggtgtcatcatagctcactgcagccttaaactcccaggctcaggcattctcccacactacctcccaagtagcatgggattacaggcacaggccacagctcccagcttttcttatgaaattcttgtgctaccttttgttgcacatatgaatgcatttgagtatatgtagatggcacttgttttaataaaacctgagatttatggtgcagggaccatattttctttatctgtgtggtcccaggacctatcagtgcctggtacttagtagatatccaataaatctttgctaaatgaatgaatgaatggatgatttctgaggacaattgtttttcctacagaacttaatgctgcaccattcacattagtatattttggggtgtcattgaaatctttctgtttgtacacatgtcaattttcctttccagaaggttttatcatagaggttttctgtattatgtatctgcaaattgtaactgaaaagattgatgctctgcaggcccctcaaacaacagcatgcatattaagactgccctctgcctactgctgtttacagcttgcctttttgctttttgaactgcctgacacttttgcttaaagagtcatttatcactgatggtgcattccacagttatctgctattctttttccagtataccataactaggctttcttgagttatctctggttataatattagctgtcacaagttggttacataaacttaaaaaagtgaactttaaactaaagtttttgacttttatctttttgcactgtaggcgtgggacaaaaaagagcactttttgaggctatatttacatgaaatgggaactgctatggcatatgctgcaggtgctgatatatagtcaaaaaa

SEQ ID NO: 113021 - DNA, 1077 bp, Homo sapiens
aacctccacctcccaggttcaagagattctcctgcctcagtctcctgaatagctacaactgcacatgtcaccatgcccatctattttgttttttttttttttttgtatttttagtaaagatggggtttcaccatgttggccagactggtctcaaactcctgacctcaggtgatacgccctcgttggcctcccaaagtgctgggattacaggcatgagccaccccaccggccaaattactctttctctattgcaattcccctgtcttgataaatcagctctgtctaggcagaggacaaggtgaacccatcgggcggttacaaaaggccactaacagaataaagtaccatattaaataataactaaaaacaacaacaacaaaaatatacagcagggaattatgccaagtccaaaagcattttaaatgacagcaaattgaggcctaaaatggccacgatggttaaaaaaaaaaaaatgaatgaatcaaatctaatctaatcaatgtctagatttaaccaccgcttatggaggatagaggaacaagtgaaataaccacaaggagacagtctgccctatgcaaaataaaacatcttacaggaaaaaatgagccagtttctttttccctccctccctccctccctccctccctccctccctccctccctcccttccttcttcccttcctccctctctttctctctctctctctctctctttctccctttctttctccctttctctctttctttcttcttttcttttcctttcttttttgaggcagggtctcactctgtcactcaggctggagtgcagtggtgccatcttagctggctacaactcctgcctcctgggcttaagcaattctcctgcctcagcctcctgagtagctgggactacagtcacgcaccaccacacccagctacttttgcattcttagtagagacagagtttggctatgttggccaggctggtctcgaactcctgacctctagtgattcttccgcctcagcctcccaaagtgctgggattacaggtgtgagccaccgtgcccagcagagccagtttctataacaaatttc

SEQ ID NO: 113022 - DNA, 1011 bp, Homo sapiens
gatcaaggactcaaaagaatgcaaccttttgtcttttacctacttatgatctggaagcaccaccccactaagttgtcccgccttactggatggaaccaatgtacatcttacgtatattgattgatgtctcatgtctctttaaaatgtataacagcaagctgtacctcaaccacctcagatgtgtgtcctcatgaccttgtgaggctgtgtcacagatgtgtccttaaccttgacaaaataactttctatactgattgagtcctgtttcagatactttctggtttacattatctaacgttaacaattttcaataatcatcatcaatgatcagtaattgatataagaaataggaaaatggagctcttctccttccggaagcattctgtgatggaaagggccccggataagacttggaaagatttagattctatttgccagtcttgggaaaaaagaattttaatactagtgaggcttacaataattaagatagtcacaatgaatatatgacaagctgatctgaaaaaattagacactaggaaatggaaagaattatcattgatgatcgtcaatccctaggaatttgttttctctgacccagcattcaattttgttcaaaatactgtaaaagtaattgctgatggtaaagaaaattttcaactgcaacagtaatattaacattgtccttacggtgggttttatgagtccttgactgggaagagtggaatggtactttttccaagactgctgcagggttctaatttcaaaagattatggtggatgtgagaaatacaaaaagggagctcttcttctccttccagaagcattctgtgatagatagggcacagcataagacttggaaagatttaggttctcttcccagctctgctgataagaggctgagtgtccattcacggaataagagtgaaaccgcctttccaaaactataactaaggaaattatgacactgaaagatacctgagctaaccaactccatcttgcttctaacctcta

SEQ ID NO: 113023 - DNA, 1051 bp, Homo sapiens
gggataggtgtcttgcagcagggtacatgtcttctaaccggctctcttcctgcttctgctatcttgctggcgcaggctgctggcacaaatagccttgcgccttggaactgggcctaagaagggaggagttactcatgccttcaagctttcaggccctggggagaatctttcaaacaatttccatctttcaacagatccaagtgtttgctgcactggtcagaatcactaatcctagacaatgcttatttactatggtctctactcaggaaagacagactttttactagcacaagttcgtgatcagatgccattaatactgtatgggagaagacagagaggagagatgagctgttttagcactttgtaatttttcatctaatatgcaagtagccattttcctttaacttgctcactttttcttcacttcaaaactcaaacacagtaagaagcttacatctaagttatcaatgttttatttactccttttaaaatgagactgacttctagctcaacattcactatagcataatagtattgaaataaaacaagtaaaaaatgccaatatactagttataatggaatttaatgtatgcaatttaatattaaaaatacagatgctgaacctgatttaaaaggcctgaggagattcaagagaagctgagatttgccccaaacccacccaggataaagctacatgattttgaagagatcacttttgaagagaataaaataccatataaaataagagttaaaaacaaaaacaaaaaaagaagtagaagaaaatcccaaaatccaagaaaagtctttggataagaaacatttgataacccatacttagttttttacttcttgaattactcttcactgaaattcagctacgcttaaggggatggcattggagaatttctttccatatctatcttaaggatctttaatttcagttgagaagctctgatgcttctctaaggcttatttatctttaaaggtccataattgcatgcataatgccacatttcttttcatttgaaaaaatgtgcctgatgagttctac

SEQ ID NO: 113024 - DNA, 1284 bp, Homo sapiens
ctcagcctcccaagtaactgggacaaaaggcccacaccaccagacccagctagtttttgtattttttgtagagacaggattttgcaatgttgcccaggctggtcttgaactcctgggctcaatcgatctgcccgccttggccgcccaaagtgctgggatttcaggtgtaaggcaccactcctggccttcattctattatttttattcaccagggcttgagtttatgaggattcctgataagaattcccagactttccattcgataccattcttagagatcccaatgattttactaaggcaaatatttcaatatatagatttatatacatatatatgtgtgtatacacatacacatgctagttttctatagcagagcattcaactgctttaagattgcagttacttacacttcaggaaaactgatttgtgcaatcttcaatttttcgttttgcgcaggaaaaatcaacctgagttttctgctactgtgtattgaaaatcataacatgtatgaagataaaatagatataaaatttaaatctaagccaatggaatacaaattttttatttgttcaattttttctgaaacatgccatgcagtagttaaattagaagcattggatgaaactgaaaacagagggaagcataaatattaactgtcatgataatttctgatcagtagttgtaagaatttgttaaaatgcttctaaatcttaatatgttttaataccataaaatatatttttgaggtaagccagtgtcataaactcttgtctaaatacaaaacaaattcctgaacatccaattctagcaaacttctgttcatttaagtaaaaatgctgggaaagtttagttctttcaccaagcaaatacaggaagaatttaggccaggcgctgtggctcacccctgtaatcccagcgttttgggaggctgaggtaggaggatcatttgagtccaggtattcgagaccagcctgtgcaagtcagtgagacttcatgtctacaataaataagtaaaattagcctggcctggtggtatgcacctgtagtgccagctacttgagagactgagatgggaggactgcttcagaccagccggttgaagttgcaataagctatggtcttgccactgcactccaggctgggtgacagagttgagaccctgtctcaaaaaaaaaaagttctatttgtaaggttcttatatcggttcgaaccccgaaagtgcaccgacagacaacaccaggcagagtgaagcaacatgctgttttaatgagcgcctgggtgcag

SEQ ID NO: 113025 - DNA, 2002 bp, Homo sapiens
agcctcaattttctgggatcaagtaatcctcccacttcaccctcctgagtagctgggactacaggtgtgtgccaccacactcagttaattttttcctatttttgaagagacagggtttcaacatattgcccaggctggcctcaagtgattctcccacctaggcctcccaaagtgctgggattacaggcataagccactgtgtccaggctggttggattatttttttacgatcagtttcaggctaggcatttttggtgggaacaccatattaggtgataatgtatccttctcggtgcttcacatcaggaggcacataattaccggtatgtccttatttttttcttttctttttttgaattattttttgccgatgacacagcttcaggaggtcctgacgacatgtgcccttggaatgtcctttcttggttgaagtagtgtctgccaggtttctccactataaagttaccactttcatctttgttattctagtttgtgggaagtactttaagactagataaatatgctgtgaaacttgaactcaagcatcttagcatccattgatgactgctgcttgaattaattatttgtatgatgattgcaaaatggtaattttctattatttcttttattaaatattattctaaagtgtaatgtttttatagaaaataaatacattcttttgcatgacacatatatcagaaataagtttgttttatgtctttttaaaaaatttttgagacagggtcttgctttgtcacccaggctggaacagtggcaagaacatggctcactgcagcctcaaattaccaggcttaagcaatcctgctgcctcagctccccaagtagctgggaccacagacatccacaaccatgcctggctagtttttgtatttttagtagagatggggtttcaccatgttgcccaggctggtctcaactcctgagctcaagtgatccacctgcctcagcctcccaaagtgttgggattacaggtgtgagccaccgtgtcctgcctgttttatgactactaatgtggaaaaagcatgttacattttggcccacacaagacataaaaaatgaaattaaagagatacaatacaatgaacaagcatttcactttctttccagaacatagaaatgtcttttggacagaaacagtcatgtaagactatactagtgttcaatataagaggcctatctccaagataaggatttagagaatgaaggaaacattttaaagaagaatggttatgaataaccaagttgagaataaacattgattgctaacaactacagattagtgaggaaggtatcagactgattttcaagctcagtttaaacattagtttggagggttgtaatcctacatgtattgaactgttttaataaagtatattttattttacttttttcttaaaaaatttgagtgtgctactgtttttctctgtttctcatactttaagcctggctagaccgtggcccaaagaactaatgggatcattactcacctaacagcaggatatagtaattgcacataataaattcaaaagaaacatcttcagatgctgaacttgcaaaaataaacatatcaagtgagaaaaaccttacctcagtggttctaaatcctgaaagcacagaaattcctggcaatgttttaaaatgctcaggcccaggccctcatcccacctcgatccggttataccttactctcaagagagtttcgccctagcatggaaactttgcaaaagcttcataggttattgtgatgtgcagccagtgctgaggactgctgccctaaatccatcacctattgaggaagcaattaggcctcaggctagttaaagctccataccagcttcattagttttttcatctcaggtctcaggccaacatctctttcttccttccaaaaccccttaggatttgtctagagggcctcttttctacagctgttaccacctgctctaccacttatagttcctcctttagggtaggacataaa

SEQ ID NO: 113026 - DNA, 1054 bp, Homo sapiens
caactatcaaaaagcctgaatttattaaacctataaattaggaaatggttattgaactatgaaaggattttgtcaattttaaaatgatttaatttaagtaggattctttcctagagctttactgtctgtctcttcacaaatcattgttgaagtggtcaggcatggtgactcacacctgtaatcccagcactttgggaggccgaggtgggcggatcacctgaggttgggagttcgtgaccagcctgaccaacacagagaaaccccatttctactaaaaatacaaaataagctgggcctggtggcgcatacctgtaatcccagctacttgagaggctgaggcagcagaatctcttgaatctgggaggcagaggttatggtgagctgagatcgtgccattgcactccagcctgggcaacaagagttaaactccgtctcaagaaaaaaatttttttgttgaagtgttcaagagtgggtaaaaggagaagtggaataaaaaaagaaaacatactagggacattcgcaaacaatgtttgtctcttaacaatgctattgagtactctgagtttgttggatttcgttttttttgtttgcttgtttttcagacagagtgttactctgtcacataggttggagtgcagtggggtggtcatggccggaccatcctggacctcccaggctcaagtgatcctcctacctcagtctccgagtacctgggactacaggcggacaccaccatgcctggctaattttcgtattttttgtggagacggggtcccactatgttgcccagactggcctcaaatgcttcagtttaagtaatccacccacctcggtctcccaaagctctggaattacacgtgtgagtcaccacacccagcctatatatgtgaatttttcaaatttttacttttaaaaaaatcgaagacttacagatatagtacaatgagttcccttatatctgtcatctaggttcatcagttgttaacaaattgtcatttttttctttctgtatataattattttattactttgatgaaatattaatgattagaaa

SEQ ID NO: 113027 - DNA, 1036 bp, Homo sapiens
ccaacatggagaatccccgtctctactaaaaatacaaaaaaaaaaaaattagccaggcatggtgacacgcgcctgtaatcccagctactcgggaggctgaagcagaagaatcgctggaacctgggagatggaggttgcagtgagccggtatcgcgccactgcactccagcctgggcaacagggcaagactccatctcaaaaaaaaaaaaaaaaggaactacatttcagcaaatgggtcagtgataatttacttacaaaaaatttatgtactttcattttgaagttacacactgctgccaccaaaatgtgtcagttgcacatgccacagatgataaataactggaattctcatttcttttctaaatgtgagggggaaaaaaaaaacctatggctattcaccactttgaaaatcaaaacagaaatgatttcttggctatgacaccaaaagcacagaacacaagacaaagcagatttcatcaaaattaaagactttgtgcatcaaagtaaaaaggcaaacaataaaatggagaggaaatatttgtgaatcgcatatctgacaagggattaatatgcaaaatatataaagatatacagtaggaatagggaagtattgtttagtgagtacagtttcagtaatggatgatgcaaaattctggagatggacaatggtgagggttgcacaacaatgcgaatatactcaatgccattaaaaatagttaaaatggtaacttttatgctatatatattttactatgataaaacaaactcagccgggtgcagtggctcacgcctgtaatctcaacacttagggaggccgaggcaggaggatcaggagtttgagaccagcctggccaacatggtgaaaccccatctctactaaaagtaaaaaattagccaggtgtggtgccacatgcctgtagtcccagctacttgggaggctgaggcaggagaatcacttgaaccagggaggcagaggctgcagtgcagggagctgagattgtgctactgcactccagcctgggcgacagagtgagac

SEQ ID NO: 113028 - DNA, 2397 bp, Homo sapiens
taagaatttctataaaaattcaaaatgctacagcagccaattccgtgaactctgtagccagatggcttgggatcagatctgagactactacttactaactgtgtaaccatggacaaaagagttaacctctctgtgcctcatttttctcacctgcagaattgggcttataataggacctggcccataaatctgttgagaaaactatgggtgaatatatagaagatattttggatggtgctgatacagtaagtttaggtattgttatccaagtaaataatttgtgaatctaccaacttggtatactaattttttaaaaattttctttcatatagttttttttgtttgtttcctttttagaacagttctagatctccatcgttataaaagagtattaccgtgttggtgtaccacaatttctcaagaaaaacattagctaagcccaagctggattttggtgggtgtcacaggtcattttttcctccattctatttctttctctgaattctttcttctcattgtcaaccagatgccacttaaggtgataataaaattgagacagaagttaggaaggaaaaagcaacctgactttcagagccctaagagatttttatgagcaaaacaaagaaagatcccaacattatacctagtaaatgctctaggaggataaaaagtgacaacaacctccaccaataaagtgcagtcactatagaagcttttccacatcagaacactctgaccttactctgagagcttctggctgcataatcctttcatggacgttatatgcactagaggggacaagagcaagaagagaacaaggcactgagtttcagagtgactaaggtatagaaattcagaggaaaagcagaggcagaggagcgattaacaacaacaacaaaaaagcagcacaagatttgacaaagaggcaaggggaacaggagtggagatggggaatgagataagaaagctgcacatccagggagagatatggggagaaatgcagtgcttagtagatggcaataagtagagttctgctttgaaaaaagaaatcaaagggcaaaaaagaaaaaaaaatagagaacatatggggaaataactagaaagcagctgaaagggttgcacctggaaggaagaaaaaaataagtaacatgtattcataacaatgtttgagagagggaagaaagattttcttcctcttcaagattcccatcccctctaaaaatacagtcactaagatgcagccatctttgtggtattcattcctccaatcccatttcccccttctctgacatttattttcattcaagtcagttgccagtcactcttactagaaactcgccaaatcatatttcaagaatttgtaaaagacaacgttctcggcaagggggtcttagaggttggctttttcttttggtcatgtggcatcaggttatccctgacagccacacagcagcaggcaagatgaaacttagtttacaggttggagctaagggctcagattacttcctcatgtgacccagttggctttgctttcttctgtggcagcaaactgaatctcgagccccagccagctgtcacaaagctgccaatggtcaaaggatgtccaggctcttaatatagcctgaggagccatgcaaggcacaacttagcccagagagggccaggattagaacctcttgtcctagctcaatgcactttcactacagagaccagatatgagcagttgaaacatgactgtgtaagatttgggaaaaggggtctcatttactaggagatgactatttgggtaactttttttttcttctttcttgccttctacaggactaataaagttttcttgttttttctccctgccctctctttccttttctccacattctggtttggaagctatgatatttcatttctttcagtcatttccattgattaaaaaaatactatggaacttctcaaacacactcaaatagagataatagtatgaacttcccaacgtatctgttgcctaacttcagctaacaataaatagccacttttgtttcacctatatacttatatacccacctacaatctcacccctgattatttagaaaaaattctagataatacatcatttccttgtatatattttagtattatgtctaaaagataagaactattttttgagacagggctttcctgtgtcacccaggctggagtgcagtggcaggatcataactcactataaccttgaactcctgggctcaaacagtcctcctgcctcagcctcccaaagtgctggaattacagatgcgagccactgcacccaaacaaaaactcttttttttttaagcaaaattataatgttaccatcacatctaaaaaaattaacaataattccttaatatcatcaaatatctg

SEQ ID NO: 113029 - DNA, 1033 bp, Homo sapiens
ctttttccctccccacaagccccaggaaaccattctaatgtgtattcttttggttgtaggtacaaaatgtatatgattttgtgctcagatattattaacttacacaaataatgacatattatatatttcattttttatacaattatatatatttttattatttatgctttttttgtttgtttattattagagatgaggtttcactatgttgcccaggctggtcttgaactcttgggctcaagcagtcctcccacttcagcctcccaaagtgctgagattacaggcatgtgccaccatgcttggcctaactgtatttttaatgtcctaaaaaaatctaactggtattttgatttggattgtataaagttcgtagatagaattctaaagaattcagagatttataattattttgtatctctttttataacatactgactaaataaaggcatggtcctatatctcttctaccagtatctggccaatccatgtatattaacaagctaaaatttaattgaatagtcaccaaagtagatagaactggtttcagaacactaagtgggtggcaaataaataaaaaatcagtgtcatatggccaggtgcagtggctcacacctgtaatcccagcactctgggaggccgaggtgggcagatcacttcaggccaggggtttgagaccaggcttgccaatgtggtgaaaccccatctctactaaaaatacaaaaattagctgggtgtgttggtacatgcctgtaatcccagctactcaggaggctgaggcacaagaatcacttgaacctgggagacggagattgcagtgaaccgagatcacaccactgcactccagcctgggtgacagagtgagattccatctcaaaaaaaagaaaaaaaaagaaaagaaaagaaatcagtgtcataaaaaggcatttattaaactcataattattcttggtattatactagattctgtactaaaaaagatgtacatgtgtatatcacattatttgggggtttccatttaaacagacaatattga

SEQ ID NO: 113030 - DNA, 1030 bp, Homo sapiens
gcttatgcatgctttctgacagtggattgccctcttagggctgccattttgtcctgagatttgatgactctggttctccctttaggagattgctatgaaaaggcagagaaccattggggcctgttcaatagggcacacctggctctctccgtctccctcatcaaggcctgtggggcatgatgagaactggcatcagcctactgatgctgagatttgttttgaagcattcgaagaggaagcgaatgctcaggggaagctttaaatttctttctacttacagaagttgaattgcaagagctatctctttaccattaatcaccaggtctagtgtgaagccagccaacttcagagagttagttaaaagagatgactaatgactcaactctctccttatctcacgctctcttcaggtttgatctcaccagacactcaggctgcacttacccacttgaacaagagctcttccagtgttctgcagtattgagggagttctgcgtttaaaggggcctgtcctgtacccccgtccaactgactgatggggaacttcaatgcccagcctgggatataagtggggccgaaggtggaagagtgagagtaccaggtctctatacatgtccaacttgaccgtgatggtttaggcatgacctagaatccctaggaggtcttgatcatttcagtttaaaatgactcttattatatagggaatcttttttgaagttagttcttctaaaagtctgcttttggtctctgctcacggagttctgtaagaacttattttagagataagctttcaaggctatcccaattgttccaacttcaatgatcaaaacatctgagactgtgttttgatttgatttctttgtagctattttatcacaaggttttcagagttttagattatactaagcaattactggttacctttccacagattcattacaaaacccctgattatatataaccaagtattgctctctcaataatattccagtgaagcttgttgttcaaatcttatacgtttccaatgatg

SEQ ID NO: 113031 - DNA, 1036 bp, Homo sapiens
agtgaatgttttgtcagcacaaagactatatcaggcagtgcatttttaagcaactggtagcatgatgtctgtattgatgaaatactggggactttactttgacacaacagggacttcatctggtcctttgttgttaagaccaaacactttttagatactctgaggatagtcattatctctttcagaaagaacaccagaatggcttattctcagttcatcttaatagatttgacacatggttagcagttttgaaattgttaaaatgttattaagtctgatcaaaacaattttctgttaataattctgatcaaaacaattttatttgtcaaaattcactgttgtggttcttttgaaatagtagtcattatttcctcagcatctattttcattttgttctaaataccattaaaattaacttttaaaacatcttagacacataaaaccctgatatgcggtacttaccatacactgcctcacactgttaattatcattttatgttatttatgtctcattcctctaccagatttacttttcctggaaacaattgttattttttgcatgtatttgtttgccccaccatgtctctcagtgtcttaaacataacagacacccaccaaacacgtgtgtgttcattgataggtttgacggtaacttgaaacacccattcctctggtcaggaatagaaactgtctcaaattaggtaagttaagaagagaagctgggcacagtggttcacgcctgcactttgggaggttgaacgggaagattgctggagcccaggagttttagaccaacctgggcagcacagtgagagcccatctctacaaaaaatttaaaaaattggctgggtgtggtggcacatgcctgtagtccctgctacttgggaggctgaggtgagaggatcacttgagcccaagaggtccaggctgcagcaagccgggattgcaccattgccctgcagcctgggtgacagagcgagaccttgtctcaaaaataaaagaagagatacaacagaacacttcccagatatacaag

SEQ ID NO: 113032 - DNA, 1080 bp, Homo sapiens
taggagagaaatcatcagaatgttggtgttatggaagccaggtgaaaataagaaaacagggcatgaatggacaacagtgtgaaatgctggtgagagttcaaataaaacaaggatgagaaattgccatgagatttagcaataagaacatcaatggtgatcttggcaagagctgggtggggtgacagagagcataagtcagatttcagtatattcaagtgtgagcgtagaccattcttttaaaaagtgtggctgtaaaggggaagggggcttttttagtggggaacataagtatatttaaatgtgtttgagaaggagtgagtaggaaaagaagaagggacctgagagagaagggctaatcttgagtttgagaccagcatcttgagtttcggtgtctcagggacttgggaggggaatctgggcacaagtggagggaaggtcagcttcccacaggaaagaagagcaaggatgggcctgtaaggaagactgtctgcaagtttggtgccagaagctgaagctgaaggcattcttgttcattggcttgttacctccgtgatagtgacgtaggttagaagctccagtgaaagtgctgaggcaggtggcaggagaatgcagactgaactgactaggaaaacagagtgatttcagggcattgtggaggtgggggataatgagtgtattctggaaccaatcagcacagatctgtgactttctccagtagcttagaagtccaaattcagcaatgaagaaggctaatatgtttgaattattctaggactgtcttcaaggaaaccattgcagctttgcagcttcctttgcccattctttaaatgcttctttttagtttctagcctaggctctgttttcttctcactttatggaaacgtcctattgatctcatccactctggtggcctcagttaatctctctatgctgatggctcctaatccaatatttgcaacccagcctttctctccagtaccagatttcttctggttcccatctgccttctggggcatcttcaattgggtgtctcctgggcacctcaaattgaactcatcatattcccactgtctccgagaa

SEQ ID NO: 113033 - DNA, 1835 bp, Homo sapiens
cttcaactgtcatctagcctcctaactaggcttactctctccagtctacaaacccgccgccctcccaacccatccagttccctaccctgaagccaaagggcttgtaaaaagtcaacatttggcccccatcctcctcctcctcacctggctgatgccttcgggtttcagctttagtgtcacttatttttagactgacgtcttctctgaccaccctcttcccaccaggcagatcaggtgtatgctatatgcctcccccaaaccctggagtttattgaaatcactttttaatattttctactggcccgtggacaaagaataggcctacttgcctgttttaccttgtctccagtgcctagccagccctgtgcctgggacatactaattgcttaacacatttgtctgaggaatgaagaaacattagacaagaaagttcagaaaacagttggttagaggtggtaggtgggagtgagacctacataagtgtttttctgattgagtgtggatcagaactaccaggaagggttgttaaaacacagattgccggatcccactttctgtttcagtaggtctggggtggggctggaaataatgcatttctgacaagttctcaggtgctgctgctgctgattagagaccttatgagttacatccgttctgttgttggtaagaaaaggctggaggggtagatcagaggactttcagataaaaagaagggtaaggtgggatgtatagactttggaaatctgaaaggtagtggtcaaaatgggagatacttgagtttgataataaagatggcagaaatttccagtagttgacaaggtccagggagagtagctatgagaatgaatagccaaagtaacctgtggaggaaggtataataacacagagggggtcaaagacctgaaatgcacaaacattgcataaaagtatttaatacccaaatggaaaaattgaaagatgtaagtgaaaaggaaggatgtaaaatggaatgtgtcgcatcattccaattttaggaaaaatgcatagaaaaaagaccaaaaaatggacaatgtttataatagttatccatatggttgagttttattacttcatttttctaaattttcaaaatttcattatcatgtattcctttcatgattagggaagagctttacttattttgaacctcctcagctttggtcatttccatctggtggaattatctcctgttatcccatttcatacttacttctctttgacatttttactttcactaaaagtatggaaatcaacaaaattaaaacaaccaaaatgaaaagcaagcaaaggaaaacaaaaagaaggggaagaaagaatctcaagaagaaagtaatttagttggtactgacaccaacaagaaacaaatattccatatatttggaggttgtaatgacctgcctggaggagctaaaatgttgttaaggactggtgacttcaccaacaggtcagacaaggaattctagtcctaatctcttacccttcatctcctgtgtcacggagttcagataggtgttgactgtggctctcaacttttcttgttcagaattatatgtaccatacattaggacaaggggtgttaaaaaacaaaaaagaattatatgtccttattcctctttgaactacatccctccctcatacaatattactcaacaaagttaataaaaagttattattattatttttttgagatggagtttcgctctcattgcccaggctgcagtgcaatggtgcaatctcggctcaccgcagcctccgcctcctgggtcaagcgattttcctgcctcagcttcccaagtagccgggattacaggcatgcg

SEQ ID NO: 113034 - DNA, 1283 bp, Homo sapiens
gaccactgaactccagcctgggtggcagagtgagaccctgatcttgaaaaaaaaaaaaattatctcgttggaatgtataccaactgacagtggtatttgccagtaagaatttcttgctcatttccctaaaggaatgagataatacaggactttagtgtatgcatcccttcatttcaaatatgaacaattctgaatctcttatcaaggccttataattctttacctacagagaagtagatgaaatgactaagtaaacattcagaggtttaatcaagtctggtttcaaaatcaggaatatgaatataaatatccaaatttctatttcataaaaacccattattatggaagaaaataattaaactgtttatgactacagcagaatgtacaggatatatagaattgtaattatcaccacgaacaggaaagacaagaatcttgatatttctattacactgagtaccttgtagctattttgttgaatgtcttttcatctctgataataaggtgtgaattaaaaagaactattccagagactaggaaatgatgatccggaatgatttggcaaggtaagacagtaagtgacagagtggaatcagaaactcgctttcctaattgccagcttagtacttcttattctaggctgtattatctgtgctgccgcaaggcaaaccatatcattgcctttcccattttagaaataggttgtataggagtttcctttgtggtctgatggcaagagacacctattatttaagaaatgccaactgctgatcattgatgacaaaatatttttacatgttccttatggattcaagttgtccgccatttcttcaaataatcatcacgtttctaagtttggtaagaaaatcagaaatgactgaatgttaaagagaaaggggccttaggcattatttttcctatcatctcagtggggaaactaaagcccaaagagtcatattgggagttggtgggagtctcctgacttcttgtccagggctatttatagcacatagcactgtttcagtggatgagtattctgaagccacggcataattgagactctgtacatggcaccttcactcatgttcaatgtgtcagtgtggggagtttgtgtgccattttatccctttatttttgtcatccattttattcaatactttcgttggtgcctgatgtttttgatagaaaaagcaaataaaagagtaagcagcaaatgtgagttaaaaaaattttttttttgagacagagtctcgctctgtcgcccaggctacagtgcagtggcg

SEQ ID NO: 113035 - DNA, 3864 bp, Homo sapiens
ggccgagggagtggacaacctcctactgccagggcctctactcctgaactgttatgaggttgcctgattcctcttaacaacccttcaggttaggggccagctgttaacttaattttattaccagggaagaaactgaggctcagataaagttcttttatcccacaggcacacaaactgctaactgatagagccagatccagccatgtctggctacaaagcctgtgtactttaacttctacagagagtatgtgcgaggtgaaccagtaaaaataacaataacaagtgcaatactaagaatagtaataatgatagttaacacagtgctttacatgtgtgatcgctttgaacaggattaagtgaacacatgaataggactggcagggagtctttctactcttcattagcgaaacaggagaggacatatacagtacttaggatttccactggcttactttgttttctgaaaaataactgaaaggctcaattagttttgttttgtcgcatttatcagattataacgttctggatgtgggtctggatgtgggtagttgggctggtgtgggattacatgaaatcaaacctgatatattcagaaagattcttccggtggacacatatgccttttgggttcgatattcaattttgtaattagtgatcactgttcctatttatttatttatttatttgagacggagtttcgctcttattgcccaggctggaccacaatggcgcattatcggctcatcacaacctccacctcccgggttcaagcgattctcctgcctcagcctccccagtagctggggttacaggcatgtaccaccatgcccggctaattttgtattttttagtagagacagggtttatccatgttggtcaggctggtcttgaactcccgacctcaggtgatccgcccacctaggcctcccaaagtgctgggattacaggcgtgagccaccgcgcccggcctgaatgggagtttttaatccgtacttttttcttattgaagttgaatgtcatatacccctctatttccctagatgaatccatgaaagaagtatgttgccctctatatgaaaaagcaagcttgtcttctgcagaaaatcagtaaccactcctttttacacataaatacccccaaatgaatctccgatgactgatctgatactagtctgcaattctagttttagcattaggctcactcctcatatttgggagaagatgtccaattctgtagtaatgtgtaacataaagtggtgtcaatttataaataatatcttctaatgaattaatgctcatttgcaatgatcacttccatacaaatttaggtaaagatgttattcagaattggattctctctatttaaaaatgtcatcctaatgtgcaactccctaaaactgttactacaaacaactattttgccactcagcctaaaaataaaacctttcacccaaatgacacatcttaatagccatattttaatctacgtaattttaaactattctgaaagaatccatttctagatgtcagacaagagttgaaactgggacagcagtttgaaggggctaatttaaaaacccacttgcttggagacacctcaagaatttctaggctcacaaggtgggtgaagtaaggaaagagactaagagctgaacagtgccgttctttgcgagcccccactggcgcaggctgagccggctgcggctagggctgcgaagagttaacgagggaccgagccccagcgccgcgggctccccgcatgctccctccgccctcccgtccccaccctctcgttttggcaagggattaaagtgctcccccctgtggcagcagtgacccagaaatgagtttgattcacatagtccttcctccataacaagccaaacgccagaccgagagtgcctccgtgcgcgagtgcccggtgtgtgcgcgccggcgagagcaggggcccgcccggctccccgcccgccgcggcccgaactcatgcagctccgagcgagcgagcggcgcccagcccagcgcctcggccgaacccctccgcagcaggtacgcgcgcgggccgcggggggcgcgcggggtgggcgcgccgcgcgtgtgtccgcgcgtgtccgcgtgtgggtccgtgtgcgcgtcccggtcccgcggcggcgacggcggcggcggcggcggcggctgcaggacgagccgagaggctcagccatatttgatggttttgttgctttgctcgggagttctcgggagtaatttaatgccgaaggtcgctgcctagtggaaataatataatacgtcattaatatggcgccaaaagattgggttctcgatctgtagcgaggagggagggaggcagccgctgagcgcagcgttactatcccaccagtaacttgggcattgccggggcgggggccggaggaggaggagaggatgatttttggatcctgagaattgatctatgttggatcagtaagttttattatgattttttttttcaaatttggggggctgaagacttagagctatttcttcttttggatttgcgaagaacatgcggttttcaggtgaatcatcaattaaacgcgtttaggagcagaagcccagtttaagttggctttagtttataggttttttttttttttttttttttttagaaagccaaagtgcattaggctgcatgaaagtggaaagcatagtagcaacttggtagacagatggcaatggcagaacgcaggttcgcgtacatatatgaatccagagtgtgtgagaccgtgtgtgtggtgggactgtatttgtccaaacataggtgtgcgtaggtacatctgtgtgtggtggccgcagccctggctcttgtcaccgcgtcaccacatgtccaaaatattcattgcatcaattcaagggcagtgagaggggggtgggggtgggggtggagggacagtttggcaattagattcttccgaactgggcttccagtgatcagatcttttacttacagcgcgactgcttgtaaagtgtaaaaccccttaatcgatgaaatggggtaggagttggcgttggtagagcaaagtaccgattaatcgtgaacttaaaggggattgcaaattgcaacctttggcaccatctgcaaattgtgggggtggggtctcttggtctccttgcttccttaaatgaacgtgtagtgtgtaccccgggactgcaagttgcagagcccttcagtgcacgtgtcttgtgcctgtgagtctgtgtttgcgagttgggggctgttgttcggtagccagcaggctttccgggttgctcggcattggcttgcaaatgcgggagagggatggaatgtggaatgttgaccggggaaccgaatcctgtcggaacggtcccatttgctggagaaattcgatcccttccacctccttcccgctcccccccgcccgccttcgggcaggaggcggggctgaggacgcggctgctgctcaaagtggcggagcgcggcggcgggaggcaggtgcacggcacccgccagtgggggtgcctcaacttccgcgggcgtttaaatagcagcctctctcccctcccaccggtaataggtgacctggcggccgagggcggcgggggagggaaccgggggagactcgggagcgagcctccgcggcacgtgggcaggtgctgggtggccccggggccaacttttgtagcccgcctctggtgtttgaggagaggcggcccagtgtggaaatgggggcgggcggcggccgaggcgctgcttctccgctgcggccggagcgtcacctaacggtcccagctgcgccgcccgggccggggtggggggttgcgggggcggggacgcccggcccgccgcgcccgccccgcacaaagccc

SEQ ID NO: 113036 - DNA, 1520 bp, Homo sapiens
agagagggaggggtcggcgccgcgcggaaccgcggccctgcgcattccccggcgggcggcgggagccgcgcggagcgttcgccgctgcggggcggcggccgagctcccccacaaccccggggtgccccccttgctgggatccttagccttctcacgtcccctctcactccgccaccctcccactagagctccttattctcgagtcctcaaccccggcttggcgcgtcccgggtctcccctcgccccaggattcctcccgcgccaggctccgctggccccaggtttcccaccccaagcgggtgggggcggccgcagtcccggcgccggtgaatgctgagagcaaacaaaaaagcgggcgatttaaacatgccttcgaaacccgttaggaatgcgtcgtcatccggagaccgtttaaaaggagctttagcttgccttctagtaacgagagggctggcgccctgccttacttcggcaggggcgaggggctgtcgccctctatttgccccggccaagagggaatttaaattttcttttgtaaaatgacagctgcagtgaatgacctgagacagctacgtttttaggaaagtaggagaggatctgaggtttccattaatgggaatgcttagggggttctttcccaaaggttttttattaggtgaactatttttcctttttataatacccgccatgaaggctagctctcttgctacttgtagctcaaggctaatacctttcaaagctaatgaactagttttaagatagagggaaattatttccctgaaagctgatttaggtagtgactccccagtggttacagattttatagtaagttgcattttgatcatatcacaactgatcaagatttaatcacaggtggagaaaggtggagaaaggaagcattcaatatgtccatacttgcattgagtcaacacttttgatgtaataatttgttgtaggtgggcaacatacgtggggggagttaaatgggatgttttgtgagtaacactcttagcaagtacatgcaacccagaatttttattgtccttttatcccaaagatcttagtctcatttacttacggtcacttttttttttttttttttttgttccttgagacagagtctttcgctctgtcacccaggctggagtgcagtggcatgatcttagctcactgcaacctccgcctcctgggttcaagcgattctcctgcctcagccccctgagtagctgggactacaggcgcgtgccaccacggctggctaatttttttttgtatttttagtagagacggggtttcaccatattagccaggctggtctcgaactcctgacctcgtgatccgcccgccccggcctctcaaagtgctgggattacaggcgtgagccaccacgcccagcctgcttacggtcacttgtaaatcagatgactttctgcttggtattttgctgtcttcttcaaagtttggatacttctataagtgtcttttacttggcattgtcattttaatgtgtagaataaata

SEQ ID NO: 113037 - DNA, 4771 bp, Homo sapiens
aagttattacacaagtagtgttacatgtacgtttttgaaaattagaaaatacaaggaaacaaatataaaaacaaattgctaccatccatagatgactactgtattacttttcagataattttctatgcatgtgcatgtgtgttttaataaaaatgagatacatgaatataccatctgtaaggattttttcttttttttttttttttgagatgaagttttgctcatgttgcccaggctggagtgcaatggtgggatctcactgcaacctatgcctcccaggttcaagcgattctcctgcctcagcctcctgagtagctgggattacaggctcccgccaccacgcccagctaattttttgtatttttagtagagacgggttttcaccatgtttgtcaggctggtcttgaactcctgacctcaggtgatccacctgcctcggcctcccaaagtgctgggattacaggcgtgagccaccgcacccagctctgaggaccttttttttttctgtcagctagcttggttagttttaatataatctattactgtaacatgtccagatttccccatttagccccagactgtaatagagaagctttgtctaaaccactgcctaataaaggaccatttattgcatttggttgtttcccttaagtcgattttaatcttaagtaactttttttttttttttttgagacggaggcttgctctgtcacccaggctggagtgcaggggtgcgatctcggctccctgtaagctccgcctccctgtaagctccgcctccctgtaagctccgcctccctgtaagctccgcctcgcgggttcacgccattctcctgcctcagcctccagagtagctgggactacaggcacccgccaccatgcccagctaatttttttgtatttttattaagacggggtttcaccgtgttagccaggatggtctcgatctcctgacctcgtgatccgcccgcctcagcctcccaaagttctggggttacaggcgtgagccaccgtgcccggcaatcttaagtaactttttgacagaatatctgacactgaggaggcaagcctttggaaataaagttgcctggattttaaaaaagcaggaaatccaaatggtatttattgtaatttggaaatcttaaatttggagatcatctgcttgcttgatgttactttccacagacttgttggaaaaagatttatcagatgtttgtgtttcagtactgaggtggttggaacagtaaacatcaagatatcaaatacagattacatcctgtctctttagggtttggtcagagaagaggaggcataggaatctgtcacagttctgcttgctgctttactttcttgtttgtgaagctcttccctgtcatttagtattatggggcacctgttacagcattacagttaatggtctgtcagaatttgcattataaaactggttttcctgtgaggtttataaaacagttatagagggaaatatgacatattagcgaacacaccttgctttttatttgggttggcattaagaggtttagcttgattgttaaaacggtgaaagttacgtcacgtttaaacttatttcctcccttgtacaagcctttagagaattggcaccatattcaacaatactttttttttttttttaaacatgaagggtgggtttgcttggagtttctggtttcttagaaggtatcagcaatcttaaattaggaaagtattttaattcctgagacaggtaagttgtttccttaaaagtcttaaatctgttttctccgttttcaagtccttgcagcactttatatgaccatgtatttacaatctggacaattctttttatgtttgtggaatgtaatatctcagaagttgagatttagttgagtctattgagtctattgtcctttgcctagtgtatttctcatatgaaaactttggtttgtgatcatgagggtgtatgcattatttttattttttctttttttgcagttcatagccctgatgaagcaagttactctgctctcctaataaatgcaagaaaatgaccttggagggcctttttaattacacatagaagtgacaatttgtaagtttaaggttgggtgtcatggaatagaatggaagaaattgatgctaaaaactttggctatgatggggcctttcctagcccaggacttgaatgattattaaggatcctttcctcacctcaaagcacaaacataaagattaccagacttggactggaaagcctttatcactaggaaaggggccatgtatttttacgtttaatcccttagacccatagtgtacgatgtgcacacagtaaatgttcagtgaccaaattttggttactctaaaacgaattcagtatttactttttgcctttagttcttcaggtagaggtaggacataatgtgatagagagcagttgaagaaagttaatttttaaaaccttagatttttttgggcttacttgttgagggaagtaaactacattttctctctctttttttttttttgagacaagttcttgctctgtcacccagggtggagtgcagtggtgggatctcggctcactgcagtgggttcaagtgagtcagcctccggagtagctgggatcacaggcgcatgccgccgtgtctgtctaatttttgtatttttagtagagacggggttttaccatgttggccaggctggtctcaaactcctgacctcaagtgacccacctacctcggcctcccaaagtgctagattacaggtgtgaaccaccatgactggccagttttctattactttgaaagcgctcacaattgacatctgtctctttgtattttttgttagagagatgaggtttcactatgttgctcaggttgcccaggctagtcttgaactccagagctgagtcctcccgccctggcttcctaactgcgattacaagtgtgcacctgtgtggctggtggaagtaatattttaaactattgatcatttagtgtctcctgtgcaggagattttattattttgagaattcatggcatcttccatgagagtttataaggacttactttaagtgaagatttcagtggtgtgggtccacactgaggcataaaataatctttttgtttgtttgtttcccacttaaaccagggtaaggaacaagaaatagcaatgttattagcaagttgcttgaggttgaacttcatggcttgctttaatttagcacaaagtacactaaatgcaatttaaattttttattgattactctttgtcataatctttacgagcatcagttacttccatgtggaaatgccatgatgcacttaacatatagaggctgagtgttggtggttgtaactttttaagttggggacacttgacactgaaacccatggaagctctcccccagaaaacatgggtgtttccttaagcacatccttggattctagtttaagtgtttaaattctggtgacttctttttatgatttctctgtgatccttttactgccactgttaccatgtattgtagttaaaatgcctgttgagaacagtgatttttctgcttattggtcattaacttgaaaatcaaataagaagcctgttagaagtttttaaaacttgtgtacactggctccaagtaggagcctcaggggttttcttttgagaaaaacccactggttttactgtggcctttatttaagttgcttagaggtctcctcaatgccttccttttgattattctagttagggacttcttttttttttttgagatagagtcttgctctgttatgcaggatggagtgcagtggcatgatctgggctcactgcaacgtctgtctcctgggttcaagcaattctcctgcctcagcctcccgagtagctgggattacaggcgtgtgccaccatgccctgctaatttttgtatttttagtagagacgaggtttcaccatgttggccaggctggtctcgaactcttgacctcaggtgatgcacccgcctcagcctccccaagtggtgggattagaaacgtgagccaccatggccggccatagttagggacttcctaaggagtgattgtgtctgatccttaattttgtaagctttcggttgcttgtccagcacctggtaattgattcacattgaactaaacacgcataatggtggtttataaacatcatactactgatcggttgatttataggacagatcagttgcctttctctgtaaagagccaggtagtcaatattttaggttttgtgggtcatatggtctgtcgcaactgctcaagtctgcagttgtgccagagcaaccatgggcaaaatgaatgtgaaagtgatatttatggatatagaaatgtaaaatttttatgaattttgtatgtcatgaaatgttctttggccctctaccctcaaccatttcaatatgtgaaaatcactcttagctcaaaaaccatacagaaacaggctgttgacccctgattggttgattgattgatttgagacagggtctcaccctgttgtccaggctggagtgcagtggtgtaaattccagggctcacttgatcctcccatctcagcctccccagtagctgggactgcaggcatcccacaccaggcctggctagttttttgtattttttgtagagatggggtttgctatgtttctttgttctcgaactcctgagctcaaaggttctgcccactttggccatcactccctggcctccccagatttatagtaagacacagcagctacttgattgtttctgctggtggc

SEQ ID NO: 113038 - DNA, 2170 bp, Homo sapiens
gaaaatgcaagttgaaattagaagtttgtttggaggtagttggctacgctgagggctgtgggttgtttttgtttcgctctttttgcccaggctggagtgcaatggtggttttttttttggggggcaggctctctctgctgctcaggcagtagtgcagtggcacgatcacggctcagcaaccttctggtctcaggcagttctcctgccttagcttctggagtagctgggattctgatcctagatcccttttgaggataaaatgtgtaagaacaaataccttggtcatctctcacaccctccgggggggtcaagctaagaagacctgtgtaagaggatatgtattataagattgtgttccactacagagggagataatgtcaagtagggtgtatgtgtcacagcaatcagaagttaatgcctaccactccgggagaactcatactcctgtggtagtgtttaaggaactgctgacacattcttccagctttaccttttgtgtgcttcactatgcaaaatgaatggcatttgtgaccatcttgccatgaatctgtgtttcagttttcaagttaacagactgttgttcattgattacattttcagtttttgctctctgataacgtatcatggccttagtcattcacatgacctctttttaaatcccagtgtacatccaggaggaagaagcccatagtccaggaatctgggaggaggtggctggcacaggaggagagtgcccctccacccacctggggaactggtctttggttcttccactgcctttgcactagatctacttatgtgtgtttgtgcaagttgataaacatgcagaaatccatgtactcctctttaaaagtaggaaaggtggattaaattattttaaattgtttttgaaatcctctctagctctgcagttaattatgattttatgggtttcttttgggaagatttctttttttttttgagatggagtcttgctttgtcacccaggttggagtgcagtggcatgatcttggctcactgcaacctccatctcctgggttcatgcaattctcctgcttcagcctcccaagtagctgggattacaggcatgtgccaccatgcctggctaatttttgtatttttggtagaggcagggtttcaccatattggtcaggctggtcttgaactcctgacctcaagtgatccacccacctcaccctcccaaagtgctgggattacaggcgtgagccaccacgcctggctttcttttgggaagatttcttctagacacaatctgtgttgtgagacttgtaggcagagtctacgttgtgagactgagacttcagcctcagagagtgctttctagaccttgcttctaggtttgagaccaacttaggtttccatgatcataataacgaggcttgtacaattgtgatgaaacgtttgttttcatatgtaacttggatgattgtgtaaatgttgtttttgtcaagtgtgtcatctaggttttcaaatatacaacattgggagtctctctcttttttttttttaaaacagtactttaaaaatttttggtgacttaacattgttagtggtaacggatagtttctgacaaccgggtataatcaaggaacaaagttcctgaaaaacagctgcatttcaatctgtgcacagtgtaattgtcattagctggtggagtctggtttctgcagaagctgatttgtatatcctgtataagaacatctggtttgagcatttaaaaatcttttaaaattaccctgtagacatttagcatttattggcttactccaccaaggatggaataatgggttgtagaatcctttctcatgcttattcttaccttcgttcattcagaagcacttggttttcctaaagtgtctaatgagcttttagagtttgatatgaagtgtgtaggtttgtattatagaaattagtacctggttcagagacccccaaggcagaatggaacacaaactcctgatttcagtgaaatgctttaaaaaataaacatttcatttttgtatattctgaagagattaatctgaccctagctttccctgataaattgtcagaaaactgagacgcggaataagacatatagggcaaatgggctttatctctcttggtgatagcactgtgttaaggaggattctgaagatatgtgcctggg

SEQ ID NO: 113039 - DNA, 2227 bp, Homo sapiens
ccagttacttgggaagctgaggcaggagaatcgcttgaatccgggaggcggagtttgcacttagcagagatcacgctcctgcactccagtctgggtgacagagcaagactctgtctctcaaaaaaaagtatctttactattataagtgtagtacacaatcatcgtaaaaagttaaaatcatggccaggtgcagtggctcatgcctgtaatcccagcactttgggaggccgaggcgggtggatcacctgaggtcagagttcgagaccagcctgaccaacatggagaaaccccgtctctagtgaaaaaaaaaaaatacaaaattagccgggcgtggtggcacatgcctgtaatcccagctactagggaggctgaagcaggagaatcgcttgaacctgggaggcggaggttgcggtgagccgagatcacaccattgcactccagcctgggcaacaagagtgaaactccgtctcaagaaaaaaaaaaaagttaaaatcatattaaaggtcataaagaggaggaaaagttcccaactcagtctgtcttggaaccctttggtcacatttctcagagatgaccactatgaacatttatattctttcagaaatgttctatgaatatacaagcaattgctgtaggtattttctctcctcctattatatataaatgctcttatattttgggttttttccctgcagttagcctgtttttctcccctaatatgtcttgggcatctttccacatctgagcatttagatctaacagaaaagaattctgagtagatggaaataaggataaaagctcaagattggagaccatggtgactgactgccttttttgtttggttgtgaattcatttactcccatgtcaagggaagttaaaaaaatacattccaagtacaaatgattggaatgttttgtcatagctgctcttattcagttgctgactcttaattgagtcagcaattacagagtcctggaaggggtttaatagattgccttagagctcataagcagtgattggattatttatacattggcaaatgagagctgcttgtgattcattcagaaccactcaaatttaaaattccttaaagtcttgagaaatgctttcttggtttttaaatctgagttcaaaaataacttataaagaatttaaagtgaactaatgtattatagtacatgggctttatgagtaatgctcctaagagtaaatattatagttatttattatgtggtcagttatcataattttttttcttttggaggaggtggctattgctaatgtaaacttgtcagctgaatatttgtaagttttacctccttccagaggttctgtattagcttgggccagcattttccttaaataagttttgatgtatgacgttataaagagcacatttttttgcttgagatatttagacaagattaaaacattaacgcttaagagttaagctatttgtcagttaaatgtatgactttatttttgactagatataaccctttagttaaattgagaatctgtgtttgagttatagtcatagtagcatttttagattctgtgagcatatgaattagataatgttgccagttggaaaacttcatatttaagcgattaatgtttactttaaaaactgaggtaagaaaccagctgggtttccttcacattcatttaggggcaggtggacagattttattgtgaagttataggtcattatatttgggtatttagaactgtatattccatagaagacaaaagtgaccaattattaagaatataatgtatctttttgggggagtattctatgttcagtaatttaggaatcaaattatcaggtacctagtgtttaaaaaataatttgaactatgtgaacttaaacagaaaggagtggcagggcgcggtggctcacgcctgtaatcccagcactttgggaggccgaggcgggcggatcatgaggtcaggagatcgagaccatcctggctaacacggtgaaaccccgtctctactaaaattacaaaaaaatatatatatatattagctgggcgtgttggcaggcgcctgtagtcccaggctgaggcaggagaatagcgtgaacccgggaggcggagcttgcagtgagctgagtgagccattgcactccagcctaggtgacagagcgagactccaactcaaaaaaaataaaataaaagagaaaggagtagctcataaaatacttagttttatataaga

SEQ ID NO: 113040 - DNA, 2087 bp, Homo sapiens
tacattctttagtacctttaggtattagattttagctatttgacagaatggaagggcatcaataaatttaaaagtgaatacaggagaagttattccagttaaaggtcaattagatattaaagtaaaagcatctcaaattcaataaagtggagtgaacataaggtaacagtacgggaactaaggcattcatccagtaggttattttaatacatagtattgcattgggtgatatataaaagtatgtagcggtctttaattgagtaccttctagaacttcttgagtgaaataaataaaaatggaaacagtagataaaactgatactttgagagagaaaccagcctttctgcatatgagccataagacaaaatcactaggttgtaatccttattatagctatagagtttatggcctgataaatgggccctgttccaccacagagagtaagtaattctagtaactggacagtttgttttcctcaaatcagtccttgtttcccaggaatagcattgaataaacatcctcaaattcttagttacctttccctttttttgtttcttttttcgagacagagtcttgctatattgcccgggctggggtgcagtggtatgatcttgactcactgcaacctctgcctcccgggttcaagcgattctcctgccttagcctctcaagtagctggaacaacaggaatacaccaccaaacctggttaactttttgtgtttttagtagagacggggtttcgccatgttgctaggctggtcttaaactcctggcctcaagtgatatgcctgcctcggcctccccaagtgcctggattacaggcgtgagccactgtgcccagccctcttattcttttgtaaaagtccttctctccttgtccatgacgttctcattctttcttagaatcatcacatcagtcatgaccacgcccaggtcactgaacttgttcgctcaaattcctgagccaccctagggatgggttccttcacatagtggctcctctgaatctattgcatgcagatttttcccagtttcagtcagaggaatgtaaatttcaaggttttcaggtgccttgctatctcatgtgcatgtaagcagtaatctggtgacttttatagcacttaccacactgaagccacttgtctagttatttgatgtttcctccaggtagactgtgtgctcctgcagtgcagacattccatatcttgttcaccgtatctctgacgtctaccttgataaaattttcctcaaattattatgttagctaatgtactgcattttaacccacatgacagaagggatccaaggagagagtaatctgcatataatctaaataggggtttgggccagtgggtaaagcctgtgtttgcatttcctgaggagatggttctccggcagctgccacagatgctcagttgtcttggtgcatctcttcgtgcagtgagtggagtagagacaccagaggattgttaagtaactggtccagccagggtctttggccagtggcctttccaggcagtgttctgtttttaatttaacttcctaggtagtcttcctctttttgggcaaactcccaaatgcccactaactagctcttttgtctctgtagctattatgtttctcgtggcaagtggacactccaggctccgataagctggataactttgcatcagttttgaggaaatgtaaacagaatgtcagggtgagccgtgtcgactggatccagagttctgagggcatctattgtagccacgctgagaggccttgtttctgaccagtctgagttggattcaatctctgtcccgtactgcaaggtcccattgcagtgttccctatacctaccatcatggtcccccttctctgttatgtctttttttttgaaacagagtttactcttgtcacccaggctggagtgcagtggcacacgctcagctcactgcaacctccacctcctgggttcaagtgattttcctgcctcagcctcctgagtagctgggactacaggcatgcatcaccacgcctggctaatttttgtgttttttttttttttttcagtagagacggggttttcccatgttggccagg

SEQ ID NO: 113041 - DNA, 2253 bp, Homo sapiens
gggtatctgaccactctgtcctatcttatcctggcctgtcttcaagaataatcctatcaaattagccataaaccccttatccttgatatttctgtttagtagtcagtctcctatccaccggccccaccctcctccttggttataaatctccacctcttttggaatctgagttgggttcaatctccatccccctctgcaagatcccattgcagtgttccctgtacctaccaccatggtcccccttgagtaaaatctgctttaccatttctaacaagtgtcatgaggaatttttttcagtgatactattaaggtaacagtgcattgaaaagcaaggtgaaaaagttctaaaagaggaagaaagttgaactgagcagtacagaatataagtgtttggagttggagtggtcagtggctttgagctgagccccagaaaagtggtgggattaggatagggagcaaggagcaacaggagcagcattagcagagaatgagaactgaaagtaagcagagtgttcagggaagaagcctggcccaaccaatgcaagctctgggttttggggcttgctagaacagatgcctgagtaaagctgtgagaagtcagaaaacttcatttttggctggacactttggacttagacctatttgtaatgtggaatggagggagagatctgcatatagtattttgatgaggttgcctcatggggtgtagttaatttgttgttttaataattggaagtgggaagagatcatagtttggagaataggtgtttaaagctttctaggtacaagtagttgaagggcaaacccacagggcatatggggacttcagagagtcataacattatgaatcagtaaaccttggcaattggctataaggtgagaatggatgtgtatgaagatgctacccagagtaatatgctgtgttacacatatgttggtaagtacggtgctctgccccaaacatgcccctttttctggctacctcctctttgttcttcaggactcagctcagtcttaccagcctcctctgactcttatccaccttttgtattcctgtagaactccgcatttaccactgtcaggcacaaacagtagtgaatttccgttgttttcctgtctgcccaactaggccagaagctctgtgaggtcagggttagtaattttcatccagcacctcctaatatatgagatattcaaatgtttgtcggctgcattatgtgccattatatcttcttgctactttggggtgttgtgagtagccattttaattgattattacttatcctactactgtctagattagtaattagccattgccctgagagtcaggaaaggtgatgatgcagatgctggcttttagtggggcagatgtttgcagcatacaaccactgtattgtgtagctgaaagatagtaacatgtattttgattttctgatacagtaagtcatcctgggtgagataaatcagcttgatgtcaaggtttaagtactttagagccacagaggaggaaattctgctgagcactaacccccatactgtgccaagttccctggagaagcaaatacagcactctcaaaccctcattactcaagatcttcagcggatgaaaatggatttcattagaaagaaaatactatttttactcttcttttacttgaataattttgcttaagagagtatttatgtgtgtttaggtgcatcattgtattttggccaatgcttgcgttctttatttagtgactgttgaagtgcttcctcagggagttgtgtttgaaagctggaaagtaagcattttgattcaaaaagattcttaaaagctactctgttaggtgaatctaatttttaaatttttttatagagataggggtctccctgtgttgcccactccggtctcaactcctaggttcaagcagtcctcctgccctggcgtcccaaagttctaggattacacatgtgagccaccgcgaccagcctagtactaattttttttagcactcttttgtaatgttggctttggggagctgaagctgttaggagtgagtggtcttctgcctttcccttttcccttttacctcttgctggatcctgaggggacccagaggtgcattctctagaaggttggagagcttacctgtctgcagttggtgtttttggcacacacagggcagagaaaacagttgaatagggagtggaccactggtgtttcttggttatggaacctgagggctggagtgggcttaccccaggccaagt

SEQ ID NO: 113042 - DNA, 3859 bp, Homo sapiens
tgcctacagcatgaaaccccagcttgtaaagcgtgtccataatatagctcatgacccatactgatcaggacttatgttcagcctttctcttggtacatcattttaatggcttttgaagaatcaattgataaacaaaaactttaactgggtgagtttctcaggaagaaaatataaaatattgcaattatagattagggacctaaatatttggatgaattgtgtagatccattttttaagtgtagtataggaaaaacttttcatctacttttttaggttcagttcatgcgagtctgaattaaatgacaaaagacattacaggagaaaaggcaaacttcactgatgttgatatttttatgtgccagatgtgggtaaagggaaggagacttcaccgaagagaaaaaacccaagaagagttagacctgaaggcttatatacaattttaacagagggtgataaattgtgaagtgactagtcaaaggaaaagggagtttaggcttttttgactgctcttttgtaggcctttttagagtggagctttggttttttaaaattgctttcttgttctatcacagtggttctccacatttttctttttttttcaagacagaatctcactgtgtcacataggctggagtgcagtggtgtgatctccactcattccaacctccgcctcccgggtttaagtgattctcctgcttgagcctcctgagtagctgggattacagatgcgcgccaccacgcacggctaatttttgtatttttagtagaggcagggtttcaccgtgttggtcaggctggtctcgaactgctgacctcgtgatcctcccacctcggcctcccaaagtgcagggattacaggtatgagccaccacacccagcccggttttccacatttttttctccacaccattcctatgtgccccacttctattgttgtgtgtatgtgtgtgtgtgtatgttgagacagggtctctgtcgcccaggctggagtgcagtggtgtgatctcggctcactgcaacctccgcctcctgagttcaagcgattctcctgcctcagcctcctaagtagctgggattacagacacctgccaccacgcccggctaatttttatatttttagtagagacggagtttcaccatgttggccaggctggtctccaactcctgacctcaagtgatcctcccgtctttgcttcccaaagtgctgggattacaggggtgagccaccatgcccagccacatttgcattgttaacaccacatcatacatattgtgattcccaatgaggaggaggttgggatgtacttttctgagagggtggatgggtaggtaggtgatggactaccatactttttctcacttgaaaaagctccctttcatttttaggattcattgaactgacagaccagtgccctaaagatgtcaggttgatcagtaattttaatttggaaaagctttttgtatttgtttagagagctgccctgtgtgaatataaccgcgagaccatctgtataagttcattactggccattccgtctcagttcactgccttcttacctaaatgcagcctttctcatacttgagggtagtgctagaattctgttatcatcagctacctgggaggagttggccaggtgcgctgggtctttgtacaaactgacttcttattttggctggatttgggtctatttgtcctgaagggagctgaggtgaagtggagtggaaatagtgttggatttggaattagaagctccattcccacaacgtgaccttggggaagttgctgcttaacctttcttggctttagtttcctaatgtgaaagggaggggtctggatcaaaattgtataatgtctgtggttccttcctgttccctctgtggggttagagatggctggaggagacatttgcattccattacccgatttgttttgtttctttcgcctttagggttattttagtaaaatttgcctgagaagcataatcatgcccagtgcagtgtaaatattcacacatccaggcacaaccccaccccaccccccacatgtacgcataaaatatgaatctgtctgtagtgaggaagcacagtacagtgttcattgctgtggatttttttctgcagtgcttgctgccagtcagctaaagattcctggagtagttatagtaataatgtcacaggaatatagaaagaaacctggcatctttgggagacctactgatatgtgacttctccacccctccccctccttttttaacctggtttgttaatgattgcacctaattatgtatctttggtctttttactgtttacaattcaaatgctacttaaagccatttgtttgcttttgtttgctgtaaatcctgggctgccatctgaagcacaacttgatgattgtgtattatcatcttgggttaagtgctgtctcattgctttgcaggctgcctgctgtttcccggggagatcatgaaacgaggtcgccttcccagcagcagtgaggattctgacgacaatggcagtaagtcctgctttgttgttcttggagcctaccagggtttgggtcggggtaaaaacatgattttttaatgtaatgctttaaattgctgaggccctttgcatgtcaggcaggtcagagaaagccaaagcctggagaaacgtacctgagtgtgatactgcaggtctgtaaccagatcttactgggtaaggttgactgcaggcaagcattcctgaggcttcctatttgttatcctgggaggaataatccagttccaagagtcactggtgtgtctggttttcctaaacatcatttatggtacttcgcagttgcgctttatgaaaggggaacttaatcaaagccaggtaatcattaactggttcaactcaatacaaggggaggttgaagactgcctagtgtgatgtgaaaattattaagtacaggttcttaataggtcgaaagtccctgctcttcacttggttttaatgtgactatattgaatactactgctgtctgtatctcagctctctggcaacttcatattttcacagtgcagctgagaaccagaagttagttggcttccaggcagtcaaaataaatatcacacagtgtctgtgtattgagaagctaacagactactcagagaagagctcccctcagataacagagggaaattttgtacctagcacagtgcctgagctctagcccgttagcttatgttttacattacaaattaaacccaggacaccttgaaagaatgtgtgatgggaaaggagctgggcctgctttcaaggaactctgctttagacatatgtaagaagagctctgatgtgaaagtcatcagggcagtaatagagatgtctttttgatgcactgtggaaacagatacagatacagattcagaggaggggagggcagggaaacctgcagaggagatgaaagttgtatagatccttaaggatgaaatactttttaggcaaatagggttattttcagttttctgtgctctaagttttcagcaagttaaaagctgcacattagaaagcaaggctttgctgctgtaggtgccaccctgttcagaagaggggaccaggaatatgaaaaacagaactcaatgtggtatttcggttggtgtgcttggcacaggcacaggcacggggcttttggggaggagaattggccgttatgggagagtgtcaggtgtgaagggcttgcaatgaggacctctaaggaattgagagttttagggttgactgctgatgttggcagcaggagagaagtgaactagttgagagagggtgtaggggctccagagcgaaagacctttcctcttatttcagagaaaggtattaaaggtctgtttccaa

SEQ ID NO: 113043 - DNA, 1836 bp, Homo sapiens
ctggccaaatatttcatctaaaatatatatgttcaggatgggcatggtggctcatgactgtaatcctgacacttagggaggctgagctgggaggattgcttgagcccaggaattggagaccagcctgggcaacaaagcgagaacccatctctattttaaaaaaaaaaaaaaattccacctagaactctggttaggaaggaggaagagagtgtccacagtccccaccaaaagtgtgtctgtcaactcacaagtctgtactggcctccgtcaagaagctggggatggagaattaaggtaaatatttataggttatcaaagggttagcctaggctaaacatggaaatctggtggtggaggagaggaatgatagttgctagtagaaggttggctgtccttttgtcatacagctggttcaatataaagtatatattgatgctttacagccatgctgtctgtccacgctcaatgatttgataaggtggatgatggtagtggtaaacgcagagttctcattaagaacccctgaaatgccaggcttataaaaagatgcacatactcattgccatggaacacacccctttccatcccctctgaaggcagctggttcacagcctctgccaccaactcactcatttgcactggagccttccttttgtatataactgggtggcctgcgtcatggggtgtgcctgctgtccctgctttcaggtccacaaaatgagccctacctgggttaactgcccatactctgccttccttcagccgggcctgtgcatttggaaagttctgcttacaagaaagatagggtctatgcagtggccacacctcagcctctccagcctgcaggcctgacagaattttggcagcacttcccagcccagtgcacaccatgtccaagtgaaggagaggcagctgcagacgtcagcatggggctgcagcacgagccacagccatggctgggacttgctggcctctggtctggagccctttgccttgttttctggcctggtccagaggaataccagtgtggtatttacagttggggacggacaggcattttctgtgccaggtgcaagcccttatacagctgcagtcatagttgaagcctttctccaggtgccctggaggcccagccctgcagttggatggaataatgttggggtgtttgcaggcagcgtctgcagttgctgggcttctgggactgggtggctcagccagtctctgaagttacgcattgcgccagagcatggccaagggaaacaagtccttaattttctgctttccagcccaggatcctgtccttagggatttggcacatgtgggaatagggtccactaactactttcagtacagttgatccttgaacaactccccctaccctgcaaatcaaaattctttgtataacttttgactcccaaaaatttaactaataatagcctactgttaaccggaagccttactaataacataaatcaacatattttatatgtcatatgtattatatactgtatttttacaataaagtaagctagagaaaatattaacatcataaagaagaggaaatatatatgtatatatataaaatatactattcattgagtgaaagtagataatcataaaggtcttcaacttcgtcttcatgttgagtaggtagaagaggagaaggaggaagagaaggcgtgggtcttgctgtcttaggggtggcagagagaaaattctcacgtaagtgaactgggcagttaaaacccgtgttgttcaagaggcaactatgtttctaaaacctaaaggacataccatgttatcttcagtaaacctgtagaggctaatttaaacatc

SEQ ID NO: 113044 - DNA, 2342 bp, Homo sapiens
cagagcagtgactgagacaggatgaccgctgtttgatcagtggcaaggttctttcatagtttgcattttgtggtgcagcaaacacgaagactgccattcattctaatttctgaacctttcatgcatggcacaacatgagaagcttatcacacaccagctaccaaatgtggaaggtgtgtgcagtatgtgttagatttactcttcaggttttccttattttagatctagggcaagacagcatggctatttttaatatttcaaaggggagtgagtgttggagatgtctgtataataggacctgaaggaacgttgtgcccgggcagggtccatgctcatggtgctacaaactctgtgccttttataactttatattaacccaaaggattctgttttaatggaagttggggatattaaaaacaagacaatgtttttccccactcagtctttcccatgtttaacatgaggtaatgtaatatagaattgtttttaacagtgtatgtcaagaattttaagtcctttaaatttgtcagtaaagtgaacttaactttaggtaataattttaccttgtgaatggcagtaaaatacttttagacattattagcagatttttagagttcctaactcctttcctgaaagcgaaaagaaagtaaaacaaaattttactcgtcatgtgcttaaattagtttgtcattaaatatcagcactctggaaacaaacaaaatgcaaaccaacccagtgtaatcttaccacgcggtttttaacaatagcaagcacactgtttttaataagtgcgtgatgttttgctgtagtataaatcactgactcctggtctttttagtatttaaaatattctaatttctggtttgaccccactgtcccacccccaatattttccagaaagtgtttataaattttgttttaattaaaaaggagtgttttgattttaataatattctggtagcttcctgacctcctgggaatgtctggggagagcctggctgtagggagaggtgttggtgtagcaatgtcaagacactccctttgagtctctagcctgtggccttccatgaatgtttctgtagatgtaggtgcattccaagcaggaaacagtggctccacaaatctatctttaaatgtattattgctttattttccttgagctcaaacgcatgtcttctattaggtgaaacaggagtaaattcttagtgcctgccaccttcagttcatgggttacagcaatggttacagcatgattgactgtcctcaacaatgacatttaaaaaaaaattatctacttttcaaagaaatattgagaatctgctgtgtgcacagcactgactaacttagctatgctctatgttgtaaattctgcgtcttataccagtggctcttgatagattaactttttggtacaacaagaaaatgagaaggaatagatcaccagcaaatacctgctcctggagatggaaggcagagcagttccctcgggttcacaaccccctcccagattctcacttggttcatcagcaaagtctaggttttatacagaccacttgtgtaaagtaaaatagaatttttttccccttactgttagtggatggtatctcagtgataaatgtttaatagctttattgagaaataattgacatacagtgagcctctgagcctcatatatttaaattgtgtactttgatacgttttgacatgtttatacccatgaaatcattgaaatcaagataatccttccctcccacttttctctagtcttccactgatctactttctgtcactatagattagtttgcatttctagagttgtatgtaaatggaataatacaatatggactcttttttttttggtctggcttctttcactcaggagaattacttcagcatttattcatgtttgcatgtatcagtagctcattcctttttattgctggatggtgttccactgtgatggtgttccactgtatggatataccagagttttttcattcacagtctgttggtggatgtttaggttgtttctgatttttggcttttctaaataagctgctaagagcattccttatgccagtgataatttaaatttagtttctttaccagtctttccctgtctgcaaagtgagtttaataggattaattttgcttttccttcttctgtattgtatcaacactaggtaaattaagaggaaaaggaacagactatttttgggtggactagagtttctcttggttattactattggataccaagtatgtagcatctttgtatatctgtttttaaaagcaaatgtggcatagacagcaattttcaggatttatgaaagcagtcctag

SEQ ID NO: 113045 - DNA, 2216 bp, Homo sapiens
ttcccttccccagaccttctgataattccatccagacactgcgtgtgcttttcctcgtctcttctttcaggctgtggaccggctggaggatggcctccaggacaagagggagaaagagaggcctctttatagaccctaggagccacccagccaccttcatctccaggttcctaacttggcgtctgtcttccttttttccagtaatgaccagatttagaacttctgcaggttgggctcaccccagtgtgcccagaatatttctttcagtgtgggagtgaaatattcttgttcatttagagtctaaagaggcacacttagtatttttttaaagaagaattttctaaaacatttactgaaatgccatggggccaccagcaggagctccagttctgctgattgtgctggtggaacagcagtcagttgacctagtaatgagcctcagaactggtgctcaagggtagtgccgatgttgtccctgtcagggaagcatggcaatcccatttggtcttggtcatcgcaaatctgatgataggcttatgtgcagaatctatttcttaaggtccccaaggtcttaagggtgctttgattctctgttcctgtctctggaatctgtagagataagagcttcctgtctgagtgacaaatgatttcactggcagaatggcagttaaccttaagcttttttggcttttatttttctggattttgttaatttctggaaaatggtacagtaggtgttcaggattggggtgatgattattaaaaataggaggtggaggtgaattatcagaaagttggacaaatactacatgtgggtgttagggttgtttcagatctctggcagcagtacggcacccacaaatggaaggttttgcacttaagttgtctttgtaacaaattaacaggaggcagaggcagagatggagaagaggagctggaattattgggaagttgaattgacctaccattgattgtgtcctgaatgagaagagtctaggacaactcttagatttctgacgtcaagtagaaatggtggtaatagtcatcaaagtaggaatgtaagaggcagaacaggtttgggtaaaatgttgagctcagtttttataatgctgagttgacagatctaaggaataccttaggattgatgtcttatgtgaaggtgaaactggatctggagcttgggagggaggttagtctgggaatgtaggtctggcaggttcctctgggtgtgctgggtaagactgtggacatgggtgagcacccccggggagaatatttggagcaagaaaagagcaaagagttcaggagaaacccatgttgatggggtacatggagaggaggaacccacagagtggaaagagaattgccactgaggctgagggagtatttcaggcaggatggagttgttggtgctgagaagtgtcagggcagagaagagatcagacttggcagcagttgggagaccctgttaggcagcagttaggtaccatgttctgggggaggccagatgataggagtagacccccctttggaagaaaggcagagaacagagccaactggaattttcatgggaaagtggagcaaattttaaaggttatttggcaattggccccttagtcttcactaagtttgtttacctcccgtcctctcttcttatggcactatgctagctatttactacaccataggcctgaggttccctgtctagggattgctaagtttttaggccttgtagagtgaaacctttttttaaaacagtgttttagaaagcttcctgaaaactcagtaagatgtttttcttttcttttctttctttctttttttttttttgacagagtcttgctctgtcccgcaggctggagtgcagtgacgcagtctcggctcacttcagcctctgcctcctaggttcaagcaattctcctgcctcggctttccgagtaggtgggattacaggtgcctgccaccacgcgaagctaatttttgtagttttagtagaggtggggtttcaccaagttggccaggcaggtcttgaattcctgacctcaggtggtccacctgccttggcttcccaaagtgctgggattacaggcgtgagccgccacccctggcctgatattttttcaatttgtatttagcagcatgagactttgaacctcttcagtgcaggcttatgggtgaagactacacctgcatggtgttcttaaagtcctctcttc

SEQ ID NO: 113046 - DNA, 2882 bp, Homo sapiens
atacagcatccctgcacagaatgagcacattaggcctgcttatgagaggtgagagttaaataactgatggacgtggaagagctctgtgagagccaggagggcatcacaggtggtctcatggtgcagtgctgaggtgagcctgggatgagtttgggtaagaaaacccctgagaacactcagtgacccctgcaatttctaatggttcttatttggatatttgtttctttaggcctgtcaactacttggtcccagaattcccgatcccagcataggagaagctcctgctccagacatgaagatcgaaagccttcagaggtacttcttgaatgcttgcctgaccgtgcatgaatatatgctatcccatatgcctagttgagtggtatctatttgtgcagtcctgggcaaattattcaaatccttgtgctccagtttccaaatctgtaagacggggagaacacaagtgtctacctcataggattgttgtgaggattaagtgggttaattcacatagactaatacatgcaaagcatgtgaatagttgctggcacataaaaagtgctcagtaaatgttagttattattattaattacattctttttttcctttcttgttgcatcttcgctggctcccaacaacttttcttcctctggccaggatatcagcaggttcagctgctgccaagtcactgccagcctcaagttagttttagccatgggtttgtggcttatttggcaacaagcaaaactctgggacttttgtttaggggattatgctgaaggctttccccattctttctcaatttgtttctcatcttatgtttcctctgctccctaacttttgttatctatctatctaaagttgcttttaggtgcatttctttctgctggtctttgtttaggggtccttatgagacctgaggtctgtttattctaaagacttttgctaggctttaaatcatcgaagaaaaacattttattttatcacagttttcaagtgagaaggttataggaagagtttctttggttgaatgctttgctttgtgctgcttcttatgggatgagttcacaaacagcctcatcctgtaatggcaatgcataggcagatattccttggaggaacttcccaggctctaatagggaacgtcagaaggctgccctgctgtggagtggaggagttatttggttgtggaatagcttcctccatgaggaagtagtttacatcctttagaattgtggaaaaccatcccaggaggcactttagcatgagatcaaatgtacttgggaaggtagccacttcttccccttactttatttcaggccttttttcctttgaacctttagtgctctcttccttttctttgccaaggagtgtctctgctgctctttatttcttaattccttgtgctgtgtctgtaacccccaaaatacctttctgatgttcacactaaactcctgttacttcagcacaggaatacaagggggacttagcagctgtgacctggtgtgacgagggctggtccccagtggtgtagttcgaaacctacttccagcagtgacaccaagcatggagaagggggcccagcagcacgggttgctgtgctggctttgtcccagccctacattttggtccagatgtttttctcaaccctgagtccaaactatatgtatggcactaacatactctaccagagactccagagttgacgtccatttgagggcctttgtttcagttcttgactgagtctttgagcaaaggaatagcaggctgcctttttttcatttcattgcttcagtttgattttctttcttttttggcaaactcctttgttttttatttatatcagttagttggaatatgtttttacctgattggctcttgaaggtataggcccatctcttaggttttaaagtacttttctcttgggggccagggagttggtgtccactgggctgggcacctgcttctgcggctctatgcttgaagggaaggatcctggtattacacgtgatttttgtgggaggtgcatggcctaattcttgcttgttaataggtctttagaaatgaagagtggcatactggggaatagtccgtatggaaaatgacaggcaggagaaatggcctctttattcagacactgcctcagactttattatggggaagtttattaaagtgatcactagcctgaaaagccaccaggaaaaacaaatatggacctattagcaggcgtatgatgtgaactgtgcttagtagcacaagaaagaactccctgtcctgagaaaagagagttcagcattgtgacttgtgtaaacagacagggcagcttacagatgcaagcttgctcgatgccaaacacaactttgggctggtcctgatgtcaaggtcagagctttcttatgcagccttagacaccagtgggccaaggacgaggcttgagagggagccagctgtgcagccctggctgggaggcggtgttgtgctccaccccaggggcaggcctcactgaccaaggatgaatgccacaggcccaggagtctgcagtggcataggcactgggatggctgcctttcctgtggtttccttcatttggcctgtgataaggaattggggagctctctcggtagaggggcactgttggatctgcctgtttttggcagagtggggagagggtagtgactttctctatttcctttccccacaaataactcttcccaggtagaagttttgccaggtgaaggtgtgcaaacatgttttttgcaggcccatcaacccagtggcctgtggttgcttctcttccagatttttctaggccagcccagaccttgacttcaccagctaccataccataaaccctggtgccctgggaggtagggcctgggtggggg

SEQ ID NO: 113047 - DNA, 1672 bp, Homo sapiens
ttctactaaaaacacaaaaattagctgggcgtggtggcgtgcacctgtaatctcagctactcgggggtgctgaggcaggaggatagcttgaacctgggaggcagaggttgcagggagccaagactgtgttaccgcactccagcctgggtgacagagcaagattccatctcagaaaaaaaaaaaaggagatgagtccctggtggttctgggttttggcttgaagttgttacatggttagtggagttatatttctagagcacccttgagtgcagtatctcccttcagagatttccaggtacatgttttcagcagcccttttggtgaactgagagacatttttcagaggcggacaacaagattttttgttgtttttgttgacgttgttgtggacactatggactgagggagtgagagggcagtgttccctcagcactgccaccccccatgcctgagtgaggtaaaaggcgtgtcaggcaaagtttttctgtaataggtcaggcttgttctatgttgatacagtgaccttgttacatggcagctccatggttacattgcagctgccagcactctgaataagaatgcaaatatcaaatgtcagtgtccctttctcttcctttccaggtgtttaggacagacctgatcactgccatgaagttgcatgactcctaccagctgaatccggatgagtactatgtgttggcagatccctggagacaggaatgggagaaaggggtccaggtgcctgtgagcccggggaccatccctcagcctgtggccaggtagagatgccctgaggacagaagcctctccacccacccttgctcttcttccctgacagcaggcatctgagaagagacaatttctgtgggaagagacagtttctgagttagcattaaaatatcatgaggcctcaagtggaaatagaaattcaggagcaacatacttcaggcatacagggtagtggttttgagggccatgagcctccaaacttaacattacagccaccactgtggggaggtgctgctttcttatgagaggaaggcaaattccaagacatcctgggaagtgatgggctaggggaggaaaatttgggtgttcacacgtctgcatcctcttttcctgccctccgtattcgctctggagagtggctctcctggagagaagcatctggctttgttgggaactagcgcgggcagctgctctgcctactgcggttgcctctgcctttggaggaggacaggtgttaggagacctgtcagttagggtttgtggagaggggagttttggagggatttattttgactggtcacattattcttggggtacgttctctggatttactgacttatctttaaggatccctcagggtcgagtccctgccgactctcctcacaatcaggttgcagctagtttactcatttcctcactgtgccactctgtgccacctggagagtcctgttaggagggaggcttgagtgccctctgtgctcagccggcacctggcttctccgccatcatcagttggctgctgctttgcgaaatagtgtctttctccacgctgagtcattactgaacttgcttcctggccctcacccactttgtgtctctttttttgggcacttaagattatcaaatttgagttgtcattttgggatctctggggagtctatcc

SEQ ID NO: 113048 - DNA, 8741 bp, Homo sapiens
ggtttaggtgaccagtcaggagtgccaggatggcccccacaggctagagtctggacctgtggaatggagtggtcatggggccctgcggggcagaccaggtatctgcctcagagcctgtgtctgagatgcagcatcacctgattcagcactggcagccccagtccaggaatcacttgctgaatgcttcactttcagtggggagccaggacagaagtgagcattaatacagcttgtggaagttttacaagctgtattaaagttggagccctgagcaagttggatccctgctcttggctgagtaggagaaataaatcccttcagtttgtccatgtcagtgtcacgtagataaaatcactcccgtaatataagggtgatgaaggtactctgacagactctgggcagcctgttgacagtaatttaaactgtggaaatgcatatgtggaaggactttgttgaggcctggggtctgtgattaggaagatggcctttttttggttccaagtcgggagtgatttgctcttgcacatgcagtcttattttgagtggggtgagttggaaggcaccactccaggtgttaaaggtcgggagagattgtgtggcagtaccaggaggagaaacttgtgcttttgttcctgggatcatgggtatatgttgggagagtcagtccccttcttggctgggactctgtttcttagattttttggtaatggccggggtcttatttccttttttttgtttgcgtttgagacagtctcactctgttgcccaggctggagtgcagtggtgcaatcttggctcactacaacctccgcctcctgggttcaagcaattctcctgccccagcctcccgagtagctggggttacaggcgtgtgccatcatacctggctaatttctgtatttttagtagagatggggtttcactgtgttggccaggctggtctcaaactcctgacctcaaatgatccgcctgcctcggcctcccaaagtgctgggattacaggcttgggccaccttgccccagcccaaggcctgattttcttttccctctctccctctttttttttgtgaggtgtgagggttggcgggtttctccctctggttctcagagtctgctgcgcctgccctgcctgtgtggtgccctggttctaatggcctccagcagggatgggcaggtctggttaagggaaagtgatttaatgactaactcttgaaatgtatgggtcagtgtgttttggtgttggctgcaggccagagtggtcagaggtggtgggcagggcacagcagggtcccgggaagcagattttgaaggcttctacagtgttttcatttgtatctattgcctgttagcaggctttaacaacttctagttaaggttttattagcagtgacattcaggttttcagcctctggtgatgacctggggctctaagggttggaagaggaagacatttggggccttgtggcacacttcattgtctgtggctgaaagggtaacctggctgccttgtttttttattatccagggttgtgtctgaagagaaatccctcatgttcatcaggcccaagaagtacatcgtgtcatcaggctctgagcctcccgagttgggctatgtggacatccggacgctggctgacagcgtgtgtcgctatgacctcaatgacatggatgctgcatggctggaactgaccaatgaagaatttaaggagatgggtgagagaccatgtattctattattttattaaccaatgatgaatagagacattttaggcaggtaggtgagtagcagaaagctccttattgccagttgcaggcagctccatcatagctttagtcagtgagaatcgcagccctgccttagatctcagcctgtttggctgtgtcagatgtgctgagatggtttcagagtggaagcaaggctcctcggctcaggcaccagggattcccatccccgctctgatctaactccctcattcacttaccttaaggaagctgaagtccagggaaacgaagtgacaaaagggcatggcccacagttacctgctctagtgtttttttcctgtgatgccattcggattccttctttagccgtggtttgctgcttctctaaatgaacactcttccaggcatgctccccatttccaagcacatcatgtgtgttttaacttgagcgattttccttatgtcatgctgcaaacctggagttctttttccctccgtttatctctgtcctggctttccttcagtgaagcctgacattagctgtgtgcccagcccttctccacctcttttctgcaagctcattttagcgtatgtagacgttggagcatctcatggtgttgagactgggatggcgtataggtctcatctcacatgccagtcctgattgctaagggttgccttgagggtcttgatgaacaagacagtggagtcaagtctgggctcagtgtgaaaaactgtgaggattaattagcttttgtgctgtaggtacacggtggggaggtggtggcaagggccatgtattgtaatctaggacatagtaaataatcacaagatcggccgggcttgttggctcatgtctgtaatcccagcactttgggaagccaaggtgggcagatcacctgaggtcaggacttcaagaccagcctggcaaacatggtgaaaccccgtctctactaaaaatacaaaaattagctaggcgtcgtggtgggtatctgtggtcccagccactcaggaggctgaggcagaagaatcacttgaggtgattcttctcaagtcacttgagggggtggaggtttccttgagccgggattgtgccactgcattcccacctgggcaacagagccagactccatctcaaaaaaaaaaaaaaatcacaagatttttgtcatggtggatttcacagccttgaagggccaagaccttttgcgtctttccagggaacgtagcatagggtgtggcttgcagtagatgcttgtcctgccattaggctcaccacctgttgaatgggagtgataatgtagactgagctgagcatggtgttgtcttctactcgctcagttactcaagtgtttttatagacaaaatagacttccttcttcttggtcctgctttaggtattaatggccaaaacattagcaggccacaaggtggttttatggcatgagttcaggagttctcagagatcttttggaattgaatactaaattttagcttcacagatgatacagtttctgctgtgttgtaagcacattataaagaccagtgtaatacacttgactggaatctaggtgtcctgtgttaagtcagaggactcagcccaaagactcttcgcatttatgaatggtttaaataataagaactgggctaatccatatttgaagatactgttgaatacattggcaagattaattttgtaattttataacataaacggaacgcatgcttaaatatgtttgtcttagctgttattggtctttttttctttcttttttgagatgaagtctcgctctgtggcccatgctggagtgcaggggtgcaatctcggctgactgcaacctctacctcctgagttcaagcgattctcctgccccagcctcccaagtagctgggattattggcacctgccaccatgcctggctaatttttgtatttttagtagagacaggatttcgccgtattggccaggttggtcgtgaactcctgacctcaaatgatctacctgcaaagtactgggattataggcatgagccatcgcgcctggtgtttcagtcttttttgcatttggttaactatgtttttcaaccttgtagaagtaagaggatgaggagggataaaccatttaaaaatatttgagtgcccaaagtgaaatctgttttgagagaactgttttacctaccaagaaaggcaaatttttaaaaacatccataccattatatgaagtcatggttttgaagtcacttacgtgttagttgttatgtgtaatgagtataatgaaatgacttattcaacaatgtatgtatttaatatccttgaatccttttaaaatttaccttttgcttttccatttactacactgcatcttcactacctgaccataggaaaataacagtttcctggaagactctcccctttgaagattgtttcttagaaggatctgataagcatttaataaaaaattttggggccctcagagatggatgcatcgatgggttgattgattgatagattgagacacggtcttatgtcactcagcctggatcacagtggcacagtcatggctcactatagccccaacctcctgggctcaagcagttctcccaccgcaggctcttgagtagttgggactacaggtgtgtgccaccacgtctggctaattttcatattttttgtagagatggggttccactatattgcccaggctgaccttgagctcttgggctcagatgtgagccaccacgcctggccagtgattggatttatttattgtacaattatttattcattatacattatttttaagtataaataaaccagtactattttgtaatatttattaatatggatttattaaaatgggttttgtggcatttttaacttcaggaatgcctgaactagatgaatacaccatggagagggtcctagaggaatttgagcagcgatgctacgacaatatgaatcatgccatagagactgaggaaggcctggggatcgaatatgatgaagatgttgtctgtgatgtctgccagtctcctgatggtgaggacggcaatgagatggtgttctgtgacaaatgcaacatctgtgtgcaccaggtatgtggggcagggaggccagaaagaagaaacctggggcatgagcctgtctgctgtgggagtgtatgcctggagtccaggattcttcctccgaatggggtctgtgtttctacgatttaaagaaatgtgccctatagactttatttttccctagtaggttcttacagtgattgaaatatatcctctgcttttgcagccagaaggatagcaccctctgtggaaatcgtctttcttcacagtgttttattcttatccataaaagtcaagtttacttaaaaagaatgtatgagccccctctgtcctactgtaacacttaaatttaggtattaagaacactgagaaaacaaacctttgaaaaggtggttagtgtgctgtattagtttcttacagctgccctgtggaacagacaaattactacagactgtgtgtgcttaaaacaacaaaaatgtattgtcttgtggttctggaaactaaaagtccagaattgaggtggtggcagtgctgtgcttcctctgaaacatgcaggagagcccttccttgcctcttcgtagcttatggtgatttgggcaatcttgggcattccttggctcgcggctgccttcatcatcatgtgtgttctccctgtgtctctgtcttcacatggtggtcttctttttttttttttttgagatggctggagtgcaatggcgtggtcttggctcactgcaacctccgcctcctgggttcaagtgattcttcctcctccgcctcccgagtagctgggactgcaggagtgtgccaccacacctggctagagatggggtttcactatgttggccaggctggtctcgaactcctgacctcatgatccgcccaccttggccttccaaagtgctgggattacaggtgtgaggcaccgtgcccggtccacatggcggtcttcttagaagggtaccagtcgtatgggactagagacccaccctacttcagagtgagctcatcttaaataattacatctgcaatgactacttctaaatctaaagaaggtcacattttgagatatttggagttaggacttcaacatgtcttttagaggacacaatttgccgtcatatttgtgagcatgtgttagggtataagctgagctgttagaggaaagcagccccttttcctgaagacgatttcctgtcttaaaaaacaggacagtaggttttggtgattgcttgctaccatccacagaaagggaaacccttagatttcaggaggatgggcgctaggtaacttaaaaagtttatgacaatctcagtgcctcttttttatttagtttttaatgcagtaatgaagaaatttggatttgggtggggacatgtgcccacgtatattcttaggatttaaaaggctatcctgaagtactttctttaaattcacctgttgatgctgagatttaaagcaaacttaaaagaaagacttgtatggaataggtgcttggtgacttcttgggaagaagaagcacgtttgctccatgaagttcttgattaccctttgcttcataatttgtgacctcctaggctttccctctgtctgaagacctccccagctgtggcccagtcctggctccttgatagggagacctgcgactcctgcttcagtcatcgccgtctgttgctctggatctcacactgtctgggaagtctccttacggtagtgagaattcctgtggtggctttgttctgtgacatgagcatcctgatgaccagtgttgcttttttggttgctggtgcttcatgtatttacttggctgacttctcagtctttttcttgtctttacttgctatttttttccccatgaaaaatttttttgagtaaaagctttctgcttgaaaactggtcaacccctgtgttatcagtgagttaactgatgtcagggcaggcttgtgcaagctctcacggtggacgtgtggcagagttgtaacttaaggcttttggatgcccccttctcaccttctcttctttctgccatatcaccttttctcttttcctcaacatttacttcatttttcctttgagaaatccttcatggcttatctttaaggcatactttatgtaatctcctaaattaatttagacctgcttttccaggaaaaaaatttcttccttcacatgtggctgtagaatgtctgatacagacctttagtgttttgaaacctttatagtgtcacttaactccattaaaaatttttttctagtaagtctgcgttgacggtagcttatttatggcccccaaacagcactctgaggcttccatctgaagtgtgacttttctttgctcaactctcatccttgtggtttcctctttgcatcgtcgtgggtattcagattgcatagtggctgtgttttttctgtctgaagaattagagctatgctactgtgactctcgacttcctgacttccaggtcatttatgaataaagtgctgaacagttgggtttttaaagggctctctgaatatgctcctggtaccatcgtggtttttatttattcagttatttaacattaaccttttctgtctttgaactgtcttaattactttagttgtaatagccttgatttctgcagtttatgccatcttgtttaattttgccatcttgtacaaaacaggctttgttttattttttaatttaaattgttttttttgtctccatttctgaaaggctgaatttgttttaaataccagctaaggagacgacattcttcctgtgtagaaggtctcctttttctgccctgttttgttcactgggagagtgctgggatctagttggtatggagtttgcttagcctagggagtgtgcatgcttctctcctgttccattgccatctcattcagcagctttgggagattctctcagctgctgtatgctttttctccacactctgtattccaccccacctctgtcagtaaagtagagaaatagcttctctcacggaaccctgtggagtgtttcgaggacttactgaggacttactgctcaatatttagaaacttggtatggatgggtttctgcggcaacacagcaaagcagatttcatttaaacctttctgtcctcaagtagtttccaggaccaccctctgctaaataaatatgtattgtgtcagcagagctcacctctattatgaatacatattcacctcctaaatgctcctgtgaggctgccgggcattttcccgaggggagacggtcgtagccaggaagctgtgggagcgtctctgctttggtggtagttctgttaaaatctttctaagtgtttaaaatgaatagatataatgggaaaaataacattttctctttctctctattcctctgggatgtgccgtggcatcacaggcctgttatggaatcctcaaggtaccagagggcagctggctgtgccggacatgtgccctgggggttcagccaaaatgtctgctgtgtccgaagaagggtggagctatgaagcccacccgtagcggaaccaagtgggtccacgttagctgtgctctgtggatccctgaggtacgtgtggttctttttttgttgtttttacttttttttaagacagagtttaactctgtcgcccaggctggagtgcagtgagctggatcatggctcactgcagccttgacctgctgggctcaagtgatcctcccacctcagccttttgagtagctgagattataggcatgtgctaccaggcccagcttattttttattttttgtagtgaggggatctcactttgttgacctggctggtctcaaactcctgggatcaagcagtcctctttccttggctttccaaagtgttgggattacaagcgtgagccactgtgcctggtcaagcatggtttttaatagcaccttagctcagaaggtcctggcttttaactgggatttagtgggtgggtggagaacca

SEQ ID NO: 113049 - DNA, 7248 bp, Homo sapiens
tcttattgtgcctcaacctttttaatttcaggtctggtctaatttatttctagtctcagaccttgactaatataatttgcatagctcagtgtgagaatataatttgctattcaaattccagcatgttttgggtgtgattttggtacattttcctcttggggaatattatttgaggatgatttggattgaggtttcatgattcgggtcttggtagcactgagtctcgtggtttggtattgatgggatacaattcggtgatccaggctgaatgcagagatgataccttatttatctttgtaatttcccatcttgaatgtagtcatgtttcagactgaagaaaatggttttttttggcgagagattaaaaacaggttatatttacttaccctgttgttgacaacctatttgaatcgatttaagatggatttttagtcttcaccaatttgttatgagctagagattatagacggcattgtcctggtacatgactctttgtcatcagacgctccggtgagaagtgaaaactcagttatctaagtgtttttgacagacagggatgtctgtcagatggggactgggctgtgagctcagttgtcactggggctgttctgaggcttttaaagtaagggtttgctttgagtgggtgccccttgccactgtctggtaggagagatgtaggaaagtaatggatcttttagtttctgacattcatgttcagcctttgacgacctgagccaccctgtcttgctgttttccgacctttaggtgagcattggcagcccagagaagatggagcccatcaccaaggtgtcacacattcccagcagccggtgggcgctagtgtgcagcctctgcaatgagaagtttggggcctctatacaggtaattagcttcctaagaatggcttcattttcctttcctgcgtggtggggagcaggatgagggaaggctctgtgaactgtccaagggtttggagaggggactagaatccaggaagcaggacgaggttcccaaggggtgactccagccccagtacacacacctttaataggctaactgtatccggtgtaactagaacccaagctttcacagtcacagggtagttcagaagttcccctgagctgtgaggcggttgcagtttgtctctcgctaccctttctgcccaaagtctagcatcgcaacttctttccataggccaacacctcctagcagtcttagtgagatgttccttgacacggcatttgagagttggccaccctcccacctgcagtcactgagtgtagctgcagaccctggcccacctctgtggcggcctcctgagattgcaggtttccatggtgtgcgcacatctgttagtaatcaaggggacatgctaatgcatttgcagttggaaaaacagagactctttgaacacggcctgggtagaggggcatctgtgaggagttcctgtgtatgctgtcatctcattggggcatcatttggatgtctgattctttatggcaccaggcgcgcatgcacgtgtgtgtgtgtgtgagcgtgagcgaaagagtgcgtgcacacctgtgtgtaaacatgttgcctgcctgcttttgcatatccaggtacagacaagtataggatgtcatgagataggggaattaaggagggaatatagatggcatgctgtttttcatgtggtctaagaccctactgagaagttcgtttttaggcctcacattattgacatctagacagtcaggattagagaggcctgcagtgctgtgtggctgatgggggcccttcaggttaagtttggatcttctcggatgtactagcacaggccacaggctcttcttccttggtttcctcattgaattctgggagcagaggcactgttttgggatggcttctttctcaaagcagctcagcacagacataagctccgagagcatggtcatcctgtcagccatgggttttaaagaaatgacctcatttggcaaagtcggtttgtattttgactgataaatactttttgggaaggtggttttaaaatttttttttttttttttgagacagagtctcactctgtcgcccaagctggagtgcagtggcatcatctcggctcactgcaacctccgcctcccgggttcaggcgattctcctgcctcagcctcctaagtagctaggattacaggcgcgcaccagcaagcccggctaattctcatttttgtatttttagtagagatgggggtttcaccatgttggccaggctggtctcgaactcctgacctcgtgatccacccacctcggcctcccaaaatgctgggattacaggcttgagccaccgcgcctggctatttttaaatttttttaacaagccaagtggttctacttttcttctttatcactttgactagtgttcaagaatccaaaatataacagaaatatttggagggtgggtcatgagacagctggtgggatttggctggggaccttgaaatagtggagatatttttggcatgtgaatacatgacaaacgcctctggcccgagttggattggggaaggaggaggaaagagtggagcaggaagagaaaagggcagggagctgatgaacttgagtgtgtgtgtgtatgcatgtgtgagtgtgtgtgtatgggtgtgtgtgtgagtatgcgtatgtgggtgagcatgcatatgtgtgcatgtgtgggggtgtgagtgtgcatgtggttatgtgtatgtgtgtatgcatgtgtatttggttatgcatatgtatgctgtatgcatgtatgcgtatttgagtatgcgtgtgtgaatgtgtatgtgtgtgagtatgcatgcgtgagtgcgtatgcgtgtgtatgcatgtgtgcatatgtatgcatgtgtgtatgcgcgtgagtgcgtgagtatgcacatgagtatgcatgtgagtatgcatgtgtatgtgtgtatgcgtgtgagtatgcttgtgtatgtgtgtatgcatgcgtgtatatgtgtatgtgtgtgagtatgcgtgtatgtgtgagtgtgcatgtgtatgagtgtgtaagtatgtgtatgcacgtgtgcactggcaggaaacaggctgcagcagaccacattccccggtgttctgagcgtagaatttatgcccttgcctgagtatgccaatctggtccataattaatgtttaaaagaggtgggcgaatgggatctttgtttcccttttgaagagagatgatataatgacttttttgttgccattgacctctttttcccagaacattaatctaaagaagaggccaaagaaggctgatgatttttcatatcttcacagaatggattgattttattaaaagaattcctctctgaaatgtctgcagctgtgaaggctctggtttacgtttctgtaacatctgtttgctgagtcaacctgaatgggaaaacccagaggaaggccatttggcgtttttacaaagtcctgtataaatattctgctgcagttcatttctctttagggttagagcgcttgggttaagtgtagtttaagccaaacacagatagtgtctcagtcatctgttcccacttttacttcccacttggctgtgtgctacaagggaagacactttgtcttctcatgacagtggccaggtgtgtatgtgtgcgtgcttgtgtgtgtgttctgccaccaaagctgatttcatacatttcttagaattgaggttatttatagagaaaatacagatttatgtcagtctctgtggttgaagtgtttgtaagggtggaatggtgaagggagctggattttctcctcttctcagtaaaagagacctcatagtaatggaagaaagcctggttggcagtgagtttcctcttaaatactggaatgattagggggaaagcctcagctctagcctctgccatccttggtgatgtgattcaggatctgttgaatgagttgaattcaacttctcagttggcttgaagccgctggattctacagctctgtgcagcccctggcatgccccggtgatcacttggcttcacacaatgcagtgctgcttttcagggactggcttcagtcaccatgaggaaccaccttctagggatttgctcagcaagatcagtggaggaggagttaatcactttgctcctgctagaccagaggcttgttgtctggatcaaaggcactaaattgtggccctgtttaggcagtgagaggggaagtgttcttctgcataggttgctgatacctggcctctacgttgacctccctgtgacgcatgggaaggatctttcacggttctcctgcctctcttcagtggccaggatcggcgtgcaccgatctcagggctcagagccctccatgcatctggtgaagcttcttcgcaagtgtgaagacctttccctacctttcctgtgctggattcctcttgtctcctattttttggggtttttattcagtttctccttcgtgctgcttcaaggaagtgcactgttcattttctcactcgtgttgggactcttcctggctggggagtcaggatttatgttcaaactgtgagtagtagtcattcttcccaaggaggttcttattcaggtttgcaccaaaagagctcaaatctgtaagaaaacccaagttaatgcctgaaagtggactttgcatattgagtacagattcttttgaatatgatcctagtgccacacctcctttctctacacatgtcatttgtgtaatcatgtctgctccaagatgggatttggatgcagttacttttctgaggaagttagggtttggttgattaaacctttcatttgaagagggcccttaaattccaagacttggctgggcgcagtggctcacgcctgtaatcccagcactttgggaggctgagatgggcggatctcttttgcccaagagttggagaccaacttaggcaacatagggagacctcatctctataaaaaaaattccaagccttacctcttttaaaacatgacaggatcttgcagggttaatccacgtacaactttcctgtcatggcacatgcttgaagcatggctcttctctgtgcatgtgtacatggggtgcctagcactgcaggccttctgccatcattgctctataatggtctattctcatgttctttgtgtgttcttgacagtgctctgtgaagaactgccgcacagccttccatgtgacctgtgcttttgaccggggcctggagatgaagaccatcttagcagagaatgatgaagtcaagttcaagtcctattgcccaaagcacagctcacataggaaacccgaggagagtcttggcaagggggctgcacaggagaatggggcccctgagtgttccccccggaatccgctggagccctttgccagccttgagcagaaccgggaggaggcccaccgggtgagtgtccgtaagcagaagctgcagcagttggaggatgagttctacaccttcgtcaacctgctggatgttgccagggctctgcggctgcctgaggaagtagtggatttcctgtaccagtactggaagttgaagaggaaggtcaacttcaacaagcccctgatcaccccaaagaaagatgaagaggacaatctagccaagcgggagcaggatgtcttatttaggaggctgcagctgttcacgcacctgcggcaggacctggagagggtaatgattgacactgacaccttatagtgacttagagaagaagatgcaaagaggcgaacgctcgcccagagcaagaaatgatagccagtcatatactctcagacccttgtacacaccacagcatgaggttgtgttggttaaaaatatttatgggctggtaaactcattgtacatatgtgcaaaactgctactgagtggggagcttctttgtggtttttttttttttaaaaacactttcccattaatctttactgttttgtaagatcaaatggggtgtgtcttccccacccccattccttcattctagagctagagtgaatgagccccaagaaaatgacccaaggagttgactcaggatggtttacagactgatttagaaaaccagaacggatttcatttctaatggagggggccagagatgggaaaatttcttgttcagtccggggaaacacacctaggtgctggtgatgggcttatgaaggaagctaagcacggctgctcactggcccccactttgtttcttgggtaattcacaggggaattcccagtactgtcatggagcagagcaggcagtgggtgctgatgtgtgtgcatgagctgtatgtacacatgcatatatctgttacagaagatactcctggcagtgaggtgctaagtcatcactgaggctgtgtgtgtgtgtgtgtgtgcgcgtgcccgtgtccatccatgtctctgttgtgtgtctgtgtgcgggtatgggtgggattcctggtggacaggggtgtcagatctgtctgaggagccccagtcatgctcagcacgctacagatgtgttgtttgtcacactgagattgctgaatgtcgtggctgttggctgccgagcctcagctgctggcatttccttctgctgtttgctgcttttgtgcctcccccactttccatcacctctggagtcccgtctggacgtcccttcctgctacaggaataatgaggcgtgggctgcctcccgctagggcctcctgctccctgtaggtagtttctggctgaggcttgctaattggggatgcttcttagagcatcttccacatcaactcccctggctgctggctaccgattaaattcattagtgtgaaagaggtgggagtgaggttttctggcctgaagcagtctgcactgaaaggtacccaagtggcctgaaacagtgtagggaaagacctgggaaacactggaccaaaaaagcctgatctcatggagacctgcatggccctgttagagatggcgtagaagtgaaagtcttaaagggagcattagagatccttttaatacacgactgagtgccagcttatttgtgatgccccttcccagaccaggttaggattcctgggaaggccgcggattccggccctggaagaggcaggatcctggagcagttttgtgaggcttttgtgctcccatacgccccctggtggtgagtgtaaagaagactttgcctctcacaactacatgtatgtgtggcatttttgttagagatgagaaaaggattgagaaggataaactggaatcctggtaagaagcctttatgccagcccgacacctgctgtaattggggtgca

SEQ ID NO: 113050 - DNA, 1449 bp, Homo sapiens
cactgtcgctgtttaagtagaacaatgccaacgatgtatgagaaacagggaataaatcaggatttgtgtgtgtatgtgtgtggcattacttacatttactttattaaaaagcctaaggaactttaaagaatttgtattcagtttatttttattttttcaagacagagtctcactttgttgcccaggctggagtgcagtggcgtgatctcggctcactgcagcctccgcctcccgggttcaagtgattctcctgcctcggtctcatgagtagctgggattacaggcgtgcgccaccatgcctggctaatttttgtatttttagtagagacggtttcaccatgttggtcaggttggtcttgaactcctgacctcaagtgatctacctgtcttggcctcccagagtgttgggattacgccactgtacccagccttagactcagtttaaaatgggcttattgtaatgaaaaaaaatacgctacccaaaatttgccatgatgcctgtgatggtgaaggcattaaacaattgaaatctttgccttgcccagagagttgcagttatttgtaattataaacagtaagtgtatcagggcaggggtgacaataaaaaaccaatcattactaccaacttgttttctcaagtaagttagttttctgtttaattcacacaatatcagtttatagcagatcctcaaaaatcatttaatacctgtgactacaatcaaggcatatgatcattctcagactgacaaataagtagccatcattagaaatgcagacaactgagtaattatggtgactgctcttccttcagacacacacctcggggcattgcatacctgggtaccagttctggatctggaagttaggtgacaggagtagatttcaggagggcttgggagcacacaactttaagaagacacagttgctgatgtggtgggtagccatgtcattcccaaggctgccacttcactctcattcctttcccctaaaagatgcagtaaatgtgagttcagcaaatgagtatttattcagataaagacgtgctaccactgcactctggctagcgttatggaaagtggccaagtcctgggggcagtcctgtagtcactcagtggaatggtcacctttgaaaatctggtagtggctacagtgtcccctgaacaaaaggcacgttcaactttagtgctgcaaacagttttggattcaagaaaacactgaaaccacttttagatgtcttagagcagtgtatctcagggtgttgtccctgacccagaaacttaggaatgcagattcatgggccccacctccaaagggtggttctgttttgtgggtaccccatgtttctgtttgggaacactgctttaggggaaagggatgatcaggtttaaggtggtgtgagagtgcacctggagatggtttaaatgttttttaagatacctccttgcaggc

SEQ ID NO: 113051 - DNA, 9438 bp, Homo sapiens
tgaaagcctgtgttctgtctctcttaatgcttcatgtcctcttgcaaatgagactgccttcagcacagctggaattattagggtttagtctacacttacgctctacaccagagtgcaaaatcttttgtgtcttcacaaggcttgttgatgcttgttgctgtcctcactgccaaaagaaaaggttggtgacctttggactttttccacttaaagtagggtgatactactttattgagtttatggggaaaaaattataaaggtgtcaggggaagagtttgctcataatgggatatttttaggaaagtgaaggcatgcctgtaggagctaatgggaaagatgtggtcagataaagatgctaccactcctgccactgagattacttaggaggtcttgtccacatattcctgaagaagggtttaattgtgtatttggtgtgctgtgtctgacatctgtgtttgcaggtccgtgtaatctaatcaggttgaccaatagaagattttaggactgaaggattaggggagtttagagactaattctttaagttttgtgtattgagtgatgacaggtggggaacaaatctaaatgttgattactgagcataggttagggttatgtgatccaaagcagtcacacatcagataggaagtagagccaactcttagcactgggtcttttcagttacaagcgaatcgggagagggcaataccagtttttcaagtgatgatgcagagaactggactggagatgtctaaccagcaaatcattggcaaagctggaaatttcctaggcattcgcacacctcatagcaacacataagctacctgctaactccaggcctttcagtgagttcagtgtgcagttgacaaagacatttactaggattcttggtaaccatttggtcttccagtgggcctggtgcagggggctccactttgatgacccttggccccatgtttacccagttcagcctcagaagatagttgataaagtgcagaagtggcttctgaactgctttaaagccattggccatccaagtaatagaagatattgatgcaataattagcaaagtcgactggcaagaggttgcaagttttgacttggacaccaatggcctctgtgccgggatgggttaggtgtgatggaggaggcaggacttttgtaggagttctctaggtgtccctcccactcctgtgggtccctaaccctcttcgatgttgcttctgcctatgttgagggctatatgtggaatccttcttatctgcccaaaaggagatcagagattggataaaatgtttaaagtacctattgatttcaagtatctgtcaaggccctagtaggagtaatttctcttaggtaaagaaatttaaaaagcaccaaagtactgttatactgtattgcttacttagaatctttattctctacattctaggttcggaacctcacttacatggtgacccgcagggaaaagattaaacggtctgtgtgcaaagtccaggaacagatattcaatctttacactaagcttttggagcaagaaagagtttcaggtatgcattaagccctggtaggtcaaagtatagggcaggggtttgtaagctttaacactgttgaggaagaaataatcatttcttaattttcttatagaagaatttaagaagcatagacgttcatatttaaaggaagtctttaatttgaggcatcatgtttaagggaaaaagctatgaatttgccctctataaatatgggtggaatcctgtgttctctgcttactgagcaaacacatgaaagtcttttgagtctccctaatttcttcatgtgcaaaatggagatatcgcaagctacctcttggaattgagagactaaaatgaaacagtgacttatatattacacagtacttggtaaacacatcatggggatacctaacaggtttatattcagccttgggctctatctgtaacatggtaaatatggtcaatatatgttaagactgtacttaagacacagtccatttttagataatgttcacagtagattttttttgtgtagatggattgttgactatttctgagattgagcaccaaatatttatttagtgtcttctattttatattgccctgggctaggcaaacagaaaaagaaaactagggtatatacttcctctactctggacaacacatcagttacttgggagatcaagggcaaagatcaagttgggcaggttgtttaacctctctgagattccgttgatcttaaagtttgttttagaatcaagaccccttaagtgcatttgagccctatattctgtgatcataagcccccaaaagtaggtagtataaggatttcagagaagcagagctgctgagtgtggatcaggcagaattagggacccatggaacaggtaggtcttagactggacttcattggaagatagtcagcctctctcctgccttggactgccctttaaagttctagctgcaccattcttggtgcttgcgttgtgcaatcatagttgattcactcttgtttttgtgcatttgtggctttttgtcactccatctagattattatggtgcacagagaacaaagaagttgttataacctgttgtgttgaaatccaaattctggtttatctaaccaattatgtgcgactagagggagctcggtcatctgaagaaataaaaaaaggtttagggaggtttaaataatgttcttgaagtgttacatagtttgaatgcaataacttgttgatatcctagatattttcttcccaagattaagtattttccaggtgaatcaagtgtatatcattagctggaacttgcagtttaattgttaagattttaaaaataaattttctaagtagggtgtcatatgtaaaagtaggtcgattcagattccctaaggtgagctctctcttcatgattcctacctgaatacaaataaatgagatctgtttaactgccttggaagactgtctggtgcagatcaccgagcctacagcagcaaatgctgagctgggatcactaatacaagttgtgcctgtggagttgtgccattggagggctttctgcaactcttaggtcattatgtaatgagtgattccctgtaaaaataagccgtaaagagcattttcatctggtttcatttgagttatttctcatggatattgcaggcaggtttttgcatttcatggctgaggtttttactgggtgagcgaatgatattcttaataagtctgggagttattttgtggtaacagagctgtaatgtagatctgcattcagaagtcctactatttcagaaaaggaaaacaaatcttcctttcattctgatgtaagaaccataggtatgatcagttgaaaacatttatcttcctgtaggattctgttgagtaatgcagttgaaaccctttagggtgctttttttctttttccagtcctaggcttcagtcgtgttcttattcatgcctaaaggctgtctcctgcctgaagtagagcagatggtcatgatttatatgtcatttagggtccatggtttaaactctgtgattctgagagtgggtagggtcatttgctgagagtgtcctcagtggcaacagtgcttatggggggtgggagggtcatgagttggaggctctttagagacatggattacagtcaaggagatagaaatcagagttcagaaaatgttagcctcttcttaccattctcttttcctgtggcaggtgattgagtaaaagaaatatatgcagtgtgatgtgaaggttgattctaatgattgattcttgagaaagcagcatttccaaaccagcaggttgtaaaacacctcctgtggtcatgacagctctgtgttctgagtcgctagctatgtttcatttgcttgcagtgtctgtgtctggtgagcactaggttctcatatggcctcctgtctcataacctgggggctgaaccttgttttcttggtggctcatatcttatgggagacagaaaacatgagaactgctctttctagatgatcttgaggctgttgtagaatcatggtctttatgacaaacactaatgtgttatgaattcacctgctaggggtaacaactcattagtgggttgtgagatgaattcagtgggtcatgaccagtattaaaaacaagtaaagtataataggaaatgtcagagtacattatcaaatgatgagggttaatattatttcgtgaaatgtgaactcttactaggtcatgctgtggaatttagtcactgtgatttgcatcaaaaaatacgaaaaacatcaatttaacttacttcaagttgaatgacaattcagttgaatcccacaaatgtattttgcacataataataatgaacatttttggaacgcttactatgtgtcaagaattatttcacacatttcctttattcattcacatgtttacatgtacttgtcctcgtaatagccctgtgagggtacagacacatagagaaacttacaagccccgagccctgctttttgggtcctctcagtctcgtacgggaggcagaagactggaccgtggaggagcgcggcgcaggtgctgctctgtaaccaggtagagggagcagaggcagccatcagccacctgatgagttctgcatggagtccgctctgaaaatcagatcagttattttgtttggaggaggtctagttttatgaaaaattatgtgagcttcagctgttttagaaaatgtggcatattgagtctgcagattgaatggagattctcaaggcaggtcatctcttcactataaaaaccaaatttgtacaaacttggtggtgtaagtgttgtgttgttgggtggggagttcacatcaattgggccacactaagggtgtagaattttattcttttggatttgcttctgctgtaatttttctttatttgtggttttatgtttataggtgtgccttcttcctgctcctcctcctcactggaaaacatgcttttgtttaacagtccttctgttggccctgatgctcccaagatagaggacttgaagtggcattctgcattcttcagaaaacaaatgggtacttccttggttcattcgctgaaaaagccccataagcgagatcctttgcagaatagccctggaagtgaaggcaaaaccctgctgaagcagccagacctgtgtggtagaagggaggggatggtggtcccagagagctttttgggtttagaaaagacctttgcagaagcacgtctcatatcagcacaacagaaaaatggtgtggtgatgccagaccatgggaaaagaagagacaatcgttttcattgtgatctcattaaaggagacttaaaggacaaatcttttaaacagagtcacaagcctctcaggtccacagatgtgtcccagaggcatctggacaacacaagagctgccacctcccctggagtggggcagtcagcacctggcacaaggaaggagatagtgcccaagtgcaatggctccctaatcaaagtaaactataatcagactgcagtcaaagtgcctacaacacctgccagcccagtgaaaaactggggaggattccggattccaaagaagggggaacggcagcagcagggagaggcccacgatggggcctgccaccagcactcagactacccatatttgggcttaggccgagttccagccaaggaaagggcaaaaagcaaattaaaatccgacaatgagaatgacgggtatgtccccgatgtggaaatgagtgactcagagagtgaggcatcagaaaagaaatgtatacacaccagcagcactatcagcagaaggacagacattatcaggagaagcatcttggcttcttgatgcaacagagatgatgcggaagccctttgggctcgtcattgggtttgctagaggagagctctgatgtgggggagaagcagaaacccattaatcctgagctacacaaacacatttacttgcaattcagattaatttttttccagagtcatttttaaatcatttttgtgagaagtttgtgttatttgcaacttgttgaggaaacagaagagtagattgtaaccataagacactgctaagactagaacccgaactgaacactaaaataaaaatgaaatgttttaaagaaggcaaggcttaaataagcctcatgaatttttatagccctctgcattcttcccaaagcacaaactcatggttacctgaatatagggaaccagatatggttcttgagaaaccctcatggtaccattcacagcccataaagtttattttctaggactgtggtagatcttgaaatcatatttatatttggccctcaaggctatttttgttgcattatagcatataggcagcagctctgaagcttcagtaacactaagaaatttatgtgtaaatatagcagtcagggaagagaattttaaaaaaggtcattattgaagaagctgaggggacagggtagagctgctgcaatatggagatttagggtaatatggcaaggtcctgctgcttgaagcctgtgagtgggttgtggatatgggactggtggagagtgagactgttaggaaagttgtatctatgaataagggcagttgaagtagaatttttaccagtccacttgaccttcttcttccctaaccactggctcttgagccagcttgggatttccctggccattgccaatacctggccatctggcttccaatagtacagtggctactcaagttcaagcgaagaacttccagactctggtgactgttacttcccagagccaaccactagtgcatatgttagggaatctgggcttccaacatgaatggattccttaagaaaaaggaaaaaaaaaaaaaaaagaaaaaaagaaaaaaaaaagaaaaaagaaaaaaagagaaaaaagcgaaataggttatattttaaaaacaatagaaaggcaataagttgcgataagctcttactattgaccaaggttatacaggaaagagactgaagtgtacccttgaataggttttctgtagtcagagttctaaactctaatttgtaacttggactttctaattgcaaatggcaataactattaagttatcagcaataataaatttagcattaaatttgagtacaatgttttgtttttgcactccccatagtgcgtatgtattaagacagtggatagtgtttaggtcctgttaattttctttggaattcaatgtggttgtgaatcaaacttaaggaaggaacgtttaaatagcaatgagatacagaattatgggcctttggaacaagcccgacttcccctaaattctccttagtttgttaataccagtattcagattcctgattcatttatacatctgtttccatatggcagggacattatgatacttaatgaataatgctttgaggagttctgcagttaactttcaagtcttccagatgattgtcaacaacaaaaaaggcttattgaatcccatcttgctatgcaagttttatcagatgatcaaatagtagatctgatacatccccattgtatgtacgacattttcaaaccaagtcttaacttttcaaggacattttagtagctaattcaggggagggggaagaatgatgcaggtttttagattgactgactatttttgagttatggggctcattttgaaagactgctgtccagatcagcttgttgctgcagataatagaaggttcttatgaatccaagttgtatattcacttgtaggataatttaaaaattagattttttttgcatatgagcaaaaaccttttgctggatacaggagaaggttggactttatctacagttatcttttgattacagcaacagctctgggtgagagtagaatttatagagggataatttgtcaagccatagaaagaaaatctaaattaatctagtaagtgtatgacctctcaccattttaagaggtatcagattcatttgcactattaggaatgctagttttgtgcaaaaataatgccttacctgttttttccccacatttaggttgaaaagctttcaaatgttccaagttatgctgaaccaaaaaaaacaaaacaaaaacaaaacaaaaaatattaaaaaaaacccacacaaaaacaaaacacacaaaaataaaaagcccacactttttattcctgcttcgaaatgcaaatggatagagcacggtttctctgacagtataatgatagctttgtgagttagtttcatgtcatgctgggaactctctatgaggtggccataagcagcaaccagcccaaacacccacttgcgttctattagtatggaaccatttgcatttgttttttttaagctttatctttccttgtgcatcctgaccaagaaatatctttgattatgattaatgtattatgtcaaaatgtaggctagttaaacttttgtaaagttgcctggaatgtcatttgttaggttataaacacaagatctaaatgaagggttttatgtgttgtgtacaaatcttattttgaaatggacaaacttgtcattacatttgtaaccttgtacagaggatttttcactatgtgcctagcttggtgtccattcagctaaaattgaaaaaaaaaaaaaggtgcatgaagagttaaaaatcaaattaaagtatatgtagagatgactattttatattacatgacccaatcctgtatttatttctaccccctttttgaaagtatttataaaactagttgaggacagctgtatttttttgttgaactatttagtagaattgtgcctttttgtctgtatgtgaataaatgctgtacattttgcaatacattttaagtgtcttttgaaatctgcttttgctaaatatttaaaggtatatatgacttagcagtcctgaatcagttgtttactgtcttccactttaaatcaggaatgagaactgtagagaacatatcaaatttgtgcagagcacagattcactgggctgctttctggctcaactctgatggcgagactgaaaaataacggtttgagtttagtcttccccacctggagttctttccagaatacagttttggatctgaaaacagaatcgttgaaacaacgtagacttcagggtcagagagaactgtatttaaaggctaaactatagtttaccaggcacatgacattggccaagtcacttaaccgttttaagcctcagttttcccagaaagaggataacatcttagtaacttagatattgaagtagttgtgattatttaaagcaagtccattgagcaccttacagagagcatatattaggcatttagtaagtggtaggctattatttttattaggaacaagacactgatgtttacaatattttaactaatgagctttctgaggtgaaaaaatattcctgaatgatgggacggttgtatttttaatacaacctttaaataatttttaaaaataatttttcaaagag

SEQ ID NO: 113052 - DNA, 1072 bp, Homo sapiens
ctccatttggatttgtaaagcagcgtggtagatactgtggaaactaaaaataatccttcttttaaaagtttctcctgggtacggtggctcacaactataatcccagcactttgggaagccgaggtgggaggcttgcttgagcccaggagtttgagaccaacctggacaacataatgagacatcatctctacaaaacacaagattagccaggcaagattagccaagccagctgcttgggaggctgaggtgggaggatcacttgagcctagaaggtcaaggctgcagtgagccatgattgtaccactgcactccagcctgggcaatagagcaagacccccatctcaaaacaaaaacaaaaaaaagttcctattccacttagaagaatgtgtgtatgtatgtgtgtgtacatatatgtgcatatctatacatatatgtaaaatactagcattataatacaggattgataaatctcttatacataaaataagtatttaatatcatagagatttgatgtgtaaagaaagctgtctggattaaaatgaatggaaaggagacctgaaaagaagggggacaagggtgcagtctttttttttaattttttttttattatactttaagttttagggtacatgtgtacaacgtgcaggttagttacatatgtatacatgtgccatgttggtgtgctgcacccagtaactcatcatttaacattaggtatatctccaaatgctatccctccccccccccaccaccccacaataggccctggtgtgtgatgttccccttcctgtgtccctgtgttctcattgttcaattcccacccaagagtgagaacatgcggtgtttggttttttgtccttgcgatagtttgctgagaatgatggtttccagcttcatccatgtccctacaaaggacatgaactcatccttttttatggctccatagtattccatggtgtatatgtgccacattttcttaatccagtctatcattgttgcacatttgggttggctccaggtctttgctattgtgaatagtgccacaataaacatatgtgtgcatgtgtcttta

SEQ ID NO: 113053 - DNA, 1050 bp, Homo sapiens
gacattaaggaaatttgcaaaagtattttaaaaatgctactcttctcaaaaatttttagttttggagaatatacttatttcttataaaaatattgttcaggttaatcggtaagaaattactttttaagagattagtaggtaaatgtctttaaattttctgttttcatttctaatatggtagattttcatagaacccattataagcaaaagatcttttttttaattgtgggtaaaagcatcctatgaccaaaatgtttgacaaccacggtccttttggatataccattctattcactctccttccactttcatggcaaattcttggctctttaatatattatgtgcttatttgtcttttatgccctaaaagttacaattttatttttatcaaaattattatcctgagtgtttttatcagatattaatcatttttattctagaaccaaataatgagtaaatgtcttaatttacaggttgcaaacaccaaaaaacaatgtaatatacaaatttctcgattaacagaagaactttcagcccttcaaatggtatgtttgactatactgatattttcttccaaatattacttattttaaaggccaagatatatactattggggattcattcattcaaaagatacttattaaaccaagccctggctaggtgctaagaaaaaagtgaaaatccagatagacatgtttgcagcagccttgtggcttatgttctagcaggaaagatagatggcatttatcacattttactgtaactacctgtctttgacagagaatgcacaggatgctattgctagctgtagctcctatcatatgctgagtttatctgggaaaccaaggagaaagagaaagtatatataacagtgggaaggaagaaatacagaaagcttcctgaaagaaatgaatactgaggaatgagtaggccaagaggggagaggaaaagaatacttgtgtggctagaggtgagattggaaatagaagtttaacttgaagatttgatgtaatgaaatttaataaccttgcttataggagaataaaagt

SEQ ID NO: 113054 - DNA, 1072 bp, Homo sapiens
aaaaggtttgtgttagagatgtaaatatggggattgtcagcatataaatgatatttaaaactgtgagatttgattagaccactaagagaaggacagatagagagggggacaagaagtgaaccttgggtagtccagtattaagaggttcaggagatgaggaagaatcagcaatgtagactgaagaggaatgatcagtgagataggaggaaaaccggtactgtgtgtgatgtgctgaaaatcacatgcagaaagtacaacaaggagaggaaagtaaatatttcaagtgctgctggtaaagaagtactgaaaatttacttatagataatcaatatggagatcatggtggtgaaagcctgattcaagggagtataaaagagattgagaggaaaagtcttggagatgaacaagttacagagttttgcttctcagagaagcaaggaaatggactgtgactgacagcagagctaggattatggcaatatttatttggtggaggatggaaatgattggaattatagaaatacatcaaagagacaaaacaagtagtgtctgcaatgatcaaattatgagttaatgagtgacataatttgaataatactaaataatggaaagagagagaaattcaagagattcttataaggatacaatacctagatttgattatttactttatatagggacttgaaaaaatggaaaattcaacaatggttttaagatttctggctgtagagattagaagggtgttagaaacactggctgaaataaataccatagagaaagtgtctttagttaggacaagggcaggtgaggaggttagggaaaataaatatcattcgtgatttcaacatgatattcaagtagagatgtcccagaagttttgaataaggaagtgactagtggataggttttcacctgttattatctttactaataataatgttatctataacatgaaatgattattttctgaaggctctacttgaggagaagcaaaaagaagaagacatagagaaaatgaaagagacagtttctcggtttgtacaagatgctaccataagaaccaagaaagaag

SEQ ID NO: 113055 - DNA, 1057 bp, Homo sapiens
taacattctctctctctttctctctctccctctctttctctctccctctctttccctctccctctctccctccctctccctctcctccctcccactactccttcccctcccctctccctccccccaccttttccttttgccctctcattcatttatgattgatttacttgtctcctatgccccaggtactatgctatctcctgaaggtttaaaaattaataagatgtgatccttgcttttaattatcttacattgtatattttttatgaactcacagttccacaaaggagaatctctatagtattgattacaatacagtgtgttcaattaataatgtataaagtattatatattataagtattgagatatagggtttttgccaaggagaagttagtgaagacttgaagatggggagatttttgatctaggtcaaaattaaggaattggttagaaaaagaagaagactagtccagccaaacatgtgaaaaaagaaacaaggatgtgtttagaaaacagcgagtgagtactttattatacttggaatataaattacatgggggtaattggcaagagatgagactctttgaggctagatgttgactggccttatatgccagtagaggagtgtagacttatatgtagaggagtgtagactttatgccaaaaagtgtggaatccaggaatcattgttaaataggagtttttattactagataatttttttaacagataagatacattataaagaatgaacaaaagaggagaccatcagtgaagagatgagtttggaatctactggaatagtcttatgagtgataatgaagctaaaggttgggccaaagaatgaaaaaggaatacacaattgaaagacaacttagaaatagactcaggccaattagattgaaataaggaaagaatctaattctagaattttggtcttggcaaattgcctaatccacctctgtttttggacatgaggtctttgagacgtgcagcatggtcaagtgaattgtattaagacatattactagttagtgacagaattgggtccctgcc

SEQ ID NO: 113056 - DNA, 1136 bp, Homo sapiens
agcctcccattgttgaccatttttatatgtttatttacctatgtggttttcttttctcataaaatgcttgttcatatattttccccatttctacttatcttgttcttattaaattgccaaagtgcatatgtgatctgtattctgaaaatttgttgatgtgctggtcagtctcaacacagtaaacaataaccattctagaaatttgaaacaagaaaggatttaattcacttacatttaagtgctactaaatcattagttttacagttacacctcagagactataatcctggggttaggaatttatggtgctaccaccatccctggtgctaccaccatccctattactaccatggcagcattatttccataaaactggagacttgatattggaaaaagggtcataggatattgactacaagagacatttttgtctatccagttttacttaccagccaccatatcaacagaaaaaatggtctcagctcacttctaccttttatatctcccttaaatgcctctcactggtaaaattttaatcttatccacaacttcagctgcaagacatctgggcaatgtagttttggactttccgcccctgggacagaggccagaatgtggaagggaacagaaataaataatgagtgccagtggttcatacaacacattagataataggtgtttcaaatgtatattcccagactgtggtgtgtttgatgaacagaatttttttttcttttttttttttaacttaaagtaaatctctcactcttctcctgtggttattgttctttgtatctcctgtaagaagtcctttctcagcctaatgtcatagagatcttctcttatatttgctactaaaaaatgtttaaagcttttccataccaagtttcttaactttaacccataaaattcatataactggactgaaatctgatacatcattttttgttgacttttaactagactaaaaatccaaaattttttgagttctaaatttattcaaaacatgggctcttttaaagtttgacattcttttatttgtatttttctatgttatgtagtaattttattttattttgattatatttatttttattttagtgtagctatatttaaattaatacatgctgttcctt

SEQ ID NO: 113057 - DNA, 1012 bp, Homo sapiens
ctaattttgtagttttagtagagatggggtttcaccatgttggccagggtggtctcgaactcccgacctcaagtgatccatctgcctcggcctcccaaagtgctaggattacaggcatgagtcaccgggcctgggctggccttgttattaccaagacctctcacctttattctgggtcttcttcccccattgtctcttacccactcctgtttaatttggattcttcagcctgcaatttctccttaaggtggaggtttgtcctggaagagtttcaattggttttaagaattctaaaaaatatgactatagcttatcttcccaatgcttctcaattttagtagtagtaataagatgtggagaatatattttactttcattaacccgaagagcaagccagcagagactgagatttcatgtttatgaaatcagaaatggtagttctttgcagatgttatttttttcactttggcagtaattagttggcttagatatataaaagggcctattttcaagttttaaaatggtgtattgaaactgatgattcatcttattttgagaagcagtgaagactagccgttttgcatgggatacatcaaataattactgtatttctagttttaaagaattgaccattactcaatgaactgaaatctgttttcccgcttgtttcagatcgaagactaaatgaagattttaggcggtatcaaatggaaagtttttccaaatattcatctgtacaggtatgtaaattataaattctacttgggaatattctcatgtgaagttgcctacagcactttgaaacttggcttacaactttgattcctgtaatgggaaagcttgtttttgcttaatgaaagtaaatcttttgacaatagaaattgcccttttccccccaaccagagttggagcttatatattatatatgatatataaaatgtctgagttctaaaatgggaattcattcgagttctgaaacatcctaaaattgtttctcaatatacctctagtt

SEQ ID NO: 113058 - DNA, 1049 bp, Homo sapiens
atcttcagtctctcaccagggccagggactcgtctggggcgcgggggaaagaagcgtggcggggctgtagatgccgcgtgagtaggatgcagattgcaccgctggagcgcttgacaaccaaccgagcgttggcttagttttgttttcccgcacagcaagctctctgtctttcagaggaaggtaaaggtggtgaaagctctaaactaaaattgtatcgaaatggctgcagaaatcgactttctgagagagcaaagtaagctccatgtttttttgagacttcatatacaatgtttaatatcgtcgtcgttgaccgacaaatcttttttgaatgctggttgggtacatttaaattggtaaagagttaaagaagttagttgcaggaaaaaaaaaaccttgatgttatacgtgaggatgtgtgtatatttaagcagaaccgtgtggtagtacttgtagcttacacagaattctactagacgctaaacatgtttgttatgctcctctcgtgctctgaagattagaaggctaatggccagcaggagtttccaagtgtgcatttaaaatctaggggcacagctctctggccatttattaaaaagatgtttattgaactcctgtttctattatgtaccagacactatggaagaacagctgctgcaaagataaacaggacagtttttacctccaagaatttaatttggggagggaaatgtattccaaaatatattgaagtgacagcaactgctggctcttttgccacagtctcatagggttgttggaaagattaaatgaatattaaaatatgtaaaggatttagaatagtatctgatacattgtgttaaacaaatattaactattacacgattattattaaaatatgttcaaggaaggtgctattgggctgaaacgtgcagtacaaatatgaatttactatatgaaaaactctaggcatcccaaatagaacaatatttgtgacactgaggggattaggaatatgctttgttaaagacttgcaatacggctggtttgagtgtaatattgatgtaaattga

SEQ ID NO: 113059 - DNA, 1073 bp, Homo sapiens
taactgctatgaacatgcctccccaggaatatagtataatatagtttatagctggtataatataatttatagtttttgcttatatggccagttagcctttagttgtattaaatgaaatatttctgtacatgttatattgtaatcttaatgatttacagttgattttcaaattattgcacagtatttatatttctgaatcacccttccttcttctaggaaaccactcatactttagtggaacgattagaagtcttcagttgttcatgtgtggcccttcaacatctttctttcctagaaaaatcaagcgtcttagcttcagtgttctaagcccctcccccagaacgtgtaggcagctgggtggagcctaaagccgagccctctcctgtgacctcggctgaaaagaagaagccagtgtttgagaaaagcttcgtggtctgtgttctctagttgttccctcttctctctgacattcctttcgtcgtcgccaggtcttgtttttcgcttgatctctggaaaatactgaaaagtattttacttttcagctgtctcctgctaagtgagcgtactccccctttcaggctgacttcctcatttctccgtttccctgataaatgggcggggcctcggggaggtatggaaactgaaaagaaatcattattgtagaaaaactaaagaaatttttgttgagcagaggaatttggaaattttccttgcagatcatttggttgagaaaacacctttaccataacttatttcttttaaactttgcggacattttttcttttcctgggttcttaatgctccagtgttcggtctcctttctcttccttcgtttccttttagaggtctttccaggtaaagataaagcaatcagaacaattgaaaatttatttttttaacttgttttaagagcaatttgaagaatagaggttaaaagtagaaacatacagagtaacaataaatattgtattaagaaagtctaaacagccaaacttaaaattgcattgcaggacagtaatcatcttgataatatgcattatgacttttcggaaacgttcagcatatataatata

SEQ ID NO: 113060 - DNA, 1023 bp, Homo sapiens
tatatgaattccataatttacttaacagttctcctgtataataggagatgtatttagagaataagagataatcttatgtaataggagataatcatttagatcatttctaatttttgaacagtactctaatgaatggcattatacttaattcttttcccagttgtcagattattttcttaagataaattcctagaagaagataactggctcaaagtttatgtgataatgttaatttctttacaacctgaccagcactagttttaattaatcttttcaatatgtggcaatctgatatgtgagaaaattgttgatgatttatttcctatatatttcttcttccaggcaatgtctattttctttgctctttttcctattggggatagtattataattaagaatagttaattcattttatattctaaaggaataaattatttattgttggaaagcaatattaaatatctcaatatgttatatctctgttttcaaaagttgtggaagcatttttcttgaatgatataactgagcaatatttagaagttgaactttgtccgtaagtataaaatgttttttcttacttattactacataatttgaacgtgttattttctagttataaatgatatagtaaaagctcattaattccagagtaagaatggtactctgaatttgcttgaatgatatgcttttatatatttcttagtttcaagtacagagcacatatttagaatgtatgtttagaatatactcatattctaaatgtttgaaaatcctatgtcaatattttcagttcattaatgtagatttttgtaataaatttcaagataatttttttcaaaacgaaaagtcattataaaacaaaaactctcattatttacgcaataaatttgcattattataatatagctgttcggaaataaaaggagagatatgggtataattaattgagctagcttataaaaatgtttcttttaggggatttttaaatgactagatgaaactttaattttatgtattacataa

SEQ ID NO: 113061 - DNA, 1089 bp, Homo sapiens
caactctcaagacacacatttcaggggaaactaccttacttatcaattccttctatcaaaagatagaaagatagaaagaattcaggtcagagatcttcaattttcattatgcaggggtatataaataagaaaagctacacttatgtcaattatttcttaacagaaattttagtaagcacccattcacccaaaaataatcagaaaattgggtcttttggttaattgaacattcttgtaattgacatttgtcaaatatatcatacatggattaacagtgttcaaaaaactagaataaaattacatgcacttgacatcagaattataactttaaggctcttcctagctgtataattctgaacctcttcagaatatacaagtgctcagacattacttaaagtatgtcattgatttaaattaatcaacaaataattatatttgtataacatttaggagtaaaaggttaagctaataaaactgaattgttattgactcttggacacagcttgaaatttgattatatgaaatacatttgtgaagtaaaattaaaataaactagaaaatgttattggataaaaaaattctgtctttctagttgttggttttcttggttaatgggtgggtacgtactctattaagctttaataaaatgattggtgtctaccttaataagatacattttctaatattattatgacttttctctacacttgcatggtattagcaatacattatactagcaacaagtaatcagcaatatattagcattatattttcatttctcctttgaatttatttatctgctagtaatcttttacatgataatggaaaaaaatcagaagttgcatatgtgtgctatgaaaactatttttacagcaaactgattggagagcatgtaattttttttgtcttctattgatcatcactaccaactagttcaaagagttttaataatccttaaaatacaacaacagttttaaaaatgtattgcaaatttgtttgttccctgaaaagaaaatagcctttttcatactggaactgtcaaaaactattacattaactggttcaagtggtacaagtagaaaggagatt

SEQ ID NO: 113062 - DNA, 1066 bp, Homo sapiens
attctcttcattaacaggaaaaataaatacaacaataacccatgagtcatctgcatttgatcacaatcatttaatatatgttaattgaaataatgatctcaattttgtctctgttcaaaattataatttcatgtaaagagtttcttttcccttcctgtttggatccgtgagagtaaaacatgctttcataatcaggacctcacataagccatttcaaaatggtgaaacagaagatataaaattaactgtatagaacagtaaatagacataagggtttgcaagtaactatatggatataaatgaaaaataagtcagaccaaggaaatatcagttcccctcaatgatcagagaaattcaacctaagcatttttttcctgaactattcagaaaattacagttctctaagactattcctgatgtgcttgcaaaataattctttaagagcacaatcatttgagagctacccaacgcaaactgagctctgcaactatcccctgaattcagactgtgaagtcaaccaatttaaatcatatcacctcatttttttttttttttgctgagtagatattttcttctcatcttctaactgaggaaaactctataattcatagtttttaaattgtttaataaaagcttttaacaagtaagttgcctcaaactggtaggctgtggattttgaagggttgacagttaggttgatactgccttctcagttacttgccagtgctatattttaagcaaataattggataacactttctttcccccagaagtctcaggattttacagtgacattcccagtgtcagcagtggcttcatcaacagttacgtaaaatgtgaagatgccaccaggaagtcctgtttcacactttagaaaacgaatgttagtggatgtgtgggtatgtgggtgtgaaaaaaataggctgtgtattgtagcaaaatttgtaatggaattttttttttaaagaaggattcccagaatatcacactataagcattggacaacctagagattttgtgaaaaatgaacactcttaaggaagaaggattttttgcatctgtttca

SEQ ID NO: 113063 - DNA, 1282 bp, Homo sapiens
aaataattacacacatctataccttctccccacaatgagccataaagaatggattattctccctctatggctaaaaagaactatgacttgagggttatggaacgagccaactcctagtaagaacatcatattaggagttgaacgcattggaatattttagctaaccttgtattaataatatgctgaatcaaattaatatgctgtagtcttatttcagaccaccaagccctagctggggcttacctacacaaagtaaggatatttctctaccacacaggtctttatcattctcatctctgttagttattgataatttatttaaatacatactactggtgtatatcagtctttcactgctggtcaatgtctaacagtaacactgctcaaaagatcctctgaattaatgaaagaatcaggaaaaaaaactgatggtagaatcaataatcaaagacaaaattacatctaagactccaggcaagaaagcaattgagaaagaggggaagatatcagtttgactcaggagacacagagatggacatcaaatatggtcacatcagaaaaaacagccaagtccagttccaagttgaagttgtgtatagcctagcagaatgtgagaagctctccaccctatttggtgatgggccaaggatataactcaactgcacatcagttgcccctctgacaaggaggaataaaagtcctcaaaggaagtctctgaaaaggaagacaaggacaaaaacaaacaaaaaaaaggtcctaaggaagatgttgtccagaaacccaagccaaaattatacacactccgctggaagagacttccatgaatttcttgtaagtacactgaaaaagaacccaaagaacaaaatgatgctactaatatgaaagtaggagattctgaaatttattaaaacaataactagttaagaggttccctcagatgacttcatatcactggaggcaattacactggatagctgcctatttggggatggaccacaatgttgctcaaacttgaaaatctgtcatcatcaacaaaaccagtaacataagactgcctgaacagagttttcaagacatacaaaggatgagaagaatatagaattttagcagagattgattctcaagagaaacaattcagtacagaatgagattgtctggaacagatatctacatgacagctggggattagcttaaggggctgagctgccactcaaggcgctgagctttccctaagcagccaacagagcagcatcaatagtgaactcaaatcttcagagccatg

SEQ ID NO: 113064 - DNA, 1101 bp, Homo sapiens
atattattttgggttactaaaatctgagagataaaaatatattaaaatataaataaaacatttgttatcatgcacattcccatcatatttttcttacaaagtatgcctctttagaacttaaatggattcagacaaaatagtttgtcaatggattttatggtcaatgtgtgtcacatgtcaatgtaggtaagtatatatcaatagtaggcaatatagtttataatatagtaacaaaataattttttaattatagaaaacataggtagcccaaatggaatttatattcatttgcactaaagtatacaatacatattcagcttcacatattcagtttcactgattgaaatttctttcccttgtcttcagaagtcctgttctattaaaagaataatttgtaagctcaatacaaaaaaaaaaaaaatgagtggcagagcactgacttttcaaagaattttcagatgctatgcctatattagccaaataaaatgtttaaaaaatagataaaaatgggaaaattgactcattcattggttgaattgccatgaaatgatctaattctactgattttcctattctcctgaacagactacctattgggatttcctatttgctgtaggctggacctgatgaacataagctttcagagagattgcggctgacaagacattagagagggctctttaggggttcagactgaacttgtatctctcttttatacctggtataatagcctaaggaagtcttttgatgccgttgcagcagcaattgcagcaacagcattatcggtattgccccagtgggtagtaatgcatcagccaaccattactagagaaacaggaatgtagaaggagtctcagaatgtaggtgcaatggcagtagttactctatttcactttcaggagcaaaacactgcagccatcctttgctttagaactttctgttttgtcaagcatgtcaatgttaattcattggcactattatctaaacatttgtttctaaaataagtaatataaaactttatttgtgacagaaatttaagacatgtaaacccatttgcatgtacactttcagaaagtgcttattttatggaatcagaaagct

SEQ ID NO: 113065 - DNA, 1036 bp, Homo sapiens
aaattgaagtcaccaataaaacgatctggataaaaagtttgcagctgtgctcagccagctagttccacccactgggtgtgagctgaagacccaggacaccaccttgtactgttcatttgtgggactctcatcttcagacaggtagtcaggtagctctgtgttctgttctaccacaggaaggtcttggaatgggaccagcatctcttctccactttcacttttcacaacttacggagctttcataaccttggttgatgctctcgctgatgcgaaagcctcagctttcaaatctgaacggattcacaccaagcctttgaacagccatttgaaaagtaaagctaataacacctttaatttttaacaaagcctcttcatatagatttctcgaagacgtatcatcaaggccgtctatatgcaaaaccactgttttggcacgtttgtttgcagttcccagaaaaaactgagctttccttcaatatgaattcatttcattgaaactatcaccatctgccttattggaggactgaagtatgtcatagatttcagaggccagaagttttgtttctcccagagttgcagttttctgtataacattttgtaggctcaacatcatacccagttctcctttcatcttttctctgtttgcacggtgttctcccaagtatcaaagagcgagcaaagccaaatggactggagggttggggtggtccataaataaaataaggcaaggcagacatccctgatcctggactacagctcttctgtttaatggatctgctgctatatcccctaactggttaactaccgatagagtatcagactcttcattcatggtggaggtggaagaattcatcttctatgccatgcacatgaataaaattttaaatttgctccagagctttaggagttcagagcctgctgcaccatcgggccacacctacggatgaggtagaaacccaggcggcgtgagcccctcggttcacagccacagcgtcggcgatcgcaaacaactggactaactcagggagccaaagag

SEQ ID NO: 113066 - DNA, 1027 bp, Homo sapiens
catgctgatgaactaacacatcttctggaaaaatcattcaacatggctatttttaaatgttctcagaaaagaatctttctggggaatggacataggcgtgggacgtctggcaacaaaacatgcttggtctctgctttggaggagaccccagacaacaggtatgcccctcccaacctttctcaaccatgaccccggtccctcgcaagagtaagctttaccagtcttgtccaaagcaggctacacatggataagctcaggttacagctggtgggtggggattaatttttgctacccagttctggtatgctcaataaaagttctggacatccatacatctgtttcagtttcccccggtgcctattctgcctggaaggtgtaggcatggagatgaggcccttcccccatttccccatagagactctcattattctgtcctaaaaccaaatctgttcagttgaggttttgatatctgccaacatcagatggccctatcctccacggcacccctaaactgttagcttttcagtgaggctattatcaaagctgtctggaccacttagggtcatagctctgcaactcctctgttgccagatatcagttttcttggtcttctattgcaatgtgccagctccactatccctccccattctgaatcttacactttgatcatctggatacacccactgggctcttcctttagccgggtgctttcccagtaccttgtcccaacttcttccctttacctcctggctggctgcctcaagactggttgaggttattacagtgcacctaagggtaatagaaattcaagaaaatgcaagtacactgtgagactgacctctgaccttgcacatgtggatctcagttgcatcactttaatttccctgccttttcttcttcaaggagcccaagaccaaaaatattaaaaagagagaaaggaagtatactagtcaggattctccaaagaaacagaccaataggatatacaattgacccttgaaaaaagtgggggctggagttatcgacc

SEQ ID NO: 113067 - DNA, 1050 bp, Homo sapiens
atgccatccaagtgaaagtgacagttcagcatatataataaatatatatatattttagttaacaaatatacacatatttgttaacttcaaaaactcaaggactgatagaaaaaaatgacaaggattacagagaacaaaccaaaagtgaatttaaaagaaggatttcttagaggccaccatctgaattcaaatgtatctgccagtaggggcaggagcaggagaggatgaagtcacagtacgattgcaaaatgctgccaatccacttagagttgtttactgacctcttccccacttgcttcctcccagtctttggagaacataactgagagttctaaattctaattttcttctcatagacacttccatgggaaatcatgatgtaattcacgaatgtccctgttgccaactttagccatttaatatcacggaaatctgctaaggaaatgtttgtgctatttcccatccagcctggcaaagggcaggcccctttgacatattgagaaaagttgccagagacattttctggtaaactgacacagttcctggggctcggaaaaagaaacagatccctctaacaggccaagacagacaccaagaaagggagccagagaacaaagcaagcagattttgtcttttttaactgaactttttcctttgacattattattgatttatatggagttgcaagaaatgctacaaagagatttcctataccctttgcacactttccccaatggtaacatcttgcagaatgatactacaatatcacaaccagaatattgacaatgaacagtcaagacacagaacagctccatcaccacaagaattcctaacggtggtcctttatagcatcgtctacttccctcccaccttctccccctccttaacccctagcaattgtaggtaagaaaatataatttcttttctttccctttataggttcatagttgagacactctcctaaaaataaaaatcagattaacagaagaaaaataggccgggcacggtgactcgcacctataatcccagcatgttgggaggccagaggca

SEQ ID NO: 113068 - DNA, 1002 bp, Homo sapiens
gagggacgcgcccggcctgcgccgcctgcccgccccagggctgcgccgcccgttgtccccgccggctgctgttcccaggcccgcatccccccggctgctggcggcggcctcggcggcctcgggcgccgcgaggtcgtgttcccgaacaggtgagtgcaccccagttccgggcggagaacgccacggccgccaacgcgcggccgccacctggagaccgcgcggaatgaatgagaagcccggggctgccggtcgtggagtctggcctgaaagtgggtcctttaccggagcaaccttctgcgttccctttttcctctttccctgttccccgacttgcctggggcttgcatcaaagctagtaagaactgggagactgtattcaggttcccgcttgacccttagaggccatgctttcagaatttcttgttcttgaccgttaaatttcccccttccgaggccgcgagttactatgttggttacattttttattgcacgacttaacggaaatttttatggaaaaaaaaatctaaatgatgcttatttgcttatatagctttcatggtctagatattaagttttttttttaagtcgtgataataacacattgattcgttttacgttgttttttttttttttttttttttttttttttgagatggagtctcactgtgtcacccaggctggagtccagtggcacgatatcggcttaccgcaacctcccgctcccgggttcaagcgattctcctgcctcagcctcccgagtagctgggattacaggcgccagtcaccacgcctagctaacttttgtatatttagtagagacgggggtttcaccattttggccaggctggtcttgaactcctgacctcgtgatccacccgcctcagcctcccagagtgctgggatcacaggcgtgagccaccgcgctcggccattttacgtttctttggattttttttttttggaggcttccactctttatagttaacatcattttttgtcctg

SEQ ID NO: 113069 - DNA, 1038 bp, Homo sapiens
tgacctcaggtgatacacccgccttggcctcccagagtgctgggattacaggtgtgagccaccacgcccggccactaattagagtttatagggctttgatagccacttaagtggtggttatacttcagtagataattagaaatttgaaggacagtgtgcctgggcgtttagcctcatagtaaacctgtttggacttccacggaaagcagctaagatactttttatttattgttattcttagaatgggagaaaatcagccttcccacggagggagtgagacctcaagtgaaaaccttagctgtcctctgtatctatgtggcctcaaagcaacacttgaatcatatattaatacttagcaagaattcagtgtcaggtatgtgggcaacagtgcccaggggaaagaaggctaaacaaaattggtaccatccaatttgaatgtccttataacaatttttttctccttccagtatataaaaaaatgcgtgggtcccattcagatcttctggattttaatatctccaagtggggcctgagcatctgctgattctgacataggctccgggtagacaacagccacatattgacaacacaggcggacacctgtgaggaggctcgttttactaaatgcttagaagcctattctaagtctctcagtgatgtgattctcctgtccaaaagttagagaccactgttggattgtggagagttgtgcagaaaggaaaatatttattttatttattgtagagacagggtctcactgtgttgcccaggctgctcttgagctcttggcaagtccatgaaaataagtgcttagaagttacgatgctgcccgggtaccgtggctcatgcctgtaatcccagcactttgggaggccaaggaggtggggggaatcacttgaggttaggagttcgagaccagcctgggcagcatggcaaaaaccccatctttatgaaaaatgtaaaaattagccgggtgttggtggtgtgtgcctgtaatcccagctattcgggaggctgaggcaggagaattgcttgaac

SEQ ID NO: 113070 - DNA, 1007 bp, Homo sapiens
tgtctctcgtactttaaatatatcaagatgtgtgtgtgcctgtttctcctttaggcctctttcctggagaggaagggagttttgcatgttgttttatttgtttgtttgttttttgagatggggtctcgctctgtcactcaggctggagtgctgtggcgtgatctcagctcactgcagcctccatcaacctggttcaagcactcctcccacctcagcctcccaagtagctgggaccacaggcatgcaccatcatgcctggcccagtaatacaacagttactgtatttttagtagagacaggttttccccgtgttggccaggctggtcccaaactgctgagctcaagtgatcggcccaccccggcatcccagaatactggcattacaggtgtgagccaccgcgcccagccagttttgcatgttctgagtgggaaggtaatctggagaacgggcagccaggcttccttgttgaatgcgtgagagggagcaggctggtaactaccgcctttgtcaaagaaaggagggtttccttctatattcttcagtccaaccccttccccgctttttaaaaccatccttgagtttcagagttagctcctgatctggtctgcttctctttcaggtccattcacctttgcaagccattctaaggctatcacccattttctttggggtattctttggttctatggagcaaccaaaagccacccttcccggctttgtctgtgagagaggggacacatgtaactagtgccaccgttcactttcattcttgaacgaattgccctaacagttaccccctcagcttctcctgccctttctatttcttgattcagcttggagtttcttcaaggtgctcttgggaaaaccacatttacctttggtaacttgtactgccctttccttctggtttctctgttaattcaaacttgtttctgtcttcttggaattcctccaaatatttgctccattgatgtcatgcatcccttcttgttttccaatgttattg

SEQ ID NO: 113071 - DNA, 2239 bp, Homo sapiens
ttttttctttttttttttttttttttttttttttttttgagacggagtctcgctctgtcgcccaggctggagtgcagtggcgcgatctcggctcactgcaagcttcgcctcccgggttcacgccattctcctgcctcagcctcccgagtagctgggactacaggcgcccgctaccacgcccggctaattttttgtattttttttttagtagtgacggggtttcaccgtgttagccaggatggtctcgatctcctgacctcgtgatccgcccgcctcggcctcccaaagtgctgggattacaggcgtgagccaccgcgcccggcctctttttttttttgagacagggtcttcctctgtcacccagactggagtgcagtggcgcagagccagctcactgcaggctcagcctcctgggctcacgcaatcctcctgccccagcctcccaagtagctgggaccacaggtgcatgccaccatgcctggctaaaggctcattttaatatatctagagcagaggttggcaaactttttccataaagagccagctagtaaatattttaggctttctgggccatatatctgtcgcagctactcaactctgctgttgtagtgtgaaagcagctatagacaatatgtaaactttatttatggacttttttttttgagaccgagtctggctctgtcgcccaggctggagtgcagtggcgcaatcttggctcactgcaagctccgcctcccgggttcactccattctcctgcctcagcctcccgagtagctgggactacaggcgcccaccactaagcccggctaatttttgtatttttagtagagacagcatttcactgtgttagccaggatgatctcgatctcctgacctcgtgatccgcccgcctcggcctcccaaagtgctgggattacaggcttgagccaacgcgcctggcctatttatgaacattaaaatttgaatttcatatcattttcacatgtcatgaaatattactgttcttaaggttccccccctccccctaccatttaaaaatataaaagcctttcttagcttgcaggcagcacaaagacaggatgctgccagagttagctcatgggtcacagtcggtagatccctgatctagagaggactctgtacagtcagcagaaggcgccttatagtttcatatttccactcacactgtaaaaacacgtcatttttccaagtgtcccagaaatgttagtgatgggagatcaccagatttttaggttttgctttttcacatttttatttcagaggattgtgctagaaaagcccagcttgtggaaatgatttgtcagccaatagacaattgagcaccagtcgaacatgttaaactaagcatttatcatggaggggattcccttctctttagagagcttttccatatgagtctgtcctggctgaaggtatggttcagtcttgtctggatgacgcttcagctttcttgtctggtctgtgactgccacctggcaaagagaggttgtttggattgtcacactcagtctaggtgcttgtatttttagacacgttaggttgagagttctgaccttcacttgatatctctggtaatgccaagcgggtcgtggcactgctttgtacactctgtgctgtggcagtgtgtgtgtgctgtgacgacagtgacgtcgacagatggaggaggtgcaactcgacctctgtttctttctggcctgaagaatgggctgctgtgtgcgcctggggctaggcaggacagctgcatcgctgttgccctgaggcagtatcagcacagctggagatgctgacgagcagcagtccaaggtgcaggtaactttctccagggccagcccccttactagttgttcaatctagagaaagctgtgcagatacccacttcaccagatttgggacagaataatgaaaatacatggaagcagtctggcacattatctcgaatgttaataatagccttctctttttgttttgttttgttttgttttgagactgagtcttgctctgtcgcccaggctggagtgcagtggcgtgatctcggctcactgcaacctcctcccaggttcaagcaattctcctgtctcagcctcccgagtagctgagattacaggcacccaccaccacatccagctaatttttgtatttttaatagagacgtggtttcaccatgttggtcaggctggtctcaaactcctgacctcaagtgatccacccaccttggcc

SEQ ID NO: 113072 - DNA, 1122 bp, Homo sapiens
cctgggtactttgaagtcacggttttgtaagagctgacaactgactagctttttcttttcagctcttggagaaggcaaagacaactttgtacagtgccctgttgaagcactcaaatgggaagaaaggaaatgtctcatcctggaagaaatcctggcctaccagcctgatatattgtgcctccaagaggtggaccactattttgacaccttccagccactcctcagtagactaggctatcaaggcacgtttttccccaaaccctggtcaccttgtctagatgtagaacacaacaatggaccagatggttgtgccttattttttcttcaaaaccgattcaagctagtcaacagtgccaatattaggctgacagccatgacattgaaaaccaaccaggtggccattgcacagaccctggagtgcaaggagtcaggccgacagttctgcatcgctgttacccatctaaaagcacgcactggctgggagcggtttcgatcagctcaaggctgtgacctccttcagaacctgcaaaacatcacccaaggagccaagattccccttattgtgtgtggggacttcaatgcagagccaacagaagaggtctacaaacactttgcttcctccagcctcaacctgaacagcgcctacaagctgctgagtgctgatgggcagtcagaacccccatacactacctggaagatccggacctcaggggagtgcaggcacaccctggattacatctggtattctaaacatgctctaaatgtaaggtcagctctcgatctgctcactgaagaacagattggacccaacaggttaccttccttcaattatccttcagaccacctgtctctagtgtgtgacttcagctttactgaggaatctgatggactttcataaatacttgcttttgtctttttaatcacaggagtctatttttttttttttttttttttttttgagacagagtctcgctctgttgcctaggctggagtacagtggcctgatctcggctcactgcaagatccgcctcccgggttcatggcattctcctgcctcagcctccagagcaactgggacaacaggcgcccgtcaccacgcccagctaattttttgtattttta

SEQ ID NO: 113073 - DNA, 1050 bp, Homo sapiens
actatttagcctggaggggcttttgttatttaaatgtcagatttctttgatacattcttcaaaaataatccttgtcctgcctctatgttccattattgtgtttcttttttttttttttggagacagagtctcactctgttgcccaggctggagtgcagtggtgtagtctcggctcactgcaagctctgcctcccaggttcacaccattctcctgcctcagcctcccaagtagctgggactacaggcgcctgccaccacgcccggctaattttttgtatttttagtagagacggggtttcaccatgttagtcaggatggtctcagtctcgatctcctgacctggtgatctgcccgccttggcctcccaaagtgctgggattacaggcgtgagccacagcgcccggccttattgtgtttcttgaagagattccaattagttttcaattatttaaccaattagttttcattattgctgttatatttaaactttaccattggaataatattggtatgcgtttgatattagtcactcgatgtcatcattatttgtattggaatgtgctattcacaataggttatttagaagctgtatgtggcagtggccaagagagtcagtaggaccttcttttcagagataggaaactttctagaaagcctgttaatgggctttcattgaaatttcctaagatagccagatactgtcattcaaaatatctagaaagaagaatgtaaaaagttagataacctgggtcgggtgtggtggctcatgcttgtaatcccagcactttcggaggccaaggtgggcggatcaactgtggtcaggagttcgaaaccagcctggccaacatggtgaaacctcgtctctactaaaaatacaaaaattagctgggcatggtggcaggtgtctgtaatcccagctacttgggaggctgaaacaggagaatcgcttgaacctgggaggtagaggttgcagtgaacccagactgcaccattgcgctctagcctgggcaacaagagtgaaactccatctcaaaaaaacctggaattctc

SEQ ID NO: 113074 - DNA, 1330 bp, Homo sapiens
aacattgttggaaccccattggctgtgagagcacttacccctgtttcaatagcccatggtacacctgtaatgagactatcaatgcctactcagcaggcatctggccagactcctcctcgagttatcagtgcagtcataaaggggccagaggttaaatcggaagcagtggcaaaaaagcaagaacatgatgtgaaaactttgcagctagtagaagaaaaaccagcagatggaaataagacagtgacccacgtagtggttgtcagtgcgccttcagctattgcccttcctgtaactatgaaaacagaaggactagtgacatgtgagaaataaaatagcagctccaccatggacttcaggctgttagtggcagtactgacataaacatttgcaagggaagtcatcaagaaaagtcaaagaagactttaaaacatttttaatgcatatacaaaaacaatcagacttactggaaataaattacctatcccatgtttcagtgggaaatgaactacatattgagatgctgacagaaaactgcctcttacagtaggaaacaactgaacccatcaataagaaaaaggatcgaaagggaccaagcagctcactacgatatcaagttacactaagacttggaacactaacattctgtaagaggttatatagttttcagtgggaggggttgggatgggtaatctcattgttacatatagcaatttttgatgcattttatatgcataccagcaattattactgtgttcgcacagttctcacttaactggtgctatgtgaagactctgctaatataggtattttagaatgtgaattgaagaatggatcccaaaaacttcagaaagaggatagcaaaaaaagatctagtgcgattttatatatatatatatatatatatacatacatatatatatatcatatagcttaagctgatttaaaacaaaggccttagactaattttcgattttctttcttgaaataagctaatggcttgtttgtgtaaagcttttttattaaaagaaaaattttaaaaatcttgtacctagcacagtattgttatagaatatacatgtaacattttatatggtagtttaagtctgtcagtttcttaattgtggacaaattaacagttggctctggccttttgctgtaacatgcctgtgtcactcacttagccttggcatttgtgcagacataccattttcagttctgctgtcacttggaagttcaggctcagcatgaatttttggcaggtagctctaatacctggagttttctttgtttttttttcttttttttagttgaagtttatgagggaaatacc

SEQ ID NO: 113075 - DNA, 1045 bp, Homo sapiens
cattttgggaggctgaggcaggcggatcacctgaggtcaggagttcaagaccagcctggccaacatggtgaaaccctgtctctaccaaaaatacaaaaattagccgggtgtggtggaatgtgcctgtaatcccagctactcgggaggccgaggcaggagaattgcttgaacctgggaggtggaggttgcagtgagccaagattgtgccactgcactccagcctgggcgacagagcaagactccgtctccaaaaaaaaaaaaagtagaaacaagtatattcaggatttttatgatacaatgaaggacactttatttgcttttaattatgtatttaattatgttaatgaattttaatcaatgtctgtcattgtttttaaaggaaacacaacctatttgtgggagtttcttttagatctacttcaagataaaaatacttgtcccaggtatattaaatggactcagagagaaaaaggcatattcaagctggtggattcaaaggctgtctctaagctttggggaaagcataagaacaaaccagacatgaactatgaaaccatgggacgagctttgaggtaaaaactcaaatgagctagtattcaaacaaaatttatgtatttctttatatgtctattagctgtttaaagagaagctgaaaatcctttacaacttttaactttgggggatattctagaggagcttcttagatttggaagtaggtggggagataggagtttggtctacgtgcttataattttaacataattggaaaattcatttttgcagaaaatgtgcttttgtacttaggagtgtttcttaatagaaattatgaagttgtaggcttaaaaaaaaattaaacctaaacaaattatggttcctaaagttagtttgttttttagtttttaggggtttgttataaatggatttatgttgataggaaaatttatcttaagttttatcagtttggctgggcatggtggctcacgcctataatgccagaactgtgggaggctgagttgggtggatcacttgaggtcaggagtttaag

SEQ ID NO: 113076 - DNA, 1119 bp, Homo sapiens
aggcggatctcgaattcctagcttcaagagatcctccggcctcacactcccagagtgctgagattataagcgtgagccactgccccttgcctatttttgctttagaatttgtgtatcctgattaaaaatgaaaacagcaccaaacctcccccattctgtgctttcctaatttgtggagtaagatgatttcaagtaacatttctttttaaaattatttttattatcttttttttttaattttaaaatcttttgtagaaacagagtgcccctgttttgcccaggcttgtcccaaacccctcgcctcaagcgatcctcccatcttggcctcccaaagtgttgggattatagacatgagccaccgtacctggcctttaattttcttgtcactcagattctgacagataaagtatcatttcagtagtggttttagatgtgttctgtctgcccatctgataaccgaaaatttatcactttcatgaataagtgttttcagaccaatattcaatagttggataaattttacattaatatatttaaatttattctgtccttatcaggtggtttgatttaataattttaaataattaaaacagaaattaagtctagtttaaaaaaaattgtctccagtaagcctaccaagaaatttggtatttcattaggtcaaaaaaaaaaaaaaaaaaaaaaaaggtgacattgaacacattcaggaactggtgacccaatttgggagaggcttaggatacttttcttatttccttgtttgtctttggttgttgtacacttctaacatcttaggtttcttcttttagtttatattgaaaactttaaaagttaacatagtatgtattagaaaattaaactgtaaatatacagttattactgttgtctttttaaataattcttatcctcagtggtatcacttatacttgaatatcttttgcttaacgctggagaaaaactgtgaccagtttttaccaattaaaatcacatctcattacaatttcagtcttgtattaaatttgaggcagtgtgttataatgtaattaattgaagctgttacagtcaaacctgtattcaaagtccagccagtgttttttcttctgtaaaattgtgataata

SEQ ID NO: 113077 - DNA, 1302 bp, Homo sapiens
atagaaatgtcatatcttggttatttgtgcacattagaaggaagccagagcaacattactgtatgtactagaataccagataacaatttgtacctactgttttagtgactaaaacatcaggactgttacattaaataaaactttaaataccgaaaggtaatatttcttgtctgtaatgagcaagttttccttttcatattctaaaatgaactataggtgcttatgttttactgagtacatatttataaatctttcacattttgagccacatgcatatattacctgttaaaaaataatgacggatatgtggatggaaagtaattattaactaactcactattatactattattttcaaatgttttcacaactcttagaataatttagaatttttctacaattagtttgaaagtataagtgtgaaagagtggagtgactactcatgatccttgccttacccagaggattaacatttttcctttaagttgattttccatgcatttattttccttatgtagtttaaatcatatcgaatattcagcaaattaacttcttcagtattaagctcttatcctgctttgattaattcttaacacacctcgcctcttctaaatattgaactgtccacataagaaacattgatgggggtgggaaattttaatttttcaacttttttttatagtggaagtgtttgttcctccttgtgtatcaactccagaattcatccatgctgctatgaggccagatgtcattacagaaactgtagtggaggtgtcaactgaagagtctgaacccatggatacctctcctattccaacatcaccagatagccatgaaccaatgaaaaagaaaaaaggtagagtatatttatacatttctgagaaggcaggtgaaaatttttctcttatctttttcctcatcaagggacatagaaagtagtatatgctgtagatttaagattgatgttatcttaaccagatattctcaaagaatcaacattgagattttaaatttagtattttaacgtactcatactgtttaaaggagttagtatgtaaggcttgaggataattgcctgacaatgatatttaacaggtgttcgacacacagaaggcagatcagagattccctgcaccttgtcttactccatcttctccttgttgatccttttatgggtacttggttacttaaaaaaacacacacacacacgcacaacattttattctttattttacaaagtcttgtcttcccttgctttcatggatattttttaaaaagccaggcacgcctttagtcccagctg

SEQ ID NO: 113078 - DNA, 1297 bp, Homo sapiens
taaatttcatagatgtagaaagataccagtaagtcaagttttaagtaagataaggaattctacttttcagctcttgcttgtagcttgcttactttgattgcacaacactgttaaattcatgcttattcttaaatgtgcaaaattatagtttaaattttatttgaattattgatctgaacaaaatagtattttttttttaattacagacacaagtaggagaaatatttcttaaatttctgttaaaagttacttgacttatgtaaacaaaaataaaaagatagtgctcacttttacaaaatgtgttaagttttggaaactggcattagtacattattgtaaattgatctgagaacagcctcttagatttttgtattttgcattattttagttagtaaataaaaatgatgagataaaattagtaagcagtaaaaaagtaatcagtgttcctcttaacatgcttgtaacttacaaagtaagtttattttacatttttatttagttttgaaatatcttccatttaatgctctctgaactgtagattgagtgttctaaaatctgaaactgagcactgatgtgacactcgaagtgctcattaaagcattttggatttttagatttgggatgttccactggaaatatatagtgcagatatatatttttttaaattcgaaatctgaaacacttctggtcctaagcattttggataaggcatgcccaacctatagtagtataagcttcatgaggccagaaatctgttcacacttgtgtcaggtttatagcacagggtctgggcacatggtaaatgtcagcaacgatttgtcagttgtacgtagagtattagatcttctggctgataacttcataggtaatttatgcatattttatgttgtcatcgtaaatttaaagtatgaatgagtaaattttctaagtatgtattttactctgtaaatataaaatatttctgagatataatatgttgaattttaggggggaaggggaagttgaggtcagaaatatgtgcaagaattacaccttgaagaagtaatttccattgacataacaattttaataacacaaaatcatggttttgaaaatgtgcctcaaactatgtaagaattcagggcacgtaatatgtaactgttaggcaaatttcattttgtttataacttgaaacattaaaaaaactggtaaaattctcttgctgtattattattgaatacttgaagctctgattttaatatggtaaagttttagggtgtgtcttaatacaattacataaggaattagtttgcccagg

SEQ ID NO: 113079 - DNA, 1101 bp, Homo sapiens
tattagattgcttccaggaagaaaatatgattaatggctcttttccagaggggggacaattgcagacttttcttccgcagagcgtgaaatgtgcctcttcctgccgaggggctgtgtcctcgcgcggctcccggagccgtttcccagcctcaggtgtctctcgccgcaggctgcggccgctctctggagcaagcgtccgggacttcctgtttgggcgcggggcggaaggatcgcgttgccagctgcggcggccgccacagccacagccgccgccgccgccgccgccgcccctgcccctgccgcccctgcccctgccgttaggtggtggggtttctcagcccggcggcgggaggcgggccggcctcggcttcctgtcggaggacgcgcaaggatccgggcgtcggagtgtgtgcgagtgcgtgagtgtgtgtcggtcgcacggcgtgtgtctccggccgcgggttccgcctcctcccctgccgccgctgctcacggtgtaagtcaatgtgaagcagcagctccagccccgggataaacatggcgacgtctctgcatgagggacccacgaaccagctggatctgctcattcgggccggtaaggacaggggaacttttctcccgtgcatcggtgcagcaggagagggggtgcacagaaggcggggtgactcccctgtagcagtctgtgctgggggtacagtgtccacctcacagtcactggggcggctgggggaaaggggggagtgaatgaagtaatggaggcgacgaatcaggaagtgatcaccttggagagtaacctgcctcgaatccggcgctgtcgcttcagggtgggttcggcgagcagcagcagcagctgccgggctgagcgctggcagcgggtgctggagaacggagccgcggttaagttgggcactcgggggcggacgagttgtgcgcttcaccccagttgctgaggaaccaggaagtgagtgaggctgttgtctctcggctgcgcctgccacgctgtctggccggagaggccgctgctgcccgcgttcgggggcggcgggcttctccggcgaacgctcgccacccccgctcggttctcccttcagacttcgtcca

SEQ ID NO: 113080 - DNA, 1286 bp, Homo sapiens
tattgctgagggcttttaaagctttgtatctgtttcttggatcagataagtctaaagggcagtgaggagccttttaaaagttttgagcagttttgaaaaatacaaatttagtttttttcaaaatagtaagtgctgtaaatgaaaaaaggaataggacagtcaaagaattacttaaagtctgaactccttggtttctcattcatagctccctgatatctagctaactgttctttttcaccttccactaagttgtctacctctccagatttggggtataggtgtgctcattgcctacactaagttaaaagtagtagagattaaaatagttgctcagccagcctttctttttggagttaacaaggtagatgctttgtacggtgttgtttcaggaggaggaatcattgtctcttatccattgtccatgcccatttgtataaacttttgggtttttccaggacctgggcgagactcaaaacagcgagtcctgattgaatgccatgcctatttgttgaatttgttaggtatttatctaggctggtggcctttaagtcaattgtgtaataggaatattattttatattgagaccttgtctgtacaaaaaaaaaaaaaaaaaggttggtatggtggcatggacctgtagtcccagctactccttgcagtcccaggagttcaaggttgcattgagctgtgatggcgccactgctccagcctgggcaaacaagcaagaccctgtctccaaaaaaaaaaagtatatcattttgatcatttggactagacagcgtaagttaatatatttcttttggtcttgatgtctttgaggactaacttgtaagtaaaagttatcttgaaactctatctgtattttcagcgctgcatacaaacaactgctggtttttatttccactggcatcatcgacagtgttctaggccttaggtgtcatagtagataccataaagagaattatatacagaagagctatgatttgagcctttgcaactaaatatatatcaaagggctttataatggattttttttctttttaaaaaatgtaatacacaatatttagaatattctaaaaaactgaaaaattcaactaataagtatgtactactaaaattaataaaatattggcagcagtgttaatttaaatacatcttatgttcccgaatttaattttcccctttccttcttccttaagataattactatcctgtttattaatgatataatggaatatttacaatagaagtatggaagattccggatatgtgtgttttttaattg

SEQ ID NO: 113081 - DNA, 1182 bp, Homo sapiens
tctttcctgaaactctcatttactgggaattaaacattaaaatatgaggcctgtgaaaaatggaggtgagttgtggtatagaaatccatgtcagggggcgcggccaggccaggcccgggggctccgcatgctgcagctgccctcgggcacccccgccgctgccctcgccgcggcgagctaaccccagccagccgggggcgtcccggaggcggtggcgcagggaggggcccgatgcgcgcacgtggccccggcggccgccatggcggacagcggcaccgcggggggcgcggcgttggcgaccccggcccccgggccgggcagtggcggcccaggaccacgcgtctactttcagagccccccccgggaccgcaggagagggcccgggcggcgcggacgatgagggcccagtgaggcgccaagggaaggtcaccgtcaagtatgaccgcaaggagctacggaagcgcctcaacctagaggagtggatcctggagcagctcacgcgcctctacgactgccaggaagaggagatcccagaactggagattgacgtggatgagctcctggacatggagagtgacgatgcccgggctgccacggtcaaggagctgctggttgactgttacaaacccacagaggccttcatttctggtctgctggacaagatccggggcatgcagaagctgagcacaccccagaagaagtgagggtccccgacccaggagaacggtggttcccacaggacaatcgctgccccccaacctcgtagcaacagcaataccgggggaccctgcggccaggcctggtgccatgagcagggctcctcgtgcccctggcccaggggtctcttcccctgccccctcagttttccacttttgggtttttttattgttattaaactgatgggactttttgtgtttttatattgactccgtggcgcgggccctttaataaagctaggatacgcctttggtgcaaaaaaaaaaaaaaaaaagaaagaaaaaaaaaatccatgtcagtgctgagcatgctcctaaattgtgtgtgtgtgtgtgtgtgtgtgtgtgtgtgtgtgagactgaagtctcgctctgttgccaggctggagtgcagtggcgcgatctcagctcactgcaacctcccgggttcaagcgattctcctgcctcagcctcctgagtaactga

SEQ ID NO: 113082 - DNA, 1038 bp, Homo sapiens
gagcaaggtgaagaagggtggagaataaatctggaggggcaaatggaagatatctagtacaactaaagcttagtaaagaaaggtcagggagaaactgatttgggaatcatcctcatttaaagccgtggaaataaatttccgaggggaaacgtatttcatagatttttcccaaggaaggagatacgtaaattctatatttgtctctctgtgatggagaacaaaggacatagaattaaggaattaaccttagagaatgtttacattttaaagagtggagaagaatcaaagagtagtcaaatatgatagaaaatcctgggcgactatttctgagttttgttttgttttgtttttttgccctttaagtagctctctttagtaggaaagggaagaatattgacttgggttagttagttctgattttcaaatttcccctttatcacttacttggcagtatttaaccttttcagagtgtttcactgtcagaaaataggaattcagggttgtgaagattacataaaataaatacataaagcacagtgcttgtgacagagtttctttaacttcattagcaccttccctgtgacttcaagtatagacaggacttttatacattagaatggaatatttgtttaactttgtttatgtctcttgttttctccttccttttgcttccacttaaaaaaaaaaaaacaaatgctttataccttcagtttatactttttccttgtcattccttccttgattattgtgctctggcatctccatttatcattctactgaagctctttatcagatttcggtggccactcttctgtcaaattcagtgacccatagaatcatccagaagtaatccttcataatctggctgccttatctgctgaaacactgtattctcctagttatttttcttgttgacctttgcatggattgtactatttatgcttctgagtgtttgctcaaagacagtttcctcctatctataatgtgctcaggtaggtattagccatcttttaaggcccaactacatgaagatttcca

SEQ ID NO: 113083 - DNA, 1025 bp, Homo sapiens
taacaactgtgcctattatgcctcaaagatgctattgttgttcctctctggaaagtaacctgtcttctgctgaggtggaggaggtctggttgcttagcatcatgaaggagagagaaggtctaggaatcaaaagtgcatgtaattggtgttgctttctgtagattctctacactgtacagtgtgttgtttctcagattttttttttttttttttttttgctgccagactgatttggctttgctgggtctgctaacccactccatactcatccagacactttcagtcttccaggattttgttgttcttacctcttcttgtttgttgctctcacctcttgtccttgtgggtttaggtataaaagagtcttttactgttgttttagtcagctttcataattaagtgaaattatatgcatgtttttaatctgccaacttaatcctaaagcacagattatttaaaatgtttaatctatgtcttacctcttgagacttgaaaggattattaaagttagcccttttcatctcttgttttggcttttacattcatatttataatatttgaaactcattatgtggactgctcgagactgtattagttcaaggatttataagtgaattcagaatttgtaaatacaaaggttgattgttctttaaatttgctcttataggaaagtgaaaaggtttctgaatatccagcagtgattgtggagccagttccaagtgccagattagagcagggctatgcagcccaggttctggtttatgatgatgagacttatatgatgcaagatgtggcagaagaacaagaagttgagaccgagaatgtggaaacaggtagacatctcataaaatgttcattatttataactttctcattttgtaagcttcaacaatactattgccagatgaaaaatatactgaaaaacctttttaatgctatttagtatagcttggaaaccagtgaaacatctatgtttaagggaatttgtgtagatataaaacttctattgtataattctatgaggt

SEQ ID NO: 113084 - DNA, 1078 bp, Homo sapiens
gctagaaaatatttgtatatgcctgtcaggatattctggttgtagcataattcatttttttcttccttgtttttagttatctttggctaagatagtgcatctatttccttccctttttaaaaagttttattttaggttaaggtgtacatgtgcaggtttgttaataggtaaattatgtgtcatgggggtttgatgtatagattgatttgtcacccaggtaataagtatggtacccaataggtagtttttctctcctcatcccctgtctcacctttcttcctttttaaagcattctatttaataacaaagatttccaaaagggaagtaaaagagtaagtggtgtgcactgatttctcttctttgctacactgggattatggtttaaacttctaatggtgattacagggagacttgagtgtacctttggatgtggcgtgacaaatcttaaagctcaagaaataaacctaagcatacatttactttcaggcttacaagacagtcacatcagaccaagccaaacacacagaacataaaacaaatttgaaagaaaaaacaaaagcagagatacatccatttcaaggtaaatgaatttcttaattttttatttttatttattttttgaggcactaatttccatccacttagtctagcaatgaacactatttgcttttggcttctttcctagcttaatccagaatgactctaggtataagttcatttagaaaggaaaagttcaactgaaacctgaagaacactgttacaccttttggatgaatgcatttgacaaatgaatgttttacatttatattgctgaccagtgacttttgactcctttgtgtggtaatattattttcccctgctcaggcatccacccatgcaggcatgagctttcatttttctcattatctaaaaataataatataacaaattatctttcagttttggctaagaccacctgtgtgcctttgtgcaaacaaggtacatttgacataatagaatcagttgtgtataatgagtccttcagttgataaaatggtgaccatgggaacagaaactttatattttcactctttccttc

SEQ ID NO: 113085 - DNA, 1058 bp, Homo sapiens
cttcgtgtgtgtatttcttaatgtctgtttggtatcttgtacacttgagtgtgaattccatgagaacagaaacctattttattaattatcctttattcagcaacttgctcatctggtccatttaggagtttaatatttgtagaagtgatgaatgtataacggcaatcgattctttttattttattttattttttgagacggagccaccaggctggagtgcagtggcacaatcttggctcactgcaacctccgcctcccaggttcaagcaattctcctgcctcagcctctcgagtagctgggactacaggtgcgcgctaccacgcccagctaatttttgtatttttgatagagacgggcttttcccatgttggccaggatggtctccatctcttgacctcgtgatctgcccgcctcggcctcccaaagtgctgggattacaggcgtgagccactgcgcctggccagagcaatcaatttttaaatttttttctgcatgactatttcattatgattgtcaactcaactaatacccagttggacagttcctggtaaaaaacctagttatgaacaagatagtttattctgcatggtctgtgatttaaaagagaaagtttattatatatatatatataaaatatatacatctggctgggcgcagtggctcacgcctgtaatcctaacactttgagaggctgaggcgagtggatcacttaaggcaaggagttagagaccagcctggccaacgtggcgaaaccccatcagtactaaaaatacacaaaaaatagctaggcatggtggtgcgcgcccgtagtcccagctactttgggaggctgaggcacgataattgctttaacccaagaggcagaggctgggaggttgcattgagccaatattgggctactgcactccagccagcctgggcaacagaacaagactctgtctcaaaaataaatgaatgaataaataatatattcatctatagatatgtatcaaatatatataagtataccatatacagtgtacatatatatatatatatatggtgtatttctgaaaac

SEQ ID NO: 113086 - DNA, 1048 bp, Homo sapiens
gcagacgacccaaggcccagcccacgcctgtcccctacgcagggctctctgctccccatcacccgcctctagcacttatccaagttcaacctgaccactcttggcctttgtaaatggactttgggtccttgccttccccacctctgtacgttaggtcccgtaaaccgggagaggagacaccctccccggggcgccccttacatgaccactcccgagtcgtctgagggtccgcaagcccttaaacgaggctttgaaagcctcggacaggacaggtgcgtcctgtctaactcgccagtggccctgggcgaggtacttgatctctttgaacctctatttccttggctgtttaagtgggagatgggggagttgaagggagaattaaatgcgataatacgcacgtaaatgttagggttttttccctacaaggcagtaagttacaaatttacagaccctcttcccctttcagcttcagtgcgatcaaagttctacgtgcgagagccgccgaatgccaaacctgactggctgaaagttgggttcaccttgggcaccactgtcttcttgtggatctatgtaagtactttactcccggatgtcgtgagactacaccagcgtggtaagggaatgacataacattgcgagattgaatggtgctgttatatgttgtatggcagtgaaactctcataacagtaggatatttatataatcgctgatacgtatttttccataagagaaatcccaaggactaaaaagaaattaagatttcagcaacattgaaaaagtatgatgggactaaaatttctgttattgttccttaacatggttttgtaaggaatggcagttttactaaatagtaattatactttttttttttttttttgagatggagtctcactctgtctcccaggctggagtgcagtggcgtgatctcggctcactgaaagctctgcctcgcgggttcacgccattctcctgcctcagcctcccaagtagctaggactacaggcgcccgccaccacgcccggctaatttttgtattgttggtagaga

SEQ ID NO: 113087 - DNA, 1663 bp, Homo sapiens
tgtgaggctccgggcaagcggtggggaggatttagccggtaaccgggcctgtcacccctaacctcggcccggcgggcactgagccactcccgcccgggaccccgccttcatagctctcgtcaggccgaatgcattgctttgctccctctctgtggttcctactatggcccgcgcgccagggaccacaggcttcttcattccatccccacgcttgaggccctggttccggactaggccccgacctcccggcttctagactgccggttctcattctccccgatctgggggagaagaggcccggcctttggcgggcaagtgggcgacaccggcaggagtcgcggcccggttggtgtgggaaccctgctggcaggtcggggtggcacccttggaaggaacaggtggtgcggatgcagcaggctcattcattgcctaaacgcggttctccctccatcatctgtccctccctcttcctcctctcttgggattcacctgtctccgcccggcccggggtcacccaatgacctgagaggagggaaagaaggagttcagagaaggaaagaaagcttttcaaacgactacctccttgtagtcagttgcatactggagtcttcagctcctctgcctccgttgttctcgtttctggagtagggatgaggcatttatttcttagtttccgagcgggaaacagccccaccccgtcactcttctcgggaggtggggcccattgcgagggggcggttcggtaggaagtaaaaagttgagtctttagttgaaacgttgcagacctagacttttcttatacactgaagtatattaacacatgcaaaaacttaccagagaaatgagaatataagaacttttgagatggattttgttgacgctagctcagacttattccctacggttcaaatgtgtgcagtttgtatttttttaaaccataaatgcattgatgtttgcagggactgtttacattgtaaaatatgtcctgtagccttggagctataattaacacattgtagcacattttttgtttggcatttagtatgtgggttccccctttcacgcaaacgtttccttatgatagaattaactgtatttgccaaatttaagacttttaaaatttgggatgtgtgtgtgaaagtgttagccttttcccccgcagttataatttatttcacctgtttgaaaagtagaacaactctggggattcagtttttctagaaatgaataatcatccatttgaactaactttgattttacaaaagtgtccatatgccctacagatttagtgaattcattttgaaaaacattagaaagtcacatgcagtgtcgcaaaactgttaccttgaaattcttactggaattttgttttgttttaagactaagagtgtaggtggagctgtaaaatagttttaggaaaaaagttacttttaaacccttaaaaagactaattggtgtgcaggtagaactgtaacataagtttagaatagcaatttatctttaatctctttttcacaattctttattttgaaaaaaatgaaactgaaaagttgagagaacaaggaacactcataaacctttacttatatttatttgccatatatgctttctctctccctatgtatatgtatatatacatttgtataaaagtaagttgtagatg

SEQ ID NO: 113088 - DNA, 1009 bp, Homo sapiens
ctttttaaataaatcaaacttttaattttgagaagactgtaataatcacgtagtttaaggaataatacagtgcactttactcagttttcccaacactaataccttgcaaaaccatggttcattattataacattgatacaatccaccagtcttattcagatttccccactttacttgtacacgcgtgtgagtgctcgcgcacgcgggtgcagtcatcccttggtatctgtcgggggttgatttcaggatcccgcgagattccaaaatttgcaggtgtttgagtcccttatgtaaagtggtgtagtatttgcatataacctatgcgaatgtatactttaaatatctctagattacttataatacctaatgcaatattactgttatatagttatactgtattttaaaaatttgtattttttattgtatttttaaaaatagtttttacctatggatgcagacaccaaggataatgagagctgactgtatttacttctatgcagcgttatcccatgtatagattgcaccactacaattaggctacagaacaagttccttcagtccaaagtacccccctctgttgcccttttagaaccacatccattatctctcccaccgccctcccatcccctctcgctgcaggctccagcaaccggtacatgtcctctatttgtataattttgccattcttttgggtttagagatagagtcttcctctgttgcccaggctggagtgtagtggctatttataggctctatcaaaagggcactgtaacctcaaactactggactcaagcagtcctcccgcttcagcctccggagtaggggggatcactacagggctactacatccagctaatagtttattcctttttattgccaagtagtattccatgatatggatgtaccacagtgtgtttaaccatccatataatagcaatttttgattaaacatcttaatttttttgtggtagtgttagtggggcaaaaacctgtaagtttattgccaaaa

SEQ ID NO: 113089 - DNA, 1157 bp, Homo sapiens
aaaaggatgggatgaatttaatgtgacatatactatgtaagagtttattttattttgtttgttttttgagacagttttgctctgtcacccaggctggagtgcagtggtgtgatcttggctcactgcaacctccacctcctgggttcatgcctcagcctcccaagtagctgggattacaggcgcctgccaccacactcggctaatttttttttttgtatttttagtagagatggtgtttcaccatgttggccaggctggtcttgaactagtgacctcaagtgttctgcctgcctcggcctcccaaagtgctgggattacaggcatgagccactgcacctggtcctatgtaagagtttaaggaagacttgtgtttgccagaagctggtttttttttttttggtctggttttttttttgttttgttttgttttgttttgtttgtaattacaaacttttaacttatttggaaaattaagtcattagaaaattgtggcctttgcctactgttgatgctatttgtttatctaaaagtttgaggaggttaccagatatttataccactttgttaggatctaggttaagggtaggaaaaatgaggttgccagagtagaacaaaatccacaccttagattttaacctgcttggaaaagatggacatatcctaatgcctttcaatcaagtattggtaggttggttgctgttgctgctgcttccttctctcttttttgctcttcaaatgttaatgtcagttataagaaaaatctaagttgggaatagttaaaatattgtacatcaataaatgtagttttggactttagcctgaatgatttaaattgttagttgtaagtgttaaaggacagaatttttctttcctagaaaagtggtgagagaagttaaaatagcatgatgattatgtttgtgatttgtcactatttgccaggtaaaatgagaaatctaccatttgccaggctctgctctaggtgctttagaatagcactgcacagtagaattttctgtgatgatggaaatatttgttatctgctctaatatgatagccattggccatgtgtaggtttgttttttgttgtttttgttaagacagggtctaactctatcacacagtctggagtgcagtggtttgatcacggctcactgcag

SEQ ID NO: 113090 - DNA, 1023 bp, Homo sapiens
gggaggctgaggcgggtggatcacctgaggtcaggagttagagaccagcctggccaacatggtgaaaccccgtctttactaaaaatacgaaacttagctgggcgtggttgcaggcacctgtaatcccagctacttgggaggctgaggcgggagaattatttgaacccaggaggtggaggttgcagtgagccgagatcgcgccattgctctccagcctgggggacaagagtgaaacttcgtctcaaaaaaaaaaaaaaaaatctagtgagaagtgaaaatcttttaataatgtggtaaatttattctttgcttgctttttaagtgtgtgtgtgtgtgtgtgtgtgtgtgtgtgtgtgtgtgtgtgtccaggatttcactgtgttgcccaggctagtcctgagctcaggtgatcctcctgcttcagcctgccaagtagctgagattatggtacatgctactgcgcctggcctgtttgcttactttttaatttttgtctttctggagtgagatgcagtatgaatgaacaaatatatgtttttgttttaaactgacagcatatatttttaaaattctgtattgtgttagaaacctgaaatgttttaaaaaatattttttaaaaattcttttgcgtcaatagagtgggttaaaaatacttgtttgtgcagagtgaccacagttcagttttcaatagtagtagatggacaacactatattttcagaaaagcagactaaagcttaaaagggaactgaatttaatgttccattttttagatgtgtcaaagtcttgcagtcctgggtcattattggggctcaaactagttatttgatgataatagaattgccatccaaactattggagcgctggttaatgaacagtttccagaggggcgggcatggtgctcggtgtgattgggggactggagagatactgtccagctggcctcaactgaagggatccctctccttagtgtgcagtcttatatcttttaatatttctgcttctgacaatgaagttctgacaga

SEQ ID NO: 113091 - DNA, 1732 bp, Homo sapiens
tatttagagaccttccttggctagcagtcagtccttctcaccttattttcttatttcttactttattctcatttatcagcttctgacatacatttacttttatgtttatcacgttttccacaattaaaatgtagggtttatgaagataaggacgtctgttaatggctctattcacattggttaaaatgatgtaccatagtagatgtttaataaatatttgttatgtgaagtgagtgtgaaaatagtgattacagggcaagagagaaaaagatctttggattgtgtgcttgcataaatttttggagaagggagttaagctgggctttggcattacagagtacattagtgtatgaaataattgtaggatattgggcagagcctatattatggtaagactttgaagtttaatttataaatgaattatagtatttgtttatatagcctttcatcacaaaagcataataagaggaaaattttgttattgtttctttggttttggcattggaggagaaatggtatcaggattaaatgagtttgttgtgaggagcctgctgctgtattagaatcttcagatagtagggctcagccatacgtcatttcataaagctttacaaccgattctgacacgaagtcagggttgatgaccactatatatgatattaagaaatagacctgttataaaatttaaaatataaaatgttagaagagctgggcgcaggggtgcatgccagttactcaggagtctgaggcagcaagattggttgagctcaggagttgaaggctatagtttgtgattattgcgcctgtgaattgctactgcactccagcctgggcaccatagcgagactctatctctttaaaaaaaaaatttgagggaaagtaatcgtagtgttagagttgctttgtgtttttcagaaaatttaaaaatcaagtttaattcttggtatgctgggaagctgatgtggaagagagaacaagtcacataacagtgagcttagccagcaatcagcattcatatctaaatacaattttgctctctatttacaggcaatatcctgttgaggagacaaacttaagattcttagtgagaaatagttctgaaaagaatgtcagttgccaattctgatagtaagaagggtgagtgaagaggcttaaattcagtaatagttctcagtgtaaatgttagggtgtggaaggaattttatgctgtggttgtattcttgacttttggaaatttccctgaaatgccagctgtaggcttaaacatctaagttgttttatgatacatgctgtacaaacttgtattaaagttgtaactttaagaacactagtctaacttgttgcctgtggtttttttcctcctaggtaagataggaaattatattgttcactacttaatatggcattaaaataatcccttacacttttaactaaagcaatcttttctttccttgttatttagaagtaaaatagcttgtaatcccatcgctttgggaggccaatgtggaaaatctcttgaagtcgggagtttgagaccagcctgggcaacatagcaaggctctgtctctgtaaaaaatgaaaaagttacttggatgtggtggtggtgcaaacctgtagtcctagctacttgggaggctgaggtggaggaccgcttgagcctaggagttcaagactgcagtgagctatcatcatgccactgcactccagcctgggtgacagaatgagaccttgt

SEQ ID NO: 113092 - DNA, 1022 bp, Homo sapiens
tatctattttgagccagattttatgctagactttttacatgttagctgatataaactttgtgacactcccttaaggaaattgtaagtatagccaatacttaatgactacattgttacagtatatttctttcttttttttttttttgagacggagtttcgcttttgttgccgaagctggagtgtagtggccgcgtgatcttggctcactgcaacctccgcctccctggttcaagtgattctcctgcctcagcctcccgagtagctggggttacaggcatgtgcctccatgcccggctaattttgtaattttagtagagacagggtttctccattggctggcctctaactcctgacctcaggtgatctgcccgcctcggcctaccaaagtgctggcattacaggtgtgagccaccgcgcccggcctgttacagtatatttctaaatgctttatatacaggtaattccactgtatcgggacatggagattcctaaaagtcgctgcgctttgcaaaatcacgcaataaaaaccacagggcttatggggaaaatgagtttgaccacaacattaaaaaacattattagtgacagattaaaaacaaagataagaacttaaaatggtagtactgttttacatatgttaaatggttaacaaatacataatactatgatgtaaatattgcactttaccttgaaaaagacagtgcttgcttgcagaagtgggcatctgaaggattacagtttgtaaattattgtgaagtggagaaagtcaggttatctgaaatctgatggtaagttgtaacatcagatgtagatgggtgtggttcattgtggctcacaacatacaaggggatctgaggtagttgtttgaggtgtgtgtctgggtgctgctgtgcatgcctatgagacttgttttggctaggtgctgttttctgtgttcatctagagtttctaatagatgaaattcatagaagcaaacatgaaatttaaaatgttaaaaatgctccccatgaattgtgttggag

SEQ ID NO: 113093 - DNA, 1070 bp, Homo sapiens
gagttttgctcttgtcacccaggctggagtgcagtggtatgatcttggctcactgtcacctccagctcctgggttcaagcgattctcctgcctcagcctcctgaggagctggaattacaggcgcctgccaccatgcccagctaattgttgtatttttagtagagatgtggtttcactatgttggccaggctggtctcgaactcctgacctcaggtgatgcaccttggccttggcctcccaaaggtctaggattacaggcatgtgccactatgtctggctaatttttgtatttttagtagagacggggttttgccatgttggccagactggttttgaactcctgacctcaagtgatctgccctcctcagcctcccaaagtgctgggattacaggcgtgagccaccgtgtccaactcctgtggcagatttctgaagcctcttctatatatagttctctgtagcaccctgccccataaattccagcagtttctaattctcatatctactcaggtcagtgagactgctaagctctgtttaggtcccccacccacacccctacacctcttacacctattctgcagtctggaagatgcttctagagacaaatagggatttttcttgggatttaccctgcttctcttctgaaacggtagtcctgtattggcttttgtccaacagctgaaaacagctattttatgtttactttccagttttatagttggcaggaacctcatctagtgtcagttattcttatacatttgggagcagaagtctcagagtgtatggtgccagaatttagcacatgcgactttattatctattagaacaattcagtctcttgttttttgaggcaagtcttgctgttgcccaggctatagtgcagcagccttgtcctcccagattcatgcaatcctcccacctcagcctccccagtagctgagactacaggtatgtaccaccaggcccagctaatttttgtattttttgtagagacagggtttcaccatgtttcccagggttgtctggaactcctgctcaagcaatctgcccacctccacctcccaaagtgct

SEQ ID NO: 113094 - DNA, 1044 bp, Homo sapiens
cagcctaggcaacatagtgagtccctgtctctacaaaaaataaaaatattagccaggtatggtggcgtgtgcctgtagtcccagctacttgggaggctgagatagaagtattccttgggcccaggtggatatggtcgctgtgagctgtcatcacgccactgtgccctgcctgggtgacagagtgagtctcagtcttaaaaaaaaataaataaaagaaattctataccatttatttttctgttctctttctgcatcactcagttgttggactttactaatctatattttgttcctttgtcttttacttcctgtatttgaaccttttgtattttttattggcattttaccgagatttagaagcatatggaaatagcattctgttgtatttaacagagtagagaaatttagcgttgaatttaaagttgtttgtattccttgctaaacttaaatttttcttttttgttttgacagaggtgttatgaacataaacagtatagaaatggattgaaattctgtaaacaaatactttctaatcccaaatttgcagagcatggaggtaagtgcaagtagataaagctttactacatacctgtctggcctctcttactggattgtattcttcccagctgccttaactgttttccagagagaacagaccctctcatctttgacttctgtgagaaagtgaaatttaatactgaattttgaatttaatatcaagaaaatgataacacattttacttgagttctgatttattcttagtttgaatattacctctgtaggaaaagagaaataataggatagaatgctaaaatttactttagaactttggttgagctgtataaattgtatgctttataatcttattcagaaagtgaccatttggtcctttgctcataaactatcatattttttatttatgtttttcagtttctcaagaccaagtcatgtttaagacatgatttgtatattgtaatgttctgaaagtttataggcttttgcttgtgtgaaggtagattattggatggtgagatatttgtaga

SEQ ID NO: 113095 - DNA, 2084 bp, Homo sapiens
taatctcaaataatcattttaaaataaatttaggaaaataaaaaatgtaggaaatttatgtgtattttttaaatcactgatgagtttaacccgtatataacctaggttcacagaaataaagtatattttcaagataaagtttttatattttaatgaagtagatatgtaaggttatcccatggaattcccctgaagaatgaattactagattatctttctagtcaaatagcatgcattttgtatcttttatcttaaaaaaaaggagagtctctttccaataatagagtctggaaatctgtgtttacttggattgccaattttaaaaatgttttaaatctgcaagaaagtggaaagtatcttagtaatctccttgacatttttaattcttaaggcagtgtagcatttgtttttgagattatggttctgttgttatttatttttaatatttatttttttaaaatgttccttttcttctttgtttttgaaaatagaaaccttggctatgaaaggattaacattgaactgtttggggaaaaaggaagaagcttatgaattggttcgtagaggtttgagaaatgacttgaagagtcatgtgtgtatcctttttgagatatatttaaggtttgagtggggtgttttgagctaaggcagcaatttgagagtcaaagttttagatctctcttattgtgctattacagaggaaattattttttaaatagggtaacagcaactgccttcattcagggaacatttttatatacctaaccatgttttaacattctcttatttcacagataaatggaacttgcctttaaaaatatctgtgaaagcttttctcactcttaaaaagggggcattgctagggtctgaatatttgtgtggcactccgctaccccatttgttgaaaactaatcaccaatgtgatagtggtaggtggtgggtctcaaaaagaaaaaggatataaaataaggaatattagagcggcattataataccctggtttagagcacaagcttttggagtataggcttagagtgtgcctcacttaggttcaaaacccatttcagcttctttctgtgtgatcttagagctcagtttcttcatgtgtaaaatggggataatcatacccacctcactgtgttggtttaaagacttaatgatgagatatataacatagcccctgataatgctaagtaccatattggataaatagtttattaaggaagagtaagagcaaatagaaatgtctgagggaggatagagaaaaaattgtgggttgctatttttaagatagactttagcaaatatttctataccaactttgtgggctgacacaattttaagtgctgaaacaattagcaatttttcagatgtttaccaggcccttggcttagtacagacaaagaaaagataacagattttgctctcaaagaacttacagtctggtgaaggaagatactgattagaaacatttacagaacatttaggagtattacataagatgttatggtttattcaagtaattgtcactaatccagtaaagcagaagtatgtgaattgagagtgactagaggactagaaagacaagcaaaggcttaactattaagactgtcatagatagatgtctttccatcatttttaatgattgtatagtgttctgccaatgttttattatgatttatttgagttcctcttgatggacataattttctttaaatatttggcaatgttaaactctttgagggtgggatttttaggagatgaagatgagagtcagttgtgtggctgttgcaatatttaagagaggtaaagtcctgaaatacaggatattagtgatagaaatgggagggagtggaaagataggtaatgggagctagattttaatgggtagtgtttcctagtttataaaaccatgatccaaacggctgagaggatttgatccagttgcactttgtcatttgtattacggaaatcaagattatttttcaaataaaatttgtaatattttgacttgctttaaaaatgtgtaatattaaatatgtgtttttagttcatgcatgccatcctaaacattctggggtttt

SEQ ID NO: 113096 - DNA, 1740 bp, Homo sapiens
tttgcctccataaagctacacaatatggatgtttgaagtattttctattattgttcccatcattgtgttgtaaaatgcttggggttgtgggataaattaatgtgtgttttttttttttttttttgagacggcgtcttgctctgttgccaggctgcaacctctgcctcccgggttcaagtgattctcccgcctcagcctcctgagtagctgggaccacaggcgtgcaccaccatgcccagttaatttttgtatttttgatagagacggggtttcaccatgttggccaggatggtctcgatctcttgacctcgtgatccacccgccttagcctcccaaagtgctgggattacaggcgtgagccactgcgcctggcctaatatggagatcttttaaaggagcacttgctgttactaaaagcctaagaaaaagtgtttatttttttccttttaaaggaaacgaggtatcagttacttcagcttcgacctgcgcagagagcatcatggattggttatgctattgcttaccatttattagaagattatgaaatggcagcaaagattttagaagaatttaggaaaacacaacaggtaataactagaagccattttactaagtctgatcctaagtataactaaaaaaataatgtgcatagtctggcttacttttaattttgaaatagtttcaaacttatagaaaagttgcaggaatagcacaaagaactctacataggggttcattcatactaaactaattgttaatatttggtgcatttactttaaaatttgtgtatctatttatctattttaattttcttccttaaatgtttgagagtaattgcaagacatcatgctcctttacccctaaatgctttagtgtgtattttctaaaaataactgtatagttttcagttctctagatagtattatagggatagattataaaaattaggaaatttaacactgatagactgttatctaattaatccccagcccatattcagaatttactaattgtcctagttatagcctttctagcaatttgatttcattgcaggatccaattaagaatcataccttacatttagttatcatttctcttcagcctcttttaatctgaaacagttttgaaaacttcctttgtattttatgacatagacatttctgaagaaggctgtgcttttgtaggatgtccctcaatttggatttttctgatggttcctcattcttagatagagttttataattttggcaggaaaccatataaatgatattgggtccttctgcgttcattacatcaagaggcacatgccatcagttcgttccatttgattacatggtgaaagttgtatttgcagttgtaaacgtatttttctctctttgtgtttaatatgcagtttgagactgaatagcctattgctcatcaaactttcaccatctagttttagcattcattgattatgattcttgcctgaatcagtattactatgatagtcgcaaaatggtgattctcttaactctagtcattccttgtaggtttattatttggcattctactcctgagtaagagctttcccttcttccccatatttattgtgtgtaaggacttatggattattattttattcaacctgttatatcctaatattgtcattatttactcagttgctctgtagatacttaagaattttttaaaaattagttttatcaaccggatgttatcctttgacttcttacatgtttt

SEQ ID NO: 113097 - DNA, 1400 bp, Homo sapiens
catatataatagtgaaaccactgtctctctctcttcatctggcttgtttccttccataagaaaatgtggagcaaataaacagttgggatgatctgggctttaaaattagtaaacaaaagagcctaggttttaagattgatttttgataattggggctgctaatatcattcagggatgatgtgattggtcatgcagtccagggaaggcaacagtgagtcgacaagttgctgataggttgatagttttttctctgaagttgaatagtaggattagtgagacagaaagaaaagacagttaagcttaaaataggatgcttaattgcttcttggaagacattaaaaggtaaagtctagatagtttttaatgtagccagattaagggctgctatggcagaattgttttgtagctgattaagggatcataaggttaggatattgaattgagtcattaattttgatgctgaagttgttccatatgatatcaggaataattgaggagtagaagatggcttggtgacagtgtgttgagtgaatgtgagaatctggccgggcattggacagattttctgaataaattgaggatgtgaagaggatggcatttctaaataatgtgaacttcaaaaaaggaaggagaccataacataacttggtaaatgatcttaagggaactggaaccaggtccatccacttagcagcactgatttataatgagattttaagagaaattttgaggaaaagttaaaattctaattggaaggttttctcagatattaaaattttttttttttctgtttttaatcaggggaacttctgttgcaactatgtcgtttggaagatgctgcagatgtttatagaggattgcaagagagaaatcctgaaaactgggcctattacaaaggcttggaaaaagcactcaagccaggtagtattgtttaaaacttactaagttttattgtttcttttgttaatatatattttatttactcattgaaaagcacaactagaataatagtggttaagaattggttcgaaatctgaatacaggccaagcgcagtggctcgtgcctgtaatcccagcactttgggaggccgaggtggatggattgcctgagctcaggagttcgagaccagcctggacaacatggtgaaaccctgtctctactaaaatacaaaaaattagcctggcatggtgatgtgtgccttgtagtctcagctactccggaggctgaggcacgagaattgcttgaacccaggaggcagaggttgcagtgagccagcatagtgccactgcattccaccctgggcaacagagcgagactgtgtctcaaaaaaaaaaatctgaatacaaaagtacatttgcaaacttctatttaatatgacagattgagcatgttctgaaac

SEQ ID NO: 113098 - DNA, 1150 bp, Homo sapiens
gaatagtaggagaagcaatatatggaaacatgataaccaaggctttttcagaactaaagaagttctcaggttttaaaagcctacctaaagcagaacaggataaagataattatgtacttaagataaaaaaaattgaaaagaaatagtctaaaataattgttgaaatagtagatgtaagattacaaataattccaattttcttttaaatattagaattttaatatactttgagaagttcgtaattttccagaaaaaatatacaatttatgattatatataacaaagaatttttctttgtttgcagctaatatgttagaacggctaaaaatttatgaggaagcctggactaaatatcccaggggactggtgccaagaaggctgccgttaaactttttatctggtaagtgagaataattgcaaaggaatagaaatgcttttatgatttaaagtttcttttcttggttttaagtatgagtatgcatattaagtttaagctatacattgttagagttgtctaacaactctgctaaatgtaagttggtaaatgtaagtaaatactttggtaaatgtaagtaaatacttgataaatataagcgaaaaggatttttctcttccaaggtgagaagtttaaagaatgtttggataagttcctaaggatgaatttcagcaagggttgcccaccagtcttcaatactttaagatcattatacaaagacaaagaaaaggtaaagtgaaatatgatactttcttttggctaccatttctttgctcggtatttggaattattgattcttgattatctctgcacagtagtacgtgttttgtgaatctcatgtcagtcttcccagtttgcagtttaaatgcttctgattcctcttttttccatttcatcctcttttttttctttagcccagtaacttattgcttgttttctgtttcctttctgctataaacttttaatgagtcactgtaggttataaaaagttgataaggtaataatttcttcaccattttctttcatcttgttcatggtcagaagccagagtgtgcttgttttttgttttttttttaacttaagttttagcttagtcttctttctcctttttaaatttggtagacaaaaagttctgtcagaagagtttttttgatg

SEQ ID NO: 113099 - DNA, 1738 bp, Homo sapiens
agccaccacgcctgacaaaaattaatactttcttaataataactattcagtccatgttcacatttccagttatgttataaatgccattttttttttgcctttccttttttgaagtttgttggaatgaagattcagataagatgtgtactttgaatttggttgatgtgtctcttaaactctttttatcttttgggtttctgtcctatcccttttcctgcaatttatttgttgaagaaatttttttattttttttttcagttttcccagtctagagtttgctgactgtaccccatgtgttgcttaacacattattccttgctctctgaatttcctataaactggtagttcagtgtagaagtttgttgctagtatgatagccagtagcacagtggctaattaaaattttaaaaaattaaataaaataaattccattccttggttgcagtagccacattttaagtgctgctcaatagctatatatagctaatgcctaccatgttggaaagggaaaatacaggacacttctgtcatgacagaatcttctaatggacaggtccaactagagatttgatgagattcaatattgttttgatggttttgcttttgttttttaaacagaggagtgagtgagattcttacaggtggtggcatattcttctattagtaggcatacgtgttagttttatatgttagcaactgttaagaattaccaactggtgatactctattattctttattattttaaaagagaaaattttcttcctctattacctgtttacacaatgtttcagtttacataggaaaagcatgataaatggattttttctccccactccctcctttttaaaatttctttaccagttttcaaaataatgaattgttggttcaatagcatccttcaaagacagcaaatacgtttttaaaaagtattatgaattcatggatttaagcatatttgatgttttatatcaaatatttgatgttgcatattcagcatattaaaatatattaagaatataatcaccaaattcaaaataaccacattacaaatctcaaatggtcccattctttacataccatagtagtagttgataacttcttgggtgttaataagacaagatattccagtttattgctgccactgcagatctggaatcaattgtttttcctaggagttctggttcctgtagtgggaaagcccggtatgggaccctgggtgcatattgctattgggttggtcattgtttctaggtctcagattaatttaatagtacttttttccatgatttcattggttaatcatcataatgttcctttgattatcagcattttcctacatattttacaaatgtggaagaggttcaatgacttgcccaagaatatgcagcacttttgttgcagatctgtcagatggggagttggtgagttccactcctattatttgtccactgagccatcctgcttttactaggaaaaattttttaaaaagcaatctgttgctttctttgaaagcacgtatcagttctcagattttagaaatttgtattaaaaaagaattttttaacgtgtgggttgtatatttaacttacacattttcttgtcagtatattaaaattaaatcatgaactaaaatataaaaatttttttacttgtcatctcatttttggggtatagtttttatttgacttaaattatgcatctttgcatattcagcatattaaaatatattaagaatat

SEQ ID NO: 113100 - DNA, 1479 bp, Homo sapiens
gctttttttttttttaacctcacatgaatagagaacatttttaatttcttccccctttataaataacatcctgatcagtatgctctcatagttctagtacagcttgtctcccccctacctgtttcagttttctttctaggtagttagaccttatttatctcccatgtttgtttcataaagttattatatgaaagggattgtgctaggggttataaggatgcagaaaagaaaatatggacctttccaaagatcttataaacttaggaggagttttatagctagatacataaataaactcctttcatagtacctcccttgttaataaacatagggaccattttggggggtgctcttaatatatgtaatgcctcatcttggtttcttctccctcttctcctaagatgatggaaaggaggaaccaccaaccacattactttgggtccagtactacttggcacaacattatgacaaaattggtcagccatctattgctttggagtacataaatactgctattgaaagtacacctacattaatagaactctttctcgtgaaagctaaaatctataaggtaaaaatctttttttctattttcttataaggtaatgagacttgtcatgaactttttctctgtattttatagattctaaatataggaaaagtgacatttgataactcaaaaaacatgaagtaacaagtatagtacatttctcagtccaattactttgagacttgtggtcatgctaatttggtgatttatctatatccgtatacacacacatacgtacatacattaatgtatatgtattcacacgtatctggtaattctcttgggtttggagagtaagagtatataggtaatccaaaagaaattttatttgctgtgaaatgtgtatttctattaaaatttgagtatgataacatatcagtatctggcaatgttattgagatgaaactgtgaagattctattatgaattctacaggttatctcttttgacttctcaactcctgggccttgcttgagaatttttagtcatatattttagtatcatcttaaaataaagttggcttttctctgtcatattgcaaataaaatttagtaatgaaagctcttgagggactgataataaaccagtaatttgtttagcaagaaaataatgaaattaagtaatatttaagaagtttttttgtttgtttttgtttttgtttttttttttttgagagagagaaagagtctcactgcatcacccaggctggggtgcagtggcgcgatctcagctccctgcaatgtctgccttccgggttgaagcaattctcatgcctcagcctccggagtggtagctgggattataggcatgcaccaccatacccagctaatttttgtattatttgtagagatggagtttcgccatgttggctaggctggtctcgaactcctggcctaaagtgatccacctgttttggcctcccaaagtgct

SEQ ID NO: 113101 - DNA, 2432 bp, Homo sapiens
tagccaagattttaattaaatcactgtatcagaagatactggagtcaacattgatataaaggattttccatttagagggttgtacaatggacttttaaactggtttatattcatgtacgttcagataaattttttaggggtcaagggaactaaaatttattgaatacctgctatgtggtggtgttctttttcttgtattaatccctaccctcaattatgtagacctttgaaactacatttgtgtttcaaagtttcacagtgttgaacacacagtgtgtgttcaaaagtttcacagtttcacctgtgaaactacaaattatttttagtagttagagaatatcagttgttttcccatgttaactattctttaagaatgttttaaaaatttttttgaaagagtcccaatcagcttaacatctttgttttttaaaattctgtggtagaatgatgtctatgataaaaagtgatcttgaaaatatttgatttctgtataggaaggaacatcagcggtagagaatttgaatgaaatgcagtgcatgtggttccaaacagaatgtgcccaggcttataaagcaatgaataaatttggtgaagcacttaagaaatgtcatgagattgagagagtaagtaccttctacataaaagttttcttgttttattctgtcgatggttttggacaaatttcatagtttttttctcttctatttctttataattcatagtaggtgctttttaaaatcagtattcacttttttcagttttcatactggaaatatagactgcattttcagccagggtctctattgtcttgtggtaagaactcttttttaaaaaactttatggaaaatttgtatcttggctatgtttttattgatttttgaaccttccaaattgctgctgccgctttagtagtacatacacagctgattaaagtactcctaggaccctgttcattgtagaatttattgatgatgccatatacccttggtaagatataaatgttggaagacttttcacaatatttcttctgtagcttatctaatttcatgctgtttgataaaattgttttcttaattctcttcacgtctgactcatttccatgactagtggttggtttttcttttttgtgttttacacagataaacatagtttatataactaatttcacatttgcaatattgtcaagtatagaataccaaagcttagttgaaatgcatcaagttcctgattgcttgacttacttgctaattgatttcttttccacataccagcatcacattgcataggattcagatttgtatcctcaaaaaaaaattatcaaatacatcttataatcctttgcaaatgattctaaatataaaaactcaatgtttaacatgtgagtctacttgcactactatgtaaataaattatgtttgatgttgtcacaatagctttaagtataattaaggaagggataatgaataaacatttttaaagcttcctttttcaacaaatgattctgtgcctgcagtatgccatatcctgtgctagacaatggctaactgtatttgcttatttgaaatgcaaaatattcctgttgaataattgtaattgtttttttaaaattttactagtttttttcatgccaaagtaacaagtattccaatgctttgattttatagttttcttagccattgctgtacttcggtataataataaaaagataattttgttagcattttatagaaatcactgatgaccagtttgactttcatacatactgtatgaggaagattacccttagatcatatgtggacttattaaaactagaagatgtacttcgacagcatccattttacttcaaggcagcaagaattgctatagagatctatttgaagcttcatgacaacccccttacagatgagaataaagaacacgaagctgatacaggtataatattcagagttcttcttgtgctctgatgtgtttatgtgtatttatgtgtattatgtttttcatttaatagtattgctccatgtcttgagcaccacgaggaaagatattatacaaggttctctaaacaacaaaagaaaaatgtttacttttatgcttccaaagttaaacaagaatttaatttgcagttattcattggcatttaagaagtttgcatgttatgagttttacatttaatatctggtttacccaaaattataaattgctaactattttacaggtactagattgctaattgtataattagtattataattctacattagtgttggctattagtattactagttatttttttgagatggagtctcgctctgtttcccatgctggagtgcagtgcatgatctcggatcactgcaacctcccaggttcaagcgattctcctgccgcagccttctgagtagctgggattacaggtgcccaccaccacgcctggc

SEQ ID NO: 113102 - DNA, 1910 bp, Homo sapiens
catgggtgacagagtgagactccgtctcaaaaaaaaaaaaaaaaaaaaaggctacatacatatggggacatttacatccataccatgtaatatttttttaaatttgttttttgagacagagtttcgctcttgtttcctaggctggagtgtagtggtgtgatcttggttcactgcaacctctgcctcctgggttcaagcaattatgctacctcagcctcctgagtagcagggattacaggtgcataccaccacacccagctaatttttgtatttttagtagagacagggtttcaccatgttggccaggctggtctcgaactcctgacctcaggtcatctgcccaccttggcctcccaaagtgctgggattataggcatgagacgccatgcccagcctcatgcaatattttttaatggaagtttggtaggatcaaataatacttaaaattactaatctgattaacatgcttgttaattttattaattaacttattgcctgcagcaaacatgtctgacaaagagctaaagaagctacgtaataaacaaagaagagctcaaaagaaagcccagatagaagaagagaaaaaaaatgcagaaaaagaaaagcagcagagaaatcagaaaaagaagaaggatgatgatgatgaggagataggaggtccaaaagaagaacttattccagagaaactggccaaggtacttaataatagtgtttagcacaattgagtgacattttatgaccagctcttgtcatttttatactgtcttatttgacagtatataaccttatgtgatataggttttagagccaaaaattattttattttttagtattctttctttaatattttgtttctgatcgtgtttcatgtttaaaacttgaaataatgatcctgttccaaagtcatatagtatagtatggtggaaaaaattttggcttttgagtcattcagatctgggtccagatattagctcttatattttcactgtgtgcccttggacactttgtctaacctctctgatggttttctcatctataaaatggaactaagaaaatccttatttaggactggagaaaatacatatgtaaagcatctaatgtctgttacagtggtaacatgcaagtttttatgtctaggctaaattgagtttgttataaactgaggactatacgtgtatctcccatttacctctgttgtcagtttacattatttcttttctagcctaaggctgtaaatattttccctaggccaaaatctgacctgctggttttaaccattaagctgaaaccaagatactcattgtcacatgaaccattttgattaataacattcctttgtcctttcttttgaccctagacatcttcctgctttgtatgaaaataattgcataatttgttatgttaaagcaatataggaagcagtcgccccagactttaattttagcctcactagtaaggaaaggctcaaaatcatttccctgactgctttataaccaaggaaaattataatgccaaacaaatagagttggagaatatgttttgaattctgtccaccagagcaggtggacagtagtatcacgtagacatagtgatattgctatgagaaatatagccatgtgcctatagttccaactatataggaggctgaggtgggaggatcacttgaatctaggagttcaaggctgcagtacactgtgagctatgatcatgcctgtgaatagccattgtactccagcctgggagacatagcaagactctgtctcttaaaaaaaaaaaaaagaaaagtagcacacacacacacacacacacacacacacacacacacacacacacgaaatatagaaaaatccagttggattctacaaggatttattgacatgtttttacaaataattgtatacctgctagga

SEQ ID NO: 113103 - DNA, 1955 bp, Homo sapiens
acagggaatagtcttgtcttaatattcagtccaggagtagaatagtagcacaattgcattatacctgcctagtaatgattgcaagtatataattactatgacatttatgtaattaataaaaattggtaggaacacagttctataaatattaatattttaaaatgccacctcaccattaatatgtcatttgaataaatacgaattcctgtagaatttatagaacaaagcaagacagaatggatagtgtagtattttgaatagcttgattatacttcactttgtttgaattataaagaacattcactcattctgtcatggtctctgtagtctcctttgtacttctcctgtcctagtttacatctcttctttcttcccccttggctatctgacctgtttctctttctgtctttctttctctggttctgttttatctacttccttctttttggatagtttctatccagcaataataaagtatctagggttaaaaatcagttaagaattctagaattcaaaatccccttttttaggttataggaggttaaaatatgacagtgtttttctgggtgactggtaagtgattttattttttaaaaataagaatttttagtagaataaaatcacattccccaagaaccttagtttcatttgtataatatcttttatttttgttaggttgaaactccattggaagaagctattaaatttttaacaccgttgaagaacttggtgaagaacaagatagagactcatctttttgcctttgagatttactttaggaaaggtaggcaattagggtacagtggccctgacaaaactgatcactgtatttcttaggtatagtcacccaactctgatagccttaccactgtacgattatttagcaaatgccaacgcagctttctcacagaaatgcctgctatgaacagaatgtgtagggagatataatgatataatcacttcttttaggatattagaatcaatgatagatgtacataacataactaggattcaggtcagatgtaattaccatgtatatggttcaaagaattgatcatgtggataaaattagttaatacacagagcttagacctagtacctggtatatagtaagcattaaataaatgttagctattattagctattgttataaatagaagataaaattttgagcctggatcttgaaggatggattatatttctaaaggaaaagatacatagaaggcaagagtatctgttaagaaaacataggagtgtgtaaataatgttgaggttgtctgaattgcctggagcaggtaaaagatgaatgaagggtcttggtttccaggtttagaatgcttagaatatatatgtagtagataataagattttagagtactgagttaatattttccaagtggttaattgaaaaaagagttcgtcacaaaggtgatgcatattaaaggaaagagaaactgtttaataaaatcaaagagaaggttgttgctctaaacagtatatctactaaaggaaattgaataacatggtacttctctatatgagtatccatttaaaaagtcatgtttggccaggcgcagcggctcatgactgtaatcccagcattttgggaggccgaggcaggtggatcacctgaggtcgggagtttgacaccagcctgaccaacatggagaaaccccgtctctactaaaaatacaaaaaattagccgggtgtggtggcacatgcctgtaatcccagctactcaggaggctgaggcaggagaatcgcttgaacccgggaggcagaggttgtggtgagcctagatcacgccattgcactccagcctgggaaacaagaatcaaactccatctcaaaaaaaaaaaggtcatgtttatcaaaagtaaatgatgttggggaaaagttgctatattatattattccaaaataggacacagaactacctataaattgaaatttt

SEQ ID NO: 113104 - DNA, 1050 bp, Homo sapiens
tcacttgagcccaggaatttgaggccagtctgggcaacataatgataccctgtttcaaatcaaaacaaaaccaaacatatatatatataatatatatatatatataatatatattatatatatatgcgcttcctatacattttttaatttcttacggcaaaataatcactacaaatcaaagtcagtggtctcttctggttcagcattggcattacaaagaagcaggtgtaactaaacttaaatgtatatcataaaatgaaggtagagctttcttttatttcttttttcatcattgggctcttaaaattcactcagataggaccatcgtcttccatttctcattcttatgtaggtatcagagttgacagtgctaaacacctgaaattatcttcacagtttgtgagaaatctaagtcaagggtctgtgccaatgagccaaaatctgacctttatgggaccatgtgggtagtacttttcaaatacttggcttaagcccagcagctttgtatacctttgtggaatcctgaattcagcattttggctcacactgttgagataggatagtcccccaacctccacattattctgcttatttcagaaagaagactatcatggtcctaccacaaaaatacaagtattattagaatgcttgtgtttcttcatagtctcctttactgtgcatgtgttgcatatacattctattttattgggtagatatatgtggtatacctctattgttctctttctttggatggttaagctaatccccttagcattattattttttgaataacagtatctcaagtagctgttcccattcttctaataaagtgccacaccctctgcatatatatcttgtttgccttttatatttaaataagtagaggataagatgttggttttaccttgaaataaatttcctatttccctctcatttagctgccaaaatggtatattacttagatccttctagtcagaagcgagctatagagttggcaacaacacttgatgaatctctcactaacagaaacctccaggtaaagagtttttc

SEQ ID NO: 113105 - DNA, 3882 bp, Homo sapiens
gcatgtggaaactaagtagcttttctaagtgaaaatattaagaaagcaaacatgagaaatgcaaatcaacatgaatcaacaaaaaagataagaagcagacttacttaggggtttggttgaaagaattactcattttcatgaactaatttttcttgcaaataatcacttcatgtttgagacactcttttctgcttagttattggatgtgccttaagttgctctttaatttgaacacaatgttgaatacagtgtttgagtttgctggctggctctaagctttcaaaaatattagaaggcatatgtgcagtaattggtattggcattgtaaatctagatgtttatacccagggccaggctaggctgaggtaacattgctgcctaaggtcatacgcttgctgagagtgagtggctttttaaatgtagcactccatataccttgcttgcctcaccatagtcccattcctgtttctgcagtcatccctgtttagccttttgtataaatcctgcaattctggagaaatggttaaattaggccttgaagaacattctaatagaatgcatatgcaggagtaaatagctaaatatgtgtatttatttcttattttagaaatctcttgctgttgaaatgtctaataaattcccagtaagaacctttttttgaccagttacaacatgactttttttctttccttagacatgtatggaggtattggaagccttgtatgatggtagcctaggagactgtaaagaagctgctgaaatttatagagcaaattgtcataagcttttcccttatgctttggctttcatgcctcctggatatgaagaggatatgaagatcacagttaatggagatagttctgcagaagctgaagaactggccaatgaaatttgaacatcactaaacaagcaaatggaatgactttggaccatatctagtatataatatttttgtcacgcacctgctgcattgctctaacttacacagaatgagaggagtaaatgttcttgccttcaaatagtgttttacgttttttatcctgctgaaaaagtatatataaaatatctaacattacaggatagaggttcagtttcttaaaaaattaaagctgctaaaattgagtggttaaaaaagataccttatcctattcctccccacccacccatgtttttaaactaatttatataaaatctggaggctgttacagctaacaaagcaggtgtgtggcagaaatattactttaaatttgtcttgtgagattttactatatctcagacagcataaatgctgttttagcactggattctttcactgagcacaaagagttgttggggctttagcatctgactgattttgttacggggttgattctgaccataggaagtatgcaatgtgaatcactatttacagagaaacctacaacagatgcttgatgttgtagaaactgggacatatagataccaagcaaaattataagaaacctataaggtgttcaatacgcttgtgtttccaaaattcactgtacatgatcagtttggtgttcttgtaccacagtttttaactgaaggaaccagttgtaacagtctcaattttaactaaaacttgaagaactaaaacaacaatgcaaacctttcagcattgtttggccaaacttgttaaaactgtaatgcaagaaccaaatgcactgtgatgtggcaccaactaattagcaagcatgaatttttcacccaagagtgaaaaaaggaaaatctaccatggcttgaagttaaagagcagaactcctgactaccattctatgactgatcaaaagactaatagttaaaaacctcagcaggccttgttcacgatatgcagaaaaaaaagtgctgcagtttagatacctctggaatttttccacagtgtcacaggtttgtaatacttgaagccctacatttctaagaatatatttcttgctcagttgtttcaggcaagcccaagactttgtaatttttaaagggcccaagattttttttttttttttttttttcaaataacagaccagcttctttttcttgcagttacagatgtaatttcctttttgttgtcaaacataaggtaccaaatatgatgcaataaattgttttgaaaaacagttgtgtgaatatttcaactaatctgtgttgggcttctgtgaaatacacaggtggaaacagaggtgcaagccagaggcaatgtaatatgctgtaaggctagtgcagatgggagctttttagaaggggctaagtgctggtgtcagggaaattccataatgaagtagaatgctgctcctgcattaagatttcattgagggcaaggctggtggcaggtactatgaatgtaattcataatttaaaaggaaaactaaaaactattttgatttgggaaaatgagccttaatttgttaaacctatacactgagaactagcctcaggcttaatattctcattgcatttgcaagatctgagcaaataagattaagtaaaacaaatcaattgtatatataattgacctttttgtggaacatgtagtttatagaaagtatactctaaagggaatttgccgaagaccttttactgattgaacagttgtgctacaatcaacttttcatagtacatgacctgcattccacatctcagtctaacagtttagtagtgatgtaaagagaagtacaaaccgaactccagtgctttgttatgttttattaactggccctgtctcaggaacatcttaacagatggcaaaaaaacaaaaactttttttcaactcctatgagtggcaactgaagttcttattgttgggaaagaacactagtcctacctctgccactaatgaggtgtttggaggaggtaccagccatataatagggggtgtatgtgtgaattttgtttaaactctactgtatattgaaatgaaattcatttatttgtcttgacaatgttcaaatgatgtagattgtcttagaatgaatattcataagtactcagaactcttaagatgcagatgccacccgtgaggagctaaattcctaatgtgtattgtattccaacccaattttactggaactattgaataaatcttttattttctttcaggtttacttgatagtggatacattggtgtcagaggaccttgactgggttcattttatgtccagacatcacccctgaaacactgtactgtactatcttgctctgagtagtatcaactggatcgtctcatatttgcctcattcatcctattaatttcaaatgatactgtgggggaaaaacagggttagaaaaacaagtggaaaaaatggagtgatgttgtaatctaaacaagtgccttatgtttattgctaagaactggtgttaccaacccttttgagaagaaagggtctcttgacctgtattaacataggaaagtaaagttctttttgtttttctttatattcagctactcttgtcatttctcgttgaaaaactaaaatctgactaggttagtttactcagctttaattagatagttgagtcatatattttcaacatttttctgtatcgtatttattatgcacaaaaataaagtgtgatctctaatagcatggctaaaggtaatgccaatattagtgaatagctttgctgtgggctttatcaggcccttgtttttcacagtgttgtttgtactccatggtgtattgctattagagctgtgaaatgaaagctgtgactttatgaagagatcaaaaaaagtgtggtccagattcaggtaggttgtggtaagttcagggaagtcttgtatgatttctaagaatatttcagttaccatgtatagtatttgggaaaagctgtaatgtaaaatattggactttgttgcaagataggtat

SEQ ID NO: 113106 - DNA, 1052 bp, Homo sapiens
aggcaacgactcagcaggcttttaaataaggatcagcggtagatactactctgaaaatacagacatacctaacccccaaatacatattctcttgttatccctacaagactgcattttccataaatgaatgaattactattacaaatcttacatgtgaaaggatccataattctgggacagacagaattcaagccgaacatgttggcctgatagggtagaacctggaaaggagatttatttgctacagaatcgtatgtcaagctaaaatttaccttatgagatttgttgaaataacattctggatagaactcccaaatctgtccaatcttgtttgtttcttaactggttaaagaatatttgataatgagttaggctatgttgatactgttgatcgccattcttgaatttatagacattgatggttttctctaattttacatactgggaggtctacattttttagtctgtcttcacataggtgccttgccttatgctttagttacttttctttgatccttgtgacttagctgttaaatatctggtataaatacttggtgctttggtacaacagtagtataatgtagttaaagcttttaggtcagacagaactaggtttaaatcctggctcaggtcccttagataagatactaagaatttataggtcatacagctgttggaaggataagtaatatactgtatagaaagtgattaccacaacatctgcacaatgtcattatgtttataaaaggttcctttctgtttgtcagtgttatacttgattattcttatttgtcttctgcagcacatttggccagtgtttcgggaagtacttttttttttttttaagacggagtctcgctctttcacctgggctggaatgcagtggtgcgatctccgttcactgcaacctctgcctcctgggttcaagcgattgtccgcctcccgggttcaagcgattctcctacctcagtcttccaagtagttgggactacaggtgcctgccacctcgccctgctaatttttgtatttttagtagagacggggtttcacca

SEQ ID NO: 113107 - DNA, 1628 bp, Homo sapiens
cgtgcactaccacacccagctgatttttgtatttttagtatagatggggtttcaccatgttggccaggatggtctcgatctcttgacctcatgatccacccgcctcagcttcccaaagtgctgggattacaggtgtgagtcactgcacccagccgagttgctttcttactaaatcctattaaaatatgcaaaaataagtcagattttaaggcaaataaagtgacataaggtgctttatattttattttggtatatttaaacagtgaaaaactaactgaaagcacatgaagagttgtaacttgggggaaaataggtaaacatagcttctagctaacacaggagacctattcttagcctttactaatttcaagcagtgtatcccatatggtatctcttgctcttccttcaactccaataaatttaatgactaaatgccaagttaacaaatcaacttccatttggattgtaggtgtgaaggcacaactctaattgctattagtctacatgtatttctgtaatagtattgtgtcatatcaatttttaagatgtctaaattttatggtcacaagttatccctcctcagtatgaaaaataaattagatattgaaaaatgtctaaacttcagtgatggaaagaatatttcaagaagttttttaacctaaatacttttattttgaatttaagtctttgcacataaaatatagcaagcttacatattaaactatttacgtaaatggaatgtaagccatgactttaactgaagtgttcacattcactaattttgatagattgctgtccttaataattttggaggaaattaagccaaatgattattgtactacagtattttcagaatatgggaaatcaattaaaaatgtaatctaatctagtttaagatttttgtttaatcatcatggtggtcctacctggataatttaactataaagacaaagtaattctattaaatgaactaactgaaaataataattataggaagtgattattccattttaagtattagagctcaaattggctttatttgcatttagggagatcatgttttcttaatcatgctggaatttaaaaattgttttacttgtatcgaaattaaccttgatttataactatttttgtaataaaacaatgacagctgtagtaactatgatgggtgtaacaacatttttttaaagaagggaatctgtttatcgcttttcaaaatattttctaaagtgggggaagaaagtttatagactttccaagcacatttatggttttttattactattattatggttttaaaaagagtaactttatttctttttgtaaggaattaagtaatatcctttacagttctgtgaaaggacttattttttaactgtaatatttattagttttaaaatatttgtatctcatttgtaacaatttgttttaattttttatatatatgtttttatttttaaaaaacataccagttgaatggggttaaagctttcaatatcttaaaatatttataaaacatttcactgttgcaaaatcacttccaaaatgatagctatctaacaactaattactaatttttaaagaacaaatcacacatttaaaaaatctgtagaatttattttaactat

SEQ ID NO: 113108 - DNA, 1276 bp, Homo sapiens
ttgagtggggttttttttccactttggtcctggatataatgaaatgatacatattaggataaattttcactgtgtatagtagcaatacgaacacacatgccaatgtatcaacatatctacttggttacattttggtttatgataattaaccttgattcatgtattgggaagctacagggactacgtaatacctgcttatcacataggaaaattatgtccatgattctgagctcccttcttcaaaagtttcctcctgggtgttctatgttctctctttatcctgaaatacatttattaggttgtgaggtatgttgaagaagtagaagccaggggtatgctttcagcatttattgcaaccaaaagttaaccccatcacggttaacgagcatctttggtctcttgtggaatttgaactaaaactatgagccttattcaatatctataattctatgatttttttaaattatgggaaattaatgaaagatgtttacatgaataatgtttgcccttactgtgttatgaatgagttttttgtagtgtgtctgggtgcatgatgcaagagagtaggaaaaatgtttctgaaacaaaacttgacaaatatttgtaatgaaagtaaatttaaagattgctataattgcgctatagaaacaatgcaagtattaaacaaaatatacaatcatctgtcattgtcttcctttggtcatctaggttagaaaagcaataatggttttcttataatgtgtctacctgtatatttaaattactaagtgaactttacattttaagttgttttaaaatattattagccatttatcattttcagagcattctagtaagagcggaggatttgatatgattccacatacacccataaatccagaaggattagccacaccaacagaaagtgtcggattgaatacatacatggtaagggtatggaatgcaaatgagatgatcagggcaaatagctgaaaggaaacttcaattcatgatttaaagaaaatatagaaattttgttagacgttgtggtagattttggcagtctgaggatgagtctgagctgagaaccctggcaatcccttattcctgccctaatcacagtcaacatttccgttttttttttaatctgagatgaagtctcactctgtcacccaggctggagtgcagtggtgcaatcttggctcactgcagcctccacctccgggattcaagcgactctcctgcctcagcctcccaagtagctgggattacaggcgcttaccaccacactcagctc

SEQ ID NO: 113109 - DNA, 1721 bp, Homo sapiens
tgtgcgacactgtaatctcaaggagattcactcagagctgtctcagtccaactcctgcatgaccagatcttcccttagcatcttttctgtgatgaaatattatcttgtgttagagttaggaataggaactaacctgtaggagcatgtccccaaatggacatttgaatggactaacaaaaacaactggaaagactgaatttccgacacaaaggaatgatgggatcaaaaagaaagcagtgaggagttcttgagtcttgtagtacctattcttattttaacttgcttcatccttgatctacctgagacactaagaaggaaattagttttccaagagctctttgaacctgtctaggactgtagttaaacctatttgccctatgggggttcttcacactcgaaaaactatttccttatcaccaacgacccacccagaaaggccaatgaggccaaatgtaacaatttttaacatttaaatataactattaaaattgcattaattgtgaacagtgaattaaagggttgtcttctccaggagacagtatgtggcacttttcgtaaatttcatttaatatataaaaatttaaatcactcactgcaacatgcatttaaaatcttccaagaaggtagaggtatcattttctgttttgctttgttttaaaacagttgcctcaagcttctgtcttaagagtagtgacttagaatccagatatcttttgttttagaaaaacaagcaaaactatgttgcaagactgacagttgtaatgtttatttgccacagatcaaaggttcacaaagtatatcaaatttacatctacttggggtaccttgatagattattattgtttttcttttatctttcccttcaggaatttggaaactcgttgtcactttttttaattttaaaaatactaaattgtaatagttttcttttgccaaatgtgtgcgtacatattcaaagcaatgaaactatttcaagccatacaaccacaggggtgggaacccttttcacaaattttaatgtgtttgtatgtaaatagatgtttgtatgaaatattttcatgatagaatgaatatatttaaatgaagttgaattattccagtgctacttaaacacattacaaaaattttggtgagaattatctgagtctattgagatgtaatgcagatcaattttgatttttaaaaatcaaaagcctacaataactctgactctcagcaacttcctcggcgttgttgcacctgacgtggagagagctcgtaggcttccccagtgcctcagccgcttcctggtggaagttaggtgctaatggaggtgtgttcaccttttagtgatatcactgcaggcctttgaggggcctgagagtgaatcagaggcattagagacaccggtgcagttatctggagcacaatttctttgcagggcagcagaatcagaagccagacttggccatgtgaacctcgaaactcggtttcccggccgccatcaaccgccacccttactgcctagtcacacacgtcagggaggctgccctcagtggagttggggttgagaccccagggtgggacttcacagttttgccagcaatctctaccttctgacttctgcctcgcagagaggaaggagaggggagcatctggcaaggggcccatttctcagcacagtacatttcctgtctcagctctggaagactatgcacccaagcaccaaacttccaaccaga

SEQ ID NO: 113110 - DNA, 1049 bp, Homo sapiens
ctggagagcagctgttgtgctgatctgtagctgtcagctgtgattcctgtcacctgagtcagtttggtctggaaagcgaaggccttccaagctgtagcagatagtgagctccagctgatgagagaaggcttcagtggaagaagagtgaggacataggcagaaggaagtttgctatttcttgtcagttgcacattgctttatgaagactacaacaaaagtgcttaatcccaggctgctcatgactttcatttcaggtggcccttgggcacattgacagagttgcccttcccttctttgcaacaccaggcttcctagagcacccggttgcatgctttgcagctaggtggcagtggtttcagggagatccagttggatccctgcttgaaagcttaagccaatggttcacccatgagaggaagttgtcagtgcttccaggaagattgcccaccaaaggaactgaatagtttttagatttaaaggcaccaggatagggtcactcttactctgtagaaagagaccgttctatacactgtgacggatgggccagggcctctggacttgcattctgataggtgctttaatttaaatgtgcccaaagggagtgactgtcttcaggagaaagatggcttgcattaacctcgatcaagtgggttgtgcagccaggtcagggaatacggtcagggagaggatagtgctggtcatgcccccgatgcagctatgctctgaatgatttcattcctgagagtgatagcattctggtcctggctgcagtggggtacaatttacgtcctaagtgggggctactctaattatcccattcaaatggaatttttttcaacattggatagaaggaattgaagagttgtaagtagtgattagtctgctaatcagttcttcagatgagatattgaatggtaacactctgagcttaaaactcagcagtgtgtctgtgacctccacgcaaatcagaggaagcaatgcatccacgctgagcctcaccatgtcttcctcccaactctcttcatactctctgtgtcttccagctcttc

SEQ ID NO: 113111 - DNA, 1508 bp, Homo sapiens
tccatgtctaataagctctcgggtgaaactgatgctgggtgaccacactttgggcacataccaggtgtgcccagggaagagtgcctgggggtgattcctgtatcagcccctccctagcctttgcttccaacctcctggtctggcccgggaatgactgtgtgcatcttgatgtttaggtttgtccacccccgttttgggcccatcaaatgcatccgcaccctgagagcagtggaggccgatgaagagctcaccgttgcctatggctatgaccacagcccccccgggaagagtgggcctgaagcccctgagtggtaccaggtggagctgaaggccttccaggccacccagcaaaagtgaaaggcctggctttggggttcagagacctggaatagaaacttggatctatgcactacgtttatctgacaatgggacaaccagggactgctcatgctgtgacgtcacatcctctcaccatgcgttagcaacgactttctcgcatactaactaggtttgactgtattactcataccagatttaaaattagctagccttgcaacaacgtcctactgagaggtattgtcgagcatttgacataagacagcgtgatgttctttggtggttcaagtctaaatctgtaccacattcggagatgccaaatgattagactgaaacagggaaacggggtttttcagtcatttttagtcagtggtttttccatagtgcttttttcctatggccagtgcaaattgtgttagcacacttgcatatgtgccgtattaagggttgacaattactacatctttattctctaaatgtagtataatttgccttttaacctttgatctgtatcttgcaatagaatggctttggtttttttcttagtaaataggagcccacttctaaagtcatttcacccctcagccctattctctttcttagataccctttacaagagaaaacttccaaatggatttttgcatcaatagcagtgtgtaggtctctctggttctttctatatcatcattttattattatgtcctaatataaagtactggctcatagggccagggtattattatagaatattattctcgcatgtaaacaaagatatctttgctttaagatgtgagaagaaatgaatttactttgtttgcattaagttatggaagagttgtaatatatactttaagaaagaagagaagaaaactagtatctctaagcggtaactatggcaattttgcaatattttcagtagtgctagtaattttttcctccttgagtacacattaaatgtacataacatagcgcggtcaggcttgtggcacagtgcattgaattcaaaagtcaaacagcaaatttgaattctaacagaattcaaaaaaaaatttttttagtcagtactactaaggcagacacactgattactaggtacaaatcaaaccttgatgctaaaactcttcatcattgtaatttcaaagcacttacctgcttcaaaacattgtaaacta

SEQ ID NO: 113112 - DNA, 1042 bp, Homo sapiens
aggcttttttccacttttgatcactgctgtatcccctgcacctagaagagtgcccggcacatggtaccgcttagtaaacatcagttgagggactatcacatatgaataaaagcacaattacaatttaatagtgggggaaatggtataccttgagagtcaacagttttgtatgaaaatgtcatcctgttggcttcaaaaggctgggctgctgtcatcaccagctcctggggtgagttcatcaggagtggtttggagaagagaagcctgattgttacactgttagtaacccctgttgtagataagaaggcatgctggtaatcgatggctgcctcctggtcacagtgatttcccacctgtaacaaaggtggaggacttgcctagagtacattcttgcatcccttacatttctggttccatttgtgttcttactttgtttttttttcttttgcctcctcttctttatctacttttaatacaagctatccagttatatttgtgtgtgttttcatcagggactttaaatccttttttttcatatagaacaaggaaaaatgaataaatagttaagtcgagctgcctggcactgaccacacatgtcatttgcactctcagtgtgtggagacatgccttgttttgttttgttttatttcattttgtagtgctcaaaccttgaagttttggctgagtgtggtggcttacacctgtaatcccaacactttgggaggccaaggtgggcagatcatctgaggtcaggagttcgagaccagcctggccaacatggtgaaaccccgtctctacaaaatatacaaaaactagccaggcatggtggtgcacacctgtaattccagctgctcaggaggctgaggcacaagagtcgcttgaacctgggaggcagaggttgtggtgagccaagatcacgctacttgcgctccagcctaggtgacagagtgagaccctgtctcaaaaacaaaaataataataagataaatgagttaatatctctgatgtcctttgacctttggggagaaaggtcctctctaag

SEQ ID NO: 113113 - DNA, 1054 bp, Homo sapiens
gccaggcatggtggctcatgcctgcagtcccagcattttgggaggccaaggcgggcggatcacttgaggtcaggagttcaagaccagcctggccaacatggtgaaaccccatctctactaaaaatacaaaaattagctgggtgtcatggcgtatacctgtaatcccagctactcgggaggctgaggcacaagaattgcttcaacctgggaggcagaggttacagtgagccgagatcatgccactgcactccagcctgagcaacagagcaagactccatctaaaaagaaaaaaaaaaaaaaaaaaaaaaaaagagcagctgggccaggcagccagctgtgtcctggccgagcattcccgttcttagggtctgtgctgcagtcacatgctggccctctaggggaacatttcatgctctttaaagctctagcctgtgcacacaggatgcctccatttcatcttagaccagcggaggtgttctggaacacaagacaatttcttttttcacaaacagaagacaagagtgaaacaaagaaagtataagaggcataaaaacattctagcttataaatgacaagtttctggtttgtaagcccactcccagagggtcacatcctgttctacttcatgtcttatttatgaggatggctaaactctagctcttgagtcttgatgtggctttttctggtaccctctctgggattcttcttattccttagcaacagatctgtttatgaataagcgtactatctgaaattggttttctctttgcctcgtgttttgtaagcatggcttacctcccattcagtttctgttcccatctgagaaataggcctcttcctccattcaactgacagggctgaccccacaatgtcacaatgatgaatggactcttttttgacatgaggctctggcccagttacaaagggaagggtttagcttctttgttagctccgaaacacaagaccatagccatacgtgttagtcttttctgttattattgttgtgatgaggctgcataatgatgccctcagaactttcagtggtttacagaat

SEQ ID NO: 113114 - DNA, 1057 bp, Homo sapiens
tgtgtcaaccagcatctccagcagtggccccatcacctcctgattccatctcccatgaggaaggcccaggctagttccaactaccccagctccagagctccaggagcagcactgtgccctctgtccctccggcctccagtggcagcttcctgctcttgccagtgtctgggctcttcacggctccatctggcttgtcagcattccatcccctgtatgaccaattccctgaactgaattctttttgaaacactcaaatggtccgtttctgtgcggacactgactgatttggattggtttctgacttttagtttcaggtattcattggggttttggttgtacaaaaaaagccactcacaaacaaacagaaagaggacctagtaaccattagtaactactgaagaattgcttaatgggattatgagttttccctcagtgtatataatcatttgttttgcaggagtaagccctctgattctaaatcttgtttctttacctatcagtcttcagagcatctatctttagtgctgtctgtgaggattctctaaagctaatccttcacagagagccagtgttccttctagggtggttgtgtgccttgatttctagagtaaattactaattggcttctgaactaccgtaatagaaaggagattactttgttaatgctttatcaaaagcagtgctgttctccttaattctggtgaggcagaattttattcttagtgaaggagacaactgccagtgttcagttgttggattctgtagactgtatctgtaatgaagaaaaccaccagaaaaatttaaaaccatcatccaatttgatctgagccaagagatctcagaatttcatgacaaagcattttattgattcccaagcatcctttaagtcattttaataaggaaaattcaagagtgaattggaatgttaagagatgcatctgatggctgttcatgaaggcctgaaaataaaactgaagcgtaaatctaaaatgtatccatttaaattgaagaacttcattctagttggtataacttgattaagatttttggtttttta

SEQ ID NO: 113115 - DNA, 1026 bp, Homo sapiens
aactaccagtgaattctggagcactcttgagggaaattagacatgaatggtttgcttgtggaacaggtaacaccagaatttctattgcctgaaaacatactcaagtgaacttgttctcagtttccatcagtagcttttttcttctctattttctccagcagagtaaaaggattcccaggaaccatgagattgggtattaaatctccgtctttcttctcagtcttacccacgtccatgaagcaccttttcctagcagtcgatgataatttaggaggctgcgctgaatccatgtcagggctgacacagctgggcatgcagttccttggatatgatcctttcttctaagagagtcaagtcatggtctgactattcctttttgtttttcctttcctcacagcaccctggaggggtattatgtggatgatgccttgcagggccagggagtttacacttacgaagatgggggagttctccagggcacgtatgtagacggagagctgaacggtccagcccaggaatatgacacagatgggagactgatcttcaaggggcagtataaagataacattcgtcatggagtgtgctggatatattacccagtaagccgtgtgactgttcactctgctggaaagtaacatactgtgactcttcacaatgaagagtaaaatgtattctgtgttagaacttgggagctgtgaaacctgagagtcaccacagctgacaccaagagtttatgaggcatgccctctcactgttactcactattggcttagattgttggcccttgaatccgttattaattatttttcagcgttgttttggaaaggagtaattaatcatgattaaaacaaattgagacaaattggttttattgtatcactaataaaggcaaaatatattgcttttaattcttttggcacatagagggagatagtggaaattttcattgttgctattagttttatttcctgtttctcatatgtaaaaaccagtccagcaatttttaatttgggagagcttactgca

SEQ ID NO: 113116 - DNA, 1056 bp, Homo sapiens
ttaacatactaaagaatttgccaagatgttgaaaggaactttaagaaaatacaagttaagcatgttaagaacattatgtatagtatgatcccatttttattaaaataacaaaaacagaaggtaggaaaatgcgtggtatagaaatgaaaagagtggccaggagcggtggctcacacctgtaatcctagcacaggctgaggcgggtggatcacttgaggtcaggagttcgagaccagcttagccaacatggtgaaaggcatctctactaaaaatacaaacattaaccaggtttggtggcacacacctgtaatcccagctactcaggaggctgaggcaggagaatcgcttgaacccaggaggtggaggttgcagcaagccgagattgcaccactgtattccagcctaggcgacagcaagacttcatcttaaaaaaaagaaatgaaaaagtcttaaatactgtatgtgaaattggggaagaggactgagaatttctactttctgcatcttagtattgcttgaattgctttttatgtgtttgttttacaatgaacacatattgcttttttttagaggtatttattttcttccagtcaattggatcactcataaattactgcagataggaatttttcttgcttgttctttaaaaatagatttaatgcagttttataaatttctttatttcagtgtttcataactgtttctttgatgatgcttttttttgatgatgctttttaaacccagttttttagtagaaagcttgccatcatacacatgaatatgcatgtttaataataatagctgctctttatttaagcaatcactatgtgccagaccatattctaagcatttgatatatattaacccatttaaccgttataacaacactctgagtagtccagtttacaaatgaagaaatgaagcataggaagtttaagaaactttcctcacgtacagcctgtatgcatatcgaattcatataagaatgctccctgcacttgaataacactgttatgttccttctcaatcttctcttctcaatgcaaaatgatccca

SEQ ID NO: 113117 - DNA, 1029 bp, Homo sapiens
agaggcccatttcagtatgttggtattggcctgggcatgttggctcacatctgtaatcccagcactttgggaggctgaggcaggaggattgtttgagcccgggaatttgagaactgaccagggcaacatagtgagaccctgtctctgccacgaggtgtagagaccttgggaactgtggtcccagctgctggggagctgaggcaggaagattgcttgagcactccagcctgggtgacagagcaagaccctgtttcaaaaaaaaaaagttggtatcactgcttttctttcctatgactcttttaacctatccagagggaaacttttcctgccccatttccactgcaatttttttatagctcttttttctgaaaagtgtcacttttaaccttattctgcaaatttttttattcgttcaacaagtacatatttatgtaaatgtctccttcatctccaaggacagaggtttccttgagggcagaatctgtgtctattacatcttttatgcttcatagcactttctcttaatttgatactaaaaagaagtccttgctaagtgagagtgggagctgaaagagagggtagaattcacccagaacaccccctccgcctccccctccacacacaaacacacacacacacacacacacacacacacactttaaatctggtagtttgatgatgatagccagtaactgattgactctgggaaaacagtccagcagatttgtttgaatttggtgttggttacctgcttgctttatggggctgatacacagagtactgatgggctagactaaaattctgaaccagtgtgccgagaatgagctacttgttagcttcaagatgctgatcccctcagccctagggtaagatagcaaagtggggcctgagacttcctgggcacctgtcttctcatatccagctagtaacttctagccccaaacagcttcatccgcttaccccagtgtgtcagacaaatgcattaatttgcaggtgtgtcacgatatgaacaagctgaagcaccaggcc

SEQ ID NO: 113118 - DNA, 1005 bp, Homo sapiens
gccctccttcgggtcgccaggccctcgggtgattcagaaattcatcaaatccaaatggcagcgggctctctgtcaggcaggaaacaagccgcaccgaaggctcggcaggttcctccttgctgctgtggtaatggaaaaggagccgccgagtggagctaacgaggaaggaaggaccctccgtctggcgcgcctctttcccgcgcctcccgccctgtacgtgtgatgtccccagctgtctctctgtttctccaagtgccaaccacttcacagattcaggcgtcctcaagtggagaaaaccattgggcacccggcttccggcccggccacttagtgtcgttatggcgctgcctcttacaggtggcggtaaagggcgactgtaaatagccgattaaacagatgtaaatgtacacaatgtaccgtggaattaccgggtgccgctctgggcacccgccaagaacagctactgcatggaggggaggagggagcaaaaaaaaagtaattccattttgttttctgatcaatgaatgagactttggggatttcaaaatacttccagcgcccaggagactactccttgcttttggctctgtgcttaaatggtagatatttttgtcaagtattgccggcttgtttcttaaagtcagcttttcctctatgaaaaagagaacaatgctagggacattagccccacacacttccaggaatttcagcccctttgactgttttagaaaggggagggtcctggaccagaagttaggagacttgagtcctggtgctgctcacctgcagaggtgtcttgggagcccagccagccagcctgaattcctccagattagaggcttagtctacattgacataaggtccttggggcttaggctagagcactctgaggttctttggctcaagcaagacaccctctagcttagtctatacctctctgaagtctcttggcttaggtttgacctccttaaagtcctccagtgcagatactgggagtccaaggct

SEQ ID NO: 113119 - DNA, 1035 bp, Homo sapiens
aatacagaaattagctgggcaacgtggcatgcgcctgtaatctcagctactcaggaggctgaggcaggagactcgcttgaacccaggaggcagaggttgcagtaagccgagactgtgccactgcattccaggctaggtgacagagggagactccatctcaaaaaaaaaaaaaaaaaagtatgataaaaagatctaggctctagttctggatttattactgcagccacgtcttctggacaggtcagttgtctctccacgtttcagttttatcaaatggaaaaaatgaaaactgtcacacttcttacataacttcttttattatctgtattgtaaatacagagtctcaattattgactaatttatactaatagtgggaagcagtgtctagataatcccagatgattactaatttaaaactactttacattttatttagtaatgtgtttggaacagttacattttgtagctacttacaattttactttaactgaaataataagacaaggccataaatattggcctccctggctggggagttgtgtgggtttcctttccaggcagttgaggttttccatggagcctactctacagtgtcagcaggagtataacatagaaggcttccaggtcaggtggcccagagtcaaatcaaagccccatccctttttagcaaatttctcagccttacttagctgtgccggcctgcctctttctaaaatgaggaaaataataatacccacttcactggtttattgagaggattaaatgaggacgtgttatttcacaccattattgcttctgttgttattattttaaaatctaggttggtgattgcatcagtttcttagggctgctctaaagaaagtaccacaagctgagtgacttacatagcggaaaagtgttttcttacaggttaagaggctggaagtctgaaatcaaggtgtcagcagggccatgctcccactgaaacccatagcggggaatcctttcttgcttctaagtttctagtgtttccttggcttgtagatgtgtcacttc

SEQ ID NO: 113120 - DNA, 1046 bp, Homo sapiens
atcacagttcactgcaacctccgcctcctgggttcaagtgattctcctgcctcagcctcctgagtagagtagctgggactacaggcacgtgacaccatgcctggctaatttttctatttttagtagagacagggtttcaccatgttggccaggctggtcctgaactcctgacctcaagtgatccgcccacctcggcttcccaaagagttgggattagaggcgtgagccaccgctcctggccataatattatttttgtgaaaatatgtgttctgaggtctaaacattcagcttacaaatttccttttggaacgtaagtttttgtagagtatgtaagtgtatgagtgtgtgttttgaatgtgtgatgggagtacatgaatgtgaatgtgtgagtgcacaagtgtgtgtgcgtgtgtgtgggtgtttatgagtgtgggtgtgtgtgcgtaggaatgtgtatgaatctggatgtgtgtgtgtgtgactttgtgtgtgtggggagggctgcatgtgctgagagctgtcaagaatggggacttctatttctcctcaccaatctctagatcctgctttattttatcctctcctaagccttatgcaaacttaagacaactcaggttgagaccctctattactgtcaaaagccattttgaagcaattcaaatgttctgtttctattcttctgggaaatctgtgctgtctcagaaattctaatggcattctaaaatcatctgttgctttgtaatatggccttttcaacaaataggcctagtctcttctgctttcgcccagggttggagggcatcaggatggcagagagaatgggcagggtggtgacacctgtggacagccagcatcatgccgggttctgtgctatttgcttccttcacatgacttcctttattcatcagaggaaccctgcaaggtcagtattattatttccctttgaaaacacatgtccaggaagtttagcaactttccaccgtgacacagagataggagcttaaaccttgtactctttttttctacactacattggtaactgatc

SEQ ID NO: 113121 - DNA, 1188 bp, Homo sapiens
ccagaaaaatttaacaggtttatttataattattataaagttgaaccgctgaaacttgttcactgaaacattttaacttgcattaatgctttacgtctccgcatttatattaaaaattcacacacaaatgaaaatggaaaaactgccaatacctgatttctgtcccctatttttccactcgcaatcatatacttaggtaccttttgaccccatggaaaaaaattatctaacgttcagaactaccaataacaggaagaagagaaatttttttttttttgagaatgaaatgtttcccatcatagtggattcttaagcacgttctccacgtatgctgtgtgctagctggatgtcttttggcataattgttacacgtttggcatggatagcacacaggttggtgtcttcaaaaaggccaaccagataggcctcacttgcctcctgcaaagcaccgatagctgcgctctggaagcgcagatctgttttaaagtcctgagcaatttctcgcaccagacgctggaagggaagtttgcgaaccagaagttcagtggacttctgataacgtctaatttcacggagcgccacagtaccaggcctgtaacgatgaggtttcttcacccctccagtagagggcgcactcttgcgagcggcttttgtagccagttgcttcctgggtgctttaccaccggtcgatttgcgggcagtctgctttgtacgagccatggtacagagacctccttacttaccccccttctccttcggctggagctcggcgagcgagaggcggcgctggcgttggagagccaagtatgtgtttcttatagcaatcctgctcccacataaaagctgcatttcaatatgagataaaaagacattttggaaaaagtgcaaggtttttccccctgctggtgtagctgcaagtgacagctttacaaatcactttttctttcttttttcttttcttatcttttcctttcttctttcttcatcttcttttttttttttccactggtccttgcactgaattcatttatcttgcaatggtggtcaaccacagctcacagctgcagacctcaatctatgacacatattaagccattcaattttttcttgtaatatcataacttttctctgctttttgggagcactttcagcaccactagtagcaatctgtatgggtatcatggcatt

SEQ ID NO: 113122 - DNA, 1114 bp, Homo sapiens
attccaaagcccacattctatctatcccacttccctgcctcccatcctgaacttgtgtagctggtttcttgttcacctgaattctagatttacctctgttaagtttgacctgagtttctgctcaactttcagcatcttggaaactccacagggagaatttagctcatcttttcaggtttgtatcattgtatctgctgccttcatctacatcagtgacagtgccttatcactccccgttagagaactctttctagattgacaccaatctgggtaccagtaggaccagactttcagccagcttccaaggaacctactcttgacttctatgcactgttttccattttgtccaaaagttgtcatgagagagtttgccaaataccgtgttgttgagaagtatcacatatgtggcattcccctactataatcagttaacagcagtacagaataatgggaaaggtggcctctttgttttacatattttcagaaatcctgtttaatcttttgtcctaaaactttgcaagaaatcaatatcatgttcgcctttaccccctgtgtgaaagtgggctattgccttgcttctcttcatggttcattccagtattccattatttattcattctcgatattaacagtgtttccataaccacagatgcaaaaaaatatttttatcttaaatcatttttcttttcccaaaaatattaaaataatgcatacttcttatagaaaaatcaaaataggtaaagaaagcacaaaacaaggctgtctaacaatcctagagacagcctctaacatctgcagttcttttaataacctagaaagcaatttgcctaggtgctaaaacaatttatggccagaacctagagttggtcttccacacctagagcaggactacagcctaatagcagctagaaaaattgtaagggagagatgctggttcaaggtgaggagtcaggccgggacctggggcaagggcagggtggatgtggaggggtaggaagcaggagttccctgccacgtgagccccacagacaccagcctgttccagcaggttcattctgtttctgctgcatacttcagtgtgttgatattcaaggcagtatattggagtccccca

SEQ ID NO: 113123 - DNA, 1010 bp, Homo sapiens
cagaaagaaaaataggatggcaaaggatgtccaccgtgcttttcaccctgtcagcagatgatagcaacagtttgacgtgatataccggaaagatagaaacaacaacaatgaaacaaggatgccttggaaaataaaatgcaaacctgaaatcaaacggaatcattctgccccccgaaccactcctctctgctgcaaactgccccctattttcctttccgggcccacagctcatggtttaacctgggagattgtaaactccagtttcgttcctcatccttaatttagctagacagagctttgaaatggcaactaaattaccttttggtgaaatcaaatcttccctactagcctcaagcagagaggaatctagaccgcaagggccagctaatgtgtcccagcagctcccagtcactctcctggaacccacagagggtgcgctctattgaagggttactctcatcctttgtaccccacagtttatcctgtagggggttattttgcacagccttttctcttctgactgcctgcctagcaggaggttgcttagggcagtaaaatgtttattacctgtttattgtgtgagtaactgcagtcaaggaggagaaaatatttcccagtttacctagggcaatgaaaataggattaagagttctgagggctaaggaaggagcagtataaaacccagagaatcatataccatgcagccatgagaagcccaagtacccttgcattatcctttcattctagtcatggtgacttttcctcttattctcagacccgtgtaattcaccattatggatctggggattgctggtgttctaaaaggaagtctttccccggagagagtttggccccatcccaggtgtagctatcaaattgcaccaaaagagagatcatcggcctgattagcgtttacatacacatttatttctctttcctccaaagtaagttacaaacagcttaacttccaccaactttgcagtgtggagattcaataagatatcatatag

SEQ ID NO: 113124 - DNA, 1036 bp, Homo sapiens
tcataatgttgtgtgagggctcgctggccaccatggcagagagagcaacatcctccttaccttcagaaacctctggcaccaccagcattgctgacatatctcacgccctgtcacagcttcttagttcaacaggctgcaaaagctcctccccacctccacctgttcataaggatgtaaggataattagtgcattttctcaagttcaatgatacactcattttgaaaagcaactaccgcattatcctgcccttgcccttgggaactggatcccttcatttgtcgagaataccccttgccaggccttttcatctagccgctgctcacactgcaccggggcttctgtctgggtgattcttgctgggtcatgccaggaggtatttggcatttccctaaagcccatcatgtgaagtaagagtaccaccgaatcacgaagctctgagaagttttgttaagatcagtcatggcttgatcagtccaagcattaggatacctagtttgcaagtccagtgttgtccacctggcctggaatttaccaactgctctgtggagagctctcatcccacttatgaactgtgctgcttatatctgcactttctttttctgtatgcccagtacgtagctatgaagggaggatcccaggggccagaagccaggggaccatgtagtgtcttagtgtggtttatatgtcattgcagtctccatccaggtcttttccagatcctgggatgctgccaagaatttccatgcacaggaagacagagatggtcatggtgatatacagacttatacagaagacgtttttctatctttggggggcttttgacccctttccactcacttgaattcacacagaataattatatgctcttctgagggcttactgctgggtcagaaaagcagggagagttgcttttggatagtaatccccactgctggccaccagcagctgcagcctccacagcagctgcttcccctcgcctccatgccaccatctccccttcatatccactatctccttgtctctctgcaggtcatt

SEQ ID NO: 113125 - DNA, 1105 bp, Homo sapiens
ggggattgtggtaccaatgaaactattctataccattcaccatagatttataaaggagactacaaaagagaaaataagagatgacatcatatgaagtgctttagttcagataaaggaaacatccaaaaatactgagatgagtaaaattttattcaaagtaggttcctgctttgtcttgatctcaatccattctaactcctgatgtcatttaccgtgtgagatcttagtacaatcatgaaaagaatatgagcatttatcaaaactctctgacatctgtatgtttagaaatgaacttacacagcaaaatatgatttccttgcacttatttaatttttctaacttcaatttctacctatgtgtctctgccagtttgacctgattcagacacccagaacttgaataaagaagccctcttctattttcattcttaatgaatataccttttcccatgtccacattgagcctcccttctgtgtactctgtctaatgcagccacatgtctagttccccctctctgtcaccaccctcacttcttctttcccatcttcttacttctttggtgtgacctctctgtaggacaacatgccatttctgattccccacacacataccctatcattgatacctaccctcaggattagattctgtctaagtaatttgtagagccatcaggctttagtaagtattggactgcaagtcaacacccattatctcatcaaaagggatgctgtgttggggcagagggagagagagagagagagacagagagagagacagacagagagagagaaagagaaatagaaagtctcttccaggagaaaaaccatattgatgatatcaaaaggaaaggaaggtgaatagtgtgagccagaataggactaaacaaatggcaggcttttgttcagctctctggcatctggacagcagctctctgcttcttactcaacctgtccccaggctctctgcagtcttgtcttctggtctcattttatgtcatcccactattgatgaacagaaaatttgggcagctgcccaccatccctatatcccacccacactgtcaacaacagcatgtgaagaggagccatgtggctgcagtggtaag

SEQ ID NO: 113126 - DNA, 1037 bp, Homo sapiens
ccccaaaatccagatcttaagtgcagtgcccctgctgatgggtaaaatacctcatttccgtgtacatcctggcatattttggaaactgatattctgtcagagttttagaaatatgaggctaagagaaagcagcagaaaaggaaacattttaggaaaggaatgagctttctagaagaaagaggttttttgtttgttttttttttttcaattttgagatggagtctcactctgtcacccaggctggagtgcagtggcacgatctgggctcactgcaacctctgtcttctgggttcaagcaattctcctgcctcagcctcttgagtagctgggactacaggcacaggccgccacgcccagccaattttttgtattttagtagagatggggtttcactgtgttgcccaggctggtcacaaactcctaagctcaggcaatccacccacctcagcctcccaaagtgctgggattacaggcgtgagccaccacacccagcccgaaagaggttttaattgcactcctatgaaaatactccttaaaggttttaggggatgagaatattcttgtttgctgagagagctgataacccatcgaacagtggttctgaaacatttatgggcctaagaatcacctggggaaagcattcaagatgcaggtaatcaatcagattccactgccaaaggcccagaatctgtagatctgggatgaggcctgggaatgtgcattttaatgaacatccccacccccccgcccacatctcccaaccactatcaccaccacgaccattttctcccaaccactaccaccaccaccattttctttctcttttttcttttcttttcttttctttttttttttttttcagtcagagcctcactttgtcacccaggctggagtgcagtggcacaatcttggctcactgcaacctctgcctcctgggctcaagcgattcttgagcctcatcctcctgagtagctgagattaaaggcatacaccatgatgccccactaatttttgtatttttagtagacatggggttt

SEQ ID NO: 113127 - DNA, 1024 bp, Homo sapiens
tgtaaacttggatgctggctttctggagctgaataagggtagggaggtaagaaatggtggtgatgctgaggggcgtgtcttactaagttctatgtagactttcacttaatctccctgttttcatatggctcctcaacccactctggctaggcctgggatccaggattccagagtcctgtggtttcatctctgcagagtaatccacccgccttcttcttgtctgagggagggtatctggtccgattcttaattatacaggattgcagccagttttcctttttgcactcccatctaccctggcattcagaggtgcctctggttcctaagtcttcacagcgttgtttagcttgaatcatcttgcttgatttttggcttcttctactgcaggattagattcagctttctctaagctgctaagtcgtttaccactcagccagctgattttcatctcccaaaattttgttgacacccctcaattcctattgccatctcccatcttctttgttcttaaatatttatgtcatttttattcctgtattgtgattgtactggagcatcggaggaagccaagattaatgtgggtgttcattctaccagaggctccttcagtgattttcaacacttttctgttgaatatcgaatattgtccaaattgaaatttataattttacagcagaattcacattattgtttctaacacttttggctccaatagagtgggtttcacaaaaccaaaagtgctctcttaacacaaaatttacacatgtcaaatacatgtattgaaaaagacaacagtgtcaacatgatcatcatgctattttggaagaagattttgtgattataactattgagtagttttcagaatcttgaaatactgacttacttcaaggactatgaaaacagtttaggttcatgactctgactaagccagtagtacctggccactcaggggcaaggtggaatatggacagaacactcctcactgactgaatccaggccttccctgctgaggggaaaccagcaa

SEQ ID NO: 113128 - DNA, 1052 bp, Homo sapiens
cagtaagtccaaagtccctaccatgatttcagagccaccatctacctccctgtcaccatagtcctccacagactgtgcttcaatccccctggctactctcctgcctttgtgtgctgccaagcatttcctacttccagcttttgcttgtgttttcttgctcatcttctccacctatcaaaatccaactaatttcatccaatgctctactcaaatgctaccttgtccgtgaagcctgctctaatcctctcagttcaatttaattattgattccttgcatttccacaacactcatttgcagacttctctgacaatagttgtactttgctttgattgcagctcgtgtttctatgtctacctttttcactagatggcaaatatctggaaggcagggactgtatctttcataacccactgacctcatacccagtagttaatgaaaaatcttcatcaaatgctgttgaatattgcccaaggtcagatgttagtggcagatcaaggtctgaaaacttgatttatttatatttctatcaaaattttaggaactccaatatgttacttaacatgtgtctactccatcaggtgcttcaccttggaaacacttttttgtgagtcagtggtgcggaatcgccggtatagtcagggctgccaatgtttatagtggcagcgaggttgaggagatagataggggaggcatgtgtttaggtagagcatgcttttctcatctacagtaggccctatgaatatttgaaggggagtctggaagctgtttcctatgagcgaggttaagttgaaatgcaagaagtaaagattaaggaatattaacataaaatctgtattgtgaattcttttacataaatatgttactattgccagaagtggtgtcagggagcttttcatatgtctacattttaatacccaaatgaaaagtttgctgtaaattatcaaatgtggaaattcttcatgcttataaaggtccttgacaaaagaatgtgctgaaagaagaaagagagagagggtgtgtgtgtgtgttcatttctccaaacatatttttc

SEQ ID NO: 113129 - DNA, 1042 bp, Homo sapiens
gagtagccaaacatggagatacctgaggaaagagcagtctaggcagaggaaacgcatgtgaaaatgcttgaagtgtgcctggtatatgaggaagactctgaggaggctggtgtgggagaggaggacataaggcgacagttgataggggtggaagaagcagatgctgcaaagccttgcaagcccttgcaaggactttggcttttatctgagagagatgggatgctgctggatggctctgagaagagaatggtgtgatctgacttgcaggttaataggatcatgtcaccaagtcgtcatatcacttcccctacttaaatccaccacttgacaacatataatccctttatccacagagacaaatacaaactcatcttccctgtccctaatcaagaatttttccagtcaccctgcacaagccctctgcactcttagtaaacagtgaccacctcctgcccctttcacattctacccgtccttcaagtccaagctgaagtttctttttccagaaaacctttgccacctcaaaattgatctctctcttctctgacctcctatcgtattgattatttatcaataaatacaatataatatatggacttgaccatatattatctggacttcaccatatattatcttggattgttttctacgtaggcattgaaaggtttatagaacttgagacctagaagagtctcgggaatcatctcttctgactccttcattttaccagtgaggaaatagaagcccagcaatgtttaggatattgccaaattcgctcaactagctgtttaatgtgtacactgcctttctcaatgaaattataagtacattaaggaatgataacatgccttatacttctccaaaatctcctataatagtggttaacatagtactcatgtaacagacacttactaagttcaattaaatggccgggcgcggtggcttacacctgtaatcccagcagtttgggaggccgagacgggcagatcacaaggtcaggagatcgagaccatcctggctaacactgtgaaaccctgtctct

SEQ ID NO: 113130 - DNA, 1054 bp, Homo sapiens
atccagtgataatgactaaaagtagttctgtagttctgttaaataaaaagaagcagaaattcagtggctacaccattttctcggctttcttccaaaatgctttatccttggatcttggcaaatatgcctgtccctgatgtttgctaaggaactgtgatactcagcccaagcaagaacataataggaggaggaggaggacagctgaaagaagaagaataaacaaatgactactacgtgtgacagcactctgatgacaagggatgaccctgtccacaacgaaactcggaaaaaacccgtttgtatttatcagtccataggaaacaatgagagccatgggaggcagaaagcacatgctggtctgctcttctgcttatcctgaccctgctttccatagagctggaagaaacataatgagggctagatatctgcaaaagaggatgctcctagtgaacttgggaagccagcaggagtgaagttgagaagagaatgacgaggcatggcctcagagacagcaaagagatctggtctgtttccatagccactcttgaagagattgcattccaaaatttatttaatgaaattgctattagggtctcattggagatctttgtttcctcttctggtgtggtttgcttaaactctccctggtgtctgtagcacatggtagaattctagctaattccccacaggctagggcaaatatggccatgtgtgtggtgcctctgaaggagcctttccatgggcacctcccttcacagggcaatccctaaacagcacagaatcttaatctttgttaagattaatccctaaataaggaatctatgcattccttatttggggctacttagctaaatgacataaacagctggtttaagtgattcacaagttagttgggcaagtttcactgttgcttacaatctattttagctcaaggaaataaatttgcacacctaaaggcactgaccttttgttgtatacagtgagacttcagttgttgcatagattattgtaataatccttctgcttattggccaacatgtgatgtactttatga

SEQ ID NO: 113131 - DNA, 1050 bp, Homo sapiens
agccaaacaaaactggaggaaggattgggatcagtggcaccaggaagcggaggaagaagggaggttggtgagtggattcaggaacgttaaactggataaagaagagaaagaagaaagaaatgagattcccaatgcagttatgacctgagtaggattggagaaaaaggaatcagagagggaagagaaattcttgggtcattgttttaaaaataaggaaaaaaaattaggtaaggaatatgggtagatatttttgccacttttcagcttcaagacgtagatctaattacttagctactttgaaccttataaattgggaataatagtattaaccttgcagggatgtataaagattagaatagtgtatccaaaatgcctggcacacattaggtaggccctcaataaatgatgatatttgttcttacataaaggttatgctgctgaagtacttccagcaaatcattctttttttccagccctagttaatttctattgcttaagtagtccatactcacttctaaaaggtagaaaattaaaaatagttaagtaacttatctaagctcacacagtaatggaatggttaaactgggattcagagcttgcaagtgtaactccagagcccgttctcctaaataacacacatatttgtaagtcccagcaggtacagttgttttatttcatatggctatagctacagaagagaagcagtcttcttttctccacgtattgtctattttcatctctctgtaactccttgggtactttaaaaatgaaaaagtgacctacacctttgtttctctggatcggatgtcatctaggaagtatgtatttggcttcagtttgtttcactggcagttttttgcaactatcagaggatggaattttgctttgtcatctgacccaagcacaaacttaggtaaatttatgagaacgggccaatttctacagaaaagctgactctagtgaaagatttttcttccccaagtcaattttttaatttgtatttgatctgttctgcatggtgtttggccctcctctttgcaagttttgcaa

SEQ ID NO: 113132 - DNA, 1677 bp, Homo sapiens
gcaggtctcatgaaatctagttcagaaaatgaattcaaattgacttgaatgtgtcaaattgattgaaaactgcctgaaggactgaaagtgtaatgataaatggcaatgtattgaatctggacgagtgttcagcatggtcttatttaacatcttcattaattatctgggaaaggatataaacaacacattcattaaatttgtagacgcgaacgagagaggtgtttttaagcactgggtagggcagagggcaacttgaagggaactaccctgctcaagaacagaatgatgttaataatttgatgaaaatctgctaatggcctggcagtgttctgtgcagagcacgatcccaggcactgtaggtgattaaaagatgagttaaagcatctcagcagacagagtgcaaacaactaaagtataccacgggagaaggggaaggaagtgctgcattagaagtgcaagcaaactgcaatggaagcaaagaagtgatgaaattctaaagagaacagtcaggactgcaaattcacattgttacaccatgaggaaaacaactggagcaagaaacatcccagagaagtaactagggttagataaaggataatgccatgggctaccaagaagcaacaagacggggatatttttcttcaagcacgccatgtgagtcacagataatagagtcgggacattgggctcagccagtgcaaactcactgctcaacagaacctgtcttttttttttttcctttttctactatttttctttcttgtgttaaggtaaactactaggtactgtttttaatttagtttttaattatgatctaaggatcagtactatggaaacacacataattatataagaaagtattgcacatataaagcattatttattttataatattaaataaatggcaacaatctaatgttcaatagtaggggaaaatttacaaaactttactgtctgtacttaacaggatattctccagctactaatgggtgtttatgcggaattagaacaggaaaaaatgcccatattttaatgttaggtgagaaaactgggatgcaaaatttaccatagagtgtgatcaaaagcaaaaagctagtgcatttttagcaacaaaatgtatcagtggctgtctttgtgtagggggaaagaggaggctagaaaatagtatttgttgagtccaaccaactaatttgttcaatgtttctttctgtcgtaaaggtttttatttgcattttaatatatgttttgaccagatgtggtggctcagggctgtaatcccagcactttgggaggctgaggcaggtggagtacttgaggtcaggagtttgaaaccagcctggccaacgtggtgaaaccccgtctgtactaaaatacaaaaattagctaggtgtagtggcgcatgcctgtaatcccagctacttgggaggctgaagcatgagaatcgcttgaacctgggaggtggaggttgcagtgagccaagatcacgccactgcactccagcctgggccacagagtgagattccgtctcaaaaatatatataagtaagtaaaataaaaatttaaagatgtatatatgtgtatatgcacacagacacacacacacacatatatatgttttgatgagcctctaataaggcacttaagggaagtttaatgatttagttatatggttatttt

SEQ ID NO: 113133 - DNA, 1040 bp, Homo sapiens
ctggtgtaaagtggtatgctcccaaacagaattacctaattcggatgggaatgggaaagccagatgtgagacattccaaagcagtggtccgaggggcatgctgagtcagtgaaggagatgaaggggagtagtaggagtgccccccatttccaggttggtgttgagagaatgctgctgccatgaagacatgaagaatattggaaggggctgtttggagagacaagtttccaaacagcctatccaacactaaaccaggagcaccagttgtcggtggctgctgttcatattaccgtctgaggaatgtgtaactacccagagtgtatttgtctcttatcatgattgacttaatacacttttaggttttgaatgagggggtttctgtgggcctctttcagctctatatacctcataagtgctgtctgttagggtgatactggatattgggctttatattaaaacagtttctggaaaagaactgattcatggagacaaatttatcaccacttactcactttccctgttaggaggaaatagttgcagatataagaatattttgagggaaggagcttctcatcaaatagaaatatatgggtttttttgccaggcacggtggcttacgcctgtaatcccaagactttgggagggcgagatgggtggatcacctgaggtcaggagttcgagaccagcctgggcaacatggtgaaactctgtctctactaaaaatacaaaaattagccgggtatggtggtgtatgcctgtaatcccagctactcaggaggctgaggcaggagaatcactcgaacctaggaggtagaggttatagtgagccaagatcacaccactgcactccagcttgggcaataaagtgagactccacctcaaaaaaaaaaaaaaaaagaaatatatgggttttttgagggacatttaaggatgccattttgaacacccataccccactgaacagattcctacacggggtctaggtgatccatggcagagtcacacaattacactttgcacaccccacacagatgtgtgtt

SEQ ID NO: 113134 - DNA, 1697 bp, Homo sapiens
gttagtggtaatttctgccaacaccaaatgaagtctaagtaacaagctttggactaaggtgaccgcttctgagagaagcaacagccttcctcatgaaaaccatttccattctgaacatcatattttcttatttttcattaaataggtgaaaactatgtctaggttggcacaaatttttactggccaaggttgtattttagtaactgcatgcaaacttggtcttgttacttgccttgagttgacgtactggaattcttgcatcatggtgaactttgatcattgttttgattacagaaatccttcagaattctttcataccagaacttctaagaacagcattttgtttcctgccaatcttagctgtgctagattgctgtcttcctcctgtatcagaggcagtatgttttttgactagacagtgaatgcagtctcccatatcgtagttaggaggttactttcattaggcagatctctctctctgataaatctccttggtgcactgaactgtttaacttacttagggactgtgttttcttttgagtccgattcctgtaaaaagcgatgactgttcccagggtgttcactgaaaaatgaaatacggctctaggatttggtgctggtggctgagggaacaggaaaaataaagggaagatgagtagagctttgacaatccaattctgcttgtggggaccacgtagaagtccacatcaaacgtgcgtgcctttttgtcactcctgactgtataaaacctgagccatcatatttcttcatggtaacttggaatgaaaacaaagatttctggggctccagttgctgcttttcccttcctatttaacttagcagatgatgctctgctgaatttcagctagaacctgggccctgtgactgaaatccaatggcatatgtatgtagatttccactattatatgtggtcacgctgattgttatattaatatcgtaattaggaataggtcaaacattttacttttatatgaataacaaaatattcaatacctgtatttaaatgaattctagaatatttgagggcatcagaatatcatttataatagtgacattttacttaggcaatggttattcaaacactattttataacattaataaaggatctgacactctttgtaggagaaatccgtaaaataagcaagactgttaactttccttttaatttagtgtctgtctttgaaatggcattctatgcatttgctgtgactagacatgccctgttcaaagatctaatgccctgttcaaagaaattcttataatgtttttcagaactgtgttactgagctgtattggggaagcatattgggggttaaattaagagaacttagcccatcttgattcacaggcctgactttgatttcaggcttgtgacttttttttttttttttttttgagacagagtcttactctgtcgcccaggctggagtgcaacggcacgatctcagctcactgcaacctccccctcccgggttcaagcaattctcctgcctcagcctcctgagtagctgggattacaggcacccgccaccacactcggctaatttttgtatttttaatagagactgggtttcaccgtgttgaccaggcttgtctcgaactcctgacttcaggtgatccacccgcctcagcctcccaaagtgctgggattacaggcgtgagccactgcgcccag

SEQ ID NO: 113135 - DNA, 1211 bp, Homo sapiens
tctcacgtgcatattatcagataatagtaatcattcattcatgcattcatccaataaatacttactgagtgctaagtgatggtgacatattatagatttcagatttctagaaataaccagaactggggagatggggttggccattctctgctggcaggagggtgagttccattattctctctctctctctctctctctctctctctctctctctgtgtgtgtgtgtgtgtgtgtgtgtgtgtgtgtgtgcgcgcgtgtgtgtttcaatctagggtgtttcttttgccgttgggcttttctgtagcctacaggagtcagtgtgttggggcgaacttaaggcctggaggaggagtggagtgggccaaatgcttgtaaactgcctgggagagaggtagagaatggcaagtggatctaaaacaaaataaaatacccagaccctgctgttggcaaaacatcaattggcctagttaatacaggggaaacttaggggaaccttctggttagactgagaggtaaaactaaagaataactggagttgccagaaaagtggatggtagcatgatgtcataaatttgacaggcagacctgcatgttaggaaaagcacacggttcaggaaaggctcaagtgtcaggtctgagaagcccaaatagcatttatgtgcaaacaaggaacatatccatctgtattccttcctgtttttctgactacttaagattccatattagatgctcctgacctccctaaatctggcccagggcaagaagggtgactgtgcattggaatggcatgcatgggagtgctcatttattcagaaatcatttgcagagcagcaaccatgtattagttatatgtgtaaaagtagtgggcattttcttccagcacctaagaggagtgggcaatgtggggaaagataggggaaatgttttacagatgccacaaagatgaagcttctttcagaaggtgagctgtaatgtagtggaaagagacagacaagacctgagctttatttgcggttctttacttactagctaggttctgagccttcgattcttttccataaaatggagataataatttctatccttttccctcctagatttgttgtaaacatgaaactattcatagaaagaatacagagtaaactgttaagcactatatacatgtttgtataatcagacgattgttttcaaaaagtagtaatagcacaccc

SEQ ID NO: 113136 - DNA, 1053 bp, Homo sapiens
gagaggaaggttgctagcctgggtctgccctgctttcttcgaaaggccatttgaaccctgttctgggcataaacagccattaagatgattagtttgggcttgataagtagactaaacaaacccttgaactagttgggagccctttctctcctgtaatctgcctttctactgcattcaaactaatttctcagggtctgaataccttacaagtactatctaatgggtgtattgtttttgtttatgtggtttccttcagcctcagcagcttggtccttggtcctgttttttttttttgttttgtttttgttttgttgttttgttttgttttacactaatcattccctctagttgaaagggttctaaccagcctcttgccttgtgcaaggaattagtcatttcaggaacaggaacttgtctgctttgggacagatttctacccagaggcttaaacctacataaaatagtgaaaatgatttaaagaaaaggtagaccctaactggtggcaggtaggagaagctcagcccctctcttggcttatcttggaaggctttaggaaaaaaatcttgcctgtcagctaaagccagctttgctgcgagcaaggagaatggaataggaaaaagcagttgtacctgattgtgtaaaatagtgtatgtagggctttttgctatgcagacttcatgaaattaccaggcagagatggagatgctggcttttcctaattagaaaaagccctctgtccaatttctttctctgtctttttgttgtttgttgttgttgttttggttttggttttgagacagaatctcgctctgttgcccaggttggagtgcagtggcgcaaccttggcttactgcaacctccgcctcctggattcaagtgattctcctgcctcagccttccaagtagccgaaattacacgcacttgccaccatgcctggctaatttttgtatttaagtagagacggtgtttcaccatgtttgccaggctggtctcaaacttgcaaccttaagttatctgccagcgtcagcctcccaaagtgctgggattatagg

SEQ ID NO: 113137 - DNA, 1113 bp, Homo sapiens
atagcataggtagtgtcagttcatgactataatgtgctgacagctggttaaatgttttatggctgtggtttttaggatttagccataaataaaacatttcgggcccattctgacaggtgcacaaatactaatctaagaattcattatttatactttctaaaaaattacatcactcttgtcctttcatgggttggtatgtattccatcatatgaaattgcttattttttcttactaggatattttatgctaaccacaaagctaggtaccacttcatgtaactttattggtagttagggagtggataatgggcacgattttgttcctgtggaaatgactgacattcaagaagggtggagcagtcttactaggatttgagctgcctgcacccggagggttatctttctctgtgcccttttgtccattttttgctttttgtagtttgcttttcaagtccatgtgactttgaatgttgcctttaaatttaattactctttcctgtaagtacttttctccacaaggcttttttccacagaaagtgtttgctggtcaaagttcactttttaatactgcatgaatgagactttgctcaaagatggggttgtacccaccaccaggaatatgcagtactgaatgcaaatgccggacagtcaggtagccatcttattattagagcgtatccatcttattattagagcgtgaaggaaaggtgtgaagaatgctggaaaaacgacgataggtaaagtgttcgtgtggaaggcatctgccgtttccccctttccacttgcctgaaccgttgcactgtgcagtgtcgctgtgcctgctgcatgcagtcgtagggggctcattgcccctgtgcaagcgttttgttggtagtaatgaaatgcctttagaataggccaaaaactaggacattttaccgtctgatttccttactcaaattttaaaaaatcttgagatgatcatcgctgaactagagttgttcatgtatccttcttgctggctggtgcattcgttggctgcaaagggacagttcacgcacaggcggctccacttataccagtcacagcctcctctttctcccacccaccccgttttccacttaagattccttt

SEQ ID NO: 113138 - DNA, 1052 bp, Homo sapiens
ttattaaatatgttttagatgtgataatggtattatggctatattgttgaaaataggccataacttttaaaggtacactccacagtattcacagatataagttctggcatgtgctttctataatatggaaagggaatgtgggtttggggtatggatgaaacaagataggccatgagttgaaactggtcgctggcaatttattacattctggcaacgcttgtatgtttgaaattttgaacaatccaaagtttcttaaaagacatacgtgtatacacccggcttattggggagaaatacattgatacttagtcaaaggtacggagggtttcaagagaaagagttgcctaaaaatatcagaggtttgattgcactgcaattatatgcagctatatacagctacgtaatttaaaaacccaataatattgtagttttattttaattaagataagcttctacttaagtgaaaggaaaaagaacacttgccttttggctacagtctttaattcagcaaacattttttcaagcccctctgtgccaggtactgttgagattgcaggaaattcaaggaacagcacagatacaggtaaagtagctggtgagatttctccacatcattccacagcgtgatgtgataagagctataacagacttacacaaaagtatgattggcacacagaagttggaatgattttattctactttcatagggtggagggagcagggaaggggcatatttcgcagggcagagagtgcagggaagactgcacagggagttggcatctgatctgccttgaggaattagcagcatttttctacccagagaagatgggaaggactttaaaggcataggaaacagcatgatcagtagcacgaaggtgggaaaatgagttcagtgaatggtgactgggttcactgagtgtgaagcccaggatggggtaaaacggggtgggagcagatactgagaacatgaaagtaagactcagtatgtgggtttctccctgcctggagagcagcattgcttacacctgtcagcctgagtttctaggtcctgt

SEQ ID NO: 113139 - DNA, 1095 bp, Homo sapiens
aatgagataggtgtatatatatatacagatgaagaaactgaggcgcagagaggctaagtgactggataaaagtcatacagctagtacacggtagggctgtggtttggacccaggcattctggttccagaagactgcactcaggactattaatttttaaaagattgaacacggtagggaaaaaaaaaaaacaaacccacaaatattttaacctgggggttggttgtagctgatatcagagagaacattttttgtggtggttgtctagctgtaggctctgaagaaatgccggctgtgggtgtcatgattctcattttagaagattaaaaaaaataaatttagtgtgttcttttaaggttttatttcttttgtgtatttgcatatattaccatgcgtggttatctgtgaaaatccttaaaaatgtgtaacacaaattacccttagaattactagattaatctttccttcttaatctgaactattgacttctgatattgtctgatgtgcttagagaaactgttgggctcctttgataatctcatgtttttgtaattttattaaggatatacctataatttagaaacattttatttgtatttttatgagacttggaaggtggcatcagattagatcaatttttctattctctattaataattttgagattatatatacacatacgtatatatgtgtatatatatatatacctgtatacacatacatacatacatatatatttatatatttttttagacagggtctcgctctgtcacccaggctagaatgcagtggtgcaatcatggctcactgcaatattttgcagtataaaaaactgatttggaatcccttgctttgtctctgattaagcatttgtatattttcttaaggaaataaatattctgtaagtcatacttttaaagttatatagttagagtatgcttaaaaacataaaaccacattaaagtttaacttatttttggaagttaggttttaatgtggtcagcagcaccaagtaaaagtgtaaatttagaaacagcttttaaaagtcttacttgaaagagaatagtaagtgtgtaagaaaatacgagggagatatt

SEQ ID NO: 113140 - DNA, 1756 bp, Homo sapiens
gaattttcagtaaagttctggatccacagtgagccttctataaatatcagctgttattattagcaaaccaccaagatgcccactattgtgcctcatgatggcaggctcagtgggaagccaacatgttttctccaaaaaagtagagcatgactctaggtttgtggtgcttgttagatggaagagtcgagcttttgctggctctctatacctctcgtgtggaaggtgcttagcatgtttaggccccattgcagtgactatcaatgtgagtccaaattccctccacactttctgtcactccttttggacataccatatactgtctcccatcatttatcactgactggccacatggcaccgcttaggagccagatgctgggctaaacattgaagtgacaaccatctggtttactgcccctcccctgcaagaacctgagggctccatggatggaggatgaaggtacaaaacacagggcatgagcagggaatcatgagtgttttggtgctgttgaaacagaaagctcaggacgtaaagtggtggaagaagaggctggtgagagaggcaaggcattaggacgtggagggccttatctgccacgctcagaagcataagccctatgacataggagaagagaaactatcaaaggattataaacgagggtgtgatgtcatcatgaccatacgaaagataggtttgagaccaagactgggtggagggaggtcggtgaagatgttacagaatactcagcagaagatgttgaagggcttcaagtaggtgagtagtgggtagagatggagataggagaccattttcaaaatatattaaggagtccattgagtagacaggggggactgagagaaatcagggatgacttccagttttctggcttggaaaatggtgttactagccaatttaggttttggagggaagatgtttggttttggacatgcgacgtttaatgggtgtatttatggtccattctgaagggatgtctggtagtcatttggatgtataggactagagtttagccagaggtctgggttgcgggtatagacattgcagatggctgaaatttcagagtggatgaaattggcaaagcacgtatagcaggaaaagagaagaacaatggcaggaactttgggaaacacaagattcagtgtatttctgaaggaggcgatccttcaaaggagatgaaaaaggaacagtccagttggcgaggagcaccaggagagtggtgtagtaaacactaaggagaatatagtcagcataatcacatgcagcgagataaggaccagtctcctgggatttggcaactggaagctcctggctttttgttagagggtttacaataggatggtgtcagtagaggcagtggatgaaacgtatggaagaggaggggctgacttgactaaggaagaaacggcatgtgtatgagggaagagacctcacatttaagaggggcccctttcaagtagttggtaaaccttttgggggttggaatgccttgaatatgtgtggcttccttttttttttttttttttaaacaatgcttattacagtcctttattattattattactcttttaaaagagggtccattaaatggaataatggtattgcctctttaacacctgtaccttggccaggcgcggtggcttacgcctgtaatcccagcactttcagaagccaaggcgggtggatcacgaggtcaggagttcgagaccagcctgaccaacatggtgaaactctgtctctact

SEQ ID NO: 113141 - DNA, 1027 bp, Homo sapiens
aataaatgaaataggaagtttcacgatgtagaccaaaaacctctacagctctcattgaaaggaagggggagggtacagttgcatatgtaaagctatgtctttgtgaaactaaaattaaagcaagaacaatacaagaaaatatgccgcatataggaaataattactagatatgtgtacctagtaatctttgaattacagaacagtgaacaaatgttttcagggatgttcgtgcaaagtgagaagtcttcagcctgctcttcccagggcaccacgaaggcatttgcttgcagacgttgccttcttcggagctcttttaaagtggtcgccaactctcaacagcaattgcttctgagtagtgttcaaacagccctgacatgggtcccttggtatatcattatctagtctcatatttaacctttttctaatagcctccccaaagtccagagtttccagttagtgccagaggaagttagaaaaggcgtttttttccttgtcttgactgcacagctgtgagaagcacaggtatctgagagtcatctttgtttttcctttctttgtctatgagggaccagttatattggaaagtaaagtgacttgttgagataggccaagctttgcaacgagtgtcaacacactaataagaacttccctttttccagttttttactgagctccttgtggattcactcttttcttacaggagagaagggcaagggagcacgagcattcgtggactgtgcctctcctccttttctgtattcttcaacttgccattgcaggagcatgtgtaccagtaagaggtccgtacaagctgcagagtgtgggccgggcctgaggacagtgattgcatgggtgtaggctccaccctggcacctctgtgtggtgaacaagacctgtttatccaattgccgcacatacacactcatgactgcagtgcctttaaatggatgttactttattaggagaagcatatggaaatgatgacatctctgatgtctcaaatagagactggagacagcaatcctga

SEQ ID NO: 113142 - DNA, 1079 bp, Homo sapiens
ttttacagtttaaaaaaaggaaacaaaaaccaccccaaaatctccccccccgtttttttcgccccgtcgggatcgccgtttccatccatgtgcttgcgtctcccccgcgttccacttaaactattttaatccttggacccaaggaggaggctgataggggggtggataaaaaaagttcttccaaaatagtgtgcccggggagcaggatgggggatttcgcagcccccgctgctgccgcgaatggcagtagtatttgcatcaacagtagcctgaacagcagcctcggcggggccgggatcggtgtgaataatactcccaatagtactcccgctgctccgagtagcaatcacccggcagccggtggatgcggcggctccgggggccccggcggcggttcggcggccgttcccaagcacagcaccgtggtggagcggctccgccagcgcatcgagggctgccgtcggcaccacgtcaactgcgagaacaggtaccagcaggctcaggtggagcagctggagctggagcgccgggacaccgtgagcctctaccagcggaccctggagcagagggccaagaaatcgggcgccggcaccggcaaacagcagcacccgagcaaaccccagcaagatgcggaggctgcctcggcggagcagaggaaccacacgctgatcatggtgagggcgcacgggcagcgggcttgcggcgcgcgttgggggtggtggtggtggtggggggcgcgtggagcttcttacatgggggtacaagggtctgatttgcacggtgggtgaggtgggctgaagcctaagggttaacgtcaacttttcttagggaaaaagctgccgtcgtcgctacctgttaatctgtcagggttgtcagatttggggaggagggggcgagaggggagaagccagtcacgactgcgaggggcggagggagcctagaggagcgtcggagtgaggtgctggaaaagtttccccccttccctttcttaagataccgatttgaaagagtgaacccctgagttgaaaccttgctcctcctcttcgccgctccccaccccacctctagccgcgccgcct

SEQ ID NO: 113143 - DNA, 1480 bp, Homo sapiens
gactttgagtgggcagttatgttgtttctgattgacttcattgtaaataaaattgaagtgatttttatgtatataactttctttgcattattgtccttagcctaaatttccaaggtaaaatactcagttaaaaaagatgtaaatgtttttatgaatcttattatcatactgctttccaaaaagattacatatttaaaatttgtgtccagtgtttgtgtatttgtttttccataactctttgctagtattgatcattatctcctttaaaaataataactgtacggtggtatttatgtattttttgattatcaagaagctcaacattttctcaaactatttatatcctttgcttatttacccattaggcatttattttattcttagtaaagcatatgaaaagtcctactatgtcatagttaacaaaatcatcctcctttgaaaaacaggcttatagtttattgctgtatgtgtctatatttctgaatttttcttattgtagaccattcctcaagaattttgtatccaaggcccaaaagtttgttacccaagatgatgaatgctgacatggatggtatgttcttcattttcttttttgtatactcctggttttgtggatgcttttgctttattaagcaatggaaagggcagagaaaccatgtttagaagactttgatcttggctaattacttatttatatctcatctagtgttagaaaggaccaaccaaagcagcttccattccttagctatgagaggttggcaagttgtttttatcttctttaccttggtggtattatctgcaatttggggatacaaaattttatttcacagggctcttgtataagtcaagtaagaatgaatataaaacattttgcagatttttaagtgctaccctacacaaatgtacctaatgctaattaatagtaaatttgaacctttatattacagcagttgatgctgaaaatcaagtggaactggaggaaaaaacaagacttattaatcaagtgttggaactccaacacacacttgaaggttggcttgcattttgtagtttatttgaatgacagccaattaattgaacttgtaaaaatttatattgctaaattttgtttgttaggatgtataatttttaaaagaatgaacttcaaagtacacacatatatatatctatcttcctgctttggtagtttaaagaacagatacacttcagtcaagtcaaatgttgttattgtgcttccctctttgaagcctaacataatgctggctagtatgagacccccttttaagtccccataatgtgttactaagtccgctttaataaagcttattttaaagtaaaaacaatgtattagccttggagattaaaaaggaattcatctgaattttttcattttctaaatcttgcataaaattaatacactgaaacatcttttgagttttaatgaaattaagaggttgtgtttttggtgccacagtgagca

SEQ ID NO: 113144 - DNA, 1995 bp, Homo sapiens
tagatgcagttaaggaagaaaatctgaagctaaaatcagaaaaccaagttcttggacaatatatagaaaatctcatgtcagcttctagtgtttttcaaacaactgacacaaaaagcaaaagaaagtaagggattgacacccttctgttttatggaattgctgctgatcattttttctttaaaacttggatagattccaaaagttacagtacctttgtggcttcattgaatatttatgaagataatgtcagatgtagacaaaaataacacaataacaggagacttccataagtttgtgtattatgttagtctatgaaaacgtgcaaatgtattgtagagactttatgattagaattgcatatatttatgaaacttaaagatgaatgttttattgaatttgtaggtttagcactgtcttttattataggattagtaagatatacaagaaaataaccaccgtgttgtgaaaaagtgaccaaaatcatgtactaaatgcacagctttatgtaccctgtccaccatcttgtgcctcttctccatttgcctcttccttcctatttcccttccgctaaggaaaaaaattggtgtcacatttgtaaaagtaattttaatagttaatcatctctgagagtaacctgtattttaattgttgaaacttaaccaaaataagatactgtctcagctagggcttgtcatttgtgtatttagtgttaagataggaatgctagtgtctctttaattaattggaaatagatggaggctaaaaatgaaggtttttctttgaaactgaattaacttgggaatatttgttgttaaaaacttctttttgcccaaaataactcattttgtattatctgaaaatatataatttctggtcatgtgtatgttaaaatagaaaattttgaggaaaaatggaaatagggtggaaaagtactcggtaaacagtagtaaccaaatattttcactccagatttgtgttttctctggcacagagtagatcttttgggaaatatatatgaaagtggattaagtttgactacccttatgttagccacatctggatgagaacagttacaaagagtttggtctctaagttgatttgtacccagtgggtcaacttctgcaaaattccgtaatggtgtattagtattagaatagtgaataaaatgggaaagttatacatgtatacttattatcttgctcagtattttatctcacttgttctagaattttctgtaaaccctgctactgggtttgaagagttttagtcatcctttaacaatttttaaaaatttagcttctagattccatttggtaaggaaatcaatattggaagtattgctaaaatcttataatatgaaaagagatccactaatgtagcttaaggttattagatttgggcttttaatcatggaataatcttatgtattggtgtaagagttgatgaatgactttagctgtgtgaatatataatagtcaaactgcaaacattttgcatcccttttgtgacctaatttacagacatttaaattgtgttgcagttctgctttgccgtttaataaaaagctatttcagaggttgtgtgtgttttgatatagttgcctaagtaaatggggtatttaggtatagtggtgtatccagggttattcaatgccacagaatagtgtatcttatttaagtacccagttactgattatttaggggaataatatttttattaatacaactataactggttatcaatataaatatcataggctattatacattaatttggaaaacaaaagcaaagcactcaaaggatccagtatctccagggaaaaaggaagttgtattttttagggtaggctaagctactttagcaagagacccagtgataaagaatataaatatagaagtttctctcccaaccagtggttccaaggtcagcattgcaggctagcagcccttgttcaaacagttattcagggactttggctgaggatggtgctgccat

SEQ ID NO: 113145 - DNA, 1027 bp, Homo sapiens
actttacaaagtataaggtgggaaaatgaaacttcttttacttacgagttcatcactccttaatgtaaaatgcctgagtaaataagtttttttgtatcttgtgttacccagtaaaggtttgtaaaatttgaattgcatttttatgcttatctcgtctatagcctggtgtattaaaacagttaatggcagctgctgaagggcacccatggctttggttgatttatcttgtgacagcaggagtgccaatagcattaattacttcattttgttggccaagaaaagtaaaggtaaagaaaatggatttccttcaacttttttcacccaaatttcttgttgtttaagagttctataaattaagcgattcttaaaagtaataaactaaatgtctcataagttttactgatagttcattatgtatgttatcaattattgcaaaaaaactttcaaaatagcactctgcctttagtaaaaataacttatgttaactaccacagaaaaaacataaagatacagagtataaaaaaaccgacatatgtataccacaaacaaaaggagtactagagcaagaagaaaaggaagagaaagcagccctggaaaaaccaatggacctggaagaggaaaaaaagcaaaatgatggtgaaatgcttgaaaaaggtaagatgatgagagtgatttataatggagactctgggtaaagctcataaaactgtatatggccttgaaataactagttattatacttgtttattatcaagtttatacatctgaatctcccaagaatatgtgactgtggcaagaaggaataatagtcctctgagcagccaccctgtttatagtttttgcattctaggaagaaggagatttaaatagtgttcagttgcttgagagcctagcagttaatgaatcccataggccatagctttttgcaaggatgtttcttggctctgggagtgtagaagatgagatggagggtgatagagggtgtatatcatggcctctgtagaaaaggaatagatataaaacagat

SEQ ID NO: 113146 - DNA, 1035 bp, Homo sapiens
tgaaataattgaaaaaactaggcatttgggggaacaccaagtaaactgtagaaataatgagaaaatattactagaacagaataaattaattttttgttatacttacaacactttaagatggtatcaaaaaaattaaatgctgaaaaagattagcttgtattttgtaactataaaagagtgaagctgactcgttatgagtcccaaaacagagctatttggtattattttttatttgagaagtaatggagcattttattgtaaaaaatgcagtttaaaacaaaattttatctttaggaaatgtatctagtgattttagaatgttttagttcaatacattggttattcctctatttctggttgggaaaaaagctttacccatggagttaagggtagttacattatttagaagattatctttaaagcgtatatcaaaatgataactataatttatttaaattggtcccttagtgatgaatccagatgacacatttgaggtgttagttgatcaaacagttgtaaacaaaggaagcctcctagaggatgtggttcctcctatcaaacctcccaaagaaattgaagatcccaatgataaaaaacctgaggaatgggatgaaagagcaaaaattcctgatccttctgccgtcaaaccagaagactggtaagcaaataattcggtagcaaagcattatctggcataactaggtaatgaaacaacatataagtgaagtttacaacccatgaagtttatttttttaaacatcagaactacttatttttagtattttgggtgaaatattttctaaaatggattttacacttccctccctgtaatttttttttatttctattgataattatgttgcattttttaatatatatttattttttatgttttcaatgctgtggattaaaaatttcataaatccaaaataccagtgctttaattttcattcctagtttgatctttattgtatgtgtgtgagagtccgaggtgggcagatcacctgaggtcaggagttcgaaaccagcttggcc

SEQ ID NO: 113147 - DNA, 1047 bp, Homo sapiens
agtaagaaaagtagctgatgagtattgtgcatttcaaaataaatagactactcattttgtgttatgtgtcatatgcagtttcaaatatgtcattttgaaaatacaatattgacataccctattgagacaaaccacattttataatttcattgattaaaaactctttcatagaaaaaccaaactaattcagctttaagagtgacttaattagacactatagtgtttgctattagttttcacaactttagttaagaagatgaaatcattctttgatagaaaaaaaaagataaatgagcaggcatacatatatagttgaagatatttcctgatttaaaatttttatttttcccaagtcaggcttcctggataaaaattattgttcacaactgctgataaataattcttaggtcaatgttttctgttttagtttaatttgctttgctttattttttaggaagatgggaaattgaagagttgaaagaaaaccaggtacctggtgacagaggactggtattaaaatctagagcaaagcatcatgcaatatctgctgtattagcaaaaccattcatttttgctgataaacccttgatagttcagtaagtgttgctatgtttttgaatactttttctgaattttgtattagctttggcttctgaatatagcttgtattttgaaaatggatgtgaaaatctagatcttcctttttcgtttcacttagttaaaacacaaatgtgcatatacacacaaacatatccatgctttcaataaaaagcaggtaaatgataaaattatacaaagatcaaccattcttatggcctagtactaatatttatatttgtttatttcaaggagttgtatgtgggctattaagcagcatatttcctttggtctgagtgcttgtattgactaaatgaggaataaatagtttggctctcttaaaaaaatttaaaaattatgtgatatatactgtaatatatacaattctgctgtcataaactatataatgcatagtaaaaatcaccatttttgttttactcttaaaattac

SEQ ID NO: 113148 - DNA, 1036 bp, Homo sapiens
cccgtcttctgcgtcgctcacactgggagctgtagacgggagctgttcctattcggccatcttggctcctccccccatctttagattttgtgccattggctctttgtttttggatgaaggcctgcagctatagaatctgtttcctacaagatttgaagtttgtattttcacttgctcaaagcacaatttaaataattttgtcagtgatttgttttaaaagccatcctagaataaaggagctattatggagaaattatttatttctacatatacttaacacttattttcacaattttgttttattttcactaattacttttaatttcacagataatcaatatgcatttccaagccttttggctatgtttgggtcttctgttcatctcaattaatgcagaatttatggatgatgatgttgagacggaagactttgaagaaaattcagaagaaattgatgttaatgaaagtgaactttcctcagaggtatggttattgagaaatgggttataaattattcctttacatagtacaatgaagtgattgacctctggtgattcatttcagttcaaataatcttcattttagagctagatagaaaaacattgattttttttctaagtgtcttattactttaatttttagagtgcccatgtaattcagaaatttgttcatggcatctagcacagtttcttaaacaaataaatatgggggaggtttttactatcaaaacaggagtttgtcacggattaaagagaactaagctaatagtaaggtttttattcatacttttgacattgctagatcttttcaaataaaaggctatataatttgcagttccttgagaagtaaagtatttgtctttatttctctgagaaaagaaaatgctaagaaggaggatgaattagaaaaggaagtgagggtgaggggtgggcatttagtaaacctgactcgtgtttctctcagcattgttaaaatgtatattttgaagtagtgattaacaggagtctgagaaattgcagggatttttgtatacctt

SEQ ID NO: 113149 - DNA, 1035 bp, Homo sapiens
aatgacttattcgaatttgaggagtctaattcaatattctgctaagaagtctggcttccatgcaatatatgacaatggagcaaagctccactgtacttacgcatatacaggcatttgaatttctgaaagttagggaggaatactttggcaatctattggtgtttttggtggctgtctttttattgcagctgccgtcttagggtttaaataataatgtagctgttaaatagttgaataataaatacattttacggcattagtttagttttcttttaatgctatagtgatgcacatttgcatttttgggcctctacttttccactacagcctatagtcattcaaagtataataaggggattctatgaacaactttatgccagtaaattgtttgattttacacaaaatggacgaagtccttgaaaaacaacttaccaaactaacacaaaaagagattaaaaatctaaatagtagtatacttacaaaagaaatagaaactgtaatttaaaattttttcacaaatctctaatcttggcttcactagtgaagtgttaaacatttaagggagaagaaataataccactattacattaactcctaggaaatagaatagaaagaaacacactttatggggccagtatcatcttgatactaaagccagatatagacaatataatatatgaaaattacagttcaatgtccttcatgaatataggtgcaaaagtccttaacagaatgctagcaaattgatcctagtaatacataaaaaggataatatgtcatgttgagttgttttttttttttttttgatacagagccttgctctgttgaccaggctggtgtgcagtggcgtgatctcggctcactgcaccctccacctcccgggttcaagcagttctctcacctcagtctttctcgagtagctggggttgcaggtgcacaccaccatgcctggctaatttttgtatttttaatagagacagggttttaccatgtttcccaggctggtctcaaactcctgacatcaggtgatccacc

SEQ ID NO: 113150 - DNA, 1833 bp, Homo sapiens
agcagagatacagcagagagaataaagaattagggcctccttttgggtttctgtgattattgagcataactgatgagagaatgacagtattggtgactagcttttttgtttttaaataacacactttaaaatgccacagtgttatttgaaagcttaaaggcattttctcatcttcagtatttgctttttatcagttgtagaaaagaaccttagtgttttcttctctacctatgtatgcttatgaaaccgctctacctacatatgaaacttctctacctatgtatgtttacgaaaagagatgtatttgccaagaaaatcttgattatataaaagacaaaaagattataaaagacagtttctgtttaagtaaaactgtctttgaaacttaagaaagcttaagttttaaaaaaatctcagttaaacatcattggtttatttgacttactgttaactcttgcttctctttgactccatggtgtttttagataaccatgtatgaactttatgttaatggtttgtgggatactaaaatagcttgaagatgacttgatgactgtgcattttatatagttttattctcctaaaatctcaggagggcagcaagtgctgtcaacgattatatagtgatgagatttttatgggaatgatttcttcttggtgcgttttacacatttgtactgatagcaaaactaaagtttaaagcagcaaagtttaagttctccttaaatcctacagaaaccaaccttttaaggacataatttcatctaaaacatgacgatatttagcacaccttttaatgtgggtatatatcaagtgtttaaggactggctagtatgtgatagagcaagacctgagactttataagtatttgctcgtgtctgttgacagacctctttctttcaaacttgttagaagagtggtaagacatatccaattggaaaataagatgcagtgttgtatagcacatacatttaaagtgcttgcgttaaaattagtttctcaataagataaaattattttaaaaatttggttcactttattacaatagtggcaatttagcttttcagtattacaggaatttaaaaattggtttcttgtaggggacatctcaactttgggaatatcttcacttaatttttaaaaaatattttcatgctttattgtccagctatacaatatgtcgcaaaatcctgacaagttcattgtattaaggtattaactattacatggaaagcaattctgttcatcttttgatgtttgtgttgaaaatgcttatctttgtgttttgatcttccaacagctgagagcttgaactgatttaaacatttgtcaatatacttaagaatgctttaagtaaagaaggggaaaattttaagtaagttttttcccttctaggaagaaaaactatgatgatgttaagaaaatgtcattatagagcttgctcaataatatgttctttaaatccacctccatttgtacattataggtatcattctgtttttgcttaaaataatctgcaaccatttcagatagttttacagcaaattgatctaaaagccactaataaattctagggtttgagtctagaagccaagcaaactgtcaccaatgtcagttgtaaattagaatgcaacatgaggcttcagactcatgacaatgatatacatgaaaacaaaaatataattgtgtctaccttcctactttcccttttgacatatgtagttggaattttacatagtcttaaaatccatatttagaatcttacctgtttctataataattagtaaaatgccaaagtagtgatagaatattgtggcattgaagtagccgaaa

SEQ ID NO: 113151 - DNA, 1575 bp, Homo sapiens
aatgaaaactgttggagaaatatttaaacacctcaatgtaggtacattacactcttgttgcggggaggggatttaccagaatacagtttatttcgtgaattctaaaaaacaaaaagatgaatctgtcagtgatatgtgtgtattataacttattaatcttgctgttgagctgtatacatggtttaaaaaatagtactgtttaatgctaagtaaggcagcagtcatttgtgtattcaggctttttaaataaaattagagctgtaaggaaaatgaaaagccacaaatgcaagactgttcttaaatggaaggcatagtcagcgagggtaaatcctataccactttaggaagtattaaaaatatttttaagatttgaaatatatttcatagaagtcctctattcaaaatcatattccacagatgttccccttcaaagggaaaacatttggggttctaaacagttatgaaagtaagtgatttttacatgattccagaataacacttgtattgaccaatttagacagataccagaccaattttgcatttaagaaattgttctgattatttacgtcaactcattagaattcagtgaaaagtaacagtcttttgtcacagagaatctgaaagtagcagcaaagacagagggctcatgacaggtttttgcttttgctttgcttttgtttttgaaagagtaaaagtactgatgcttctgatactggatgtttagcttcttactgcaaaaacataagtaaaacagtcaactttaccatttccgtattctccatagattgaagaaatttataccacatatcgcatatgaccatctttccatcaaatcaatgtagagataatgtaaactgaaaaaaaatctgcaagataatgtaactgaatgttttaaaaacagaacttgtcactttatataaaagaatagtatgctctatttcctgaatggatgtggaaatgaaagctagcgcacctgcactttgaattcttgcttcttttttattactgttatgattttgctttttacagatgttggacgattttttcttctgattgttgaattcataatcatggtctcatttcctttgcttctttggaatatttctttcaacacattcctttattttattatacattgtgtcctttttttagctattgctgctgttgttttttattctatttacaggatgatttttaaactgtcaaatgaagtagtgttaacctcaaataggctaaatgtgaacaaataaaatacagcaaatactcagatacagctttttatctttgtgcttgagttcctgcctaaggcaataacattattcttttgacaacttttgcaggggaaattatatcaggcaaccattttgattaagtaaataaattttataggcaaacatagagagagaaatacaatttgtagtatatcaatgactatatttaaaataaggaatataattgttatcagttatctaacttaaaatgcttatccataatgatcagtgatattcagctttttaaaatatgcttgttggttgcatgtctgtcttcaaaaccacaatgagataccatctcaca

SEQ ID NO: 113152 - DNA, 1050 bp, Homo sapiens
ccgggcagatttgattgaacagatgagattcaaacagagactgaaagtgatccagacgctggaggatactacgaaacgcaacgtggtaagtcctttaagaagtagcaggcaacctctgtcatcttccttcttcacactcctgctggctgtggattcctgcctgacagaactgaaaacaatttgaaagggaaaaattagggattttcccagcatggcactttttgagtttgtgaaattcattttgcttaatatttttataggtacgaaccattgtgacagaaacttcctttaccattgatgagctggaagaactttatgctcttttcaaggtgagttgcaaggtaaattcatgcccattcaaaggagtaaaggagttcaccttaataattcagttagttcttgatttttctgttaaattaagggataatataaataggaagctagagctgagagtacaaaactgtagtacttaatatgaaaataaacattcttataaccaatttaagttgatgttttagttaccttgcactccatataatattctagttgtttacttgaacctaaaaaaataggttattgcttcataatacttattaaaaacaatggtgatcaagtttaagttctgcttgaattattgcaaattgtgattgcctatgttaagctataaaaacacccttatgtagttagaataaagttgtttaagtgcccaaggaaaagcataattggttaaatttctgtgattttcctttcctaattcagcccctaccaatctttatttttttatttttattcttttttgagacggagtcttgctctcactctgttgcccaggtacagctgggattacaggcgcacaccaccacacccggctaacttttatatttttcttttttctttttttttttctttttttttagtagagatggggtttcaccatgttggccaggctggtcttgaactcctgacctccacctcgacctcccaaagtgctgggattacaggtgtgagccaccacacctggccccaatcttgattcttaataagaaagta

SEQ ID NO: 113153 - DNA, 1263 bp, Homo sapiens
taaaagaggctgaactcctacttcaacacacaagtgcacgtacatgcacacgttagtctccctctactgcattattttacctctttataacttccaatttaaataaccccccacatagactagttaaccttttcatctttgttttatctaacactagcatttaggacctgcaagatatcaccactctgtcccccatcctccaatacctagtccagagcctgttacaaggtagacccctaaaaaaacctatctccgctaaatgactaaggaactggcagggaccatcatcatgtactaggatcagcaggttaattctcaagtggaatttccatgatgatgtcacttgggaacataatgagtaagacttacaagaaagagcctattaaaccaaaataccttttttgaaattgaattgtagaagcctgatgaacagttaccggtttctgggagatcaaaagaagtacaggaggtagttggcctctaatatgataaagttcatatttaccttttgatcttcctctttttaattaagaagactattaaagtagttgagtctagagtggttatgaggtatctgataatatcttttaataaactacagttactttagaatttaaatcactctcagttatcactaccatctctctccgtatggaaatgttgggtgaggactccaagtctgaaaggtttcgttgttctctcaggagagcctggagccatgtgtacctgattatagaaaccattacggaaagttacaaaggaaatgtttacctcactgaattaaggattaagaacactgagagattttagcaggttaaaagctttgtgaaatagcctttgggcaaatttttggaataggggtttgccagcatgagttcggggctctgtctggtgaatattggtgttaaggaagaccctgcacacttactggttcaaggactcaggtttttatgtttttacagggtcataaaacaaaactcagaagaatatatgacagagactatgtgtaaagcctccaaagcctaaacatatttatctcgcttttcacagaaaaggtttgccagcccttgtgagaataactgagtaattttaatatgctaacagaattgcttatattttcaactgtatttgatgacatcctctttcacttttttaggccatgaatattgtcacttcagtgctgctgctttatgccaaagaggaggaagctttctggctgcttgtggctttgtgtgagcgcatgctcccagattactacaacac

SEQ ID NO: 113154 - DNA, 1036 bp, Homo sapiens
agaagttatttatagctgcattttaagtgaaaatgaaactcaaaacgagtaccaggaaactagtgtatacaacaatagtacacagccctatctcagagataatgttgagagttagacccagtgtttcctttaacggcagatggaccatgtgagaccgcagggtggtctccacacggccctctgttggggtgataactgagcccgtatttccacatccaggaatggggttcgcctgaaggccagcctatcatgaagagagcacagctccaggccagagcccaacttgggtctcacctgcttcctgtgacccttagggtgacggcatcatgacctgaactctgtacccgctgaaatgaaatgcaggtcagatgacaagaaatcacagtacgtctcccacatcaacagagcaaaagccagcgttatgtccctgtcagctgggttggcttttccagggccagcgtgagtggtgaggccagctctctcagtgaccatcagagacaaggccttggccagtccaggggtcttggggctccacttttctgaattatgaaatgttgagtgtttaccctgtcaatatatatatcatttatatattttttgtgatatctttattgagatataattcacaacttactagttaaggtgtacaattcagtggttttttttttttagtatattcacagaattgtgcaatgatcacaattatagaacatttttcatccccccaaaacaccccataccttttatccatttggaaaatagatataggctgggcgcggtggctcacgcctgtaatcccagcactttgggaggccgaggtgggcggatcacgaggtcaggagatcgagaccatcctggctaacaaggtgaaaccctgtctctactaaaaaaaatacaaaaaattagatgggcgcggtggcgggcgcctgtagtcccagctactcgggaggctgaggcaggagaatggcgtgaacccgggaggcggagcttgcagtgagccgagatagcgccactgcactccggcctgggcgaaaga

SEQ ID NO: 113155 - DNA, 1035 bp, Homo sapiens
ggggcttttgtggattttaaaaaataagtattctttaatacatgccttaagtgttatgggaaaattcttttcaggaaaaggaggtatttccctctgttatatagcatttattgcattagaaagaaaatccttatgtacaacttcaggtgtctcagaagattcctttaatatatataaatatatatttttaatattctataatgtatgtttaatatataatgtatattatatgtcatatattaacacatatatttaatatagatattaaaagaatcatatatactctaacacatatattctgaaaacagcagtcagatgctacactttttcccttgatggaccccaggcagacctatttttttagatatgcaagagtttttagacaacttcaataggttacttagtcttgagtagggaaaacatttctaagttgtgctttgaaggaaatatatttcacatgaaaatgctaatgaacaacttaaagtttaacctgtctagactgcttgcagtagaaatgaagaagggaaaaaagatcttagctttaagtatattgtcagagctgctgcaaataaaccatttttctagtgcttgccttgagatttgttttctaatgtgctaaagagaaaagttttaatgcgtttatcctagtttctagttgatgaaaatcctattataaatcacccgtatatgtcttcagtttagagctaaatttccccaatgtggtaggcttcggcacacacacacacacacacacacacacacacacacacacacagtctggtagttcagataatgttgcaattaagctgtttacattctttacatgtctgttcagaatagaacctttaaaactttgcagtggtagaaggtgaaggatgaaaagccctggagtctaaatgaaacatttgaaggattggtggtgttttgaaaaccattccaacattaagcttggtaaaaggaaccagtatcatgggttgttttctgtctcttatggctgatgaagcagcgaggagccctctctcttatagctccatg

SEQ ID NO: 113156 - DNA, 1015 bp, Homo sapiens
aagagtaaatgcagtgacctctttagagtgtattgcatttctttagaaagaggaagagtttcctgttcaggcttatttttgctatgattctttaacatttacagacatggattataagtgactatgcaagggactgaaatataataagataattttattacgcttttgggtcattaggttggggttaacttcaatataaagaaagctgagaagcgggggatgagtctagcaagattgaggaggtggaaaatgggctgggggaacttccgctgctgcataatttagaaggtatggaaacatttttcttatgtgaattgtaattattgctttccagtgatcttgatgccagggcaaagagtgagagataccgtgcacttttccggctgcccaaagatgaaaaattagatggccacacagactgcactctctggactccatttaacaaaatgcacattttggggcagatgtttgtgtccacaaattacatctgttttaccagcaaggaggagaacttatgtagcctcattatcccgctccgtgaggtaagtatctgataaaaattgatattttaagtttcatttgtaatacttttctgggtgaaccaggaataatttttttaccaacaattggcttttgaacacaggtgaatgttcatgcgtctttggtggcacctgcattctttcatttgttgtcactgctgtgactctgggacctgtgagatctcttcttccagaagctgcatgggggttttttaatgtaggttttgtttttattttattttattagagacagtctcgctctgtcacccacgctggagtgcagtggcatgatctcagcttactgcaacctccaccctccaggttcaagcgattctcctgcctcagcctcctgagtagctggaattacaggcgcctgccaccatgcccagctaatttttgtatttttagtagagatggagtttcaccatgttgggcagactggtctcgaactcctggcctcaggtgatccacccacc

SEQ ID NO: 113157 - DNA, 1043 bp, Homo sapiens
tgaatttaattatttttcagttcaaaatggtcactaagtaataaagattcactaaaggtgtaattaattcagtagacatggattaaatctataattctgacctcagaattcacatggcccagatttacctcttaaaatgaacaagcaaaacaaatatggtattataaactcaaaggagttcagtgggatgggggagtggggttgtgagactgcaatatcttgaaagcgttttcaggaatcagatgttgacccaggcttgttccttgtgctcagcgaaactggtcatccggtgggtagacatcactcagcttgagaagaatgccaccctgcttctgcctgatgtgatcaaagtgagcacacggtccagtgagcatttcttctctgtattcctcaacatcaacgagaccttcaagttaatggagcagcttgccaacatagccatgaggcaactcttagacaatgagggatttgaacaagatcgatccctgcccaaactcaaaaggaaatctcctaaaaaagtgtctgctctaaaacggtgggtgatagagaccttgtatcttccagactttagaaatgagaaactcactcattcatttattcagtgtaaccttctctgacgatcttcaagggttctgaacactcttctgtgtatagatacaaaactaaaaaagactagctgaggtgctaccagttcagaaagtgagacagacatgacctgctccaacacaaggcagcaggcactcttctggtcctgtgaacacagtgctgtgggtgcacacatggggagtgatagcctcagcccagatggggaagagtgggtaagaaaggcctctcagtggaggctgctttgagctgggctctgaagaggtgatagaagttacctgtgcaggtacatatccatgcctggatatttcaagcagagggaagatgacgatgggggaaacacaagggaaaacacagagagaagtaactttgtcacatggctagtaggtggcagggcatgggatgaggagaggctgcagagaagcctcaaagtctgaatg

SEQ ID NO: 113158 - DNA, 1053 bp, Homo sapiens
aagttcttaaagtaacactaccaacgcctgcttgtccctagaatagcctgggtccaaaattgagctccctcctggccttcatcgagcttaatgtctttgttctcttggtagagtgatatcagtggtaaatagaggaaaatatccttatgttagatatttttccagggaagcacattgctacttctattgctatccataatgccctccagtatgacagaggaacagaagttagcaacttggtacctaatttctcaggcattgctaactccaaaacaattgtagatttagaaatctgcaactctggattatacaataaagactaagatatggccccttaagatatcttttaatttggaaaaacaacaacatggattcatttagtaatattgaacatcttttaggtgctagatattggtgattaaaatgttcgagacattctttttatctttggaattcatatttagtggtagaaggacatataaacatgctattttctgccagcatgtaaattaagacaacatagacgtgagaatgcttagaacccatttggaattgggctggtttcacagggaaggtggtatttatgctggacctggaaaggttgacttgggaagattgagagcagattttatgggttaagattcagtgcagatttcttttctctttcactgagagcctgtggaagattataaggtgggaatactgtagtcagatctctgtttcagaaagtggccatgtgaagtaaattggagtgtggagagtgttgtcaggatgccatttgagaagctattatatagtaattcctggactgtgtagagggactttgggatgcttttgttagaagaataggataaagacttgtcttggggctgtgcttgcatcgtaagcccaccatttgctgttatgattattgtctacatgcttacttttaactagaataggacagtgacagagattatagaagactgaagccctttctcctgccatccactcagcagcatcacaactaccggcaacagggtgaaaggtctgcagtggaaataagactcagga

SEQ ID NO: 113159 - DNA, 1049 bp, Homo sapiens
gagctgatttactgtactctgacaattctgtctctcatggtttaccagtgaattgactattttgcacctggggctcacattggagtaaaaataggtacagatatgctaccagcagctcttgttttggatatggtgttccagaggcagcagagagtccagtccattgtcttccttggccttcagttggcacaggtagaaagccatttggctttctgcccattataaggactagaaggttctaacagtaagaagggttggttatatgatctccatgggaatatgggcacataggaatgcaggtaattccaaggatatgatctaaagaaaggagttctgtgacagctcaggagaattagaaacaaagatacagaaggagctgctggcagttccctctggatgcatctgaccttcaaaaagggctaataaaggaaagcgtggagaggatgtgtttgacggacagctcactgacaacagtgccgaacggtgccttgatttggctgtgtattgattgagtttcccttttctttaccattccagaatgtcatctggtcctagatggtcattgtgtttcagaaatgaaagatagagcagctatcgtcttgcctgcccctcttattgtagtaggatgcagaagcaaggtgaattgtccaagttcacattcctggttataactagttatgtggtgctcagaccaagttctcaggtctccccactcccatcccaggacttcttaagtggcaccatgctggcttttataattaaatattcttttagttagcggctggtaagacccagagtttaattaaagattactaattggttctgctcttattctctactgtagataaagaaaatgttgggtaatttagttgccttctgcatgaggcagacgtaatgtgaaagttgataggtatttttataattatttcttggtctgtgtaactcaaggactattctcgtatctttagaaacacagtgagttaagaaagcaaacaaaaataattgctccttttttcttcaagcaatacatgtttattgcaaaaattaca

SEQ ID NO: 113160 - DNA, 1423 bp, Homo sapiens
acaatattttaaaatgaatgaatcagatttacaagtatattctggataaattttacaaacatattgattgaaaaaaataagctgcagtgtaccttgcagacaaatttgtaaaatactcatcagttttaaattttttatatgaaaaacatggctcagtaaaagtataaggacctggataggaagaatacaaaacaatttaagaatggttaatggagagagggaaatgggattaaaggagtgcaaagggaacctcactgtggctgttaccttttctttctgttaaaaaaaaaaatagatcggaagcaggtaaggcaaagtgttaaaaaagtcagagtagtggtacatgtattttgtaatttcctgtacttttctattgttttgaatgattcattacacaatagtgcttagtgcatactaagcactttctagggtagatactattatttctttatcaggaagcaggggcacagagagattaagggactggctggtatgtgagccaaagctgagcccactcccctgaccactctgccatggatttcctggatctctgcttcattttggaccagcgtcaggactaatggagtcggggaggccaagtgatctttaggatcctgtccagtttaactttagccctgatcatcagtagatggatcgatcatttccatgagcacatttctgcatggcagcacactcctgacatagcccggcctgcagagggctgacgggggtttctctgcagcactgtggacctgccacctgtaccagctcccagctaggctgcagttgtgcagtggtgactgtgcatcacacatcttccagtgcccacaaccaaatgggaagcaaatatggaacaattttgccaagtgttttctgaatctccttgaaaacagcacttttacattataagatgccactgtactaatgtaataggtagatgcagagaagagttattttgagggctgtaatttgatttcgttatcttaggcaatcaagattgtttaacaccagaaatagctgactagaacagctgctaaaacagcgctttgtgtgggaaatgaagaaaaggttcagtattttgacagccatttccaaggtatgagtaatgagacttctaagaaaatcgtaattgttgctgcttttgcagtggggcggggggattctctagaccagatttcccatctcctagtattctacatcaatagaggacaaaggaggagtatttcctttttcccagggtcttgacttcatgtaccaacagagtttagatagcatggtgataatttattatttaggtttaaaacgcacacacacacacacacacacacacacacatgcacacacccctcacttgtccatttatcatcaaccatgtgtttagtgcttactggactccaaagtgcagggcctgtgggtccaaaat

SEQ ID NO: 113161 - DNA, 1049 bp, Homo sapiens
tgtccaacctattatcaatgtttttcaaaacaggtttcaagctatcttcaggccatgactaaactacttagaaaatttcagttgggcctaatatattctgtaagggacttatctacatttacaggtcatttacatttattgaaaacacatcctgttacaatagacatcttgataaaataagggtgttactggttaccgtacccatggttttgcacagtcaaaccatctttggtgagcttctttgttttgtttctctcccttgttggtgccagggtgttttctttattttcaggtcttccgagctcaattttctctttaaggctttatctagactttagctgaagattgctcccacgttatccatcacaaaatgaaatttgtctgtgaggtccctcagtcttatccaggtggataaaggctaagatagaaatggaatgcaggtggagttgcttgccctcaaagtgatgaggttccacgaaactcccaggaatcaagccaggctgctactgtatctctcccttgcaaatagcatgattgttttaattacagtctgtagccactatttttatctgtgttagaatatttggatgcaagactggaaaacattattgctgttaatgcctttgcaccttcttatataacttgctatagtgtggaagggaacatttactcaaagagcctatccagatggagccaaaggggttagttagggtttttgttggtcactttgggttataaggaacaggagtcattcaaggtactatgaattcaacttgctgggctttgttaccaggatgtatgcaaactgcagccagtctgaaagaccagaagcaagataactggagggtataaactgaaaattctaagctcccccaactgattgattggaccccttctgtcagccaaggggattccaaagtaaacctgaaaaactagttcaggccgtgatgagaaaggggggtcagacatgcctcattatactctccttcctttggaattcaggcacaactgaccagtattaatattaaaacagagatcttaagactgac

SEQ ID NO: 113162 - DNA, 1027 bp, Homo sapiens
gcagctggaattacaggcacccaccacagccagctaatgtttgtatttttagtagagactaaaaatacaaattttttttgtgtttttacaaaaataaaaacagccttgccatgttggccaggctggtcttgaactcttgaccttaagtgatccatccaccttggcctcccaaagtgctgggattacgggtgtgagccaccaggccaagactgaatccactttctctgattactttacacaacactaggtaggaatattagggacattcttattgctgtcatagaaataggccagaacaaacatctaaatgtttttccttagactgctgggtgctctttcggatttaagttaaatgagcttagtttttctaggggtttccctggtgatcttctggaaattatttgaaaatagccatgttggtaatttcctaatcatgtggcttgttcgttgtgaaaatgttcagtcattgttgttgcttattcattggactgtctgggaagagctaaggaggtatgaggccctgggtttatgtggggtaattattacatggaggattatatagggtagctctgactctgttttcctcagggttcattcagaggagagagtaatgaagaccagagatcctcacacttttgcaaagaggggattgttctgtcttaataaaaatgttcaaagaactagcataaagatcaggcaaatgtcctgtgagtcacctcccaatgtgcatagctgaatgtactttttttttttttttttctgaaaaaaggaacagaaaaaaaactaggtatatcacatttaaataaaataaagcatatttcatttaactttttaaaagcaaactatggggaaactatatactatttactcaattgaattagtatatactaattactcaattgaatcccatcagtatgcattgaaattaaatgtatagaaatattgtagagtaaagcactattatctaaaatgcttttatgctttatttgttctaatacagagctttctacctattttcatatcatag

SEQ ID NO: 113163 - DNA, 1014 bp, Homo sapiens
ggggctgccttcagccaccgcaatcggtactatttattgaacacctaccaagtgccaggtgctgtgcaaaattggttcatgtgcaatatttcctttaatcctcattacaacctctcaggaagatactattatcttcattaagtgggtgaagaaattgtggtttttatcagttatatagcttgccccaaggtcatgaccctaggaagcagtggaacagggattccacccaggttcttaatgcaaagcctgtggttttgaaaagctaccttccaccaaacccaactccaggaggcagttcaaaacagtctcctgcatgagtatgccagccttgggtaagtaccgtgtaacatcttctgtattacccttgagctatgtacccttgaactgactgagcaaatgaccattctaatgattgctatttgtatgtgctgcttctttcttcgcagccagatcctattctcaaagacatcagtgatagattatatttctagtgcccagcaaagcttcctctccacaggtgctcagtgtctatttcatgatgctaaggatgaaatcacatcatgcctccaggactaaggccatatttttcctttacctcttctagacactaataatcatggtgactacttcctgggattcagaacataactttagcaagcacttccttccagtgcccagcttccttctctgtagaaaaagaagatgcaagtttatgtcttgacgctccttccctgctccaaaattaagcattatttaaagaaaaatcctagttagattacatgagtgagagactctacagtttttgaagcactcccatacacagtatgtcatctgtttctcagcagccctgggagactagcagggaagatgaaatatccctgatgtagtggcaggaaactatgactcagagaagctaagtgacttgtctgaagccacacagcttgtgagtggggaaatgaagacttgaatccactttcttttatttatttatttatttatttatttatttattta

SEQ ID NO: 113164 - DNA, 1043 bp, Homo sapiens
tttttttttaccatttaaagttaaaaattttttaatataacccagaaacacttgactttgagagaattctgtttattttcccctttcattggattatggccaacattcctgactggtgcagaatatggtatcaaaagaatgtctgcagtatgtagccagtgacctttataacaactgtgtgcattgcatttggtggaacagtgtttaccatcttactttctttattaactttgggccagtagaacctgcttgttttagctttagccatggcaacaggccaaatatcagaatgactccctatactacttctgcaaatactttaaaaataaatgtgtccttcctcctataggagctagagttaaaagtaaaaaagtaaaataaaagaaatgtgcatggaaactctactctatttttctggtagactatgatttcttaaagaaaattttatctggagaaagaatttaattagcaaaaggtaatactccttccgtgcaattagagaaactagagatagcaaagagaggccaactgactgctcaggtggagtttaccagcaggtagtactttgatgggtgttatgccattcccacccctttttttttttaacttcctggctaattcgtcactcattcattcattcatttattcacttgttcactcatggaacagatattaggtgcttatcacatgtaggcaccaaggatgcagaaatacatgacaaatttctttgcttaagagactgtattcagcaagaatctgctgaatagcacattctgagtcagaacaatagatttttaatatggaaattagtttcttggtttttgataagacttaatgagaggctttcaaatgcacactgtaatatatgtgccctttatggaaaatagttatttgtgctgaatggggattatagcatcacaaaatgtccacgcttccatcctaggccataggtggtttgggactctgccccaggctgggctttgagagcctgaacgtggccaccagaatggggcctggcctgccccactgctgtgggcagtgat

SEQ ID NO: 113165 - DNA, 1169 bp, Homo sapiens
aataactcttggcatttaaaaaaaaatcacataattattttcaaaggggagtaaggaaagaggcatattgtctgtattgtaaaagtcaaattttcaaaactttaaacaattaggaatattctttattgtgtagatagataccttttcctaaatattttaaaatatgtagttctctttattttttgtttttccaccatggatggagatacagcttatggctatagaggtacatttctatgaacaatgcttgtagttttaattttaagagtacaaggtgataaatggaaactgacactcagctctaacgtcaaggagacagtctgcagtgatgaggactggggaaattggagagttcatgctgtaactgaaatcagtagtcagaagctatttttatagtggcgattgtattgtacagtgtcaccatgatgtatattgttataatttacatatatattatctgttggattgtatcaataggaattttcatttcctgatattcattaagcatccttgaaatttgccccaaagtgttactgattcaaataatcaccctttccaccaaaaaaaaccctggtttcctgttaacagtgaaggaattttagggcttgatggggtgttatgttccttggtacagacagctgtggaagacttgagttctatgttgaaactggttttaacttgtaatggtgtggctgatgttacccgaccaacaccagatttcatttcagttaattaaataagtacttaatgagaggaagaaagaactgagcagtgttttatttaggacttggagaacatgggtgagtaaacagtaacaatgtcctaaatgggaaaggtgttctaatttcccaaaagtcttcttgtaattatatttgagacatcttacaatagtatctggctattaaggcagaatgtatttgcagatttaaatattttgcaactgcccaaagatatccattagtgtttggttttctttctaaataagacctgtgacaggtctctgacaaagacaagcaactgtccatggagacttgatgtcttggaggtcaactggagaagattaaggtataatatctcccatacctctaagtctcattcccatttaataaattaaaaccactgcatattatatgttattcgtatgtttatcaatactcctttgaatttgc

SEQ ID NO: 113166 - DNA, 1254 bp, Homo sapiens
agtggggtcacctctagtttctcaaatatggctctgcttgagtgtagccactgatccttaggaagaggatgccatttgccctttgactttattttatttattcatttattttttgagatacagtctcactctgtcacccagggtggagtacagcggcatgatcttggctcactgcacctctgcctcccgggttcaagcaattctcctgtctcaaacttccaagtagctgggattataggcacgtaccaccatgcctggctaatttttgtatttttagtagagatggggtttcaccatgttggccaggctggtctcaaactcctgacctcaagtgatccacccaccttggcctcccaaagtgctgggattacagatgtgagccatcgtgtccagatgccctttgactttaatctgtttatctgatctcacctgttcctctgagcccactgtctccttccccctcactctctccttccccctcactctctccctaataaaacccaattttccttcctgacaacctcagcttcatggtatattctagggaggtatcatgtagctttctttttgtaaatgactcataaatttgtggatcattatttttcagaagcctgataatcttgtcagtatcattccagtttcagggtgtgtttgcccagaaaagcactcggtaacttttttacaacataagtaggttaggttgtatccttgctagaaatatgtataatgagctgtgatccatccccgctttcttagtgccagtaaacactctggttgtctagcaaaagacagctcttatctcttgttgttgttgtcatttcagtttgtcacagggactgtgctcaattggatgttattgtacgccacagtaggtcttgctattcactgtgcaataactgtactaaactttgacatgtacacttttatttttatttacttatttaagacagggttttgctctgtcatctgggctggagtgcagtggtgcaattatagctcactgcagccttgaactcctgggctcaagtgattctcctgcctcagtccacaggtagctgggagtacagacacatacatgatgcccggctaattttttgtgatttttagtagagatgggtctcactatgttgcccaggctagtctccaactcttgtgcttaagtgatcctcctgcctcaatgtcccaaagtattggaattacaggcgtgagctaccatgcccagctgacatatatgcttataaaagtcacttgcag

SEQ ID NO: 113167 - DNA, 1047 bp, Homo sapiens
gagtaaagggggagttcattatgtagaccctctctgggtaggtggaggaaatgaaccttgtctttctcctgcacccaggaagatgagattgtaattgggtattactggtgtggaaaacactttagttttaggagctagacttagattgttgacctcaagttaaaattgtctgtccctgtttttggaaatccagaaaagaatttacttattaaagatcttttagagcagtccttcagcagatgcctgaggccttttacctttccatgggaacttggctaatacatagtgttaggaacagctattcatttggaagaggcctgttgtatgactcagcctctggactgaagttcaggggtctagagattattaatcaggggcctaaaatcaactcttttactttatatctgggtgcaaggagcacaaagctagatgaagttccatgaggtgatgtcagaaatgcacacccataactgtacctccactcctaccttttcagctccattattctaaggcatgctggacagatacttgctagagtgaagatcaagcagaacattaaggatttggtctctgtttacactgaacaaacaaaagggaactcttgtttatctaattctgtttcttctagattacttttaatgcttctgtttaaaaaaaattttttttttcaatatgatagggtcttgttattgcctaggctggtcttgaactcctggccccaagcgatcctcccacttcagcttccctagtagctgggactataggcatgtaccgctgtgcccagctttaatgcctcttaataaggaaaattctacattttggtaatatgtacaaatgaatttttaaaaattcattttataattagcatagacaatatatagacagaagagctaaaatttgccgaaaatctgtgattcaggcatcctgctgagaactttttcattctttaattgattgtcataataaccttgtaggttagatattattcccctttatatatgaggaaactgagttctcagagaagtatttacctgaggaaaccctggt

SEQ ID NO: 113168 - DNA, 1940 bp, Homo sapiens
ggaagaaggttaatttttgctccactttctttactggcaacagcaggatcaggtataaaatgctcttttgtttccagggaagcgataagtaaggaactgatgtggtcatttcctatatgagttatgaccgaagagaatgaatacggaaacaggaatttttttgtttcacctaattagacataaagcaaagcaaattgtctggttctagttgtaaaaataattggctgtataactgcattttaactatttttgctcaatcacttcttccctaaaccccctcccttcaaggtattattgtaattgttgctgaagccatgtcatatcattcaggataataagatcagtcagacccatatccaaagtagtgccatattagaaataatctcgaactcataccatactagagaaattggaccttctccatctctgtgttatttagaatgaacagaactggaatactttttacagtgaaaaagttagcagaagaaatagtagaggtttcactagaaaggagactgcaaaaaagagatgaactttgaccctcctcagagttgagcttatatcaacctcatatatcacctggagtttgcacaataggtaaattgttgctttcaaatgctgtgctatgaaataaagattcttgatatatgtatttacttatgattatatttataaactaattttcttaagattaaaattcaggtgtcatgtggtacaatgtatactggtatgtttgaaggatcttgattctaccagaaaagataaatctgcagagctccagaccccattctggaaatacttactagtgatctgataccaggattttccaggtcattttgtagaagttatctaactctaaatgttaatatgtaatttacatatctaatattggaatcagcccacattgtcctttttttttttttttttttttttttttttgagacagagtcctgctttgtcgcccaggctggagtgcagtggcgtgatctcggctcactgcaacctccttctcctgggttcaagtgattctcctgcctcagcctcctgagtagctgggactacaggcatgcaccaacccgcccggctaattttttttgtatttttaatagatggggtttcaccatgttggccaggctggtcttgaactcctgatctcaaataatccgcccactttggcctcccgaagtgctgggattaaaggcgtgagccacctcacccggcccatgtagtcctttaagcctaggacaacaacacagagtagataatttattgtagtaaaaagagaacatttccttctgcaattaaccctcctacaccttgtaagcattaagtattcatttacctgtgtcatttgtaataggatgtgaaaaattcagggattcagagccttctttttctgcttaacatttgtattgtgttcctactggttcttagagctataactgactacggtccacttgaaatctcatcttgtcatcaatgacttctttcacttaggtaaaattacatcttgtaaattgagaaatcacagtgattgcacttattaatggaataattgaaatcattgtcatgagtaaaagtatttatgacaacaaaggctattttcaagcaagagaggtaaaatgtttggtctaataccttggtgccatgtcaaatgtagcaggaacattttagaaatgttacacaatgtgtagtatattctgattctaatgtaagttcattcattcactaactcactaaatcatttaacaaatatttgttggcaacttctagaagtgctaatgttgtgaagctcaagcctagtagaagacaggtattgatgaaataatcacataaattaaagtaaaattgccactctacagagtcccagcagaaaacagaatccaaatgaagagagatgagtgaaaagacaacttcgaaaaatagaggcatggttattt

SEQ ID NO: 113169 - DNA, 1019 bp, Homo sapiens
acagataaaatccccttttttacagagtccatgtggaatgggagcattgtcagatgatgtagcagacctcatgacaacttgcatgtatcatctttgttgcccgagcaccattatgtacaaaaggaaaggaaactaacatctatcagtaattcattttgggtcaggcattgtgctaccttgtcatattatttagatatagactatatggtttagtggttaaaagccagactagacccagactgcccagacacaaatcacagcttggcctcataatagctttgctaccttgaacaagtcacccagcctctctgcttctgtttccgtgtatgtaaaatgcaaataatagtaataataggaccaatatttttaataggattctagtgagatgtaaatgggttatgtatatgaagcatttacacacatatataaaaaatgctataaaagcatttgctaataaagcaaagcaataggtagcactagaattcacacttattttaatccaaagtctatgttctttataatgtgattctctataactgtgattctgcatgctaactaatagttaatatgatgtggtagagatcactttaaattgatgtcatcctttatttctaggaacattagaatgtaagataaagtgtttatttttcattgtgtttatatttatcctcaatttggacattggccttagaatcttaaccttggatatttttcaagtgaaagaatagagatttaaagattatactctaagattatactaaatatagcagtctatatttgacatagtgctttcctctacctgatttcatttgattcttagactagaacattgtaggtggaaaagaacattgtagatggaaagactagaacattgtagactagaatattgtagatggaataatatatatatattattttttttgagatggaatttcgctcttttcacccacactggagtgcaatggcacgatgtcagctcactgcaatttccgcctcccgggttcaagcaattctcctgc

SEQ ID NO: 113170 - DNA, 3130 bp, Homo sapiens
cgtttcataaggcttagaatgtacttaactatcaaaaggatagttcttgtgttcattctgtggtattttattccttacaaacaattgaaaaagaaactaccaatgtatttagcctcctttgtgataatgccacttcttcagggaatcatatacccggagtatcactctcgcatacctttgttattttaagcatgggtaggtgcttgtatacatgggtggagttggggctttggtgtagtgtcacttaaattttaacctgaaaagcaggttattctttgtaatacaagtaaatttgcagttttcagtcagcagaaaaattaatgtgatatttttatatgttacaggaatgtgacaagtgtcagaggtaaattttatttctttttctatctacctttaataaaattgtccctctgactttttatctgacattgaccataatttaaaattttattttacatgacaaggcggcagaagaatagagcattttgctacttttgtaattctgtacagaagttaccaatttgtgcacagtgtggtaagtttgtaataattaaggacatatgctttttatcaactggtagttcaacaatttgaacttgggtgggtttgttgctattggttacagtgcttacaattgttgataatattatgccttaccattaacaaaataacaaaacatgttattttgcctaccaaaaaactatcaagccttggttttgtctctttgatgtaatgctggaaaataattaaggtacaatttagatacaggttaccaataagtgtttttaaacagtgaaagatcagatttcagacataacatttggtgatcctgaacttttagttatactaccttagtcttgtcagtatctgtttgtttacttatctacattttgattcctgctgatattacctgcagtgtgttagaccattgggaataattttattccacatttacctggtacttattttgtgatcagtagtttttgtgtttgatgcttaccatatgattcatgagtttcctcacatgtattcccaggtgatttaaatagagttcttaagtcatgtgcccggttcttaagtataggtggagacttgtaccccaaaatgattatacaaaataaaactaaatgttagcaagatgggtgtttcccaaatagtcttccacagacttcctgaaatattaatggatatttcttgaaaaatatatatcgatatacatttgagaaatactgcatgcatcctcctttcattctcatctgggagatttctattatatatttatatgttagaagttctgaagacttgcaacaaagaaacccaattaactttattactctagatttacatccccccccaacttttgatgaacaagtattgcttttatttatgagataataataataatttcaggtagaacaatttggggtatgctcatttaagtgtgtttatatgtaataatattccagaaagttagtagtgtttagggctatatccctgaatatttctaatgtagttctagctttcaaagaagatcttttcaattccacaattaatgaaaaagagaaaactggcctatatggaacactcatatggtagttttcatagccttgttttgcaaaaagtaatgaatgtagagtgaggaaacagagtttgtggaagattaataggtaagttcttgctaggacttacccctattttcagtgtctctgggcttaaattttgtagtgttgttagatggatacatttctcatttactgattcttagtgttggacatggaacagttgggtagctgctgcctctcatttccagtttctcttcccatttcctactaactttgttccttaggaaatcaagataacggaaaattgtttcttttgtgttccattttgtggagtctcagatggatgattaatgtcatcattaactctcacataatatctgataagcaaatttcctgatagtgttttgagttggtaatttaatttgcttctagatcagaggtttagtggctgtgtggtgatttgtagctgtatcaccgtattgtttattgtgcttatttgggcactatttcaaaattttgttgggaaaatgtttaactgggggcttcgttgtaaatttttatgtttggataaaattacattaactcgataagttacataatcattatttggtttggtttgaggtattattctgtggaaagaaataacttcaaaccacagtttttattgtgaattataaaatgtaaaatttgttataaaaagcattcctttaaaaattgttttgaataatctgaagattgataagtttttaaactgttaaaatgatcattagattacaaagcataacctgcaatttctgatttagtacaaattagcatatatattgtatagttcattttacagatttattagtaaatgtataatctgaaaagtctgattcgagtaatgaagtctcagttatatccattttctctttctagttatgtaagcagtaaatactgattcaatttcattagtttttaaattatttcctcaggaacttgggctggataaaaggaggaattcgtgagtactggtatgtattcctttgcaagactaacagtgcaaatgtttttcttcattagggaaaacaaagtgcatgatgaagtcttcagactgtgtcataaagcatgctggtgtatacagtactggccttgcaatggtggtaagcttcttattatctcttagactagtacgttttcaaggataagaaaatgtcattctgatcagtggttatttttttctaaatatcattgctttgtcccttgtttcaatcaatctgtagttatctggattatgagtggcatgctttttgtatgattttcccttagtacccacttgtttctagctgcttctttctttcttattagggaacatacaaggcatggaaacttttcatgctgatctaaacagaatttcatttctcagtggtacctttttttttttaaattttattattattattatactttaagttttagggtacatgtgcacaacatgcaggtttgttacatatgtatacatgtgccatgttggtgtggtgcacccattaactcgtcatttagcattaggtatatctcctaatgctatc

SEQ ID NO: 113171 - DNA, 1306 bp, Homo sapiens
tactattataggaaaaagaccgaaattccccaggtattctcttcctttaatttggttcttgttctggtatgaaatcctaattattatacttatttataaatttaaagtagataagtcatctctgtgatatacatacaacatacatactacacacacatagacacacaatgtgtatgcatgtgtatataattcttgcaatatttatatataaaattctcagattaaaagagcatctcgaagtatatagcatttttgagcctttcgtcgccttttgcagaatgtataataataaatttaattattttatttgcagcatgggagctttgtgtgttttatagcatttgaacccaaaagacaggcagctgtctataaggctatattccattgcaagcttttagtgatttgataaaagacaaaagaaaattctaagaaccaaataacgggattttaaaattaatctatttcccacaggtgtttcatgcaatcggcttggtcagcactcatgtctccgttgtaaggtataccaatgcgtttttttctttttagattttgtttttaatctctatacccctccaccagtccttggcttatatgcagctataattaatttataagggaccttaaaattatgtagtctaattcttttatttttgagactgtggaattgaagttgagaaagcttacatgactttccaatggtcatccagtcaccttttagtagagctgtggctagtgcacatttctctggaatcctggctctgtgtttttagtggagaacattctgaccaagatgatgagagtctattttaattaatgtcaaaatatacctgcttagaagagtttgggtaaagatttccaaatttttctgtgtccttaggcctagtctctagcattcgttcgtcaaagattactaaacagatgcagccaatgcccttcctctcagaagcgtttctctagttcttatattcctaaccctatgtcttatttatcttccaactctgttctagttttaccaaatggtgttcaggcattatctgtgttttctttgtctggaatacttttccatcttggcttaccctattgccctcccattcttcatatggctattaagacttcgtgtctctaagatgcctttcccaaatcccatgtctgctttagtgcccttccctctgcacttcccgttcagtgcttagtgtcttgtaattgccttttcactgtctccatccctagttagaccatacactgtgtgagagtaaataggctgttcaccattatttcatttcatcagggaccttatgagtactga

SEQ ID NO: 113172 - DNA, 1472 bp, Homo sapiens
gatgattttgctgatcttctgcactgaactttgtgtcactattaaggcagaagaaatgacaggctttgtttttaagggcatctgcattgtaaaatagctgtcttaagaaaaatgtactgatacgaaatcagctgtattctgtgatttatgtgatttgaaaataaactgtcagtggccaaacggaaggtatttttgttttaaacatgccttaatacctttggagtggtctgttggtctaatttgttttctagatttaatgaaattacactgtaatttttattttttatggtgttgtatatagactcaggtgaaaaaattaggaaaatgtgacctattttttcatttgggattgaagcagccaatgaaatccatgaaattttatagaggaagatgagaatgtagagaactggaactaacaaaatgccttgtacttgtctgtcttctatagcacgctccctgaaatttggcaggcagactggaggtgaagagggagatggagcttctgggtatgatgcttattggaagaacctttcatctgataagtatggtgataccagctaccacgatgaggaggaggatgagtatgaagcagaggatgatgaagaggaagaagatgaaggcagaaaggattcagatactgagtcatcagatttgtttactaatttgaatttaggaaggacctatgctagtggctatgctcactatgaggaacaagagaactaggggagctgctctggtggccgtgtgtgagaggagcaggagtgagtgtgtgtgcttgatgaattgtgtgtggttgttcaaaagtaccttagccacttagccttgtgcagaagactagttacacttaatgggccaagcaatagggtgtagcgtttttatagaactgataatcaggcttatggcataagaaaaatgagtttcaaatttaagatgtttattgatcgaagcaattgaagtatcatggattggattgttactgatttcagtaaagtatgttttgccaattagatacatatatacaagataaaggaataggatggtaatatatttgtttgaaattaaattactgtttttattaaaaaatactgcttcattgggctgattttgtaaaatgtaatgagtaaaatgaattactgtatttttccttttatgtccacagaatgagagtcatatgttgttatattctaaattttcattaaatattcatgtcaccttgagttgtcatgataagtatgttttagtatttgacttattcttctctttcttcacaatgtatgtcctcagtggtacctattattgatgccttaaatgtattgataaggtgactagttagccatttttcagagatacagtatcagaaatagtattattacagaagctttacccaggacattttatttctctttgaataaatctattatttcacttaaatacttttgacattatatttaattttttgttctgtattttca

SEQ ID NO: 113173 - DNA, 1132 bp, Homo sapiens
gtatacacttaaagataagcagcccagaccccatcattgataggtggaggacagtcctgtcacaagtcccagttgttacaacttaacactggcatttaatagggattgggtagttgtacaaggagagacaatatctgattgcctcacattttagatgtatggagaaaattgtagctatgaggataacagggttgaatggccattgttaagccatttttgttctatagaagcatacttaacagccaaggacaataacaggcaatggaaagccaggtgtcaaagttagagggcctctggtggcatgtgaaaaagcttttcaccttttgcagtaggacggcttgaaaaaactgaggagcaagcccgagacttaatagtttcaaaggataaaatttaaagacagttgccagccaaggcaagtctattatgccagcatcggcaaactgcttgggaaaacctgtgaccctgacaaattagatggagacatctgaatcgatggtgctggagatttttactccccagactcctgcatttctgagtttgcagtcatagcccacccctccatgttaagggcaagcactccccacttcattctcaggctggatgacaatgcagaggcttctttcctcgggaaacatgctctcttcaagacttgccctatctctaggccattatagttagtatctccaggcctaaaattagggttaagtgacgataaagttaagcaaaactcagttgaggtgctggaactgaagtgggaggaaacaagactatgccccaaaagaactgcaagaattacgaagagttggaggaatatgcttgagattggaatcagtgcttaagagggtcaaaacataaaattagggaggagtttgatggcagccctgacactggatctttggattgctaagagttaaattagagggttttaataacctggctaggatcctgtgagatggtgcgaactcattaccaggatggcttcttgaaatatggaaaaagtaatggtcctttctgagcaaagtcgaaacactgggattactgtgacatggtggaagaatggatttaaatggttaagggaattgggtatgctggaatggattggaagatgagatgattatgttccatgggaagg

SEQ ID NO: 113174 - DNA, 1043 bp, Homo sapiens
tagtaaatttttaccttacttatcgtgaacctcattttaatggccatatagcagtctatcatattaatataatacagtttctaagtctttttttctattgttgcaccttagtcattttatacttccattgttataaactcttttcaatgagtatcctcaagataaatcattttatttatgtccaattaatcctgtaagatagttgcctctcaatcaaaggatatggatatttttaaggacacattattgttgagtgggtcttttatcccctctcacatttccacttcacccacaggaaagactgaacacaccccaagcctctacatttagggaagtgttgggggagatacatctgacttttctacatcccattctctatcctattctgggagaaagagtggctaattgaagtggccacagagcactttagcagggcttctgttcattagtagttaaggtctttaatttaaaagttggatctaagtgcatcctggcctcctgccttgtcttatacatctggtgttctgtatttcagtctgacctgacctgactcagaaggatagccttctatctagctttctccagactagccatactcctggccttctttgttctggttgtgactgagtacatggataagttgaaagtacaaatctgtctcttggctccaggttcttgtggttgggtggataagccaactcacattcaaagattagagaataggatctaagaagtcttacccaagattcctggcctattctcagcctggttccagtgtgtcagtgtttatgtaggaggatggaggcaggaaggatattaagcactggccaatattaaatagaccagcactttacctttactttttcatcatttcttttgtgcatcctctcctatcagttcctgaaacctagagtagagtacttccttcaaaaagggctgtgaacatgaaaatgactcagaggatattatcaagtacatttgtcatgtcttgacaggaagtgttttaatgtccatgccgtagtggtggtcaaatctatcaaatg

SEQ ID NO: 113175 - DNA, 1184 bp, Homo sapiens
atttctactttaagagattttttcaaaatcttccttagagggatgtaatgatcaataagtttaaagttattttggagggtctgaagtggaagttgaaatgatactttatgtttctttatatttcctttctgattagtgatttacaagttaatattttagctcaacaataactcgataaattatgaaaaattaaagtaacttatggactaaccatatcaatatatttcagtattctgtctatagtatgagtgatcattgctgttcactcctaatctttcattcctgtaatttaacattccttgtaaattaagagtctacccatgagggtgtagcataataatccttcctagttaacacctttgctgcaatgactttttttttttgtaaagtgttgttctttttaaatacttgaacctacttgccatgttcccttttctttttaattgaaaaaacagatgcatcatttgaaccttctgtagcattggcaagccttgtgcagcatattcctcttcagatgattacagttctcatcaggagccttactacggatccaaatgtaaaagatgcaagtatgacccaagccctttgcaggtacttcttcatgacactattaatggtaattgtagatttggggaagaggaagtattttgtattttgtgagtaatgaaaaacttacgaatgtttaaaactaaaatcatggaatgacatatgtaaagattctccaaatagattggaattgtttatagcgttgacaggcatcccaataattcacaaatctattttcaattcaactttttttaattaccaaaatatacacacatatacacatattatacactcagatgttgattggattatcagtatacagtatttcactgcccattattgtttcctgcaacctatttctttcttctgcgtttttttttctttcttccttagtaagtatatactttactttctctttcaaccaggctcaatgtgtaatacactctttgcctttgcctgtttgaattttttttctttctcagttttaaatagatgatttggcaagatacagaattctaatttgatagccattttctcttagcattttaaaaataatactgtattacctttgggcatctgttgttgctcgtgggaagtcagctgtcaatctgactgtcattcctttgtgagtagtcagc

SEQ ID NO: 113176 - DNA, 1086 bp, Homo sapiens
gcatttattgaacgctatataaaacagcagatttttttgctacacagcattccctattcatcataccctgctttaaatttcttaataacactaaccaccatgtgttactttttattgtttctacctgccctctagatggtaaaccctgtaagagagagatggttttttgtttttttaatccactgttgtagcactagttcctagaactaggacaagtaatagtatgtgcttaacaaatatttgttgagtgaactgaatgaatagtggactagggagctattgccttgtaaacatagtttgacaaatttttatttaattggggagttttaacagttggttaggccagttacattacccttgatctctgtcacgttatttcctaacttcatccttctcccaaagtttaataatataagttatgttagaactttccagaagggggacattcatataaataaattctagctctaggaaaataaccactgttggattaatgattttcctgcaaattcttaagaaggtgtcttgtcttattttgaaggtttttaatcgactttggtttcctcttgtgagacctggtgctcttgcagttctttctcacatgctgcttagctttcagcattctccagaggcgttccatttggtaagttatgacataaacgttctactttgaaaaagcctcaatttgaaaatttagtttaatattgagtcacatttttatgtagtgaaaatattgcaagttagtcccaaatctgttttcatatagctttatgatttcctagaaaattgagattgtgagatttccctcctaggaatatattttcgtgtctcattcaaactactccacttgcaacaactaccagcagttgagagttactgttcacatgggagatgtcactgatggatgtctgttgcacaaatgaacagtatagaaggattaaaatgattgaaaaccactgctttagaattttgaaagcatgaaaacacaccagtctttgcaggcttttcattcactctcagcctacatcctacaaatcctgttgaccccacctttaaaatacatctagaatcctaccacgttaagcc

SEQ ID NO: 113177 - DNA, 1080 bp, Homo sapiens
tctctgtgcttatctaaaagtaatcccattacctgagctgcaattttagttactcatgtaaagattttcttgaagtagactttaatgtgcaatgtacttttaattctttcaagtaaaaaattttagattcacactagatggagctctttagctaattccaggattatttttcaaaagtttattcccattgaatgacctggtaaatataataaccctaacaatttcaacctacagcatttttcagaatggtggcaatgactaagattcctattttataccttagtttatgttttagatggtgtgtaaggatgaggagaggggtcatatatgagattacagtcatatgcgacttcgaaaactagatttaccttgatattttagaaatgtttaacttaataacaagaaaaactctgtgactgcacatacagaaaagtatctgctgatcatatatcgtttgtgttctgtttgtaggctagagaatgtgttaccaatttgtataaattcagcattgtttatccttttttcttttcagattgttcctcatgtggttaatttggttcattctttcaaaaatgatggtctgccttcaagtacagccttcttagtacaattaacagaattgatacactgtatgatgtatcattattctggatttccagatctctatgaacctattctggaggcaataaaggtatgatgatagttgtaccaatatttgtggagttgtgttatattaataaggtgaaacattcttataaccagctactcaatttactattttatggtaatatgctttttatttgaaaaatgcagttagaatcaggtttcatttagggagtaacagctttcttgctggagtcaccattctaaattaataaccatatttctttatttctgcagtgtcatcaattataaggcatatctttaaatttataatagctttttgggaaatttgtttaaaaagaaatgctacgttaagttaatgcatacatcagatttgcaccccaatattagaagtgttaaagtatatgtagagtacatcttagaatacaggaaatggagtttaataaaatatttgac

SEQ ID NO: 113178 - DNA, 2336 bp, Homo sapiens
caggctgaagtgcaatggcatgatcacggctcactgcagcctctacatcttgagctcaagtgaccctcctgcctcagcctcccaagtagctgggactccaggtgcacaccaccacgccaggctaactttttattttttgtagagtcggggcctcactatgttgctcaggctggtcttgaattcctaggctcaagtgatcctcatcctcccaaagtgctgggattacaggcatgagccactgtgcctagcctaaaaagcacttctgtttgtgttgaagactggatcacaataaacatactttcctctcagtaaacttactgcataatcagtgtatagcaaaagaataggagaactgaactcagccaaactcaatcagaaattattagaaatcaattctattgatggtttttttgagatctgaatttcaacataaaggtcttattatctttacttctgtatctgaggtggattaaaaacagttctttttactgtatcattaactaaatcaaacttattttggttgagctcagaacacaaagactgttaagcaattaatgtatattgctggggtgacactttgacacttcagaagtagattatgttcaggagcattgtgaagtggatttgatggtaatattaatctctttctacattgtccctggatccatagatgatagttgctgcacttgttaattgattgccattgtttagttcatcagagtttttcatgttgaaaattctgataactcatataggctcagaagaaacaatgggctcgctctaagcccaaagaaagcactttttcttagctgtcaacaacaacaaaaatgagaagattgaaactccttcagaaaatgtttgtttgttaaggtctaagtgccagatgctaatagcaatccagataagccctaatgattttaccaacttcccttactctccagtgctctattcatgcttgaaataatttacacttgaaatgttatctcatacttcacaaagttgataagaaaaatccatatgttgtaataattttctatatgggtaacatgagattaagttttatttttcttaaaggtcattgtgcatagatgctttcatttctcatttcttaattactttgggattttatttctaagggttaatactgagtaaatattagtatttaatgaaaaggagacatttttattacaaaatttgaaaacaaattgtttacttatgtttaactgtgtgctaaaatttaagtcttcattctactgcctttgaatagcactgcagtgtattctctgaccccaaagttttattttataaacattttgctggcatatagagaacataaagagttcaaatgtgacttgaatttccagcttttgagtattccttaacttgataaaatctgttattagacaatatttatttttgccatacagtgaaatttgatattttcatgactagccaagtactgccagttacttcaaaactaagtgggggaaaagaaagttcaaatgtcggtgtaagaatcttcttaatggtgttaattaatttaacaacaaaaataatttttactttacttttaaactgtttttcttctttatgacctataggattttcctaagcccagtgaagagaagattaagttaattctcaatcaaagtgcctggacttctcaatccaattctttggcgtcttgcttgtctagactttctggaaaatctgaaactgggaaaactggtcttattaacctaggaaatacatgttatatgaacagtgttatacaagccttgtttatggccacagagtaagtttaaacttgaatcttttcattttaactgtagaagttgatgcatgctgatgaaatataagatgatagaattgtctacacattattccttataaatggcataaatgttaactttgattgccttattcagaaatgaaactgcttttagtgctcagaaactatgaaaatgttaacattaggctgggtgtggtggctcacgcctgtaatcccagcactttgggaggccaagacgggtggatagcttgaggtcaggagtttgagagcagcctggccgtcatggcaaaatcccatcactactaaaaataccaaaattagccaggcgtggtggtgggcacctgtaatcccagctactcgggaggctgaggcaggagaatcacttgaacccaggaggcagaggttgcagtgagccaagatcgtgctgttgcactccagcctgggttacagagtgagagtcagtctcaaaaaaagaaaagttaacattaattctgcttattattcattgcatttaaatgccactttaaagaaattactattccaa

SEQ ID NO: 113179 - DNA, 1077 bp, Homo sapiens
ctaacttgcttttagcttttaagaaatgcttttaaatggccaggcacagtggcttatgcctgtaattccagcactttgggaggccgaggtgggtggatcatttgaggtttcggtgagctgagattgtgccactgccctccagcctgggcaacaaaaggaaactctgtctcaaaaaaaaaaaaagcttttaataaatgcatgtgtttgtacgcacatatatataaatcattatattctctttcagtttcaggagacaagtattatctttaaatctaaatgggtgcaattcattaatgaaaaaattacagcatctttttgcctttctggcccatacacaggtgagtgtgtatgtgtatatagtacgtttatgttaactgcgtggtaatattcattaaactttaccttatacctaacctttttaactgatgaaataatataatagatatctcacccagtataacaaatccacttagaaatgctaaagagatcctgcctaaaatatctagattttttttattttcaggatatgccctaagtttttatatttttctcttgcttcccattattgtagctgaatattacgctgacccattgatctagaaatttttacaaagaaaatatgatttcctatccaataaataagttccttcatgaagaattatttttaagtgcatctttgtttcctgatattaaattagtagatttgtacaataatgagcaaataaaataatattgtggtgcctgggcttttttctcttttcttatgtatacctattcattataactaaagatctctgcagttctgtttatctgttaagttctagagcttaaaatttcgtggtgatcttttatgtccacacattaatccggggtcattaatttatgttaatggcaccaaggtggtcatatatagtaaatattcactcaacagacatttattaagagacgctatatgcagtcagtgataagcattaaaagaagagtcttggccaggcgcagtggctcacgcctgtaatcctaacacttggaggccaaggcaggcagattacttgaggtcaggagtttgagaccagcctg

SEQ ID NO: 113180 - DNA, 1048 bp, Homo sapiens
aacgatccattgtatttagcattttaatttcataaaagttatttttaattttaggaacaagagttgaatgctcgagcccgggccctccaagctgcatctgcttcatgttcatttcggcccaatggatttgatgacaacgacccaccaggaagctgtggaccaactggtggagggggtggaggaggatttaatacagttggcagactcgtattttgatcctgagagagtccaaaatgcactggtcacgaaacgtctaatactatgactgttaaaatgtcagactataacaaatatctatcttttatttttcattagacccttatacttcaagagaacacactcagtgcttgtttttattttcttgacacatttattaacaaaatgcatcatggaaaaaaaaatctacctcttaaaattccatttgcttttatggttagacatgcttgaccaaaaatgttcagaagaaaatatgtacctggtccctaattaagctgcgttaaatttggtagaagcatttaaatggtctatcttcagttttactgaacaaaaaatgtaatttatttagcattctttataaaagaattgatgctagaggtaaaaaaaaatacttgtttttaaaaaatcctttacgtcttgtgtaattaccccattattaaattcaagtccttgaaaatcaactagagattataaagtctctaaagaaggcaataacaaaatttatcaagatatagtacttttcagtttttgtttagtgtcttcagcatcactgtgtctgtatttcaagtacaaatgtttttaaaaaggattctttatacatatgtgctgaattgattttaagaaagttgcatgatcctgtaggagcaacatttttacctaaaaaatgctaactttatagtatttctaattgttcaaggattttaaaattctatttcagggagtatatcttctgtggttttgaaggaggtgagttctgtatgtgccttgcagtactgtaattcaaaaataggaatctttggctgcaaaattttaatgaaatgttaggaagtaa

SEQ ID NO: 113181 - DNA, 1046 bp, Homo sapiens
aagcaattatacttgtgcagctttatctatgaatatcaggtctctcaaggattttatgtatcaagataatatgtattgacttttttaaatgataaaatgaattctagttagagtctttccttggtatctgcagtggattggttccagaacaccatcccccaatattaaaatccacagatactcaagtcccttatttatataaaatagcacagtatttgcatataacctgtgcacatcctcccatatactttaatctccagatgattagatatgattgcatagcacttacgttgtgctatgtagttgttatattgttttttcatttgtactattttttatgatatttattggttttttaaattttctatccaaagttgtttgaatctaaggatacagagcctgaggatatggaaagctgactaaatatagtaacactgaagagtattcaaatgataactcataccagtaccaaaaacttgaagacttccttttaacattaaaaatacagtaactttttacgtgatttgttgaattcaacatatttggaaccagaataatcagaaacttcattcaaaacctatgcatctgaacttttttagtaaggtaatactcaggactgttctgattctaacagatccctgttaattacagatttatttgtcatattaggtcttttctttctcccatattcctaacccgtgtactagctccaactgttgtgaggtttgactctgaagactgagtagagtactattgttgtttttctttccttagtcagagtaatcagtttaaatgaagttgctcattgctgctaagaagcattaggcttcactgctagcaaaaatgaaaaactacaaatctgagtctttctttcaaagatgtttattgacataattaaagtaaaaaattgtttagagatatgcaaagaaggaaatatatatgatgtcacacaagctccagtaagctatccactaagcaggtgcctgtgcaactctgatttatggcattaacatatcaaattgaaggaaggattctagctcattttc

SEQ ID NO: 113182 - DNA, 1034 bp, Homo sapiens
gacatctggatcaaatatttttctagtaaaatgtgtttgcaaaagcaaaatttatgcccccttaaatataatataaatttaatgcctgtacgaagggaacccgtttgtcgttgaggaatatctacacccagtattagagctcaggttaatcctgttagtcactgtttgcttgtatagaacagagtgaagtacacagagtgaagtatttaacttcactgacaactcaccagtgaatttctgatttactttctgccagaatttattatagacaagtaattttattgaaagactcgatgccacaaatcataagaaagctctccagagatgtgtaatgcctccaaatcctgtccatctatcagttttcctgaatatcctagtaaaaatgctaactttattccaaaaatatgaacgaggcagtgtttttttttccagctgttctaaagagaaaggtaggggtgtgtgtgtgtgtgtgtatgtgacagagaaggaagggagaaaggggtagggagataaatatatttgttttgagaaggcccaatttaggaaaaacagattcttggaggaattaaagaataacatatttgctgaacgtgaaagtgataatataggtttaattcattctttcacatggttagttcatggctcactcaaaagacgccaggcactgtattagacaccaaccataaggtcacaaaatacagtaggaaaaaggaaaaaagccctgcctcttgggcttagaattcaattgaactattaaccaggaaagaaatcagccaaaaagattatgtcttaacaagaaaaacaaaaaggaaagtataatttgatcattacaactgttttctgaggtaggtgtcatctctattttacagaaaacagtcctgcatttgaacccagatctgcctgattgattggactgtaaaaggttaacgactctcacctagttcatttcaaatgtggagcttagactaggttatctctaaaggtccttcaggctcacacctgtaatcccagcactttgggaggccgaggccagt

SEQ ID NO: 113183 - DNA, 1064 bp, Homo sapiens
gtgctaaagaaatgtaagacctagtctttgcctttaagtagctctttgagtctttgggaccacgagacaagtatatgtgaaaaagccaacagtgcaaagtggtatatgactgtgtgtctaagttgagtggtatgggtattttttggctgttctgaggaacaagttcaatgtagactgaaactatgggaacatttgagagagacagtgggctgcctacattgtgttttccacaggaggatgaatgtgcctaatagcttgggagaaactaggattttctttgcctggtgtagcactggtgttttctttacccacgaataaagtagatggagatagtcctggaagacagtagacagggcggctgtcagaatagaggaaaccagcatggagtgtaatgagttaaataaggcttatttaactgtcaggttaaataaggcttgtattttacctgtcaggttggtggcccagaagattttgacattcccagattattgatcttttggctttgctgtccagtttagatggtttttgctaaagtagctttgaccatcaaagatatagacatgtatacgtgcatttcctatgcttgttttttttatgtagaatgtttatttttctggataaaggaaacattgttggccacccagtaggcaaaatgtttgtggataatgatttgtaatgaatggatttgctatgaaaagatatcttggatgcttgatactataattattaaatgagacttcagggagtttgagcatcatgattctgtttggaaatatttggcccatgggactttgacagttgtctcactgtttacagcatttatagggtagtccgaacactgattaagatgatccataagggcttttaagtgacaaaaaaattgttttagttttttttaattaatttttttttgagatggagtcttgctctgtcacccagactggagtgcagtggcactatctcggctcactgcaacctctgcctcccagatacaagcagttcttctgcctcagcctccccagtagctgggattataggcatccccctccacacccagctaattt

SEQ ID NO: 113184 - DNA, 1847 bp, Homo sapiens
ctcccaaagtgctgggattacaggtgtgagccaccgtgcccagccagaggtgatagattcaaaacatgtgttaggtactcagcagtcctaattttcttacagagactgacagccagaaggagcattgtagtagatgggctactactttacttttgaagaattttgtattaaaatgtaatttgatgcacccactgatgcttttagtggggatgttttgctatagtggaaggaaactcagactgagtgtcaggacccggattctacttggttttgccattacccacccacaggagcatttgaccattctgatcctcagtttccttacctgtaaaatgggggagggaggagctgtagatcttcagcagaagccctgttgcagtttagcgttcctcttctcagacattttcttgggtggaagggacaaatggggagctcttcaataagctgcaacataaatttttgggggacataaatcttccttgtggggaaatctttactatttatcttaaatagtttagtgactgcttaagcagtattctttggggactcttggtttttaactgaaggcagacctgcatgcagggcctttggctgctgtgctcctgggctgggtgctgtgtcttgagcccctgtgcaatgcctggctcagagtaggagctcaacagatgcctgttgactgaataataaacaggtatcgcaggagcttttgttatgtgccatgtgtggaatgcaaggaaggaaaggcccactctctgcccttaaggagtttctaatctgtttgtgaagacaagctgtcagtcattttataggagctatgatatatgattagttgccaaatgaaagtttagagtgagaacaggggatgcaggggtacgagatgccagggaagactccgcaaatgaattttacactttgcttttagaagagctggtgtactgctggcagcaacagcaaaatcttaagggagggctggttttaaaggaagaacaaagatttgtgttgagtttagatgtcctcatgaaaaaaactgcttcccagcaccccagtttcatgtgaggagtttggctgtcagctgtatcttctagtttgagaagtttttgtttctgctaagatctaatgttcctcatgggttcctgagcacaagtgaattttctgcatcaaactagaaatgaacaaaacaacttgtttggtcacctgaacttattaaaattccaagggacatgagttgtttaagatttctttatgtctgttttaagctaagtaattcattctggcaagcagttagtttacaacagagagggagcatgttctggtgggagggagaataaaagagcctttgattcatttgcttctgagttccagcagcaggaccagggctgccttgggctagcgtcttatttcggactttggaagccatcttagcccagctgtgtgagtgccagctcgtgttgggggggagagaataacaccaacggatcacatgaaaccccctctccctgtggatggaggggtttctctcatttcacattcctcgcatcaacatggcgcctaatttccaccaagttagagctccatctgaatttgccatttgaacttggattgaagtcacgatctttctgtgactccttttatctcagtctgccaactaatacagaaaacttatcaagtcacagttctctttattctcccctcttggggtataacacacataaaattagcattctttcttttttatattacccctggcaaaaagtggcccattgtactgtggatttccatatttattaaataactaggctcttccgttgccagtgggatggctataggagcctcaataaattgtagat

SEQ ID NO: 113185 - DNA, 1052 bp, Homo sapiens
ccaaagttatgtaggattatttactttacatgttcttgacagtttcaggtttaaatgtttgaagtgttgagaaaaggtaaaaggaaatattgaactcctaataatgtaaaatatttgggaaggtactttgttcctagtgatgctgttacataaaaccaaagccttctgagtaatctttgctgggtatgtaggtcatttacctccaaagaaaaaggcacacaattaaactggtgctgttgaacggtattatttttctttctattcctttaagcagtcaaatagttgagagtcaaatttataaatgttgactgtttcaaatgggaaaagcaagcgtaatatatttttctagttgattttcatagtgacccacagtatacagagaaaaaggtatatacacaggaatctgtgaaaattatggcttcatttatcattcttcggtgtttgtaataggatattaatttccagaggacagagatggcatttgttctcttgtctcaaatatacagtatggtgccttgcatatactcttgaacagcacaatcaaataattgtagaattttgagcctaaaattgtaaattctcttgtccaatgtttcttaaccttttctaacccactcctctctcatgtattgtttgagtgtcctttggcttttaatccagttttactttctatgatttgcattacaaaaacaatagctatattgaaacttttttctaattacacatatctccttctccaccagtcaagaatccaacccactccttttacagggaatgaaaataagcctaagggaggtgaattgattagtccaaagtcatattacttaaccagttgttctgttggggtccatctctcccctcccagataaaatcctttccgtcagagtgaatgcccacatgaacagggcactgtgaagaatgcaaaagaagaggaccaagtgaacactgttttcacctttgagagctgtgtgctgctaggggacataggttgcacttagttctacaaattacatcatgatcagtgatgtgtgagacattctggtagaagaatc

SEQ ID NO: 113186 - DNA, 1571 bp, Homo sapiens
ttcatcccaattgctgcctttttaatttttattttcaattgtgtttaaaacaaaacaacaacaacaacaacacataacataaacttgaccatcttaatcatttttaagtgcacggcacagtaggttaagtattcagattgttgtgccagcccaatctctcctgcttcaccgttcaatctcagtagcattggaaacaacagaagggtctttatgcaaatacctttcaggaaggcgtgcgcctcacctgtgtttgctccttcacagtagtaggaagttaattatgtgggatttgctcacctgatccacacagctgatcctactgtagtgcacatttggaaatcccacacccctttcttcccctgaggaaaaaattctttcctcatcctagattcagtgctctgtttaatcttgagcatatgagaatgagtcaccatgggtaagagtgtaatctcatttatacctttcttccaaccctcctttaattttttaagtttatgatactggatcctgctttcctacataagggctggtgatttggagactaattttgggagtgcgaggtgttgagattttttttgggaaccagtgctttctgttctgctgaacatgaagctgcatggcctaagttctgaaattcaggctatgtatggaatgtctgtgtggatgaagaaacaagccaatgcctttttttgggtcggggccggggggagactgggagaaagatgaatgaaaatgttaagatagtctgattttgtgggggaaatattcaaattttgagaatttgtgcaaatcaaagacaagcagttagttgctttgtgattttattttacccacaaaagaaatacttgatattgtgctgaagatgttgttgaataggtatattaactcagataaaataactgagttctacttttgattccagttatccctatctatgcaatgtgtaaatgctatttccatttcttcatttgtggaatgaaaaacatttcactggaaaattgtttttaaaaaagtacttgtaaagtacattggaatctttaggatactttgaacatggtgcttaaagaatgtaaatggttaatgcttgctttcatacccatagaggaatatgggagtgggagtcacttgaatatcaaaatgaaactctgtatccatttttaaatacagtatgcatttgagcaaagcccttctccctaactgcttattttaaattggcagttgctcagccaacagtcagtaatctcagttagcaagtgtttggcacgcctgttttaacctgcacaggttcagttcacacaaagaaagggagggttgggttatgtgatgcaaacaccacgttagcctcattaacatattttgaataactgtatttgaatatttgccagctaagctaggccatctgaaggcctgccaaacaaaatgggggtttctgcgaggagtgcagagatttgagcttgtaaactttttactttttcttcttgaggggaaagattttagatgatgctatttagaatactttccataccctctcaaaagaacaaccttttttgtgtgtgttttaattctgcaga

SEQ ID NO: 113187 - DNA, 1001 bp, Homo sapiens
atgtcaatttgttgtatttgacacaataggaatactcatgcagtgttaccagtttcgtgatatgcgttcaacatctctgaaggtggtgaatataaaatctgtttttcaaacaagtacacacatgaaactaaaacaatttattcaagtcctaaaacaacgttagtgaaacttcagttctgccactgtgcccacatttaagctgacagcatgtgtgtgtgagaagaagatacacattactgataatctctttagaatgcattaatattttcaggcccaaatatgagtattcagtaggttcatcagattaaaaaagctaaatgaaatttaaatattgacttgtatgtttcctttaattaattttggtgacttactaattggtatttgtggggatacgtagaattttttgaattggtgtttgtattctccatgttttagttataaagcactatgaagagaaagtgaatgaagaggctgccttcaggtgtagtaaggtttaacttctatcccggttccaacttgtcctgctgtcagcttgctccttagctccctggcttatttacatattgtataatccagactggcttgtcccgtttggtaggttggttataaactgcagagctaagtaaatgtgtgataacattttaaatggtatgagaagttaaacagtacttaaggagtgatgtcgtaaagaaccccagctgtcaggtgccccagggttggcctcctttggggccatttccgttttctctgagtaacaggaaataaatgtgaaactatagtaaattctggtcagatgatgaccccctcatccagatgagatgtagcatgctggatctgatactgaaaatgtttgatactgaaagtagattattaactatttccattaatgagttttgtacacaggcagaacaaatcaacaaaaaacccacggaagcatttttatctgtctttacccaatatgaaaacagtaaaggctagacaagtcctgttctcctcctccc

SEQ ID NO: 113188 - DNA, 1021 bp, Homo sapiens
tgtgcttgatagttctttgttttataattttatctctgattcatacagcagccttgaaaagtagacattattgtccccattttgtaaaggaactgatgctcagagtaacttcccaaaatcacacagtgcatatggcagtgctgaaattcaaacccgcatgtatctgcttcaacacctctcttcctgctatcataccagcattcctcctcatagaaattttgtgaaaaagcacagataacctccttgatttaaactagaaatttttgagagtcctgcattgtttctcttaataatccactacttatcatttatcatgagttgtgagatcctgctaggttcaggagagtgactgggaccagagctacagactcaggagtcataagaccttaagagctcctgggtgctgtgggcattggtgaggtggtcctgggaagaacttgcagagtaagagaagtagtactataggacctaatgaaacatgagctggaggtgggttagaaagagacagagtggtttttatttggtagaaggaaaacctgaataggaacctgttaggggagcccaagagcatagttgaagaaggaaagtgtggttgggagccaggaaccaaaataggataaggtggaaaataagccattggagtggatggccaagcgggaagttatgctcgcctctgtagtttgaaatcaaatttgcagaatctttaccttctctgtgagtatgccatgaggtgcggtgatagaacccctgcactgttttaggttcatatactcagtggacacatgcaattttgtgtttgaatttttagtttcttgttttttaatgctgcctttgctctggtggtccttggggccacacccaggcagtgagcagcctaggtggactaggatgttccccacatcccaccctagagttacatctgttgctttagaggccatcatccctcgagaatgacttaaattcgtgctggccgtggtggctcaggcctgtaatcctagcactttgggaggctgagttgggc

SEQ ID NO: 113189 - DNA, 1051 bp, Homo sapiens
ccgggttcaaataattctcatgcctcagccccccaagtagctgggactacaggtgcccaccaccatgcctggctaattttttgtattttagtagagatggagtttcaccgtgttgcccaggctggtctcaaactcctgacctcagtcagtccatccgcctcagcctcccaaagtgctaggattccaggcgtgagccactgctgctcggccagggtccttaagttcaaatcatggagcagtccacagagcactcttctcaggtgcagagtggaaaggactttgatcgtggactagtatttttagtcacatccacaggcctttgaaagggaaaaaatatattattgataggtcctgttttttgaggaaaaaaaaaaaacaagcattcctaactacctggcaaataatttcttctattctaatgataattaatttatgtggtcaaagatcagagaaagggagccataggcaggacagcagcccagtattggtaccacactcttagggatctcttaatttttgttttcttcataacaattgtcagttttcttacactgtgctgtatttggagtggatgatgctggtggtgattgtctaaaacttagatatttaaacagtttgaaaacttgttggagtaggaattataaaagctttatagttttcattatcttctccattcccactcttccaagttactacaaatatgcctaatttttataaatatatgcaatttaaaatgttttaattgtaatatacaagtagttcttggcagtagattccttcggagatttttcttcatattttatagagttcttcagattttttcctctttgcttataatacttataaagttatatttattttcttttgtctaaactcattcaatgtgcatttttctcacctgctcttttgtttgcttgctgcgatacaaggctgtataaagaaatacttggtgctttctgtgacagcaggccatataaagaaatacgaactcttttttttctttttgagatagaggctggagcactatggcgccatcttgacttactgcaac

SEQ ID NO: 113190 - DNA, 1036 bp, Homo sapiens
attgaatgcttgctgtaggccaggacttgttcttggtgctgggtattcagctgtgaacaagacaaagcttctgccttacatgaaacttacattgtagtaggtagagacagacattaagcaaatacataatatggtctctgtaggtgataactactgagattaacagcagttaaccatggtcacaagagaaaactgtggcttaaattgggtctgaagtcattctgagtcaactgtgtaatgcagtggccaaaaagcctaaattcatcttagactatttgaatcaaatggccatgttagagaggtcatgtttgctttcttattgtcaagctgagcctggtgtatagcatttactttttgaagagatattggcaagtggaaacttgttcaggggtatccccatgatagccttgtaaacagctgaagaaagccatcatatttgcatggagtgttccctaggccaaacctttctggttttgccaacagtttctcaaatggtatgatgtctatactctttaactgtcctggtcttcctccagataattaatttcctcttaaaatgatgctcccagaattcaactcatctttccagatgtggtttcaacttaggtaatgcttattagactatttcttcccttgatctggttatttaattttagtaacgcatctgaggattgaatttcctttaaaaacacacacacacacacacacacacacacacacacatctgtgttacttgactctcagtgttgagctaggctgtaaagccaggtctccagcacttctgttcgtacaatttatgtacataaatatgttacccagcatctctattaaaatgtcatctcatcgctgtctgtgcagtattctacattaagatcctttggaatattgtctttcatctaacttggtgttgtctacataattaacaagcatattctcaaacttcatctaggtgtttaatataattgtttaattaaaaaagaataatagcaccagacctttccttcagattatagcagctcaataattaatcctgttt

SEQ ID NO: 113191 - DNA, 1123 bp, Homo sapiens
attttgtgtcttactaagaaatctcacataaaagtaagaacaccaaattaaatattagctcttgtggttattttaagactcatctcaataaccaagagaatttggttctcacactttgtaccttttgattgtaaacagctttaaacaggtttatgttgtacttcatcaaaaattatagaggatctgcagactgagacgcattgggactgaaattaggcaattcagagtttctcatgcatgtaagctgcttttattttgatccctatcattcttagtctgtcttttcaaatattctactggaaggactgttgtgagttgagggcaaaggagaaaatggcagggtctcgagccaccaggcctcataatacctgctctttgaggtagagtaaaagctaactgatgaatgttttccagaataatatttagatttagtctggtggtttttttttttttcttgttttgtttgctttggtttaagctcaatacagtcacatctgaatttacacaacaaaaatgtttccgaaaagttgtggatgaatccatttttaataagccaagtactataaaaagcatcagaagaacttgttaactgaacttatcctaatgttctgatcacctgtttcttttaatagacatagtggttgcaacaatgctttgattagttcctttttggaagctggcttttgttggggggagggtttttgtttcttgtatcttaaacttgacaccttgattctcattgaaaaaactttcaaccatgtatggttggtgatttgttgaaatttataactgaaaatctgccactctgcttttagtatttgaaatgccttggcagggagacgtttttctcagaacagatcttttggaggacctcaggaagttaattattctggcaagaagttctttttgaacttttttggatcattatgatattatgctaatttatctaaaaaatggattctaagttgaataactgtatagtcctggcagataagagcatgtcagatgtcttggcacagtttggggacagaggggactttcccacttctttatgtaatccaccatcataatgtgggagttttatgaaatttcttctgttatacagaaatacttagctttttag

SEQ ID NO: 113192 - DNA, 3019 bp, Homo sapiens
aataatttgaattattatatattcccatagttctgcctcaaataaaatataactgtttttgaaaattcaaagacttagaaagtaaattagaggattgtttattataaaagaactttggaccctacaaaggaatttaaccacagttttcttttctttgttaatagagtctcactgtgttgcccagattggtcttgaactcctggcctcaagtgatcctctttccttgccctcccaaagtgctgggattacaggcttgagccaccactcccagccaacagaattcttttcaacagtgagttcctctagtgcactgaaaatgtaatatgatttgcagatgtttagtttatgtacaccagaaagaaatagttacgtatatttacagttcatggttctctgcagcagcgctgagtgtatgccagatatgctttccgttaactaattgtagggattttctgtgggttgagagtttttttgctgttgtgttggaattttactgacctatctttcctccctctccatgttcttcccagtagttcaaatagcattcatatgtaaaatgactggttaaaatatgggagatcatctctggctgttggagaagtcacccatttaggggatcaacctgtgactgaggaggcaggacactttctgtagtgggaggaacatgggccacatacaaacagatttagttcaaatgccagtgctacctctcccttgcattaagcaagttactgaaaccttcagaatctagttttcatctgtaatataggaataatgatgataatgcttatatcaccagggaatttgtctttctgaaagggctagcacacagtaggtattcaatgcaagttagcttttgcccttgccttcaaatccagggaacacatggcagcaacaagactgtagccctgggagttgctatgtctgcagcctctttaaggtgttaggcagacaggatgtaagcactagaaagattcagtatggtatcaccggctgtagtggttcagcccttggcctctgtagcccaagagccagtgttcgggtctactaactctgtgctcttgaaatgtctcctacttttaagtcagtttccttatctgtaaactgagactaatggcatttacctaattgggtcgttggagatcaagtaccttaattgatataaagtgcttagaacagtccctgggaggtggtattttgctccagtctgttatagggaggatcattttgttgttagagttcagtgaagaccgttttttaaaatcgtgtggaatgactataggcattataaagacaactgaagaagctcttgtttctgaacagtacttggccagtttctttaacaggagatggctttgcttttagaagcctgccccagagtcttccatctcttccactctccctgcacgtccgctctgtatggcttttgttattaatgtggagcagttgaagtcactgacttgggtgcaggccaggccagcattactgaggtcatatattactttcctagactctagtcatgaacaggatgttggaagtcagaggtacagagaagctgcctttttaggccgctcacatgaaaggtgtgtttgctttcctcaatcatttttatactaatagattggaatcttattcagtatcttggtagcatttttttcttttactctacaacctttatgccgccaggctgtcatttggcttattctttggttagacagactaatgctgttttgttatgcactttcttcattgttatttcattgttgaaacatctcttcctcggttaactaaatatttatttaaggcaggtagaatttctcagtgaagctgtatatttgtttaggtattatagatatattctaaaacatttagggattattcagtctatatatttttttctcttggaaatgaaataatactgtggagaaagtattcattgaaataacaagtgaaagtgtgtttccctcaggaatagtgtaaaaagaacttgcttttattttctgctttgcttttgtatttgggacttggggaaactatgcttttgttattttggaaaagcaatggaattttatcagacattttcctgaaactccctactttctctttttcctgaaatactaccttcaaagtcctgttttgctctgttaggaggttccatcattcaaaaagtgaaagagcttggttagttgaggttattttgttgatctgttggctttaaagaaagaagagactgtcagagaaagtctgagaaacaacacttggaggatcatatgaccaatagtgtgaaactgaggacgctgatttgttagcttgagcagttaagactttttttttttcaatgtctgcaagtaaatacgtggcctcagaccctgttatgctttatgatgggtgagagtgcagagaaagtaacgttctccaggtttaaactttattctgactctgttccctaatcgtgaggatttttatgttttttgtaactgttgttgtgaagtagaaactgatttctagttgactttggctattactaaattgtgacatgcatgcacttctttttaatttaacagttgttttctgctgttttctcagtttgaaagtagtaattatgaataagaattcctagaaatattcttcttccataatgatatgtcacagatgtttgagtgctacacacacactcctctccatttttaagtcaatttagtggagataaaatgtagataatagctgtgtgttgtaatgactctggcccactccccagaggctctgtatttccataagttatgggacccctctgatctttctgaaatggccaccatcagatcattgagacttgacatgcagtttaaaatgtgtgtttctgagatttctatatatgatttggacacagaataacttgtgctgtttccaaaaccacattctttgtcctcttatagaacccaatgaaaggaggaagctgtgccttaaatgtcatgttctttatgcttagttcctttaaaaatgtatacttttatcatttgtt

SEQ ID NO: 113193 - DNA, 1128 bp, Homo sapiens
tgaaataattttgaaacatttctttcctttaaatttgaagtaaggttaaagttttttgcaaccaaatttggggttcatctaccatggtaagttggtgctattggctgtgctataatttcagggtgaacttgactttccttgagtttccaggctgtacaggacaggaaaggctgtggccgtcagggaaatggagccagatggtcctcatgatcgatgccaagctcccaacagagacaaatgctacacccgacagactaggggcaacagcacatgttagggtgattgctcaccctttcctggagaggggagagctcttcccttctgctggtgtattttgcagctagtttttgcaggctctgttcagtctggtgtagcaagtgtccaggcagttaacttctaatgggcagtgaaggaggaggtgatggcagtagctggggccgagttggcagctagtagggctgtctgatgaaatccacattttggcatccttgaagtctttcaaaggaatctgactaagtcacttaaccttgtgtcattttggtttacttggcttttaaagggtagtggtaattaaaccaatgggagccattagttagtagatcttagtggcagttttcagtttaaaaatggaaacctacagtcacagagccattgactcgtaataacacagtggcttgtccttgacccaagggagttgatttggggaaatgaacatatctgagagtcctgtgtcctgagtttatatatcagcatagctacttaggagcagtatcactttgggcatatttcttaacctctctgaatctcctctgtaaaaataatcataattcttcaaaacataagtgagagcttatattttatataagtatgtggcacagttattagttcctcactagatattaattagttcctatgaaaatgatagattagtgccaagtcatctgacctccctgtgtaggcttattattgatcactgggggtctgtagccctggaacagtgttttcttttctgaattaattacagcctcatgtactgagctaaactcgaatatgcaaatctttatgaaaagatgcccaaaatacagtgacttaaacaagttaagaggttgttggtgctttcctcctctc

SEQ ID NO: 113194 - DNA, 1116 bp, Homo sapiens
atcactcacattatactcacagaaggtggtattttcacagcttcatctttccgcagttggtaatcaaatgtaagaagagcttttatttttataggaatgatttagcttatggagtaccaatctcatccttttccttcctctgtctttttaaccaagcatagaatgaggagaccaatgtatataatcaaatacttgcgtatgctggaaaagaatttatgtcattcactcatctccttttaattaaaacctagtgagattggtggcaatgttgggaagcagatggatgagcatgaatttcaaatgtgtatttagaaaaattgaaaggattggtaggaaagatattaagtaggcagtgtggtcgggagttgaacctgtgagttcaacagcaggcgcttgtagcataaaatatagtagtgcttccagacccctctgacctagggatgtctaagagataaggagggaaagtgcaggggtctcttttcttgtggtttatgcattttgaagttattaaagcataagacaatttgttctggaatttttactcaagataaaaactatgaccattgtgtgaacattactgcttcacctccctctcctaactctacttttgtttactattccatatccagtgtctagcagtgtactcatcaaacagtaagtgctcagtacatatttgttgaatgactaaataagtggattctggcacttaattataagagctttttggaagatgaaaagattcttaagcaaaatgattttttaaagatgtaaagacaaaagaagcttatcttccagtccccttcctcacttgactctgccagcccccttcaatacatgcctcactggcacctctcctggatttagctttaaaagtttgggaggagtgaaggtgtgtgtcctcatattactaaaagaagaaccctagtgttgtgtaacagtgtttcacaggctctttcataataaacataatattagacacagccaaagtaagttcattttgaattaataatccagtatttcatagtgctggttcgaggtacagatctaggccttgtgtgcaacagaatagaattttagaagtagagtaaaaagtttcatccactaagctgtttctca

SEQ ID NO: 113195 - DNA, 1086 bp, Homo sapiens
tacagttagataaatttaaccccttctctgacctggcaaggacaaagtacactggcttctgaagaaactttttcttgggagcaaggtagttatttcaaagcacagaaaaaggcggcggggggcacagagaagcacagagaagcgggggcagttgcacaggtaaaacattcatcttggcttttctttttaaaagataaactttgtcccacgtaaagaggaaaactgcatagatattcattgagattatctgatttgtcactgttgccaaagaaaaaacaaaggtaaaatacacgagtttctgcattcagaagaaagtatttcaggtaaaaattaactattaagcaacttttctcagcagaagaaatgcccaaattcttaaggacagccaagttgtgagttagagagctagtgttataacagatatttttaaatacatatatgaattacctccttacgttactttattcttgtgtttttagcaactgttgaaaacaattataagaaatgaaataatgtcctgagctgccacatggtatgttttaaaatctgcgattttattcttgacaagtaacatacactacatgcttttgtgtgcaagtaatgctcagatgtttgataacggagtgatcttaaagaggaggcatctgtttttgtttttataagtagttcattgcctaactaccaaaaatagctgcagttattttaaacagatggtcccaagttaatagggaagaaagtagaagtgagtctatttccccagtttttatttttaccccacaaaaatggtaaaaataattaacagtatataatttgaacaaattctatcagaatgctttcttctaagttattctttctgagagaggggatttgtcaattgaagtatatgatgtggtggagttgaaagccaatataaattgcttaaatttctactttctgatagcgttcatcaaaatgattgctgcattgttgaaatagagcttttgatttttaaaagacaattaaattgtggtaagatacatgaaacctaccaaaacttacttcaaaagttttgaagtcttaagagggtggtaagtggtggtggtgaca

SEQ ID NO: 113196 - DNA, 1955 bp, Homo sapiens
acaaaatgtagacgatggttaaaaaacaggaaaaaaatttaatgaagtgtaattcattctctctttttccttcttttgtactcaggttgtttattctgttgatggatattggactggagtgatgagtgttctaggatgggtatttgatgatgccaggggactcaagtaatggctttgcatgaagattacacagtaaagctgcacattgattacctcatcttattagctgatggagatgtttgagaggacaagattgcagggctttcaagcctgtacagctaccaggatttgatcctaagagcttgatcattgtcattgcccatagggactgtgttaagaatagtggtggtttactacttaaacgcatgagagtgttataacagttccctatgtcttttgaattgtttagataaggttaggactttcagatcaacttgagttttaatttttagcatttatagaattctaaaattaatcctgtttgtttttgtcttcctccactaaaatttaagtttgctgaggtagacagttttgtttctggaaccactatccctccagcggctagaacagtggaacatgttcaataaatattcaataaatatttttgaataagtgaatgaatgaacaggttaaatgtaatctttattttttaatgaactatcctttccagagacatacaaattgccagttgatggcattttttatttctttttgtaaaaagagtattttaaaatttgaatgagttctatctaacagataacacagttgagtacattaaaagggaccttgaacacaaaatccatgttttcgtggattagtatttttgcagcttaaatggtgaacgataggattgttagatgcaaataactctggaaattaaagacctttagttgtaactctccctaaaatgtttgtgagagcttgtaaaatgttgttcactttattctattataaaagggcattataataaatatgaagttttgaaaccatgttcttttaaatgaggtgaattatagaactctgttattagccattatgctgtgccccttcttttaaagcatatccctccacataccctttctaaggacttgggggtaacaaaatgaggagtaagtgaagaaagaagaaggcacagcttgtcgagattgatggaccgccccccgcccccgggagagcagcgtaggaaattgcaggatgaaatttgtgtgccagtcttgtcagcacccattcctgttgaaggagagggcatatggatgaggtggggaggattccagcagaggggacccaggaaaggggagggggtggggacaacaggaagtgtaatgggaggcttggggaaagttgaagatctgataaaggtagttggtgaggtgaagaaaggagaatccactaaaacttgaccctaggagcattctccgccgaatggcatggggtagtgaccctgactctggacaaggagagaagcaaatgtactcctagccctacttgggaccttaaggaaagactcatccatggccatgatagtgtaaatgctgtttattggttttaagctctttaactcaccctttggagtgaaaaacaatagaaagttaagctggttacagaacagactgtaaatgttataaaccttgaaaatgtaaactatagatacagcagatggaaattaggcagtggaagggcatgaggagagatggggggaaaggatgaaaactgattgttccaaggagctagaagatgcactctaagactgattaaaaatagcagctcgatcgggtggcttaatgtcattctggttgagggactggaatatgtggtgccactatattgggataaagcaggaaagtgagatgtcaagacaggacttcagtagatctaaaagaggtaagtcatatataagcatattatttggaaatatggggtttctctttcagtgtcctgataagagactggattca

SEQ ID NO: 113197 - DNA, 1216 bp, Homo sapiens
atttcccacccctccccctccgcagggcctgacaaataccattctgctttctgtctgtatgaatttgactacttgaactacctcatataagtggaatcatacaatatttgtctttttatgactggcttatttcacttagcataatgtccagcttcattcttttgcgtatggatttctagttttcctaacaccatttgttgaaaccatgactttttcatatttagtaaaaactgaatcctccttgatgtattgcctcaatattatatagtaggagatttaatcgaacatactgaatatatatatacattattaagttaattgagttatgagtaaacgttgcttttcagagtggcagattatcctgtggtaaaaacacacacacaaacacacacatattgtgactttctctaaacaatgcatttgtaaaatcagtttgataaatgtgcatcttcttgaaaacattatctcaagttaatactgaatggatatttttgttttgtttctaggcatggaagaggagatggttcgtgttacgcagtggccgtttaactggagatccagatgttttggaatattacaaaaatgatcatgccaagaagcctattcgtattattgatttaaatttatgtcaacaagtagatgctggattgacatttaacaaaaaagagtttgaaaacagctacatttttgatatcaacactattgaccggattttctacttggtagcagacagcgaggaggagatgaataagtgggttcgttgtatttgtgacatctgtgggtttaatccaacagaagaaggtaagttcaagatattactattcaacttgaattcttcttttctgctacatttccagaaatgtcatacaattctttgttattttagttacacaatataatgttttatttttataataggaacttgacatttggaaaaagcactgaatcctttaattagtttggggagaagctgtttaccagttttagagcgacagacttagacatattggggcagtttttaaatatcctgaagtaaaaggtgacaagaagacattttaagaacatttattgaattccaatataaatattcagtttaaccatataacactgttgatattttactatttttcacctattaaaaaatagcacatttggccgggcgcggtggctcatgcctgcaatcccagcactctgggaggccgaggcgggtggatca

SEQ ID NO: 113198 - DNA, 1028 bp, Homo sapiens
aaatatccaaaataattcattgtaataattgatgagtgcaagtttatatatacatatgtatatataaattatgcattaaaatatatatacagtgcatatatatatgtgtaaaagtataattctatggaagtttatgaatatagttcttgtgctcatagagcttacagtcagtctagtaggagggacaaataatccaggaattatactactgattcataagcgctctgctaaagaagaactagataagcatagttagcagcagcagtgatcttttcagtgcagaactcccaattccttacaaaatagatgagaggtatatttaggttgagtgtaactcttgacttgtgaacttttcatctttacaatatccatggttgggaaagggttgtaagaaaattcacagtatgattaatcagatttcttatatatagtctgtgagttggctaccaagtacagctgtgttaatcacaagtcatttttatgtgttcattaatagataaaacaagtatctaaggactttaatctgccaatacgttctacattgaggtcatgagctatatctaaatgcaactgcatttattttttaaattctatgattgagatttttcacaacttcatcctggttatttccccaaatagccacatttagaagtgtcttaatatactgtgttgaagtatttgttgagtttcttggaataaatctgtaaagcatgaacagttcttcattatgtagtattaagcagccaaaatcatactttattctgtaattttggtttttgatccataatggcgaaactgcaaaaagactctcaaagtttttcagccatttaagttctaaatagcagaatactgctattatcctttgtaatcatattcatacagtttaatatgacaaggtaaacatcaaaatgcctttgttcttccactgacttgactacctgttttatattctcttgtgtccaaatagatgtcaccaccaatcactaaataatagttgtttttgtttttatctagatctgtcccaagcc

SEQ ID NO: 113199 - DNA, 1049 bp, Homo sapiens
ttaaagtatctttctcttctgctaaggttgtagaacagcttccttctcatagcctcaaaactgaagactgttcaagcaaaggttagccatggcttttttagaggatctggaatatatatagagtcctactctttagatctctttgacaagaataaaaaaatacttcctgtataaaggtcgccatttagatagtgtttgttttagctgacattgtcatgatttattctgtttttgtgtgttgaaacaatttgtctccaaagtagctttgtttttccaaaaattgtttaactgtgatagacgtgatagttaaactttggtgttgcagatcctgtgaagccacctggcagctctttacaagcaccagctgatttacctttagctataaatacagcaccaccatccacccaggcagattcatcctctgctactctacctcctccatatcagctaatcaatgttccaccacacctggaaactcttggcattcaggaggatcctcaagactacctgttgctcatcaactgtcaaagcaagaagcccgaacccaccaggtaaattatatatgcccatgtgagagagagacagaggcgtgtgtatgtgtgtacacactgagattcttacctttaaactttttaaatttcgatttgcaggcttgaaagagaccatctgtataggcatatgtttcaggctttatatttcaggtttacattcccctattgatttccgatattcaggagattgtatcgaagagacacaatctctgccatctttggcaaagagcagttttccctacaaggctcttttggaaatctgtctcctattttgtagtctttgttacagactcacagtattacttgcttaacagatttcactgatttataaatggtgatcttgctccatttcttatgtgattgtaaaccagccaagggtcatcttttgtttctgaagaaggagaggaataccttctactagaagattttgaaagcaaaacgattccattgcagtgagtgtgttgtggtggttttggatctgtgtgagaaattaatcat

SEQ ID NO: 113200 - DNA, 1095 bp, Homo sapiens
tttaccaaaggtgtctccatcaagtactgaagcagatggagaactctatgtttttaataccccatctgggacatcgagtgtagagactcaaatgaggcatgtatctattagttatgacattcctccaacacctggtaatacttatcagattccacgaacatttccagaaggaaccttgggacagacatcaaagctagacactattccagatattcctccacctcggccaccgaaaccacatccagctcatgaccgatctcctgtggaaacgtgtagtatcccacgcaccgcctcagacactgacagtagttactgtatccctacagcagggatgtcgccttcacgtagtaataccatttccactgtggatttaaacaaattgcgaaaaggtcagctctagttgacttcttctctattagaggttaatgatagaaaatcgatttttctgaatatttgttcttttaagcgtagttaaatatactatgctacaaaatacagtccatttttttccagctctacagctacctggaagggtatattgcattcatgctctgctggaagggaaaaagagttggagtttctcacccctgaagaagtatggccttagtaatgccttcctgcctcaggaagtgtgcccttctctctcccactttctataatcctgggtggataggccctctgttgggacagaagggcaggaaatggaccagccacaaagcctctccgagtcataccctttcctgtatttgtgtgccattatggccgcttctaagtcacatctgttgggctctatttccttccttcctatataagcagtttttatgttgtgtctaacaggtgatattctgttccagtcaagccattatgctgtttgatttttacttgtgtttaaagagctgaatcttctttccccttatcactacccacttcactcattgctagtgagtatactttcctatactgtctcctagagtctgtatccaaaagttacagaccttgagaggagaagaaaaaaatgagtctgggtgattctctgagattctcaaagtcctacaaatagaaagctaaagtttttaatgcacatatcctaaacag

SEQ ID NO: 113201 - DNA, 1451 bp, Homo sapiens
ttttgtggtagagttttcctcagctatctccaagattttaatgtatctgtgattattacttaaatcagtacttatttcaccattcaataacagtatctaactcctttcttgaagtgactgtataacctggttatcagttagtgagatgtaagttatgcccaaggtggtgcaaacgatgagaaaatagaggtgtttctcttcatctttagataacctatcttatcccagacttagacattcactcacactcaaaattagatattggtattggttagcatatgagtgagtgtctgcattttctagtggtttaatatgccaattcaagacacagttctatgagcatcctttttaaaattctgtgtgtgtgcatgtgtgtatgcatatgtataatgagagaaagataataggtcatcccaatgaccctgagagctggcaaagatgggaataaatgttgatagtttgttctttattttagatgctagttctcaagactgctatgatattccacgagcatttccaagtgatagatctagttcacttgaaggcttccataaccactttgtaagtataattgaccttggcatcatcaagtgtatttcattgtctaaatcttcataattagtgccatgagactaagtgatatcatgaaataaaagtacgctgagatccatatgaatgagtgtgacttacaattgtgttttcatgtgtgacaagagtttttgtttattaaaagaaatatatatgtgttttagaaagtcaaaaatgtgttgacagtgggaagtgtttcaagtgaagaactggatgaaaattacgtcccaatgaatcccaattcaccaccacgacaacattccagcagttttacagaaccaattcaggaagcaaattatgtgccaatgactccaggaacatttgatttttcctcatttggaatgcaagttcctcctcctgctcatatgggcttcaggtccagcccaaaaacccctcccagaaggccagttcctgttgcagactgtgaaccaccccccgtggataggaacctcaagccagacagaaaaggtaaggagagcatggcaaagtaaaaggcttggggagtgccaagttagatctatctttaactgccattaaatccaaaatagaatttggactagaaattctgaaatatttcatagttccatagccatcaagttatttaagcaaagcagtactgccatttataaattaacaattatgatatcacatgttgatgtgaggtgatatttataagtctcctatctctagagcagaggttacaagctgaaatactcacggggtgagcggacaactggggagaattagaagaaactggactgccgtagccccatctaatgggagtaactaacctacactgctacaatcctttgttgacttgtgaaatgatgcacccatgcaggcaaatcttctggtatatcagg

SEQ ID NO: 113202 - DNA, 1070 bp, Homo sapiens
aagaagtctgtaaaagaaactgttcagccaaattgggtaatgcctacccaggttttttaaattggggtttaagttgttaaaacacagacaatttgatttgttgcaccatgctgttagtgtggcttaatcttgacaaccaagtaaattagcataaatgtaaatgtgatgaatgatacaatatctggcttacattagggtgtttcagcacatttgaaaagtctcatgtgctatatgtagctttttaagaccacataatgttggcatcaatttctccttaacctgggcttagatcattaatattagttctaattaagtcctagttgtgaggaaaagagactgaggctcagactatcttaagaaaaaagatttggttttgtttgtaagtaaggataacctcctcgtttcaacaggaggttaacctccttcaacaaggaggttatcaggaactgaagcaattctaggggactgttgctgtgtcctgctctctctgtgcatttctgttttatgggaaatctttgcatctggtttgttctctttcacattcttcccttcttttctgttttcttttctgattcttttttgttttcttactctgtatcctctacttaaatggattctgctttccaagagctttggcctccaatgctccccttctatggcctcagttctgcctcctagctgctttttatgtgcccttgcagcttctgcatcagcttctcattgccttacttattatttactcactttagattgcttagagatgatgtgattggtctatgtgtgtcacacccacgacgacccagtctgccctggcagcagggctgtgattgcggtgtggatctcagaaaggatgtgagcatcagaggctttctatcggataatgcttccttttgtttcctttttctttgtctctaaatctattttagacaactactagtcattttctttgcatataatatgcaaaaatatgtttggacatgtatagctttataattggttcatacagatcactgaaggattgagatataagtgtcatgaactctttgaaatattgaaatatcttttttaat

SEQ ID NO: 113203 - DNA, 1080 bp, Homo sapiens
tagggaattgagaggaatttatgaagttacaaacctatgttgaacatatgttcatgtttcgtgtgtgtgtgtgtgtatatagtttttaaaaaaatagaaattcttaagtcttccattttatatctgtaactttctacttatcaccaagtcactggcagtggtttttttgttttacacaaaatattttgctgtccaaaatacacttttataatacaattataaatattagttatgtgtttgtacacaaaaattacatcattataaatgtgtacaatgaatgattataaacataagggaatatttctgaaagaatgcagactgtctctcatttttatttggggaataattttagatatttttgtcaaggcttatgtttgtgatgataatttctgtaattagctcttccaggtttcccatgtccccccgaccagattcagtgcatagcacaacttcaagcagtgactcacacgacagtgaagagaattatgttcccatgaacccaaacctgtccagtgaagacccagtatgtaaagttttaacttttccctttctgagcagcccttttcagtcattcaagctagaactgttctgtctataaattttatcctcgtatctttatatacttaagaaaaagcagtaaaagacaacttttaaaaagcttattaaaaataatgtcataaactctaaaaccaataaaaggtgaaagtaaactgtaaatgagttaaaaaaaaaaagttgcctggcacagcagcacaaccctgtagtttcagctatttgggaggctgaggtgggaggatcacttgagtccttgagtccagcagtttgaggctagcctgcacaacatgtcaccctgtctctaattagaaaaaaattaagttttcagttatatgtcatttaagagatacttgattttttatactcttcaagaaaatatacgggcagcattttatgatgcaattctctaaggccatgtcacagcactctaatggtgaaatggtcttataagtaagtaatatacctttagataggtgtaaagattaaagaagacctcttataaacataacatgtttgaggttggct

SEQ ID NO: 113204 - DNA, 1532 bp, Homo sapiens
attctctttctgtcacctaggctggaatgcagtagcgcgatctcaactcactgcagcctccacctcctgggtttcaaatgattctcctgactcagcctctcgagtagctgggattacaggtttgcgccaccacacacgactaatttttgtgtttttggtagagacagggtttcatcatgttgcgcaggatggtctcaaactcccgacctcaaatgatctgcctgccttggcttcccagagtgctgggattacaggcgtgagccactgcacctggcctgtgatgaatttatgaagtacttaggtcctatgtattagaaaaaagcaaaaatgacccaggaggacatacctatctaccaagtacaatagaaaagtcaacaatgccaattccatatcctcatgctgccaaatacaaggactcatcatagtccattcaactctcccttagaaaagaatatgagaattatagcaatatttaacaaacttctttaattttggatcaaaaatcatgcattatcaagtgaattctgaatgtgacacctgaaattcaaatgatggtaaaccataactaaaggcatacatactgttatgtgataataacaacaaaaatatgttaaatgattttacataatttttaaagaattttttaaaaatctaggccgggcatagtggctcacacctgtaatcccagcactttaaggaggccgaggcaggcagatcacctgaggtcagtagtgcgagaccagcctggccaacatggataaaccccgtctctattaaaaatacaaaaattagccgggcgtggtggcaggcgcctgtaatcccagttactcgggaggctgaggcaggagaattgcttgagcccaggagacagagattgcagtgagccgagatcaagccactgccctgcagcccaggcaacaaagcaagactccatctcaaaaaaaaaaaaaaaaaaaatctcacactactggtttgttatttaattcaaagaacacttataataccttatagaatcttagagtttctctaaactgttttgggaaaatactgggtgaaaggctagaatacagacaggctgttccagtggagattaaatcaagagcaaatagacttccttgtagacacacaaatgttaaccatacttaaagatggaaaaacattcagttctagtaataacagacataaaataggttaactagccaccctgagaaattctgtttaggagcaacttattggtattatgcatgcaggtcttacaaatttatgcatttcttttatagccttgtaatactgtgaacaattctagatatttctaatcagagaaatggagggtatgggtctttcattgatcacatttgaatatagaacttttcacacactcatggctgattttatgtgacaatgatatatagagtcattcagataaaaaatttcatgatgattccagtttctccatgaattagaaagaagagagggattgctatttatattgaggaccaaaacttgcttatattttttgtgctctacatgtt

SEQ ID NO: 113205 - DNA, 2214 bp, Homo sapiens
agtggctcaggcagcagtgtagcagatgagagagtggattatgttgttgttgaccaacagaagaccttggctctaaagagtacccgggaagcctggacagatgggagacagtccacagaatcagaaacgccagcgaagagtgtgaaatgaaaatattgccttgccatttctgaacaaaagaaaactgaattgtaaagataaatcccttttgaagaatgacttgacacttccactctaggtagatcctcaaatgagtagagttgaagtcaaaggacctttctgacataatcaagcaatttagacttaagtggtgctttgtggtatctgaacaattcataacatgtaaataatgtgggaaaatagtattgtttagctcccagagaaacatttgttccacagttaacacactcgtagtattactgtatttatgcactttttcatctaaaacattgttctgggttttcccaatgtaccttaccataattcctttgggagttcttgttttttgtcacactactttatataacaatactaagtcaactaagctacttttagatttggaaattgctgtttacagtctaacaacattaaaatgagaggtagattcacaagttagctttctacctgaagcttcaggtgataaccattagcttatacttggactcatcatttgttgccttccaaaatgctgaggataatgtatgtactggtgtcaggacctagttctctggttaatgtacatttagtttttaatggtggaactttgttatattttgttaattacagtgtttttggttcattgagtgaagattctgccgggtgggatcttgcacctttgaaagactgaataattacactaccaagtaagcctgcaaatcattgatggcatgcagtgatgatgtgctcttacacttgttaacatgtattaagtgttatttgcaaaaggtagattatgtaaccaatcaggtacgtaccaggcagtgatgtgctaatacactgatcaggtttagacaatgagctttggttgtgttcttgttagtcctaatattggttttcagtttggaattaataaagcagttgacattcactgttagttacagcaacatactgtgatttttaattagatagtaattcagatttattactctatgaaattctgtcttttgacaccatagtgccctttctatgattttttttacttaatattcttcttggccttatatttaattccctatgcaattaatattttatatctgcatttttttaaaaaaaatagatgttatataagtgattctcgtatgtagcacctgttgcttttccactgaaagaattacggattttgtactgtgatttatattcactgccccaattcaagaaatattggagccttgctacaatgtgaaatgttatagtcatggactccttccaaccagatttctgaaaacaccagagggatggtataattctgtctcacctataacatggtcctgtgacatagatattaagaccacaagttgtagtgaggctacaattatattcgtctgtcttggctttgcaacataatttagaaagcacgtatagttgttttttaaccaagttacatacaatctcatgtactgatttgagacttataacaatttttggagggggcatagagaaaggagtgcccacagttgaggcatgaccccctccattcagacctctaactgttgcctgagtacacagatgtgccctgatttctggcccattggccatagtactgtgcctaatcaatgtaataggtttattttcccaatcctcaaactaaaaatgttcataacaagatgaattgtagactagtaacatttgatgcttttaaatatttgcttctttttaaacaaaaactaaaacccagaagtgaatttttaggtggatttttaaataaaaaagattgattgagtttggtgtgcaagctgttttataatgaaacaacaaaatgaaatctaaaatcctgaaatgtgcctaaactatcaaaacacacgatacagctaatgtgtaaagatgctaaattctgttacttggaggatgaatatatttaagatttaaaacacaataataaatacatgattaattcaaaaataaaaatctttacagctgcctatcaagggtctaaagcacttaatgaatgtttttagtctaacttatcattaactttttacaagtcaccatatttga

SEQ ID NO: 113206 - DNA, 3872 bp, Homo sapiens
aaatatttctttaaataccatcacaatcatgatgcagagtagttccatcatccccaaagtttgctcctgctcctttctaatcagttcttgctcccacctccttgccacttctgatctgctttctatcactagttagcatttcatttaagtggaatcatacagcatgtagtcttttgtgtttggcttctttcactttgcatagtgcttttgaaactcatccatgttgcatttatctgtagttctctttttttttttgctgagttcattgtatggaggcatgctgaaactttgatttctgaagttttaattgatactctgataaaatgtatcttaaatttttttttttcagcaaactgaccgggcaaatagattcgagtatttattaaagcagacagaactttttgcacatttcattcaacctgctgctcagaagactccaacttcacctttgaagatgaaaccagggcgcccacgaataaaaaaagatgagaagcagaacttactatccgttggcgagtgagtaatagtttaaacttcatagttcaaccaaacttattttcgatagtcttcagtggaagcataaaatcactatgataaataacttaaaattattttagtgccattatttatttggccctgtttggcttggcatgatttagccataaatgtataagtatataaaaatacgcataatggttagagcacagtggctcttgcctgtaatcgcagcattttgggacgccaaggtgggaggattgcttgagtccgggagtatgagagcagcctgggcaacgtagggagatcccatctctacaaaaaaaaaaaaaaaaaaaaaaaagaataaaactgcataacgccttattttttgtagcattatatagtttatgaattgtaacaatcatgttgagtatggaatttagatgtcacgtcattcctcagagaggaaacaaatgcagaggttaagtggcttgtttaacatcacattgaagaatgatccagacttgaatttgaatctgacttgggtgtgctctaggctcctccatcacatacagatgttgacagtattttatctaaagtgtggtgtgtgggatattgtgatgacttacatcacggcagcctgtttaaaatttttattgcatacttagttgtttttatataaattgaagtgtcacgttgtatgccgtcctttggtggtggttgaaaataattcttacatgttgaatttggaaattctctagaattttcattctggttggataaataagatgtttaattagtaatagtagatttagggcagtcttggctccctgaaatggctttgtgtaattcccaaagtgaaaactgtgattagtaattaaaatacaaaagattgtttaaaagaagaagtatcaacaaggttaaattcactacacagtttgttgaaagagggaagtatgatcttcatcttgaaggggttatcgttgtaagcataataccttttatttggggtattccactcattcattatatcttatttctcatccattgtgaccaaagcactattttaatacttacgaaactttgaagggacaattttgcccttcagctgtatttaaaatatttcagacttcagaagtttgcattagtgtcatggcatgaaactggaaactactgtactgaatattgttatgggatagtcagtatgatgtctcgaaaagaaacacttcttttattcttttctattttattattatcctaatttatcttttttataagataaaaaagattctattggaaatagtaataataaattgttaggcttaatgtattaaatagtgttattagggaaaaaagtcctagttaacagatttctttactcctcaaaccatcttaaatgggaagctaatttacctaaagtaatgagggtcatagtattgtctttgggtatcaggaatacatttttttaaatctttttttgtttgtttgtttttattgagacagagtcttgctctgtggcccaggctggagtgcgtgcagtggtgtgatctcggttcactgcaagttgtgcctctggggttcaagcgattcttggacctcagctgggattacaggctcacgccaccacgcccagctcatttttgtatttttggtagagatggggtttcaccatgttggccaggctagtctcgaacttctgacctcaagtgatccacccacctctgcctcctaaagtgttgggattacaggcgtgagccactgtgcctggccaggaatacgttttttttttaagtcattcacgattatattcaatttttaacaataaatgacatctcagcttttaagttttacaactgtaataatcaaacattttgagagtaactataaaggatattttataaaaagaatttaaaattatctcccagtttatggagaataaataggggatggaagtagatctttgtactcaatttcataggctcagaatgcagagaagtacaaggaataacagactaggatgtactgattatgattagaagcatatataacaaacaagaaggcccttgaatttctgaggaatgcttctatcttggaaggccgcttatccttttagcaagcatgtggttttggtagaaatgaagttacaaattagattcagcggtctcaacagaggcataacgtgcctttttctaaataagatgaaaatatttgttgaaagtgtcagaattggggagtaagtattaatagttttactgaaccaagccctttagagattaattggcagtattaaaactttagaaaatcagtttttaagggggtagtatatctgattctcttaggatgtagaatttagatgtgtatttaaaaatttttttgatgaatccgtggtcactgcttaaatttctgagtccttatgctgcagcttttgctcgaagttacaattttaaacatgtggtttctggaacttttttttccttggcaaaaagatttttaaaaaggtacactttaaaattcaaataatgagattttctgactacatagttcttgaaatttgactatcatatttgagtttattgggttctggttaatgtatcgtactggtgtattttaataactaatgtatattttaaataattatttaaaacattgcagatttaaatgtactcatattttctactgtccactggttgatgcctgttaaaaatttaattttgtggaatcttggtcagccacttgactatgatgtttaaacagtagctgataattaaagccaaaactcaaatcaggttattttattttcatcttaacagttaccgacaccgtagaacagagcaagaggaggatgaagagctattaacagaaagctccaaagcaaccaatgtttgcactcgatttgaagactctccatcgtgtatgttaaacacacttgatttttttaaaaaattgccctttgagatctcctttggttaatgttttggatttgtgttggctactatttgtgaagcaaatttttagtagtcttagatgtttattggttatgaaataaacttcagattttgatggagatgagagcatattacaggatagtagtgctgtatttcaaagttatataaaatgtcattgtgtttgttattgccctgaagtatatgtaaatctaaggatcgttttgctttatatttgtcccacataagaaaactaatttattttaaaaaaggtacttcatgaacacatttgcttacttctgatgtttttatattaatttaattttttgtgaaatgtatttgtttattggttagctttttatcctcaagtgtttttcaaaaggagatggagggctacactgtgtacatattaaaaaagaaaaatcaggtgaccgttatgtatatttggtaatt

SEQ ID NO: 113207 - DNA, 1056 bp, Homo sapiens
gtaggcttagatgaagagattgccttgtatttcttgtcttaaaatgcctattgtgcttttcttttgttcttagatgtaaaatggggtaaactgagagattatcaggtccgaggattaaactggctcatttctttgtatgagaatggcatcaatggtatccttgcagatgaaatggtatgtgttggtagttttttttgaagggtatgttttgtattgaaaatatcttatacgttgataaaagtttcttacagtctacaactgttagcaaatggatcctctcagaaactagtataagcagcttgccttagttgcataagtgtgatctgtattttaattgtgagaaatttccatcgctgaaaatatgataaatttaaaaagaatacatttgagaaacatgtttttggatgacttttatagtacaatgatttatttgcttccagttttgtaaaacaaaagtgaggtcattaattgtttataattgataaatgttttttccaggtggtagcttgtacaattcttagaaaacatttatcttttgttaactactagttatgtaatgaatgtttaaaaaagtttccttattgctataatgctaaaacgtttaattggttggagaaagtatgaagtcaaaagaaatgtgtttcaatgctagctctgctagatgactttgggaatgtcacttaaacggggccttatgcgggtgataataatacctcctttagagacttgtgaaaattatatgacataacacttacaaactttgatatatgttaagtttttgccatttattaactgttataaatatgtagcatttcttttgaacatttctatatgttgggaggtataattgtgaaataatattttcatttttcactgcttcatggttattttgaaatctttcagggcctaggaaagactcttcaaacaatttctcttcttgggtacatgaaacattatagaaacattcctgggcctcatatggttttggttcctaagtctacattacacaactggatgagtgaattcaagagatgggtaccaacacttagatctgtt

SEQ ID NO: 113208 - DNA, 2547 bp, Homo sapiens
atgtagcattgtcttggtggataaaaaacagcactttgggaggccgaggcgggtggatcatgaggtcaggagatcgagaccatcctggctaacacagtgaaaccccgtttctactaaaaactcaaaaaattagctgggtgtggtggcacgcatggcctgtagtcccagctacttggtaggctgaggcaggagaatcgctggaatctgggaggtggaggttgcagtgagccgagatggcgccactgcactccagcctgggcaacaaagcaagaccatcttaaaaaaaaaaaatcatactgggaagaagacattagaaatggtagaaagctgtaagactgtagtttgtttctctcccttttgggagtggttgtataaaatcattggttgtgctctcattagaagttattttcttgtttttaaaagatattttgaaatgtgagttggttggaaatttaaggagccacatttttagatgaatgtgtgtagtggtaatagtcacagaattagagtttttaaagacgggttgagtcatatatagtaatttggtgatttattatgatatttaacaaaataagttaaaatttcgatcagttgacaacatccttgtgggaagaagagatggaaataatgacattagtatataaagctcagatttggaaatttattcagactctactgaatagctgtgtacttgttttttatttcctcttcatttacctgtgagtgataagtctatatttttctctccctttctagttatgttggatattttaagttatcaatttttgtttgtttgtttgggagcccaaagagtggtaattacttaaccagtctttgcttcagtttccttacctttaaaataatactattaggaatgtgttaatacatttataaacctgaaaggaatgcagatgcctactactgctaactatctttccaccctcttcctttctttatgttaaaacctccctcttttttgtctaaacctgcctcctaagaatttcccgatctagtggaattgcagaaagacattttaagtgtctattgaatttttcactggttaactttgtcagttttttaaaacttaatggttctgacatttaaatgattaatgacgttactttagtcttaggaaagctggttctaaacgtttgcataatatagctagctactctactcctttttagtattcccacctctttttatatactagattacttgtcatcagtaaatgtaatgcgtagtttatttctacgtgatgtaatttttttctcttgttacacaggctgcttttgtcagagacgttttattaccgggagaatgggatgtatgtgtaacatcttatgaaatgcttattaaagagaagtctgtgttcaaaaaatttaattggagatacttagtaatagatgaagctcacaggatcaaaaatgaaaaatctaaggtaatttgatacttagatgtgaaaagccttcatgtaagaatttgattaaagtacagatttttttttcttttaactttaagttatgagatacatgtgcagaacgtgcaggtttgttaacataggtatgcatgtgccatggtggtttgctgcaccccatcatctaggttttaagccccgcatgcattaggtatttgtcctaatgctctccctctgctttctccccactccccgacaggtcctggcatgtggtgttcccctccctgtgtccatgtgttctcattgttcaactcccacttatgagtgagaacatgtagtgtttggttttctgttcctgtgttagtttactgagaatgatggcttccagcttcatccatgtccttgcagaggatataaactcattctcttttatggctgcgtactattcgctgatgtatatgtgccatattttctttaaccggtctatcattgttgggcatttgtgttggttccaggtctttgctgttgtagataatgcaatatgcagaatattctaatggtgtatttggttcttttctttcagttgtcagaaatagtgagggaattcaagactacaaatagactattattaactggaacacctcttcagaacaacttgcatgagctgtggtcacttcttaactttctgttgccagatgtgtttaattcagcagatgtaagtatttcctggtgctttctggttaataataatattttgcttaatgctatatatttttgtaataaaagtggcctgccttttagcatggcttgaggttattattaattttttatgcttttatttacatagttagcctggtgttatctcctaggttgtctctgtataatgggaatttacttttgtgcctttggtttcaatcttatttcattattattattattattttattttttttgagacgtagtctcactctgtcacctatgctgaagtgcagtggtgtgatcttggctcactgcagcctccacctccggaattcaggtgattcttgtgcctcagccttccgaatagctgagatcacaggtgtgtgccaccatgcccggctagtttctgtgttttttgtagagatgaggtt

SEQ ID NO: 113209 - DNA, 1089 bp, Homo sapiens
cctggaccagtgtttatttttgaagctttgtttgcatagctggcgtcttatgtgtattggagggatttgaagagctccatgttagtatatttttgtacaattaagttataaaaaggtattaattaattttgttttttttctgttgaagattgttttgaaagaatagattgtgttgtaaaaagatatttaatcagactccaaaagcaattttagcttcgattttatgtattttgatgtttttgagataattcctgtttctcactacattgacactttcatttactttaaagcagtgaattctaagattatgtttactcaaaaacaaagcacatatataatacatatgttcaagagatgaggttagggaaactgcccttgttgaaatcgtaaccaaatattaatgaaatgctggtaatttcaatttcatttagtaagtttgattaaaattgacattgttcgtaaacttgtatttgagtagtgcgaatggtctcagagaacaaactataaaatgttttaattttcaagcttttatgaaacttgaaagatactttacaagaatattaattttctaatcctatagaacttgctctccaactttttactgtgaaacttgttattttgatgtttttgagaagaatgtttagaaggtagtgtgatttctgaactacttgttttaaaattagtaacaatgacacatgaaaaccaggattggactaagtgatttttttttgtgggttacaattcaaattactaattctagaaatcatttctatatctggtattatagggtatttgttaatattatctctgatctgagtatattttttgtttgtttatctaggactttgattcctggtttgatacaaacaactgccttggggatcaaaaactagttgagaggcttcatatggtaagtattttggagtagtgttaaagcatatttatgatgggaaaaaggataaaggtttaaattagtagattattttcctgttaataaaaaacacaatggcttaagaatcagatctgcttgaattctgacacttaactcttacatcttacaatcagtgtagggggtgatgtgtggttgtt

SEQ ID NO: 113210 - DNA, 1089 bp, Homo sapiens
cactgaaccagccaggctgaggctggcctaggtgcccttctgtgtattccatctttaacaatctgagcatcctaatattataggactttgcagaggatattgagatgattcacaagtgttttccatactggattgtaagcacaaaggcaggaagcacagatttatttgtctttgtatacctggcacaatgcctagttagagtggatatttgaacagggaaaaaaatttaagttcatgattgttcaaatatttcattataaagtactttaaaattcttaaatattgagagttttgttaaatatttgaaggtagtaatttcctagctacctttgtttcaattcagatggcattcatgcatctaagcactctctttgtatttacttagaccaaggattgtggagtgtatatgtaatcttgggggtagaaaaggaggcagaagaacatgattttttttcatgcatttttttccccttattcctctgctcttggctttcctttagtaaatacgtaggtacatctaggtaaagcaaatgaacaacccattcagcagtatcaaccagatttggtaactctgttttgttcacagggtattttgaaaatgcttatgaagtcagggagaagaggtcttgtagctacctctctactttctcctgctctttactttgaagtttctacagtagcacctgtggtcttataatgaaaggagggtttagaagtcggtatggatgcgcttaggaatgagataactcttatttgatgtattagttatctaatgctgcaaaagaaccccttattccctccaccccccaaaaacaccttaacccccctttaggggttactaagacccccttatttcccccacctccaaaacacttcatagtttatattttattaacaaccccagaatttatgggttgactggatggtttctttgtggattacacttggggttatccagttacatttatttagctggacaatgctagaagagaaccggtggggctaaaggtcttcacttacacatctggcagttgctgccgcctgttgactagggctgaactagcttttctacgtggtgatgttagagag

SEQ ID NO: 113211 - DNA, 1187 bp, Homo sapiens
cagacatacctccctcccccatgtatttatacgtatgtttaagtcacgttgtattcatattattctcatcatcatgccttaccatttcattattcttcctgtcttctcagatgttagggttcttacctaaatgctacactagctatggggtatatagtaatcgaatagtggcactttctgttgcaaaaaaactgcaaactaaaattatgtttaaaacttacattttttaagttttgctttattacttaaaaatattatgtcttactgctgtaattctacccaagggaactgtttttgtactttaaaaataatatcctcaaggcccaaggcgtaagtatgaacattataatgctatggacagtaaagaaaaatggaagcaaaaagaggttacagatgttaaattcctaaccatacctagaagttgatgagtagtttcttacagatatttgggggttcatgtggggaaggggattaagtatgtaaagtggcagggattgatcaaggaacatttgagctctaaaaatgtttttcttctttgaataggtatactcggatattaatgaaggatatagatatactcaactcagcaggcaagatggacaaaatgaggttattgaacatcctaatgcagttgagaaaatgttgtaatcatccatatctctttgatggagcagaacctggtccaccttatacaacagatatgcatctagtaaccaacagtggcaaaatggtggttttagacaagctgctccctaagttaaaagaacaaggtatcggttacccgtatcaaattatcaaaactgttttaaaatgctcatgttaaaacaaaggagcactgtactttgaaatgactgctctgatgctttccaaggttgacgtgtagaacattaaaaaaacctgttcattatctgagctctaacccccactcctgattttaggccttaagtctcttagaaggtaagcaatagttagagcaaccatactcccttgattttgggaagagttcatactttatatatactttcctagaaattatagctttctgtcataaaatgtgaagaatgcatctccctcccacacatggttaccagatccattgttagacagtggtggtgtgttcatgatattgttttttaattatttatgtggagttttaatttaataaggtaccatgtacatggacctga

SEQ ID NO: 113212 - DNA, 1259 bp, Homo sapiens
agaatggatcttcagaaccaggctgagaccaggattattaggtgtgtgttggaggtttggggagtcatatgcattgaagagttgttgtgaagtagtggaaagttatttttaaatgtatatggggtaacaagataatgattatcttaccctttgggatggcaaagccttccagaccagaggcaaatatgcttttctgtacaaatgttacccttttttatttgtgccatggtgagaaaaaagtgggaaatgactgacttggataataatgtgtagatttttttcccccttgtaaccaagtaggtagctttggaattaaggataattgattagtcttagttttggttacccttaaatttttctacttttgaagccactgataatagattgttatattccccaacaggttcacgagtactaatcttcagtcaaatgacaagggtattggacattttggaagattattgcatgtggagaaattatgagtactgcaggttggatggtcagacaccccatgatgagagacaagtgagtaaaatttggggagggagataaaaaagaatcagataaattttttgacaaccattttgttttatccataggactccatcaatgcatacaatgaaccaaacagcacaaagtttgttttcatgttaagcacgcgtgctggtggtcttggcatcaatcttgcgactgctgatgtagtaattttgtatgattctgattggaatccccaagtagatcttcaggctatggtaagagataacgaataaatatattctgtgcttagtagatggcgttagttaggacaggctaattctacaaatatcagtgacttaacccaatagaattttatttttctctaatctaatggttcagtgagagtatattgaggtgatcttccatctaaataagggtatttccatctcagggatctgccatatcttaggaccctggagtcctctgctatactgcatcctattggcagaagggggaaacgatagagttggggatttcccaggaaattctttatgggtcagaccttgaaagagcctccttgtctctccacccccttgatcaaagaattagacagaactcaaatcatgtagcataactgactgcaagggaattggtaaattatagtatagttatatcacaggaccaaagagaattgggtttgatgagcaactagcctgtcttccactttagttatttaaaagaacacctgtgtgagagtacctggtcagatcaggaagattatt

SEQ ID NO: 113213 - DNA, 1710 bp, Homo sapiens
aattcatattcagattagtttgactacttgtatatagttaattgggtaatatttaaaggttagaatttttgtgttgtttgctaagttgtttcatgtcacttctttgcctgatagcagtgacaatttgggtttgatttagatagaaaaacattttgaatttaaacctaggaaaaaagacttaaaatctttcctcatcagacttaaaaattataatgttgtatattgtttggagacattatgtgttttatctcagtgtaacctagcagaattcatctgattccttacagatgcagtgttattacaaatttttaaaagttttatatttcagaatattttaattttttttctcagtgtacccatttcagtgttatttatgtgacttttaaactaaattcaaaataacatggtaatttatttaggaccgagcacatagaattgggcagactaagacagtcagagtgttccgctttataactgataacactgtagaagaaagaatagtagaacgtgctgagatgaaactcagactggattcaatagtcattcaacaaggtaagccatggaactttaaaactttaccaagttggattgacacaacctgtttttgtttgaaaatcgtcttagaagattcttgttactaagcatccattgagtcaagcttgcagccagtagagatgacttgtattgcaaatacagtaaactttagttttgtcattaaaaagatggatttgggctcaggacagttgaggtttgaataatgagtctgccagttagcagttctctctggttacatgaacccatttcctcatctgttaagtggggataaaaataactacacttaaggattttaaaggattaaaggggataatgtatataaaatatctgacattcagtgtggtggttaatgatttatatgtactaactactcttgattactgtggggaaaactgaagaaataaaaatcaaagagcctgattttattcttttttcttgtctgcaatttactgagtacccaccagatgctaggcaccgttcttggtgctgagaattcagtggtaaatggaacaaacaagtattcttactttcaaagagtttacaatttagttgggagggagagatgaagtaaacaagggtataagtaggagtagggggtgagagtgggattttattttggatcaattgaaggaaacttaagttctcattccagatcagcttttaaggatgacataatttatgttttcatgaagcctactataaagttgatgatgggaaatataaaattcaagaaaaggggtgggaaacttaataatttcaagtgtgcattggtttcctttgtaactgcatttgtgagcatgtatttactatctgtctataaagctgaaaggcatactgttacattgtttactgattatgtaggtatcttgattttgtcagtctctgatgtccatgtaagagagtattgtacatgtctttggtatccctaatgctattcatagtgttagccatatgtctgcatacctgaagacaataaattattgcttatttttacaaatcgtttcccttaataaagtgtttactttgtgccaggcagtgtgctatatacttaacatttcattttctcctttagtcttcatgccaacttgagatgttagcatcagagataaaggcttttgagaggttaaattacttgttcattgtacatacagctgg

SEQ ID NO: 113214 - DNA, 2253 bp, Homo sapiens
tgttacatatttcagttctgtgtaaagtttggcctaggtgaaggattttttactttacttttctaaggagaaaagctgatttggggagtattagttaataacacctttctgctcatcagaaacttgtgtgtataatgcttccatctgttgaaacttgtaggtttttgaaaatttttcatatgcagctttcacaaaagattatatttcgttggcacagtatacagcaggtttcattatataatacataaggtttaggaatgttttgtagcttaccaactgaaaatttggcattaaatttagtgcaaaaatcaaaattattagatgtgaataaacagtaaacagaaatgattgacatttgagataaaattataaagcattaaaccttacatttaaagtttcaagtttccagtaaaataaagtctgttcagttaacattatacaacacaatcttttttcagggaggcttgtggatcagaatctgaacaaaattgggaaagatgaaatgcttcaaatgattagacatggagcaacacatgtgtttgcttcaaaggaaagtgagatcactgatgaagatatcgatggtattttggaaagaggtgcaaagaaggtgagatgtagattaaataatgcttttaatatagaatgttttagaccagaaacaggaaatatttgttacattgatgataaataattttatttccttaaagagaagcttttgtgtacgtgaagttaatttattttgactgcagttttcatgctttctttgctgtgaatctaagaagctgattgttttgttctctagactgcagagatgaatgaaaagctctccaagatgggcgaaagttcacttagaaactttacaatggatacagagtcaagtgtttataacttcgaaggagaagactatagagaaaaacaaaaggtaatttagaaataggtttgggttacatgaaagctttattttactggaaacttggaattttaagtgttactgtaatgtcttataattttgcttaaaacagtagtcatttttgcttattcacatctgaatattttcatcattatgtaaaatttaatgccagtttttcagttggtaagctctgaaatatttttaaagtttttgtaatgaagtttgtggtatatgtttacagtgaaatatattcttgtatgggatgaatagtaatttgggatggtaacctgattcattttattttaaacagcagaattggctggtaataaagggaaaaatttcttaacttcataagtaatacttggtaatatagagataaattgaaaaatacccagagattagaagaaaaaaataattctacccagtgtttttcttgttaatatttaggtctatatcttcagaattttttgtaggctaattatgtgtctacatttttctcctagtttagatttataccaaacattctgtagcatttctccctcatttaacagttgttcctttaagcaagaaatactgaatgcttactctgttgactagacactgtctcgtgttaattatatacataatattgagcaaagtatcatagtctccaccctcatagagcttatagcccaggattttgtgaatatctttacatttacaaacatccttcttgatgatgatttgttactgtgtataataaaagttggtgatttgagttgtttcccatgtgctagattgcattcacagagtggattgaaccacctaaacgagaaagaaaagccaactatgccgttgatgcatatttcagggaagctcttcgtgttagtgaacctaaagcacccaaggtgagttgactgacacagcataaaaatatctaaaaattttgaaaatgtaatttttttcatatattcttgcaaaaagattgataattagattttgtgtttcttttttttttttttttttgagacagagtctcactctgttaccaggagttcagtggtgcgatctcagctcactgcaacctccgcctcccgggttcaagcaattctcctgcctcacccttccgagtagctgggactacaggcacccaccaccacccctggctaatttttgtaattttagtagtgatggggtttcaccatgttggccaggatggtcttgatctcttgacctcatgatccgcccaccttggtctcccaaagtattgggattacaggcgtgagccactgcctctttcctacattttgcatttctttagagtgtactctcttctgtttttagttaacatttttcaaaaatta

SEQ ID NO: 113215 - DNA, 1014 bp, Homo sapiens
ttttcttattctgaattatgttgtgattagctaattttgtcacagtgtagttagtaccttcttcattattttttacaaattagaaaatgttctgtttccagaaatggcgtaatggtttcctttttaaaaattttttaaccctagctaactctagcgacagcaaagaaaatcagaataagtcactggataattgcccttgcatttttatcttaatttctctgcataacttcaagtattatgtgttgtgtttcctgaagtcagttgtattattaggttaacatgtgagggtatgctgtggtgagtctgcttagaatagcagaaatttaagaattagaagataaataatccagttgatcccattttttttacattaaagaaataaaaatataaatgatttgtttactttgtccaacttttacagctgtgttttgggaaaggtgcaacgagctccaggacatagagaagattatggctcagattgaaaggggagaggcgagaattcaaagaagaataagcatcaagaaagcacttgacacaaaggtaatttgcttgttaataagttaggtagttaataaaataactcctagctgtgagtatgagagagtgactttttataaaggaaaagaagtaagggtttacaatttaaaatttcttcagagtagcattcaaacatggtattgtcagcagaatttacctatacactagactgatagatctgagtcaaagacactaagattagctttttactaagtagaatcaggaagtcttagtctgtatttctctttataataataaagactataaaggtctttcgggacaaagattatataaagcaattgaagtgctctagatagaaaattctgatttgaaatgcaacattttagctaattatactaaagctgagtttgaaatacagattatataggatttgtattttatataatataaaatctgactttcatagattggacggtacaaagcaccttttcatcagctgagaatatcatatggtac

SEQ ID NO: 113216 - DNA, 2794 bp, Homo sapiens
atgacttttactgttagtctctaagctttgattatttcagtgatgttttagcaatgtgaaggcaaacacttaaagggaaaaaatgttatttaataatagttaatttaataaaaaatggttaatttataaagtcatgaataaatgagtatctctggataatatttggtacttatgtaactgccttttaaaaactcaagtgtttcttactattttgggaagcttgcatttatttgatattgatctactactgttaattgtgcattagttttataacgtcattattaacattaacattttttattctgtaagtaaaataagtaggtaagattatttggaggctttatagtttgctttgaaagatttatatagcctgggggaaaagtctcatacctattactttgtagtagttgttattactaaagtgttataatgtgtctgcaactatatttcatgtttatattagtcttgtgaaaagtaatccttctgtctgtttgtagacacagaaacgtaaaatggatggcgcacctgatggtcgaggaagaaaaaagaagctgaaactatgaatatgtttttgtttcataatcactaactttaaaccagtagttctttaatttacgggtcttcataagatgtactgtacaatgctcaattgttatgtcatttaaagacatcaggttcatctgtttactgagctagaaacatagtatgtagtttcacttttttaaatgcaacagctgtgctgaaatttttttatcattaacacttgaagtaataaaataggcttcatttattactaagtgtttcatttgatttatttttctattgtagttccatttgtgaagattgtgactttttgtttattagctataatttctacacttgtaaggcttaaaaacaagttaaaaagaaaattgcaaataacatttgtccctttcagtcttcacctagttgtgtaattattttaattcactttgcctttgcagaaatttgggtattttctttgtagtgctattgagtctcatctggaaagattatataaattgcattctccttgcttatgtgggtagaatgggaaaagaaggcaagacaaagtatacttaaattctatgcatatttctgttatgctttctgttttttttagttgattctgaaatgaatatgccctattcttttgaaagaatggccttttagttgtatagccaaagacatttagtattttccggttccttaaggtattactgtaccattttgtaaaaggaatattattattattatttttaattatttggtaaatattttgtcatatgaccttctgaagcagccacaacttagataatgtcagaactaaggtgattttttttttttaattttgaaagcccagccaaaatgaggtgtgaatttgtcatactgttacattgaaattggtaacaaaatatatcccctcccatttggacttttagggtaaatgaaaattttattgtattttaaagtagtttctaagtgttagcaagactgactataattccagtttctgttttctatggacagacctgataaactggagaccctaaagcaggaatacccaaattatagtgtcaggattttagctgtaccagaggcctttatgtgctacacataatttgtataaaattttatatgtgcagattgggtacataaacagttctccatttttctaagggaatgcaataaatgtagcatcgtgaataaatataacttttataatccgtaaagtggtcttttctttccatttctttaattgttttctcaatttttattcactttttcctttaggacacatttcccttaattggatatctttcccttaaatttctattagtagttgttttcatctgcccacatgtaattgaagatttaaaaaaaaaattttgatacctgcagtattactaatactgcttaatttcttgaaatgtggaattgctgctgttaatgtcaagcaaaacgcagtatttatggcaaattgtaaagtaatttgaatttagtgctacctcaaaattaactttttaaatactatgttagattcttaacagttaaaggtctaatacatgcatgaggaatggttacttatgaaaggaaaaagaatttgtaagagttatcacctcagtttggaagaaattgaaaaaatgtaaggctgaagaaaacttacggaggtcacaaaagtgatgttttcaagaggaggagaaactgggagggagatacacagtggaaatgcaaaatgaatcaagtatagtggtagccctgagagcttagggactcaaatggaaactgtgtgaagggaaactcacttgaaaaaaaagcatgaaccagctaggccctgccaccactgtgtttggccaagttcacaaatctgttttaacctgtcacttccctgtcacttctctggctttcctctcccgctaagcttttgtttcctggcagtaattaaaatcttctgtcagtgccacagctactactgctactggaactgccttaaccactactgctactggaactgccttagccaccttggtatcgtggtttggcaaagtattggcctctaccaccatagggcccagagcttctgcctccaaagtttcctcccttcatgggtccaaaatttgaagactgattgttgtcattgccaaaatcattgtagcttttaccacctccaaaattgcttcaatcattaccaaatctattatagcaatccccactgccaccatatccatcaccaccaccatggctgccaccaaagccaccacgatcacagaacttg

SEQ ID NO: 113217 - DNA, 1052 bp, Homo sapiens
gaacatgtagtaattgtatgtatttatggggtacatagtggtgttttgatatatttatggcacagtgatcaggtcagggtaatgcacatatcccattctttcttctcttaccaagaactttctcctcattattgctaatgggtgtttctgatgcctccacggttgggacaggaaagaaggaggataggcaggagtagcaggaaagttctttcttgaacactttcatggatgtcagtactctttggttttggaagatggaagaaaagctgatcctgtttatcatgggcacttctgcaggttctttgggatctctcactcccacagttgggtatctcttatctgcagttctcttgatgaggatgaaacagatatattctggctgatcacttaatcattcctcaacctatttagcatttggaagtacctctgttcagccctctagatggcacctttggacaagttcattctggctcactcttgtatgcatggctcacatgtggtccatggcaaccttcctgcatcctctgccttgataaactccaggaataccacttaaccccaatgcagtccctctcttttgttcatccaccaaagcagccaaccagtttatctcccacattcagattttccaggcagagccagatcccagttcattgtgttctccacattgcaggtggcacacatcatactgcccaaatggtctccttcgagccccctctcttgatttagcacctctttaaaatgcaaaaatgttaaatttaccattctaacatgctatcctgtgttttttttattattattatactttaagttttagggtacatgtgcacaatgtacaggtttgttacatatgtatacatgtgccatgttggtacgctgtacccattaactcatcatttagcattaggtatatctcctaatgctatccctcccccatccccccaccccacaacaggccccagtgtgtgatgttctccttcctgtgtccatgtgttctcattgttcaattcccacctatgagtgagaacatgcagtgtttggttttttctcct

SEQ ID NO: 113218 - DNA, 1017 bp, Homo sapiens
tactgtttctgcactgggacagagaatgtcaggtccctcggaattttaaaggcataaggtcagctccatcacacatagatccctaatatgaaaaaagtgtctcctttttaatggaatactggcatctcagataccagtagagagtgtaagtatcaaacacagcaatttgcttatcaaagcatggctgaaacatgcatgattgaagagatctgttgggcctgagagtcaagtaaactgtagaaaatattgtatgtttcaaggaaaactgcatcatcaacagtacaggcttccagatgatccaattctagccctgcacattgtctttgagctatttttcagtgctttgtagattttaggtaactaataaatatgtaccttgtggctgttctagtagtgattttaatacaccttctcctcgatgtggaaaaactaattttagtccctctttgcaattcatctcctcatcttttactccttataaatttgtactgttttgactttctctttgaactggttataacatctgcccagttccttcatatcatatgacatgggaaagttttaacacgtgttcatttttatatatgtatcacagtcgtgcttttacatttttgtaaaacttattttttaacaactctctcttctgctatgctctcaaagcattgtttctccactaggggtaacaaggaaaactagtatgtatatatttcataaaatgtttttcatgggaccaaagaaatctctggggcaaatttttcaggatgaaaatgattccactgtagctcaaactctaccatgtctgttatttaccttaaggttctggtgctttctctgtgcctctgctcatccttatcatctacatttttatgtagcttcagggaatctgagcatcaataagatgaagcttgccagttctcgcatcctctggcatgttgtaaattgccctacgttctttctgaaggtggatcatattaatccatacaataattgcttttttcccctcatttcctactattg

SEQ ID NO: 113219 - DNA, 1012 bp, Homo sapiens
gaggggtgatgcaggaaggagacaaaaaattaaaaaatgaaaagaaggccaggctatattgtttcctatttatttggcagataagctcattgcttttcagaaaaaagaggaaggaaggatggagggagagataaaaggatggagaggtggagaggaggagattgatttaatacagagaaaagtattaaattgtatttctgtgacttcttagtgaatattaagacattttgtgactttacaactttgtttagaaaatattaatgtgatttaatctaaactgagccgtgtaaagcatgatgtgtctctttttcccccgtccttcttagagaaattcatgtatctccaaacttcatcttgaactattgaatttacttcatactgaggcttgtgtttaattattttggccttgtgtaagtaactttggctctgaggcacttagacaattaggggtccttcattggattagcaaaaattataaatgaattagtataatctcaattaaaataatatttcatctatccaatttaccattgctgtttacatgtggtctaatctaagtcctactctgataacacccttaataataaaattgactcataagactcagaggcatgagtgtgagcagatgttttgttttgccttcagaatttcacaggtgtccaaaaacattgtaaagatgcaagaaggggccaatctaaggacaaatgccctggggtggccaataaataactctgcttgtatgaatattttgctgatttgtagtgtaaaaatcagctattaaatttaaattggttcttgtggaaaattgtgaatccctcttctacagactttcttagaaagatttaagtatttttagagttctccctgatgccagattttgagctttctgttgtcttattccttgggtagctgctgtcttgctacccctaccccttatgtttatgataagaactagaaaattttattaagaatcttttagaagaccttttgaaagattttaataaaaatttct

SEQ ID NO: 113220 - DNA, 1075 bp, Homo sapiens
gataatattgctgtatatctggaaccagttattaaattttagtcaatagatccaatagtcaatgaatgattcttgctcctcaatttgcttcttattagttgtcttattctctcactgaatccagaatatggaagagattgtcatctaagcaagacatatcttgcatatgccttctagaaggggaagtgaaagcaccaagtccttaatgtgtcagttttctaagggcctacgatgtctgagtttcttgattgccaagaagcctaattcttcacagggcaacctggcatacagccatttccacactgggctgttcgttggtacttgtgaatagaacaaaaacggtctttgctttttctcctcagttatcaatgattatcatttttggaaacaagttaaaacatttttctcaaaatgatgattattcatgtcaagatgaagtcaaacttcatgctatctaagctgtaagtaatagagttagttcagtattttaaaaattcatgtaaaataaaatttgttacttctcactccaaaatattcattttgtaaaatttcaccttaactattgttagacagatgttctagatttagctaaacacttttgaaagtaaattatgaggtgggtttttggctaatttttatacttctataagtaaaatctgttatatatgaattatgggaccactagaagtcatagatcctacaagcaaagtgtttgtgggtcattgggttggggagctacttcagttgttttttttaatataactggaggtgtatattggatttttacctctgcgtagatctgtagtaagaactttgttcccattgtcatgcattatttctgtgcatattaactaataatataaaacaataagtattatgagactttcacccagttgaattagtttcttccttctcagtccccttcaaagttccacatctctttatagcatatgtagaattatggctttttgagttgtcggtatttattcacttgtacttatcttagaatatgttcttttatttttattctaggcatacatacatactttaaggttattacttcggtgatgttcag

SEQ ID NO: 113221 - DNA, 1170 bp, Homo sapiens
caacattgcgaatgaaaaccccagaagaaactgttatgtcctgtaactgtcctggaatgctatgattcagttagcagactgtgggtggaggtgggtcatggtgggtgggagttggggggaaggaaatgcaaaggatagaaaggagaattttggagggaaattaatcagacaaaacgttagagagaaacacacattttttgaaatgattttaaccttcttgaatctctaaaaagtactgtctttaaatttttcatttttttacccttgttctgtatcttaagcccttttgttagatttgatagtcattgttgcattgagctcttttctgaaaggtaagaacgtatttttgtcaaacacattgctataatgagtatgatgtgtggctgccattcttcagtctttcttcatttacatgtatcatcaatataatgcaaatactgtcaagggcagcattatctccttgaatctattttttgttttgttttttagtataggtttgtatttgtgctggtgcaggaggaagggggaaagtgttgggaagaaacatagaaagagagaaagaacatttactttctaacaaattttgacaatttgtttttctctttttttggtaatgatcaaaattatatattaaagaacttcccaaagcaatatatcagcttttattaaagaaagcaagtattttcaaatgctttaagaaacttggtgaactctagtataagggtttggttttcaaagggaaaaaaaagaattttatctggaaacattttaggtaatatggatcctccagttaatctatgggaaattatgcagcagatatcagccttcatttgtaatactgtaggagggtgataactttcctgttgcattttctttttgtaaaagacatcttttactttgtcagaaaacaacagtcaagttgtaaatggtcttcaaaaatagtaataaaaaaagatttataatggaaagaattgatggtatatttcacctaaagtaagaaagacaatgtgtaataagggattttgcggttttacagctcagtgcatgtgtttgaaagctgttctctcagcaacgtgggtggcaggttatgctaccatataatgtattgtagttggctctccacacttgtcagggttagtgttcaaccattcggaaaattttcccattgtt

SEQ ID NO: 113222 - DNA, 1050 bp, Homo sapiens
ttgcacaaatatttttgcagacttttccattaagcagtgaatgaagccctgaaagtcactgtagccaatgtgaaggcagaggatttgagagtagtaatggatttttagaaatgcttagggtgcgctcctgtaacagggcatttgcttttagggcagtttggcccaacaattgaacaaattagttatgtttgaaaatttataaagcaaaagcatagataatcataatataatttttgctagaacatatgttaagttggcttattagatcagatcgttttttaaaattacagtatgaaaaagttattcaacttattttaaaaattcttctttgcaaagaaattgataccttgatacccatggcattaagacagctttttacttctttgtgggctggcataatggacagacagtactttagccttggaaatcaggagtattgacgtgtgacattttagatgagtatgtgtgtatgtgaacaggtacatgtggatgcaagcatgtgtgtagaagatcacgtatacattcatatatgtgagagtgcatttgggttagaagtgatatgaaaaaaagtggagtattgtatcttagtaaacttttacttcattaatctccttcaagttgttgatcattaataattggatattcttttgtagaatggctttggaacttggcagtattctgtaatccagttttacaagatgacatggggagatgaccagggaatttactcatattttttttaggccgagtgatgttgatagaccacagtttggcaaagtagacagatctggtttcagatcttagttttgctacttactagctgtgtgaatcttggagatatatttggctcttttgaaacctcagtttcctcatatatagaataggtgaacaatgtctgtcttattggattccagaaagaattaagtaggataaagtttgcaaagtacttattcacattacctggtcacatagtaaacagtcagttaatgcaaattctctttttgggtgtgtttttaaaaaaataaataatattttacaacttaagccttt

SEQ ID NO: 113223 - DNA, 1942 bp, Homo sapiens
acttgcataagaaataactgagatactgatagtttcagttattcctgtatctttggactattcctccaatggttgaatttcctttttttttttaaattggggctgcttgaaaaacatacatgttctttagcaattttgaatattattctttggcagcattgttttagaaaattgttttcatagaatttcttcttagtatccatggacctatattgagggaggtggttgggggagaaatatgtcagcgctgtcaactaccagtagatggtattagtagttgcttctatagttaaaaatcgacacatgtgattaagtagacttaatgatgaccctttggaaatgaatctgtaagtagaagaatctctatactgtgtcagaaccagtaatgatacccacttcgtgttgactgtcaggaagcttagaaccaaatttgtgacccatgtggtaacaattgtatatatttatttctatacactaatcttggccctcagttatttattttgtcatattatggcatatttcttttcagggcccacaaatctttgatggctttggttagcacaaggacattacctgtcttgatcatcttgatcactcatgtagctgagtacctaccacataggtgctcagttaatatttgtgcaatttatttctgcagtggcctttgatatttattttaaagatagtggaggggcgtccgttttagctttactgaggaaaagaatccaaggcagattagttctaaaattgattcgactctagcagcctactttctgatataagcatgtgatcttagagaagataataatgactaaagggaatgtaatatagctttggggaatatagggcaatcctaatttgcctcttatcatagcccagaggttatgagctctggctaaatatgataagcaaggtactttagggaataaagagagactgaggaatgagaagaaatctctttctgccttcactgttctaccttagtatttaggtagccacttcacatttaagataataaaagggtaaaagttgagtcaaagttactgtcagccagtttgtaaaatctagttgaacaataatctcatcaatttaaaaattttatcatttctctgaggaaatttaatgaaaggcattgagaagtgttcctgactttaagaaacttattgtgaatgaagagttgccttgtgttgagagggaattgtctctgaggaaatttaatgaaaggcattgagaagtgttcctgactttgagaaacttattttgaatgaagatttgccttgtgttgagagggaattgtctaaggcagatatggaattcaaatttgaaacttttctgttgaccaggttcaggattatcggtagcatggaattatcatgactcactgaactccatttaacctgaagttatagtcatttgaaacttgctgatattcccccagagtcatattgtactcgccattgaacgcagagttctctaaccttggcttacagacggaaaaacccagtctgtttcataacctgcaatctgggttttaaatattgttttcagagtaggacagaagggtgagacctaagccaaataaaggaacatgtttctagattgtctttgccacatgctgctttaatcatggggtttggagcctgtcagatcagagttggaatcttggtattatcacttccttgagagagagtacaatttctctgttttttctgagcctctgtttatttactttaaaaaatgaaaattacaatgcctgtcttgtttgggtggttgtgaaaattagataagcagtgtaaaaacatctaccatgaacctaatatgtatagattcttagtcaatataactttacgcccatccatactacttttctctgttagctttgtaatggctgcttgctttatccttactcgtacatgactgtacaaggttggaaagtgctaga

SEQ ID NO: 113224 - DNA, 1319 bp, Homo sapiens
gtgtttatatttctatttagtgaccacatagcctcatgagaccagtaatacaaaatattatcaggtgataatgtgagttgttttcctggaaaacttaatgaacatactacttttctgccatagttctcactcaggaactacaatttttggatgttgctttaaattgttagtgcctagcttttgcagctcgtgatatgaatacttttatcttttaattatacatctttgtatgagatttatactgtttacctttttttctttctaagttaaataggagcctgatagcactttgctttttaaggaaagatgaagcagatcatgattttattttttctgttattctaccacaatatctaaatatataaaaaaaactttgctgcttctgactcatatactaaaacaagttattaaaatagtgtgaatttttatgaggttttcagagtcatcatttcattagttatagtactgatttaactgagtggaaaatccacctaaatcttttttatttttccgtggatgtttgcccactggagggtgtagtgtagtgtgtattgaaatgttttaatagattttcctttttttttcactagaaattatgaatttgtttacttgagatgcttattttttgtaattgttgatttgaagtagtaacttaaaaaatagtctaagttgagaaaagcatatagctgccttatttagcaataaattattctttttctatcctatttattttccttcattttagttatgaagcatgtattgtatctagatctttgttacttctattgataactctctacaaaggcatcagacccttcctttaataccctagaatgtgtattttaaccactatacctgaggacttaaattgaactttctgctgaatagtcacaagatactaaaactggatttggccaaacagaatatttttaatgacaaaattgaaattatttatgcttctcgttctactttcttgtattcaaaatatcctattccacataaattgaaaaccaacaatttaagaacactttataagatgtttgcaatttattgcttctacacaagagactatttctatatagaagtgataatttagcatttctgagtctacactgtctttctttgcagaatgcttcatctcagttgggttacttttgtgcatgaattcatgttattcaagagaaattttcaaatcaagatggtagtttttaaattcttaaatcccttgcgttttagcattatgttttgatttaatgttgttcttttcttttgctctcagaaggaaaaataatgtgtgagattttttttttatcatttag

SEQ ID NO: 113225 - DNA, 1034 bp, Homo sapiens
gaaaggtagttttctctttgctggacccagttcctcacttagctagttattttcaagtatttaatataggaaatgaagtaagtacttagtaaaggaaaccaaacttatgagaataatttctttgtctaaaatacaaatgaagaggatggaaatccttaatgcttgtttgcatgataaagtacctaatttggcttaactgatccttctttgcttgcatctggctcttgaccatgttctacataggtgtctgtataattaacatattatctgggcctatatttaacatactatctggacctatatttttacatttttcatttttgttgaaattaaaagatatgaaaatgttgattcaaatactccttttagcaaactatgatttttaaaatcagaagataagatgcattggaaatcttttcatatgatgaagtgcatgttatttttactttattgcttttagaagaaaaacaacagtgaagacattatgtatttatgcagactacaaatctgatgaaagctatactccaagcaagatctcagtcagagtaggaaataattttcacaaccttcaagaaattcgggtatgtctttcaaatttttaaaaatatgtcatcctttaacttttactcattagaagatagtcacagttgacattacattagacaggttaaaatgttaatatataagagaaaaatattggagaaaacatgtttgagtgtaaaatttttttcttctgaattctgattgttctctttattttttccacaatattttattattgaaattttcagacatacagaaaaactcaaagaattgtacagtgaatgccagtatactcacttcctagattcttcagttgttaatattttgctatatttgctttattacaatctgtccatctaatttttttgtgcatttaaaaataacttgtgcatatttgtccatttcaccccaaataccagtgtgatatattggtagagttatcaacatttgcttaattttcattttttaagataaaatttatgcacaatttt

SEQ ID NO: 113226 - DNA, 2075 bp, Homo sapiens
aaatatggagctcggaaaagattggattcccggccctgaactgaccacacagttgagaggaagttgaggcctagaagagcgcgcaacagtaagccgtgtcggcaccagactctgttggtcctactgacacctccagcgttagaatgactaaggctccactcctgacccaccggccttgaggaaagcgcaaacgtaaaaaaagattgaaaccggagaggcgaatgcatctgtttacgctaggaccacgctcgacgtcggagaaaagcccacacactcacagtttccagacctggctgcttgccgaaactcagattctcggcacctccagcagctggcttcgccaacggcgttgaacaagggtcgcagctcaatgacgtcatatctccctacctacctccagggttccgcctcacgctctatgtcgcgcgcgcgcactacgtcctatggcttgcgcgtgcggcggctgggcaccgccattttggccggtggccgtgagaacacgctgtgtggctgaaaagtgaaggcaagagctgatttggcctctgtgctcccctccgcaaggggatcgttttctccaggtacgtgaatagcccggagaggtttggccgttagctgccatctgccaggttggaaagaatgtagggacgttctccgagagcctttggttaggccttaggtggcggagacagcagcagcgcgtggcagcggttcctgcgggacagctggaactgatggagcgcgggcgacgccgagagcttgggggcgcctcggtcttcccctccagccgacccggctgtcgccgctgttgcctgccacacccgcgagggacttcgagaatggacctagatgccgtagtctccactccccctttaccccactcccgccctgaagctaaacctgctggagaggaaggcacctttagaacttacagcactctctagtacccccacactcctccagcacccaaaatggatatattgtcacatgtgcatatttggttgtgggaagtcgtggcttccacgttttgttgagtggaatgagtcatggcatcttgccgccatgaagtcgaatactcgctgtccactcccaggctttatagaaatgatgcccacatgtcactctgcttttctcagaacagcgtgtacgcagctatgactggggttgtcccaagtagtttcccagtagaaatcctatagtttttttggtacgcttttgtagcactaggcactttctccccttacccgtttttccttttattgtatctaatactcattgagatcaaggttgatgtctttactcagaatacctttattatctcttcagggcttcgtacattgtaggcatttaatacgtattgtgaatgaatgacagccaaagccgaattcccacctcccattaactacataagcttattttctcttttttgatggtaaaaatctataagaggaagaactgtccaaataacatgttttatttttttactctttcccaacaggactgctaactagtcatttatgatagtggcatttatgttgcagtagtttgtcccatattctgagaatattcattgtataccagccacctgacactaatactttgttagtgtaaccaaaggctcagaacctgtatttgaaccaaaagctgtttggggtttgtgagctttttgagaacttagttctcccctattttaaaaaagggagtttttttgtttgtttgtttgttggaagagcatctaacaattgggagagagggggagaaaacaatattaagttagagttcttctaaatgtcttaaacttaaaactctttgaaatcagagccgtgtaccactcctaacttctacgtgttttgtaagactaataaactacaataagcatgggttagactatttcatgtgatactaaacatcattagttaacagcagtctttgaaatgcttttacacagcgttacaattattttggctttagactgtaaatgcttctaagtattcctcacttccttttttcctctcagctgtaagaatgacactgagggtcattgttctagtgtcaattttgaacacttttgtcttcga

SEQ ID NO: 113227 - DNA, 2222 bp, Homo sapiens
aatgataaggtctaggatgtaaccagaaaaaatgaatggctgtggtaaggtagaagacaagctgtttgaggagaggggttaaatgagaggacaggagggtcatctgtgagcatattgaaatcgagaactatgtcaggagttgtaaaagagtgtgtgaaagttaacaggggctgaaatcttcaaagaatgaaagggagtgatctggtggtcactactaactaaagcagttagatagttgagatgcaaaactttttagggaggagggagagataatagtctaggacagcgtcgaggagcaagatctcttatccccatccaagcctaatgatattgatgggtgtgaaaaagacttgagatgtctacaaagggaagcagtctattaaaaaaaataaaataaaatcaagattgattatcacagtaagaaaaagacaacatgatctctttctaaatggataatcttggtttcagattcattcattacatattggaataaacttgagtattaaggcaccttttggaattttttactttaatcaccattctaaggaaattaatttctgaaccactaagcccaatattgtgaaagatttttaagttaactttgatcttaatgctgtgtagttgattaaattggaatatcaagacttataaaagctttaaaagtgagcatagtatatacatatagttatttggtctccttttaatttcattgctattatgattatttgccatttctgtcagtgtcattatagtcagatgtacacgacgtgaagtaatgcttagtttgggggaagagcttgtgggatttcccccatcctgcttcccctttttcagttttcctggctattaataattctttttccattagagctttagatttgctttgtctgggttggttggggtttttttttttttttgagactgggtctgactctcatccaggctggagtgcagtagtgtgatctcagctcactgtaacctccacctcctaggctcaggtaatcctcccacctcagcctccggaatagctgggaccgcaggcgcacaccaccacatgtctggggttcttttgtttgttttttctcatgagattgaattaaatatataaattcaggaagggtttaaatctgtgatattaactattctttattataaaaactgagatagcatgtcatttgttcaggtcatttatatcatttggtgttgttttaaagttttcttgtgtatatatcttgttgagtatattcctagatattttctttttgtcgctattgtaaatgacatttttttctttccttatataaatcttctgattaaagtatatatgtaaaatttgattttcccaaccttactagattatagattattttacaatttttacatttgtcaaaatttatattttttttttgcagataatcatttcatctccatataatgatcatttatgttttcctgtctttcatgtatgcaaattagttcccttaactaatggcattaaatttgttgatttttctttcatagaagagctggatattctttcgcccagttatggcagacaagttaacgagaattgctattgtcaaccatgacaaatgtaaacctaagaaatgtcgacaggaatgcaaaaagagttgtcctgtagttcgaatgggtaagctgttctgtggatcatttaagtataaaagaaaaccatgaaagaaatcaactggtttgataattctttacggacattaacataaactttgtgttcaccattagtttcataaaactgtgaagacaagaaaagtagtttgttctaaatttcttttattgctttgtgactgaaggatcatattttttaaagaaagaccaaattttagaataatacatcaatatttaaaagtgtattggatgtgaactcaaagcagagttcagcttactgatcttgaaatctacaaaatcttataattactttaatattatatatatagtaattaattactataatcaatgggggaagggttacagtaaactttgacagtattttcatatttaaaaaatgaacaaagagcttaataagaatgactattcataaggtttaactatattttgaagattagataaatttccaacaattcagttgaaaaattattggtagtcgttaagggctatgttaagtaattgtgaatatacgaatgaggcatagaattactgactcttagaattactgaaacttagaaact

SEQ ID NO: 113228 - DNA, 2035 bp, Homo sapiens
tttaggagccactgtgtaatgttcttaagttagatatttttatttgtagatattataaaatggagcttcaccagagtgtgaatgccgccctattaattgttcaaataaatcataagtgtattttgcttttcatttctgaatccttgattaagtatccagaaagatatcttggatacctgaaaacattttcacttgttttgaaaatatgagcaggaaacattccttccagcttaacctcttattagatgcccttctatgtcctaggtgctaggaatctgcttttgaataacataatatctgttctgttttctttctttgctgctatagggaaatgagacttttattaattatgttcgcctccaaccttaagttaaaagccacaagtgttctatttgcatatataatctatttcctgtagcattcatcctctttgtcattgtattattaaattcacatgattctgtattttttttttttttttaggatcctcctgactggcaggagattttgacttatttccgtggatctgaattacaaaattactttacaaagattctagaagatgacctaaaagccatcatcaaacctcaatatgtagaccagattcctaaggctgcaaaggtcggtttttgatagagggaacttaacggatattagtagaagtataaaagatatatcaaaataaacttgttttactttgtgattctttttaatattgaaagaaaatagtaactgtttttggtatattgtggcaggggacagtgggatctattttggaccgaaaagatgaaacaaagacacaggcaattgtatgtcagcagcttggtaagtgtttattttttgtttgtgtgaatatatatttatttattttttgagacggagtttcgctcttgttgcccaggctggggtgcaatgatgcaacctctgcttaccacaacctctgcctcccgggttcaagcgatactcctgcctcagcctcccaagtagctgggattacaggcatgtgccaccacgcccagctaattttttgtatttttagtagagaccgggtttctccatgtcagtcaggctggtctcgaactcccacctgcctcagcctcccaaagtgctaggattacaggcgtgagccactgcgcccggccattttgtgtatatatttcaataggccctgaacttaagtgatgaaagtacacatctttatgtggattactgaaaatctccagtaattgttatatttaaacaattttcaactgaaatagcattcaaacttcaaatgatgacatgcagtatactttttacctggaagaggtgaaatacattgagcacaatgcctctatgttctttgtagatttaacccacctaaaagaacgaaatgttgaagatctttcaggaggagagttgcagagatttgcttgtgctgtcgtttgcatacagaaagctgatatgtaggttactttacaatttttgtttatcttcatccgtattgtagagttttcagttgtgatgctgctaatagaggaatggttttgagagaaattaatagaaatagtatctaagttcctaatttcgaggtaagatgttgaagcagttgtgtatccactactcattttccctgttatattcacaggggaaaatatttatttatttagatagtttataactgataggtgccggaactttttatataaagtcagttattcattatctaagctctctttttttgagacggagtctcgctgtgttgcccaggctggagtgcagtggcgcaatcttggctcactacaagctccacctcccgggttcacgccattctcctgcctcagcctcctgagtagctgggactacagacgcccgccaccacacccagctaatttttttttgtatttttagtagagacggggtttcaccatgttagccaggttggtcttgatctcctgacctcaatgatccacccacctcggcctcccaaagtgctgggattacaggcgtgagccaccacgcctggcctaagccctgtttttatgtgaaaagactt

SEQ ID NO: 113229 - DNA, 1068 bp, Homo sapiens
aaataaatttatattgcattataatccttttcataaaaagatattgggagtttttataatttataaaaagtacataaatattaagatgtggggaagaaatggttgtaacttacctacttatacatttgagatagatgcatactttaaagaaaaatttgcagttacctagttttcttgccagtagtcttaagggatgacatcagaacaaatttattaatgttttattcttgtcaattaacaaatatgtattgagtaccttactctataccatatggtagtctttgaatcaagttgataataatatgggtactcggcagtcattcttcacaactccagttataaatgtcatgtctaaaggctgtgccattcagtaaatggtacccagtaaggtttttaatgtgctcgatctattaaaacagcttaagaaactttagtttttctctgttcctttaatatattgaaatcagtgcagcatacttaaaagctttctataaactgtaaaggtgattatggtttgaactcatttttaaattgacaagacaaacattgaagtaggactgtaaagactgacttgctgtgttttttttaaacgaagtcacttagttctttgagcctttattttccaaaataagttaggtatttgaaccaagtggctgctaaggttcctttgagtttatgtttttatgtaattgtttttatttaattttttaacttcacatttataggttttagatagtttaagatcaaaaaacatgctgattttggcaaaataaatgtaatctgttcatttgttctgtcagcaaagatgtattgaacacctgtgttctaggatgaggatacaggctgcatgatgtgtctctcagttccaaataaaatgaataacgtcaagaccttccaagaaacttcagctttctcttcacttaaatataggaaacactgaaatatggattattcattgtttctcaaatacgcttttcatttcagtgtgtctgccattgtagatcttaaaattttattacagagggttcttgtatacaatgtggatttaagttattaaaatctgtttag

SEQ ID NO: 113230 - DNA, 1221 bp, Homo sapiens
ttcctttttacttgttggacatgatgggttttgaatagaaaatctcaaaacatgtcatagatggtggatacacattgatatctgttggtggcaaattgatatacttttattctgaagcttaactttgtcaagattcataaatagaagagttctatagtgaaagtttatcatttaaatacttttttatattaaaaacagggaagtgttcgccagttactacatgaaaagataagagatgcttatactcacccacaatttgtgaccgatgtaatgaagcctctgcaaattgaaaacatcattgatcaagaggtactttaacataattttttttatttttttattattttgaattttggatgcctttacatggtttgctaaactcctccaattaggtgcagacattatctggtggtgaactacagcgagtagctttagccctttgcttgggcaaacctgctgatgtctatttaattgatgaaccatctgcatatttggattctgagcaaagactgatggcagctcgagttgtcaaacggtaaatatcttgctcctagccatattttgattatgtatactgtcctacaagtgtgcttaatataacagtcgaatgttttatgatagaaagctataagatttcaaaatcattgtgttttagtttcatactccatgcaaaaaagacagcctttgttgtggaacatgacttcatcatggccacctatctagcggatcgcgtcatcgtttttgatggtgttccatctaagaacacagttgcaaacaggtaaaattactttttaatatgttcaaagtaattcattttaaattttccagtaaatagtaaagtcactcactttaatttttaaaaaatgaaagctagaaattctagacttgattctgtgactcctgagatcattggtattggggactggatgggaccatgtggaagagtagtgtttaggcttcagtgtggaatccctcaccaggaagataaaaagctgtaggccacagcataaaaagctgtgggcccctcaccttttctcagcttaacttttgtttgctttattatttgaatttcccaaaaaagattgaaaactattgctttcatacatgatagaaaaagaaaacaagattaaagaggttacatgatttgtccaacttatgctgacagtgattgagctcacagtggatcccaaatatctggtattaatctatagcagagttaaa

SEQ ID NO: 113231 - DNA, 2237 bp, Homo sapiens
atcttaagattgtcataccttaatcctaataagagaacagctcaacaagtaggtaggtgagattgttactggccagtattggaaaaaactttatatatatatattttgtgtagtaggcagatctcaaactgacagtatgctgcattttgaatctggagataaaagttgcattgatgaaaatggaatttaatagttttcctagaaataataacacatagcaaaattttatatatgtgaggcatcttatataaagggactttacttgagttggtgcaagtgagtcattctagcattagggatggggcagaggtagttatctttcctttgagcagtggacccaggaatatccagaaacagatggtatgtgcagaacaggttgtacaggcactgttttaagcacagctaagtaataccatgagtgaaagtctacttttacctatagtagaatcgtgttgctgatttttgtggcttctgttttcttttttaggatgtagaacaaaagaagagtggaaactactttttcttggatgattagactgactctgagaatattgataagccatttattaaaaggagtatttactagaattttttgtcatataaaacttgaatcaggattttatgccccacatactctggaacttgaagtataatatacttaatataacataaaaagccagttgggttctaaattgtagttgaaacacagaaaatgccacttttctgttcctgaagaggctcttttgtgcataatattctaaaatgaagacatttcaagctatacaaattacttccaagttttcatgatgtatgggaagattttcagtaggtgtattatattcacggtaccaaatgctgaccagtgttgctccattttttaaatcttgaaaagggtttctgtacttacctggtttgccaagtatgccagtgtaatgaaactgcccttattttaaaagccagtcaaagattccactgattgacatttgataaataaacatcaggattatgtttattgtttgttttcagtctttgcactatattaccagtatatggtttccgaggaagattatctactgcaaaacaccactgttggaaaaataggtatttttaaattgtttttaatcttttttggtgcttttaaacatgtttagcaaaaaccaattcagttccattccccgcaaaaaacccctaactttactctgaactttttttgtttttgcattccatgaggttctgtattcagtcattctctaggtaatgtcatttttgtacacatatatttatataatcactgattgagatttaggaaaaagcatttctaaagaatatttgcttcccttagaactacagactcgaaatctttaaagatggtgcctaagcatctatgtattttttttaagttccacagatttttctgttgggcagccaaggattataaaccacttccctaaaggcaacattaatgcaaaagtccccagatggcaatacaaagtatcccctggtaccacatatattcatttgtgagtttggatatagagcacattatctaaaccattttgtagttccaaaaacccatctaaatttcttgagttcctgaattttgaacaggattacctggagcctggagccactttaagttgtacttctgactaaactggaattatgagtgaggaagagtgtttactaaataaatgactggggcaagcaaaattgaggaggaaattagaaactgtttgacaaactttaagagctacttgaaataacagaagtcttgattaatatgcaaataatggctagaaagtatggtttaactggaccctattatgccttttaaaaataatttcagtaacccataaatacatgttgtaaaaaattcaaatatacagaatggaataaaaaaatgatctccctttattaccctcccaaaggttaccagcgtttgaatttaataatgtatattctttcatgcttttttctgtgcacttacctaagtgtgaatatgtaaagggtttgttttgtatacaaatgggattatactaaaataagtaatgcctatttttaaggataggttaaatttgtgaatgatcatttcaaatatattgaataaaataagcaaaagctattgttatttactgatcctggattgtcttaaagaaagtacttgtgatataagagcacagttctacttactgctaatgacagaatatgtattaaacgtattttcatgtaaatgaaat

SEQ ID NO: 113232 - DNA, 1434 bp, Homo sapiens
tgcagactgtattcttgcagcgtgttgtttcctttgtgactcaaggttgaattaaaatgcctgtgaactgcaaacttgcttatgattgacttggtgcaataaagttcctttctaaccatttctggtttagaaaacattcagccatcctagaaactagcaatatttatttttgcctctttcgttttaccttcatttttagatgaggtaaatgttttgtcttttacttaagggtactaagcaaggtccactctagtgtagctgaagagaatgcatatttggctacactatttctgtttactgtattttgcttcctactttatgtctaaatgctattgtttgtttaaaatcctaataatgtctcatttccaatatgttattttcagataactaaggttttgctactaatgtcagccatttactctcccactaattgggattattttttaaaagaggtctttctccccgaaatacaagttttagaaaatcttagaagaggggtgggtgcatgtcttaatgctgggaagcggcaactttggggttgaacttacttgaatggattaaaaattgcattgtgttacagagctagaaaattttatgtatgaaaaacgataatagccttacactgagtacaaataatactttaagagcatgtgaagatgtgatcatttgtgatgttacttgtaaaaaaaagtatatatacatatcttttgaagtgttaaaaggaaactagtactttatattctttatcatatcactttttgtaagtgttgaatatattcctgtttatttttctatgttctgttttgtagccttaagaagtgtttcaaacatatctgaatgtataaaataagagtaaatgccctacatggtgtgatgctgcattatatataaaactgtgtgcatatattaaattttgtctcttgattctgcttgtgattctttggttccagggttaaccaggtaatatagcatgtagatcttgagaatttttgtaaactccttaaaataaatgatttccatgacatgtttccagctagaagacaattctcatacatgcaactaaaagccatgtagaatttataatctatgggtactgtgtaattttccctagtttatataacgaaattgaggccaagttacttgcttagggttatgcaactagtaagtggtaggacttgtatttgagtctagttttaagtgattttatagctagtgctaccattttttttctgcaatgactaaatgggaatgtgcagaatatctaagaatatggattaaattgttttttaatggtttttacatttagcattcagtgatatttatgttggctaaaggtgaaagcaaattgagtgttttgaaaacaaagtatacttactttatactctgaaaactcaatttcttaaagcctgtttttctttataaaagttaccaaag

SEQ ID NO: 113233 - DNA, 4187 bp, Homo sapiens
cattttcacgttggttatcacagtgatttagtatttggactatagattatatggtctttgtaggcatgagaaacttattttgaccctagtacttgtagattgatatccacccaaacctctcttttttctcctcttttgtttatttaactgttttttgtctcttcaggcatacagttgtcctatgtgggccccacattcttacctgtaccctctgcaccaggcctacctggcagcctgcaggatgtacccaaaggtccctgtccctgtttatcctcataatccctggttccaagaggctcctgctgctcagaatgaaagtgattgtacctgtactgatgcccactttcctatgcagactgaggccagtgttaatggtcaaatgccacagccagagattggaccgccgacattttcttcacctctggttatccctccatctcaggtgtctgaaagtcatggacaattgtcttaccaggctgatcttgaatctgagacccctgggcagcttctgcatgctgattatgaagagtcactaagtggcaagaatatgttcccccagccatcttttggacccaatccattcttaggcccagttcctattgcacctcctttctttcctcatgtttggtatgggtacccttttcagggattcatagaaaatccagtaatgaggcagaatattgtcctgccctctgatgaaaaaggagaattggatctgtctctggaaaatctggatctgtctaaagattgtggttcagtttcaacagtagatgagtttccagaagccaggggtgaacatgtacattctctccctgaagcaagtgtgagcagtaagccggacgaaggccggacagagcaatcttcccagacacgaaaggcagatacggcattggcttccatccctcctgtagcagagggaaaggctcatcctcccactcagattctaaacagagagagagaaactgtgcctgttgaacttgaacctaaaaggaccattcaaagcctgaaagaaaaaacagaaaaagtaaaagatcctaagactgctgctgatgtggtcagccctggggccaactctgttgatagcagagtgcaaagaccaaaagaagagagttcagaagatgaaaatgaagtgtctaatattttgagaagtggtagatccaagcagttctataatcaaacttatggaagcaggaagtacaaaagtgattggggctattctggtaggggtggatatcaacatgtgagaagtgaggagtcctggaaaggacagccaagcagaagtcgggatgaaggttatcagtaccatcgaaatgtcagagggcgaccatttaggggagataggaggagatcagggatgggagatggccataggggacagcacacttgatggttgttgccgaagtattttctaacagaaactcttaggtggaatgtttctgaaggctttaaaaaaaatacaataaagtaaaaaccgcagttggaactctttcctctccccagccccccttaccttcactcccatactggacaagacattttggacatgagttcaagggggcaggttaattcctggcattgccagttttcttcattcagaatctgtttgttgatcaagtgactgtccccgtaaaaagtagaagataagtttgttaaagtattttttataaacagcttaatataaaacattatagatttagtgtttggcttttttccttataagtttataagtttgatttcagatgttggaaatgtgtgctttatagtgtttactaaagtgacaagaaaatataccatttgacacactatagattccaaacataacgttgcaccaaatagaaatgtatattttattatgcaatgccttagtcataaactgggctcaaacaattctcagcctaaaacactgttgtcttttaaaatgcttccaacccaaaggcctttcatctcaatatctgtcaaacttgaataatgtcttctctttaatattcacataaggcagcctattaactgtgtcttagcaatgttgtatatagttcttttaatattcataaggtatatttttgaattttggtatttgttgagattgcatagaagaatagtaggaaatccaatgaaatggctgtttccaccaagaattcttagcactggtgtaaatatcatggtgcctactcgaaagaaatgtagatgctatgcattttgaaaataatctgcatcagttagaactgcagaagtttttttaatgccactttaacactaatgcactgacagattctaaatattttgtgagaagaaatgttaaaaatttttagcttgacaggtttctagagttgttttcttcctcccccccccccccgcaccattggttgtgtatcactttcactttacacttgcatgttctacttgtcagggctggaactattgtatagaagataatatgattgtgacttctagttcttttctagaggatgctgctagaaaatggttttgctttgtattttatagcttgttacccttaggtaggtaacatcttacattctgttttcttccagtctttgcagtattcactagaggttccctttgcatgttgcactctgttctcatttggagattgaactctgaattaacacagtattcattcatctgtgttattttgtaaaaataactgtagcttatattctttatttgtgcataccaatgtgaaaatccactcttttattatgttgagattatcttctgatcaggaagtttgagtgctatgcaaataacatagtagtaatttctctttgcatgccatgtgtaatatacctagccaaaaccagatgcggtgactttctttttttgtaaagcaaattacttaagaaaatacaattcacttgaatttgacaaactgaaacagatgggttttctgggttctctgataacctatgggaatgtttggatgccagttgggctagtgaatcgccactgtactgtaataatggttatttacctctgtgctgttttaattacctaacgtctgtgtaactgctgatttgagtagtgattagcatttagataatgtaacaggattttagagagcactttgaaagataacattttattatgatggtgctaggtaaaaaattgtaaagactgggatggttgtgtggaaaacttttcttgagagaacctattgaaaggaatttgttgtcaccttcttaactagaatagttgttgaaggtaccgcttaagccatttttttcttaacatcggtggctcagttaaggaatgagaagatagagggtcctccactttcagctcatgcttttttatgtaggactagcttacctgattttaatgaaaatcacattttgatacaaacaccagatttgaaagttcaatgtgtttgatctcaggagtccaaaataagttgttgcttctagtgtcctgcattttattgactggggtttgatctcagcttctgaaaatgtttaaaaattggaaggaaatactactcatatcttcattgtcactttgtcttacctcaattgagtaacagaatatagctcctgaaggaaacactgatttgctttctgtttcccatatctcacctctaggatatgatggaagaagtgcttgaaagagaattttagcagatggtacttttctcagtgacctctggaataaaagaactgacttttgatagttttaaaattaatctttgcatgaaggttggtttcgctttttttcctttaagtttgtttttaaatgtattagtccaggggattttgccttatgctgaggtcaaactaaggataagcaagcttttgtccttcattttaactgttatgtcatactgttatgttgacatatttctttataagagaatagaggcaaaagtatagaactgaggatcatttgtatttttgagttggaaattatgaaacttcaccatattatgatcatacatattttgaagaacagactgaccaaagctcacctgttttttgtgttaggtgctttggctgaacttgattccagcccccttttccctttggtgttgtgtatgtctcttcatttcctctcaaatcttcaactcttgccccatgtctccttggcagcaggatgctggcatctgtgtagtcctcatactgtttactgataacccacaaattcattttcatggcagacctaagctcagaccctgc

SEQ ID NO: 113234 - DNA, 4109 bp, Homo sapiens
taatggactgttacgggaggttacccagtataccagtataaaacattaaagccccacacactcaggtgtgtcttctggtctctgtggacttccttagaggcttgaggaggagctcagttgaaaacaggtgatctggaatagcagtttaatctggcacaggcattggagtttaggaattattggaagaagtgccgaatccatttaggaataattgaagtgcccaaatccgtacataaataagcattgtttatgtgcaaagtacatttatctctcatgtcatgtgttattatataaataacaactacaaattgtttaagcttgtattcataccattatgcatttttcagttagtgaattgtaaatgtacaactactgtaatgtgggtacagatggtgaaatttctttcttattaagaatggggtccttcatactcatcattttagactaaggagtttgatactgattgcttttgatagtggctcagatttgttttctagaaaactgttagagagggctgagatcctcctcttagctgtgtggaacatttatttagaatgccaaaacaggaacctagaaccctcagtgataatttagcttaaaaacctcacttatttcagtcccttatctcatgcagagtttaagtgatttgctgacagtaagcatttcagtgataagaatcctagtgcactgtatttgctaatttgcacttaggttctccccaactccccaccaaaaaatatggcgctacaatgatttttttggaaggttggcacagaagatgttgttttttttgaaagaaaaattgtagggtaaaggtttgttcagggtggcttcctgaaatagggatatgaagattaagtctactaatctaagttgaaatctgattgcttaatcctttcaacttagcgataagactattattctagggtgtataattaattatggaccctagattctatcttctttagtttcagttaaaaatacagggctgtgaattttaagattttagaagtatgaagagtgagattaattacagaatttgttcatgtatctgtgggtaaatctttaacacaaaatgttgggttttgttcattttaaagagctcatcagtcaatcagtcagcttctcagagtagcaatccatgtgtccagagaaaatcatcacatgtaggtgatagaaaaggaagcaggcggagaatggatacagaagaacgaaaagacaaaggtaagttatctcatcattagaaagcagatgctagagatctctttagatgactggcttaatgtcatatatttgggaaagaaccctttttaagttgttaagtagtttatctaatgtcacatattttgaatgttgcagagaagtattgactcaagctaaaggatgttaagtgctattctaaaaactacattttcactgactaaacatggttcaaataatacttttggcttcttctatcttcgtattttgttcttctgtgttcagacatgactggtggcttatgctgtcttttttaatcttgatctgctatagactctattcatggacatagtcagttggataaaagacccgaaccaagcacattggaggtaaaagttttaaacactacttgcatcttttctttttccttaatactgtgtagtacagtaggaagaagtggaagaaggtgaaaataatttcgaaattttatagctgtgtattaggaaagtagaaaagcagggaaaagatgatggggattgagaagtcactcacaaattatgacagtttcttcaaggtacattagggtgccctgcctgaattgttagaaagtagcctttattctctgtccctctagagtgatgtttttaaaggagaagagtataatgtttgaagccttgcctccagtgaaaactgcccagtagtttgatgtaataaagatgttcaggcaaagttagcctacctgttgaaaataacatataattggaaaaaatactcagtggtgagagggttctgtcagatacaggtagggtgaattataaaaggaaaccatcaatattccagaatgtgggtctctgaaatacaaaactttgcttcttttttgcttccaaagaatattactgatgataaatatgcaacagtttcatcaccatcaaagtcaaagaagttagagtgcccttctcctgcggaacaagtaagtatattgttgcatttaacattgaatgctccactctctgggtttctgtgctctgtgtatagggtcatttaaaaacagaaaacatcagtatgggaaatgggagaattttttctggcatcacagtttggctgtggttatgatttttaaatgtattctgatgttagtctagaatgttctctatttatggaatgttatagaaataaccaccattttctggtgattgagaccatttttttgaattgactttgaatatatttatatttgttatcgttatatttgatactttgtattactttggtagatttccttgaaaattagatttttgaagggaaactgaatttctactttatttcaaaatttaaaagagttatctgcatcagttatttcacagatgggagggaatgtactgattgaaaaggtttgaaaaatatacattaaaaaaataccaatttacaaatttcatgatgaacctgtgttctagcagacattttagttcttgactaatacaagagtagagaaagttaaatgttaaatgcctttcaaccaacattcttcatattggtaagaaagcatatagttacatgaggagtttttctaaataatcatgaatttcaagatttcaatgattttgctcacttgccttaaaagtattgtgttgtatttaactctgctagtggataggtgcggtggctcacgcctgtaattccagcaccttgggatgccaaggcgggcagatcgcttgagcccaagagttttgagactagcctgggcaacagggtgaaaccctgtctgtattaaaaaatacagtccttgttggtaggcaacccttggttaggatcaaatttgtttgcatattatctttagctactgtgtgtttttcttacatttctaagactataagggctatttgtacttcatttgtataaaaggcaggcaactcaatatgtatctggtggttagaaatagtgttaaagcaaaatgacctcttgtctttttctgtcttcccccactcacccctttcttgaagaagccagcagaacatgtgtctttgtcaaatccagctccccttctagtttctccagaggtacatctaactcctgcggtgccttctttaccagccactgtgccagcctggccaagtgaacctacaacttttggaccaacaggttagagaagggtttagaaaatctagccagccaaaatacctttctagtcagagacttcaaattcttgagtggaagtttgacctctgagcaggattaggtgtgtggagcctcacagagctttctgtgatactctgctttgctctgcttccaatgtggaaagaccatgtacatttggtgttgtattcatctgacatatgccctcatagtctcaggagcatgatgtttgagctggttgctttggttgctcagcactaattagcaccacggtttgatgcttccttcatgggccagctctttatggccccgtaatgaaccccttgaccagccccatgtcctacacgtgcctgcaagagctactattagaagacattgactcagagcttgtatcctggacgtatttccttcttggtgtccaggagggctcttggttgatactaaaaggtactactttagattggctttatcagttatacagcattctttataggttaatgtaagcatatttgtagagattttcatcttttgtcattttgattccttttcttctcttttgtaggtgtccctgctccaattcccgttttgtcagtgacacagactttgaccactggacctgattcagctgtatcccaagctcatttaacaccctctccagttcctgtgtcaatacaggcagttaaccagcccttgatgcctttgcctcagacattgagcctttatcaagacccactctatcctgggtttccttgtaatgaaaagggagatcgagccat

SEQ ID NO: 113235 - DNA, 1391 bp, Homo sapiens
tttgtgtctcccttggtggtgtcataaacaagtgggaagatggtcctagtgtctcattggaccattggaccattcccctttacttagaacagaaagtgagaatgcttttgagacctaaactaataactttccctttgagaattaattcttaatgaaaatattggaatatggtataacaagtatatacagtgctcactcatttttgtatcatttggaaataagtttttttttcttttcccctctacctcccattgctgtttgtcttcttgactctctgtaaggtaggctaatgctacaggagcttccatttgcttaaacattcattaaccagactgccaaatgttctaaaatgtcagtgtagctaaattagtaaaatgtttgtgttgcaaaatagatcattttattttaggtactcagtacagttttgtgttttttttttttgacaagaatgttttatttatttatttatttatttatttatgtattttctgacaagaatgttttatttgacagaaaacctgatcgtgaaagagttgaggattttgatcacacaagtcgagaatctaactatttcggcctttccccagaagagcgcagagagaagcaagctatagaagaatcccgtttactctatgagattcagaacagagatgaacaggctttcccagccctttccgtatgtatgaaaagacagtttaaaagtcattatacagaagtttctcttaatatagtttttagattaagccatagttcccaagggtaaactaataatttttaaactctaaatactttaaagatcacatttttcacatttttcctatttttccttttcacatatttagtaatatctctagacctagagatattactaaaaggttgatgatagagttgaggcaagtaaactggtttgttcacttgtagtgtttcgtgttttcttttgaactaaaatgtgtttaatttgttagcaaaagtactgtgtagtagaggttcatgatttagttaatccattacaagatctatgtgtaaaatcaggaagcccttttgagagctgtctttcagggtgtttgctgttggaggtggtagcacatgtcatcctgtggctttgtcctttctccatgtgtcaggcactgggctgtgatggatgcttctctgataaaagaagtgttctctatcttcaggtttcttaattctttttgggaagtcagaagggaaaactgttctcatgtagaatgaagtatgtgctctgtgaggtgggtttgttggcagcacagaggaggggtacctaattcattctcatgtctgggagcctgtgcctgtggtcttttacatcttggtaagtagtacccaaatgacctatgatccagaatggtggttggacactttctctcttt

SEQ ID NO: 113236 - DNA, 3443 bp, Homo sapiens
ttgatgaagaatgaaataccagcttgaggactttgatttactgctaaaagtgggaggttgcttaaagcattgtcctgtatgttgtacttggcaggtgcacaatttcagtgtgggcagtttataggaagaaaacttaggcttatttactcttttatcatggatttacaactgcgtaatattaattgtatgctagagaacagttaatggatctatttttagggataaaaatcacagttgcacatttttaatataggaaaaatgggaagataataattgtaataatagttgctctcacttgtagagtggttgctgtgtgcaagttggtattctttatgtgtatcctgtgcaccctcattccatctccatgagttctgtgacgtaggtactattattagctccattttgcattatgaggaaactgaagggagagaaaaataacttgcccaaggtcatattgctggcaagtggaagagccagacctggaagcctggggtatgtggggccacagccctgccttcagaaccaggacctgctgcctgttttgtttagagccttaacatattgtgctcctactttttgaacaatttagaaaataagtgttagaaaaaaatttagaaggacaaagaagaaaaggttttctttcttttaggtaggagatatggaggtctgggaggttaaggagatggatttgattgtagacctatttgaacttattttgtttttactgataaactttattttctgtttaattaaagactaaattttaaaagctgggtgtggtggctcacgcctgtaatcccagcacttcgggaggcctaggcgggtggatcacttgaggtcaggagtttgagaccaggctggccaacacggtgaaaccctgtctctactaaaaatacaaaaaaaagaaaaaaaaaaaaagccgagtgtggtgtcacacacctgtgatcccagctacttgggaggctaaggtaggagaatcccaggcttgaaccagggaggtggaggttgcagtgagccaagattgtgcctctgcacttcagcctgggtgacagagtgagaccctgtctcaagaaaaaaaaaaaaagaaccgcaaaaaactgataagtaatgcaaaggaagcaggtgactgattttttttttccttttcatttttggaatttttaacaggttaggttggatcacaatggaaaatttttgaatgcagatgttcaaggaattcattctgagaatggaccagttttggttgaagaactgggaaagaagtatgtactactcttcagctaaggcatttactgcctcctccatttagcctaatcatgagcattttaaaatggccttcagtatttgcaaattcaatgaaagataattgcccatgtatagaaagtatatttgggccagggacggtggctcatgcctgtaatcctagcactttgggaggccgagatgggtggatcatgaggtcaggagatcaagatcatcctggccaacatagtgaaaccccatctctactgaaaatataaaaattagctggacatggcagcgcatgcctgtaaattccagctactcaagaggctgagggaggagaatcgcttgaatcagggaggcagaggttgcagtgagccactgcactccagcctggcgacagagctagacttcgtcttaaaaaaacaaaaagaaagtatatttgttccgacctctagaaaagcactaaatgtgcaaatttagtattttgcacattgtcaaactttaaatgaagattatttgttttgttgcttactgtttaaaatgtaccattgtgcacaaaggcagttcaagaaattgactagatcgtaatatgggaactttggagggattcattttaaattcattcagtactgcattgcatgtagttagtattcagtcagtgtttgtcagatggagtagcaaaatattgttggcttaccttatacagtgttattttagagcatctttgtttcagttgccgctgggctttattagagaaaaaggtagtaagtcacaccttaaactttactgtggaaaaatttaaacatatacaaattaagaatagatccccattataaccagcagcacaatttttgaatcccaatataactcaacacccatttttagcaactaacagcgtttggcaaatttttttcattttttttgagatggagtcttgccctgtcacccaggctatagtgcaatggcgcaattttggctcactgcaacctccgcttcccgggttcaagtgattctcctgcctcagcctccccagtagctgagattacaggcatgtgtcactacgcccggctaattttttctgtttttagtagagatggggtttgaccatgttggtcaggctggtcttgaacccctgaccttgtgatctgcccacctcagcctccctaagtgctgggattacaggcatgagccactgcacctggccttggcaatattttctattctattttccctaatatgtttttaaaaaatgaaaatgaaattggcatattttgaaggaatccaaacatcacaccatttctccagtagatgtttatatgtttctctaacagaacaaagacttccttccccaccttaactacagtaccattatcctaacagaataagtcattctgtatttatttaacttttgcttagattgtgattcaactgtctttttttaaaattagaaaatatgcttttgatttatatcatttttttttattagaattacatctggattggtaaatgcaatttgtaccttaattgtaatttgtttttaatgtaagaaataaaactagaaattcttatataagctgaaaataaatatgcagaatatttaactattcttactagggtattttaagctatcacaagtcttttcccctttgaaggcacacatcaaagaacctcaaggcacctcccccagaaagctggaacacagtgtcagggaagaagatgaaaaaaccttccacttctggacaaaatttccattctggtaggagcacatcaagctatcattcctttgggattgggatgatggtacttgggattgtttataatatgaatattatcatgtacttttgggttcttacaacagatgtggattacagagggccaaagaatccaagcaagccaataaaagccccatcagcactacctcctcgactgcagcatccttcaggagtaagacaacatgcgttctctagtcattcttcagggtcacagtctcagaaattctccagtgagcacaaaaatcttagccggacaccttcacagatcataaggtaaccttcttgaatgtaagagaagtatagaaatcaagtaagaggcatttgttatatttgccacattatgtgcatttgaataattataactttttactcatatcattgtccctatattagtattaagagcattttgtataaaacttcatgtga

SEQ ID NO: 113237 - DNA, 1442 bp, Homo sapiens
catgtgtatattaaaaggaagtttttacattcttttgtaaattcaattattctacccacccaaatttcacagtttatgttttcttattactgagccagttagaattactgttgtctttgacttctgtcttatatacacacatttacatacatatacccttttatatatagatatacttgtaccaaaacttgtatgagctcactggaatatagctctttttggagcatagttctgactttgaagacgtttagatgaggttagaaggtaattacgtgcaaatacctttttctgccccaattatggttatctttctttgtaggagtaagactgctgctgctgctgctgatgtgaatggatttaaacctttgtcaggcaatgaggtattttttttaaaagtggttttaaatgtagttctttaatataagaaagcatgtacattaaaatcttaatttttttcttttttctggtacatttcagtcaagtcaggatcatctactcagaaattgatttggtggcttcctaattttttgaagtttcttttcttcatttgactttagttttacgtgtatctcaaacaaaaatgttttaaaagcacttatgtgttgattggacttcctgactttgtttagcagctgaagaacaatgggaactctactagcctgcctttgtctagaaaggttcttaagtcactcaatcctgcagtctatagaaatgtggaatatgaaatttggctgaagtctaaacaaggtgagttaaaaatctgcattttccataaatttgctttgtagcacttgaaaataagtcaactttatattatactgacctttttttttttaacagctcagcaaaaacgtgattattccattgctgctggcttacaatatgaagttggagacaaatgtcaagtaagtgacttatgtaaaagaagaagagattttacttgaaactttgctttttctaatacaaacagagaaaacagctgaggtgtgaatgtgttgttaatttgggatttcagaatatatttatcatgtatatacattttaatagtttacaagtatttagctttttgactcatttgaatacgttgctaaaattgtatgtatctaaaaccgtggcatcccatcacatgatctttaaaaacaattcagcctttggtattacttggttcaaagaagtaatgataacatttcagatattgaggtatttttgttaaaatggactgaaattgattcaaaattgactttataggtcatttagttttgtttatgaaaatcatcttgggagatgttgatacgtacacaatatttactgttggactgaggaaagaaagtgagccacagaggagtttttgccaattaatttgaataagcagctgccctggatttgagtagctgattgttaaaggaaaaagttggattaaaatcagtgtttcttaaactagt

SEQ ID NO: 113238 - DNA, 1051 bp, Homo sapiens
aaagtatacattgttgtatgagaatatgaaaggattgtacttggtatgttacactctgtgacactagagatagaaatggaacttaaggcttaggatatctaattctttattataaaaataactttaaaaatatatgtatatctcttgatttgttttttttttgtttttttttgttttgttttgttttgtttttgaatcggagtcttgcactgttgctcaggctggagtgcagtggtgcgatctcggcttactgcaagctctgccttctgggttcacgccattctcctgcctcagcctcccaagtagctgggactacaggcgcccgccaccaagcctggctaattttttgtacttttagtagagatggggtttcaccatgttagccaggatggtctcgatctcctgaccttgtgatcacccgccttggcctcccaaagtgctgggattacaggcgtgagccactgcccagcctgtatatctcttgatttgtaattccaggtatttattgaattaaaattttctgatcctgattgaaaatttggccaccatttctttctaacttgaatcagtgtctgccattgtaaatttaattctagaatagactgactttgcctaggtagaaattttgctttacggttctctctgagcaccatgtcattgagcatgggggacattggaagagagaatgactagcttgttacaacttattacctgtgattggggttgggggacttttagaacatgccctttggttgctgttgctgttaatggtgttagaaacaactgggtcttgtatggcagttggcaggtgaagtatagagtaggggctagtaagctggagaagtttaccagagaaggtagagcaggtgtgtaagaagatgtgttcactattgtgtttttctttttatactgcactgttgttgtccttggaatgtggattacctttctattgcattattaaaatttctttttttttttttttttttttttgagacggagttttgctcttgttgcccaggctggagtgcaatcgtgtgatcttggctcactg

SEQ ID NO: 113239 - DNA, 1019 bp, Homo sapiens
aatgcttcactgtgctggaattaaacgtaaggatatataaagctgcacagtgtgtggaatgtagtagtaataattgctcagtgtgtgtgttttggcttttcctgttgtcctacttgtttcacagttgtgatacctttttgtgatggtgttagttttaaaaatggcactgtcttttgcgattattttaaactacttaactgcacttacagaaattttagctgtaccctaggtaactttctgataaaattatgttattgaccataaggtttagcagatatctagtcaggattttaaaagcctgagcaatagaaagttacaatgtgatggtctgttcctgtttttaaaaaactgcctgtagttaatgttggaaaatctgtctgtcattaattgcagctctcctttatgaattgctgtatgagaaggtatttaaaactgatgttagtaaaattgtgatggaactagacacgttggaagtagctgatgaagataacagtgaaatatcagattcagaggatgacagttgcaagtaagaatgaaatcctaaaatacctttcttagtgccatacaaggaaagttaagtaaatgtctttacatttcagtaaatgtctttctataacatatattgaggtattaatggtattcataaaatacagcagtctgctgaagtttctttatccctgtcactaattttacctaatttctattatgggactgtttgttttgaaagttggtgtttttggttgatgagaatttacgtctgcaatctagatgcatatttgtagaataaatttggtcctacctatatgtgtgtgtattgtaaaattttaaagttaacttgtcaattgttcacatacccagtaatgaaataaaatggccgtttggatttccttcactttcttttattgttttctttcttaggtagtgcctctttttagataatgaaagttccaagttggggttataagtatgtgaacacctggataatgcctctgtgtaggttgtgagtaaatatgtctgaa

SEQ ID NO: 113240 - DNA, 1230 bp, Homo sapiens
agcctagaaagaaagatcaactgacttattataagagaatttttgtcttaagtagctattttggagtcatgatggccaaattgaagtgacttgtgttccaccatgctggtggtgttaagttagaggggaattgagtgaaatactactgttataagggttttggggtttctgggactttctaagggatctggctttttcaaaacaagttttgaaatatattgttatattctaaacaaaatcaatgtgcatttttctttgtataagtgatgatttagaaaatcacttatacaaagaaatttaactttgattttgcttgttagaaaattttgcatgttagaggttagcattaataaggttttgaaatattttcttacagtgtcttgttctttaagtagttgaaagcatgttttcatatattatttttatttttttgtgatcctataaacatttccagaaatcattttgaattttttgatttaatgtttatataacatttcagcatatggatgtactgtagcttgacaacactgaagctttaggttactcctaaaatactcactgtctgtttggaaatgatctagtaattcagaggcattggagacatacattgctatgtaaatgttatatgtatgaggggctgaaatgtttcttttatttttccctttcaggtgttactgtgtttttcaaatggaaatcattatgatattgtgtatcccataaagtataaagaaagctctgctatgtgtcagtgtaagtatcaccttgtgtttatatgggaaattatattcctaaacttatacagtctttttgttttttgttttgttttttgtttttttttgagacggagtctcgctctgtctcccaggctggagtgcagtggcgtgatctccgctcactgcaagctctgcctccggggttcatgccactcctgcctcagcctcccgagtagctgggactacgggcgcccgccacaacgcctggctaatttttttgtatttttaatagagactaggtttcaccgtgttagccagggtggtctcgatctcctgacctcgtgatccgcccgcctcgacctcccaaagtgctgggattacaggcgtgagctaccgtgcccggccttatacagtcttaatgtaaacaaatcagagcaaataattctattctgttataatataaaagatatgtccaagaaccttaaattaccaagagtattaatattataataaaaac

SEQ ID NO: 113241 - DNA, 1785 bp, Homo sapiens
cacctgaggtcagtagttgagaccagcctgaccaacatagagaaaccccgtctctactaaaaatacaaaattagctgggcatggtggcacatgcctgtaatcccagctacttgggaggctgaggcgggagaatcgcttgaacctcggaggcagaggttgcggtgagccgagatcacgccgctgcactccagcctgagcaacaagagcgaaactccatctcaaaaaaaaaaaagtctcaacttaacagatgccatgctgtggtcttgccacaccaataggaactgtcatttcaccctgttagtatttttttgtgtatgtgtgggagagacttggactgcattttaccacatattgtggtctgttttatataaacgtttttataatattcacaatactactaataataatgagctttaagaactcattacgtatgctgtatgaaggtatgtatagaaatataaagtggaatctaaaaagtgtgagacacttacatgccacctttttttcttcaatacaggaatgggtaggacaagtggaaataagtgccctttctcttatgtacaggtaaacactgtaataacataagtaaaagaaaatgaaaccagtgggaaattatattccattatattaaaaatgttaaaatagcaaagctcttttatactttagttatgaagtatcttttctaagttttttttaattgcatcaattagattttgacatttagatatgtcagtgtttagaaattttaattctcaaaatactttggaaaagggtacagaaatttttccggtctatgttctgtaagatatcacttatcaactttgtagagaaatgattttctactttctcagggtcagtggtattgaatggccactagaaccgtactaaaataccatgttacaaattgggtattccttatctgaaatgattgagtccagaagtttttggatttcattttttttttaaattttggaatatttacattatgcttacccagttgagcatccctaatttgaaaatctgaaatccaaaatgctccaatgagcatttcctttgagtgtcatgttggtgctcaaaaagttttagattttggaacatttgggattttggctttttagatttgggatgctcaacctgtattcaattttgctacttttgcctagtagaggagcaggtaaatactttgttttttcttttcagaatgttgtttaaatttcatcttcaaaatttctttgatttttgaagtgtccctttagaattatatctgaaatttaatatatatacaaataatatttgaaattttacatgttaaaaaggttacttttatatagatattttacaacttagttatctcattattgtcttttgtatctccagtggttgggacagtgcctggcacgtattaggcccttgatgaatgaatgaatgattaaattcaaattcatgaagtatagtccattataaataatttctaattgttattttcaggaaagattttataatttatcgggaaccaaatgtttctccttcacaagtaacagaaaataattttcctgaaaaggtaagaatttttcaaagtgttctaaagtatttaagtaaaagaaccgcttagttgctaccatgacctcataagctataattttaaatgattttttgaaatatttctgtattaaggttatggtattctgatttcttaaaagttcctatagccgggtgcggtggctcatgcctgtaatcccagcactttgggaggccaaggcaggcagatcacttgaggtcaggaat

SEQ ID NO: 113242 - DNA, 1600 bp, Homo sapiens
acaggcgtgagccaccgtgcctggcagaatttttcattttttaaagtgatgtaatacttcttgtataaaaattagaaatgtagctcgtgtgtttgatctaaacagactcatatcagtgaacggtttcctctacaccagagggtatcacttctagcagtttgtgagaagccatgattgttaggctgaggcttattttaagagatctattttaatatatggcacctatttcattttgaaaatcagagctaacttttaagaactattgaaaagtctctgagggaaaagattgtgctggtctaagatcaaaacattgtttaaaatattttccttatttcagtttttctttcctttcaaggaataagtggcagcattcatttaccaaagctcattgtttttggtgacttaatgtattaagtctttaccgacttcacagtactataggaaaatattcttacggtaaaagttttaaaatatagatgtattatagaataaagggtgaaaattcttcatttttcctcatgttaacttccctgtctctattgtcaatttaggatgtatcctccccatcccctttctatgtgtgcacatgtaccaatatatatgcctttttgtttttcacaaatagtattattttcccatgatttacttttaaaacttaatcttgagtgatttttctaggtcatttcatgtggttatacctcattcttttgaatgaatgcatgatattctatagtgtggctgaaacatgaattattttttatgagacatagtttcgctcttgtctcccaggctggagtgcagcagcgcgatctcggcttactcgactgctgcctcccagcttcaagtggttctcctccctcagcccccgagtagctgggattataggcatgtgccaccaggcccgactaatgttttgtatttttagtagagatggggtttcactgtgttggtcaggctggtcttgaactcccaacctcgtgatctgcctgtctcggcctcccaaagtgttgggattacaggcgtgagccaccacatcctgcctgaaacatgaattattttactattctgtaggaatcttagggacttttttttttttttaaacactgttacaaataactcccagtgacatcattattttacatacacttttgtagatgtgaaatatttctttatgatagacgtatagaagttgaattgctgggtcacagggtatatgggacattttaaattttgaaacatactggccatttgcctttcagaaaggctttaagtgacttttctaaggagtgtagaatttctcttgttttcaaaacaattgctaggacactgctctcttttgtaccttcatttaccctgaagagaagagatcttctgcccttttctatacttcccaattttctgcttctattcaatatttctttctttctttttttttttttgagaccgagttttgctcttgttgcccaggctggagtgcaatggtgcaatcttggctcactgcaacctctgcttcctgggttcaagcgattctcctgcctcagcctcttgagtagctaggactataggcatgggccaccacacccggctaagtttgtatttt

SEQ ID NO: 113243 - DNA, 1400 bp, Homo sapiens
ttggcagatatttgatggataaactcagttgcttcatccagttctcagagaaagcatctttatcctcttaatgagtaatagtggagcattttgaaggtacttcaaacttgtgcgagaatatgtttttgtcagctttgaggtaaaattgacatacagtgaaattcatcacttataaatatacaatttgatgagatttgacaagtgtatatgctcatgtaaccaccacagcaaacatcataaaggacatttccatctctccagaaagtttccttttgcctttttgcagttaatcctcttccgcctatcccctgggacctggcaagcactgatttgctttctaagttttgctgtttctagatgcatataagtggaatgatagagtttgtagtcttatgtatttggcttctttcacttagcctattggaaatactaaaattcattcatgcgtttagcagtagttcctttttattgaagaaaaataatctgtgtatgtatctatcacaacctgtgtatacatttaccagctgattgatatttaagttctttacagttctgggttgttaaaattgaagctgctgtgaacaattgcttataaatctttgtgtagacatgtgttttcttttttcttggattaataccttagagcaaaattgcttggtcatctggtaaacatatttttaagaaactgccaaactttttgaagtgactgtaccattttgctttctcatcagcaatattatgagaatttcagtttctccacatatttgccagcactctttgtgatttaacttgaatttctctaatgatgttgagcatcttttcatgtgcttatttgtcatctatctaattttgttggtgaaatgtctgttcataggtttttgcccattttttaattgctgttgttcttactgaattttactagttctttatactggatataagtcctgtattggatatgtgttctacaaatacattcttctagtttgtattttggctttccattttctttttttttttttttaattttttattttatttatttattatttttttttgaggcagagttttgctctgttgcccaggctggagtgcagtggcatgatctcagctcactgaaacctctgcctcccgagttcaagtgattcccctgcctcagcctccagaatagttgggatcacaagcttggcttttcattttcttaacaatgtcttttgaggaacaagagcttaatactgatgactaagaacatttaagttatgtaattttgttatagtatggttaattagttaaaacatattttgaaggaattctttttacaagaaagatatatgtcacacatcataaaaaatgctgattaagtaaaattacagtgttagaagacagtggtagtataatatcga

SEQ ID NO: 113244 - DNA, 1656 bp, Homo sapiens
tggcataggtggacgctttctgctcagaaaggagactctcagagaggatgcaggcttgtgtcagaattctgcagtctctagtaactttaaatggttctgtgttttttttttccttagacctataatcatctaatacagaacagtagccctttattggtgggctctttaatatatatggctcttttattataaatatctttcgaaatttaagatatttttggcaatttgacattatataatctatgaaagaatctcaatcttaaaatccaagggtgcttaaaagattttatagacaagggagtatactttaatgtctttaagtatatctctgctaaatcaactgggactgtaatttaaacgcaattgaatttggtggttcaacaaatgacttttagagatttctcaaatgagtgcgattgctattaaagaaacataaaaaaggttgtgttattacacagcttgaataaactgtttttatgtcaaagtaacaatgaagcgatgaagcaagctgtattagaaaaattttgttgatgcttcaaaatatttttcgccttactagttctcatcgctctttctagtatcacttgagagacaatgagtactcttatctgtattattaagctatactatttcttagcttgtaagtcagtctttgttttattcccttctacacactggtcactaccaagttaaagcactgctttcatcatataatttctcagttcagaatgtcacctgaagtggccttgaatggcctttctcatctagccttcaagtcctgcctgggctcaaggccctctgtaaacaggcccccctttgggttcttctcccactcagttccacaacaggttgtcctgctccagctggccagattgcttgtcttcccaacacagtgttcctcttcctcctcacgccacattggccctctctgtagagtatcagctgcctgttgccatccagatcctgtccagcattcatcttgagtcactcttctttcaggaaacctttcctgacagaatttccttctttaaattcttttgtatgtttatagtctttaatgattgctatatgttttcataattagattatgtacatatttttaaataatactgaggtattttaggtttatgtacaaactcagtaattcacagtgaatgtttacacagcgaagcggttaactgttttggcatatatgttagatgacatttctaatagatttattttttgcagtttatagaaggatcatttgaagaatatttaaagcgtttggaaaatccacaggtatgtcacagtcttctagtatatttctatttttatatatccaaataatgtatttaaaattcattaaaatagaagattactattacagtgtatagaggagttgcagtgacggtgtatcctatttccttataaacgtttcctacacattttatgcagcacttaagttggagctatatgttagaggttgcctcactaaggcagagttgtgatattttatcttggctataatggcatgtaaatgtagtataaaaatctgaaataatactggggtgatgattttcagaatgctacgttggtgtgtgtatggaacttggacagggtgaagtttgatttctttttttttttttttgaggtggaatttaactccattgccag

SEQ ID NO: 113245 - DNA, 1009 bp, Homo sapiens
caatatgtataggatgaagttgagcgtggcgtagcatggattttgttagctcttctttgtgaagagtaaagttattgtggagggaaggccaagggaagagagtgtcctaaatttacaaaaatgtcctaaaggagaaaggctaataaattctttacaaatttggcttaagaagtagtattgtttgtatatgtcatgtcttcgctgtgcttagttagaagaagaggtaggaatgagtaaagatatcgaaattatagaaagggaaatggagaaagactgataatctattggttgtcagattattttgggtgtaaaagaagacattaggttgtaacttttaactaaatgcttaatagtgtgtttgttgccttttctttttaggtattgcactctcagtctcgccatgttgaagtcagaatggcctgtattcactatcttcgagagaacagagagaaatttgaagcggtaacttgtaatttcaaacatgtaatggtgtcttgacttggttttacattttggcttttagaagtgttctagtagaatttcacaggctggatcttaatgcgggttatgaaaataacacttattaaaaaaacttctctattgaacttaatctagttatattcagttatgttgttttctaggctattttatgttttgcatttatttggacatttagaaagctactatgatggataagacgctgagctgtgggggatggaaagatgacctggacaaggcccttgcatactaagagtgggctttgtctgacatggtcagggaattgggggtgttgtgattaatagtggtttctgtgatgggtaactccctataaattaaaagaaaaaaaattcagtctgggcatggtggctcacacctgtaatcccagtactttgggaggtgaagagttcaagaccagcttggccaacatggcaaaactctgtgtctactaaaagtagtggcatggtggcacatgcctgagtcccagctactcttgagtctgaggcacgag

SEQ ID NO: 113246 - DNA, 3686 bp, Homo sapiens
ggggcgcaggccccgcttcacctgagccggcccagcgtgcgcgccaggggcgggggttttctcgcttcacaccggtacggaggaggaaacttgtgggggcggcgacccccggcctgggtcctgagtcaggcagcgaggccgtcgggaagtgactactcactctcggggttttccttaatcccgctccccccgtttgtcgtgggcgcgtgttcgctccgaggaggcggccgcgtgcggacagccatgcattaggcagggcttccctatgcgcccggagagcgcggaccgctgcctcgggccgccgccgcctgccgccgctcgcggagcccgagccccagcccgagccgccgcctgccccaggccggggcgtcgagcagccggcggcctggccatgtggggctagccctcgccgcgcctggcctgcagcaggaccagcaacatggaggctgccgtcggcgtccccgacggcggggaccagggcggcgcggggccccgcgaggacgcgacgcccatggacgcctatctgcggaaactgggcttgtatcggaaactggtcgccaaggacgggtcgtgcctgttccgggccgtggcggagcaggtaattgcgggggggcggggagggcttcgaggggaggcggggacggcccggcgggtctgggtggggaggcagctgcgggctgtccgggccgcccacggccggggctgcgcgtgccctggctgtcgtcacagcgccccattgtaacgccggagtgggacgctgctttgcgtctgaaaggtgcaaattgaaactcgaaagcccgcaaattaacggggtgtctctctcctgatgaagaggtaatgagttgaggacaacttgtgaggcctgctcggagcttgtacagttgatttattgctggggacctggcgacatgatattttttacttttgttccgcattcaccttccttcccttcgtttgagaagcaccacgctcaccccactccagtaaaccaagtgtttactagaagtggtggatcaaactttacttgtggaacatattttggtttgctgctggactttggaatgtagggtaggcaagctcgcccatgtcacttgaatcaaatgggcaaactgccgtttgagaaaaccagccttttacaaatatagaatattttgaaggatttgtcttgagtaggttccaccctttattatgctctgctgggctgtgtaggtatactaaacagaactgacttttttaaaaaagcctgttttgatgttggtagtagaaagggtacgtgtaactggagcttttcaaaaccattttctaacacagttgctcaggaagatttttctgaatttttttttttgagcgagcttattccatgttatataacactgtgtgttgtaggtgtgcagtcaccaaaacccatcctatattgaaaaatagctgccgaagtagctggataaaagtttctgctctggtgtgtctttcagacgattcacatgtgctttcctttgacctaggacctgctccccacaccccattgcacacccctccctacccgcctgtggggtttttatgatgtttctgttttcttttccctcaccttttttgaatgctaaataacttttaaaatttctatttgtgagtaaatgttttacttaacatgtggaggccagtctgttctcatttttaaacattgaaaggcaagccatttatttaccataggtagcgtaaaatctttctttaaaacaagaaattgatttaacggacacaaaccgttgctttatgttgcggacattgtcattgaaaaattcttccaaaagctccccaaaccaggctctgtccgtttctcattttcagtgttgctgtggggtatgttcacagccacccactgcctccggtccttattgttagtaggtaaatagtctgccccatttgtgaattttctgaatctctgtctgtcctgcttccttggactcctcagcacctccagaagcctagggaagaggtggaagtgaattcagcccgtatttataacgtactgttagacctagcaagagtttggtaagcaaggaggtagaaataaatggcggtaagggaagcttggcgcttacttggatttgagttatcttgagtcctagtttatattgaagcagaagggtgtgcctgatttccgtagtgcataccatagatactcggtggccttgattatacagaagcctcttttattatagtgggatctctgtttttaagtagaaaaggggcaagagctagtttacactaagaactctttgttacatcaggtaacacattttattgtattttgtaatggggtttaggttaggcataagggactacccttcccagttatgtgactcagttttagtctgatgagcttagctgaagaccttgaactttgggggaagttcagttattcagtaggctacagttatagccatcatcgccaaaggcaaagtgtgtgtgtgtgggaaaaaggaagtaataccagcgtcaggcttcccttttaaaatgtgtaccaataatttatattttttgccaacaatttctcctataaaatcacaaatactcatcatttctaagaaggaatcaaagtaaataatctaagtggcagtttttaaagacggggaggagactcgagttaggattttggtctttctctccaaattatctgatttagataggccatttcctttttacacttacggatttgggcctgccggaggcctgacctgaatcagctccacagccatggagctaaaaatagggcagtcttggaggacttgctaaaacagtgtctcagcctttcccagtatttatcactatcttgtcccaagtaaaaatgggaaagccttctagtttgctttcatgtatatattaatttgcagagatatttgtcatactactttaattctttcgaagtgttatcaaccttgcacaataatttacattttagacagttgtcatttaaccttgcttttcttgcagtgcttgactttgtgaattaccagcactctcacactttatagaagttgctaagagttttgcttctgagcaacaggttcagatagattgtatgtgccaaaatctttgttaaaagagaagaaccagtagatatgcctaccattgcttttgattgaaaataagctttactaacttatgtttgccacctgttgctaggtaaatggctttaagactagctccacgttgctaatggcagaggaaagccctatcagatgacactgtggtttattcatacgagtaataccttgattcatgatagtgtctaacatagcttctgtgaaagaagtgttgctaaatgtcatttgttgaattggcaaaaaaattctacggtggttatttttatatatagatagtcctttttggtcacatactcttagaatatataagaatatagtttaatagtgtccaagaacagcagtgaaggtagaatcagttaaactgaaaaccagttattacactgaaaacaaactaattgctaacctcaacaggtgcattttcagtgtatctcagcgtaataggacatactaggcgtccaggcagttgtgccggttctgtgggtataaatgagccttggttgtgatccaagagagctgtagaatgcacagctggagcctcccttttcccaaatgctctactcatgctaaacgtaaagggagaaccac

SEQ ID NO: 113247 - DNA, 1026 bp, Homo sapiens
gctgatatggcatattcacaaggtcatcagaaactcaggctgcttctgactttctgttccatcatcttagcacgtggcttatattctcaagtctgggactacaggcacgcaccaccacatccagctgatttttgtatttttagttgagatggggtttcaccatgttggccaggatggtctcaatctcttgatctcgtgatcctcccacctcggcatcccaaagtgttgcgattacaggtgtgagccactgctccctgcctaaatgtgaagttctaagggggaagaggaaaaagaatatttggtaagtacctagtagtttctgccataacatcaatatatcaaagagtcccatattcatatttccagccctgcactcttctccaagcctcaagaccacttactgtgcttggatgcacacttggcaactaaaacttaacatgagcaaagcattgcctttgtaatggagactcaaagatgaatgactgtgagttgagggaagaatgaggagtgagaaagtgaagacagtgaatacagtatagagaactctttcaggagttttgatagaaagaagagcagaggaacagaaaaatgggaagtagctggaggagaatgtaaaatctcaggagaattttgtttcattttataaaaagaataatatttcaacctattagtataataatgggagtggtttaggaaagaagaaatgaatgactcagggaaaggggaataattgtaggagtaaagtcctcaagaagacgggggagacaaaatacaaagcacaaatgagatcagcatttgatgtaaatgacagagaaagcagagtatgggggcacaacttataggcaagacggctcactgagtttaagcttcgataacgcactttgctccaaatacatgacaaaaatagatcaaatgtaaaaaaaagataagtctaggataaaaaataagacaaacatctcctaaatgaaaatagaacaaaaatgtcaaagtggctagactgaagtcacaaagtttatggaaaatcca

SEQ ID NO: 113248 - DNA, 1050 bp, Homo sapiens
ccatgcccagctaattcttttttttatttttagtagagacggggtttcaccatgttggccaggctggtcttgaactcctggcctcaagtgatccacccacctcggcctcccaaagtactaggattataggcaagagccactgcgcctggcctacttaaactctttgagtccctatactctactatgaaataaagctgattataacaataccctctctcattatgttcctgtgaacattaaatgatataaggtatttaaagagtttagactaatgcttcacaggtgctcactaaaagatagatgctatgattatctactaattaaaattccaaggagtatattatactgtcctagacaatgatgccaaagttaaatattttagagtggctataatgcatgcattttatgtctccaatgcacctagcagcattttgccaaacaaaactactttaagtttgataaatactttgcaattctcaaaatggtggcatagcattatctaaattggtcctcactgcacctggagaagggcaactgttatctcagtgtaatagaggtaggaaaagaggcttggagaaaagttgagttgaacatggctggtaaactgaagaacccaaagtagaatataagtttttattactcatggttgttaataagaatcatggagattgaaaacagtcattcgtggaattgttggttagcttaataattgccctaatcatgtctttgttttgaaatggaaattgtcttattttacttgccttgtagtaatatacctaagcatatccacaaaccacaaagaaactttgtcagttcatgtgctgtatgaagcatactttttcttttttctttttcttttattatactttaagttttagggtacatgtgcacaacatgcaggtttgttacatatgtatacatgtgccatgttggtgtgctgcacccattaactcgtcatttaacattaggtatatctcctaatgctatccctcccccctcccctgaccccacaacaggccccggtgtgtgatgttccccttcctgtgtcca

SEQ ID NO: 113249 - DNA, 1151 bp, Homo sapiens
tgtataccatggtatactactcagccataaaaaggaacaaaataacaccattcacagcaacctggatggagttggagaccattcttctgagtgaaataacttaggaatggaaaaccaattgttgtatactctcacttataagtgggagctaagctatgaggatgcaaagacgtaagaacgatacagtggactttggggacttgtcagggaaaggtggaggtgggggtaagggataaaagactacacattgggtacagtgtacactgctcaggtgatgggtgccccagaatctcagaagtcaccactaaagaacttatccatgtaatgaaaaccacctgttccccaaaaagtattgaaataaatttaaaatgagagcctttttcaagtgttgttaaatatcaaacttataatggctagagttgacagagcatttacctgtcacaatactaaacacctgagaggcatcatctctttcagtctcaaatctccatacaaggtagatgccatcttccttatctgtggatagtatcagtgtttattgaatagagtttgtgaggaacaataatactagtgataataatagctaacacttatgtttactatttgccagacattgttttgagcaccttacatatatgttataaactcctttattcttcaaatcaatcctatgagatagatactatgctatttccattttatagatgagaaaactgaaacaccaacatgttacgtgacttcccaaggtcacacagcgagtatgctaatgcctctaaagtacttaatgaggtatctggcatatatatgtgttcagcaaatgtagccaatattcttttcactggacattcatagtgttgtacttaagtgaagtattttaggtagactcagttagtgggttagtcccttttttaaagttttaatgatcacatgatttccagaaacaaattatttaacggttttgctttcaaaagtaatttcccttcactaggccttcatccattggcaaggttttccatgctgaaagattggctttggctacatttaatacaaaacctaaataacagtggcttaagcaagataggatttacttcatctcttgtagaaagagaccagaaaaaggaatttcaggcatagttcagtagggtagctca

SEQ ID NO: 113250 - DNA, 1721 bp, Homo sapiens
attgtattgaaggtaggtggaccgtgttaaaaaagaatcggaacagaagtgttcactgccccagcattttcaattggtataaatattgttgcatcagtgttattctgatgtaggtgccagatctaaatatgctgtactgattaaagtgtttgttctgccctctcccactctctttcccatttgcaattatttgctatttctgtgcaggtggtgtatcattggtgtaatactgcagttcttaggaaggtgtagctagggtcgtgagagatgatttttctggaggtgggtgatgccagagcctctagaggatccaggcaggatcgagtttcttctgagggtagggatttgtccttgatttagttttgacccctacaaccataggtatgtaaccaaatacattttacctcttgcagtatcctttggtttcgtatccttgaagagctgatgacctttgtgttttagagaaatgacaatttttaggcaattaaagacattggcctcttacacttcttggaattttatgttatttttactaagttcattaaggcattaagaggaagttgtcacattttctcaactacgtttattacatttattagttaaaaactaaatttcactttgtaattttgatttctagcaattctgggttaaatattaaatctaataacctagtagattggaaaaagaagtagcttgggtatagtaattagactagcatgtttaagctgcagtagcctacataatcaaggccaagtgtgtgtgtataaaagatctcatttgtgtagtcttacaaggctaatggaggcatcactgaggctttataaataatgtaagttgggtataatgtagagtctccagagacggcagagaaagcatcattaccagccttttcaacctgcttgagatcttaaattgatttacagcactgaactggtgcaaaatgatacatcaggatgacatggggtcagcctgtaaaagtctatgatgtcagcctattagttcagtcatcataattaaaccatattacaggggtagctaagcaggagtctggcgttatacttcagatatgggtggtacatgggttttgtttatagtggaaaggctgagatggccagggataccagtgtgtgtgaaagagggaaaaggcttacagaactatgaatttctgtagaaaaatttaagataaatgcagagatattcaatctgaattgtataagtagcttttcatttggtagaggagaaacagatgctttagggatgctgataaggacctttgcagctctgatatgtgtactgaatgcttcatgtgagtttgaatttaacttggccttagggaccttataaaatatcagtggaccacatacttaactttgatccttttattacccctgaattttcactgtattgatatctactgacatgttatttctttaactagtcaaacttaccaggcctataccagaaacaaagatatttgaattgaacatataaacagttcaggaaaagaagatccttattttgcttaagtttctgacaatccttatttagcttatggattatctagggctctgctatcctagccatagtcacacgtagctttttttgaaattttattattctatttttttgagacagggtctctctgtgttacccaggctggagtgcagtggcacgatcatggctcactgcagcctcgacctcccaggcccaggcagtcctcc

SEQ ID NO: 113251 - DNA, 1073 bp, Homo sapiens
tctcatggtctttcgggtgaaatatgtccatgggactgccaagtgctttcataaacattaagatttgtaatttcctttacagagaatagagatacttagtattaaaagttgctttaaagattttctaatctggttggttcatatcaaggtgaacagtctgaagtccagagaaggtaactgacatccaaagttacctgtctagtgattggaaaagggaaagccaagatctggactcctcttggcattaagtgcccttttgttttcaggttttttttctccctaccacgctcacgatatttctgaggctttggtgtaagcatatccagtgtaatttagggaagggaggaaagaattttttggcctgttagcaactttttatacctaacattgtttgagctaagtaggaatcaaatctgacaaccagagagaaatgcttattttctacatattaaaattgattctttttcattctggagatggaaaagaaaagccctatatctaatttaatcaatgagaccttattagaaaatgggagatccaagattgcacaaagttcaaattaaagcaggcaactctgacatctagcaaaatatacgaatctcctcttgactctcgaaaacaaatcacattcctaaccaaaagctaaagtttggggtatttagggagctagggagtcctagggagagaattggacaggtctgaggagaaaaaggataatttaaatataaaaaagtggaaaaaatcggttttaagtcatagcatgtctttgaggttgatgaaatgttctgctacttctatatgtggttttactctttggtaccaagattttaggacatactttgataacaaataggggcatgtcctctttgccccaatctgaaacctcttgaccctttattttcctttcctgctgttatctggtagtacaaatattcagtctaatctgttgatctggcatctgatttgcagcaaaaatacctgaagtattttcatcactctgctgtagccacctttaaaaagaaaaggaaagagaagaaaaaggcagagccaaatagtattaatgtaattgctta

SEQ ID NO: 113252 - DNA, 1012 bp, Homo sapiens
ttttaatgctttatttgtagtttccccttaattgtagggctgctgtactgtggatattttgctctacaatctgagattgttagggtatagttactccaactattcatgtattatcctctccctgtctttttgtgtgtgtgtgtgtgtgtgtgtgtgtggtttctttgtggtgtgcttatgcaaagtagaagtattccagacctttatagcttttttttcttttagtttcaaacacttcaagaaaaaaggtgggggggagactctctcaacggttataattaggcattaattaagccattattcagttaactaaatgcaagatcttttgtttgtttagatggaaaagaaacgtatctttttaatgaaggagggatattaaatgggcccttatttgatcattttgctgcagtattgtaataagtatatgcttcatttattccctgaatatttattagttctgaggcttaataattagagtatacacaaacatgaaaaattaaatgcagcaacattataagagccgttacaaggtagtataggagtaaattgtacagacaactcacatcaggaccactgtggcctggaaggacatgtgagtttgcataggcagaaggaagagggacattatagacagagtaatggcatgaaaaactgggagataagcatgagtgttgagtatctgtagagcagcactgtccaatagaatttctgcagtgatggaaatgttccacatctgtgctaatacagtagctgtagccacacatggaacagcattttttaaaaaattaatttatgtttcagtagccacatgtggttatcatatcaaatagcacagatccagaggcagtgagcagccctgcctgacctcagtgggtgttcctcatggagcctagtatggtggtgtggaggagatgctcagaaaggttgacttccagtgagaattttagggccttagagtgccagaataaggaaacattgggaagtcactgaaagtgtttgaacatgcagtttg

SEQ ID NO: 113253 - DNA, 1098 bp, Homo sapiens
ataaatctctggtaaaggtagacatggaaagagaaggatttaaaaataaataaataaataaaataaaacaaaaaaccatgaaggcttggtgattatgtggctataaagtaatgagaaagagatgtcggagatatatccttaagtttctaaacttggtggctggaaaactaataaagatgttacttaagaatagggaagagctggttgtagaagaaataaaaattgtgcaaatgataaattagacttgatgtgttaaatttaaggtgcgatatctaagtcaaagtatgctacaggcaggttggagataaggtttgggaggacttgaaagctttacgttagactctctgcagtcatctgctgggtattctgagacaaccacaaagagagaaagaactggtggattgaatcttccattggagcccacggttaggaattaatagaaggaagaggctaatttgaagtagactgcctgagaggctgtttgacatagaccaaagaagaaactggaagaaaggcatggggtcagaggagtgggaaaaccaggaagccactggaagagagattctagaagtaggtttggaggggaaaatgtacagttcagggtgaaggagaagaagtcagataatcatgtgaatgcaatttcagagaaggctgaatacattaagaagtgagagagtcttatattgccttaagtgacttgaattttaagatagatgagacctcttcatatttgaaggttgaggggaagaagtcagtggacagagagcaattggaggtgatggagttagccatctggagcacaagtgacaaatgttgaccgtggtaaggagggagagttgtctgagaaagaaacagaatggggtccgagtgagaagaaagcatgtggcagagctcctgtgcacttttgctgattttcctgtattgttggaggtaagtcctttcactgggatggtgaggaggaagatcagcacatggtaagggaagaagaaccaccgtaggtagtgtgccaggcaatctatagagaagtcaaattctaaacaattggggggaaacctggggtgaagtgtggtgaggctgctgtataggagactaggttaa

SEQ ID NO: 113254 - DNA, 1044 bp, Homo sapiens
ccagcactggactatgttttggatgggatagagaaaactgtaagtcattttctgccctgaagaagcaatctaattggtaagaggagattatgcatttgaaactttcacttcaaaatcaagggattggggaaaaaagtctgatgcatttgatagagctttttgcctctggcccacttctaccttactttattctgtatttattaattttttttgagacagagtctcaccctgtcgcccaggctggagtgcagtggcgtgatcttggctcactgcaacctccgcctcccaggctctagtgattctcctgcctcagcatcctgagtagctgggattgcaggtgcccgccaccatgcccagctagtttttgtatttttagtagagatggggtttcaccatgttggccaggctggtctcgaactcctgaccttgggacccacctgcctctccctcccaaagtgctgggattacaggcgtgagccaccgcgcccggccccagttcattctttcagcaaggttttgagtgtctgtatttctatttatgcttatgttcatagtgtatctcttagacagcttgataaagttgggggtaaggaattgtaagtacaggacctgcactgaggatcttctaactttaaggaacaatacaaacctgcttgtctagtctagcatctgttgtaatgccttttattacaattaccttattaactctttagactgagttcctcgagggtatggccagtgtctttatgatctttgtgctcgcacagtgcctagtgcagtggttctcccttgtctactcatcaaaatcgtgtgaacagctaccaccacaaagatgcctgggcccatcctattgaagggttatggtaaggaagcttttaaaaatactgttaatatccagcaacattaagaacggttgggctggcacacagtaggtacttggtgaatgaattttttcattttgttgtttttagaattacatcaggaaatatggtatgttgtgagttcattgtagttatgaaccatgtcttttatactctgtagcac

SEQ ID NO: 113255 - DNA, 1017 bp, Homo sapiens
tatctcattttatatattcagaatattccaacatccaaaaatacctggaatctgaaacaccatctggtcccaagcatttcagataagggatactcaacctgtattcctgtacaggaattatggacatttagtccataattcttggactacttctcctccagtggccttgtctttggtcctacctcagatattcaatctctgggtagaaagattccataaaaaaagaagaaaaaaatctcgctcagtcttacagttcccataatacgggttttcatacttctaaaaattaaacaattctccaaccttacagttaattattttctttatataagcagtaaagtattatttgttcatgtctgtactttgagaatatatccagaatctgacgacttctgccacgctggttgaaatctttatcatcttgtaccttaacaattgccatagcttcctaactggtctccctacccaccactccctacttcgatccctgcgtccttcagtatgttctcaacccagcaagccacagtaattctattaaactctaagttggatgatggctctcctctgctcagatctcccagtgtttccatctcaatttgggtcaaaagctctgaagtctctgtgggtcccgcacataccttcccctgtgacctctctggcctcatctctcatttctctcccctcactccattccagcctcagtgaggactccttgccattccttgaacatctcaggatcattcttgccaaatggctcaaatggcttttgcaattgcccttctctctgcttggaatgcccttccccagataattcctttcagggggctgttcagataccacattcacgacgaggctttccctgaccaccagaatgtaggccccaccaaggcacagaaacagactttgaaaaactttttgtgtctctttcagtgctgcgtttctagtgcttagaatagtgcctggcatgtgatagctgtttgttgagtgaattgaataactgtagtggttactagtttt

SEQ ID NO: 113256 - DNA, 1033 bp, Homo sapiens
catttaagtaatagttatttcagctttatcaaaagtttgtaagttcccagttcttctggacttctgattaattcagcctgattttatttagggcaaatgattatgatcccctttccattttgtgaatttttcatattttaccaataaatctcattgcaattctttgcttacaagatggcttgaaagatgcaagcaatgatggattgctctttattgttttaaaatatttattggccttaaattgctgaaataatatggtttttccaacctttgtgtttttatgcatttttaaccctacgtctttagtgtataatcttctgtgagtctgtggtttctataagtgtcaggaatttttcaggtgtctttattatcctttgaaatcatgatctatttggacaattccatctttgtttggactatacagttgacttgagtacctaagtgaaatggagcaggttagaaaaaagtagtttgttttatagtaatgagaattacattacaagtcccctggcatgttcccctttgaccttttttgatgttttaatttaagcatctcaaacaaggcaagagttgatctcaccaggccttgaatcctatccaaaattggatgttaggatagatgacacatacatttctgtaatactaattaatattgccagttaatattgatcactttctacaacatgtctctgagatatcttgcatctccatggcatctaatgaggtgtattgtgaaatagtttcatatattaaaaatactggaaaataatataaaaaattagctgggcgtggtggtgggcacctgtagtcctagctgctccggaggctgaggcaggagaatggtgtgaacccaggaggtggaggctgcagtgagccgagatcgcgccactgcactgcagcctgggcgacagagcaagactctgtcaaaaaaaaaaaaaaaaatgctgaactacaaaattcatgcagtttgcttataatcactctgaagcccaccataggtctactctggaagctcaagtcttactttttctgt

SEQ ID NO: 113257 - DNA, 1053 bp, Homo sapiens
atgttaagagaagctcactacaattgctggataacaagtaagtctttaatttaaagaacaaatacactgacttaactaatgaagatctgagaataattttgcagttatctgtttagatctttaatacttaataatttttaactgatgatgaaaattttttttttgtttttttttgagacggagttttgctctggtcacccaggctggagcacgatcttggttcactgcaacctccacctcccaggttcaagtgattctcctgcctcagcctcctgagtagctgggattacaggtgcacaccatcacgcccgactaatttttgtatttttagtagagacagggtttcaccatgttggccaggctggtcacgaattcctgacctcaggtgatccgcccaccttggcctcccaaagtgctgggattacaggcgtgagccactgtacccagccaaaaagagtatttttaaatgaacaaaatggtatttagaaacaataagtataacagtactgaagtagagttttcactggtgatttccaaagttggaagttggtataactgggctgtccaaaggctttcttctgtaattaggatagatacacataaaccccgtctgtttttcagctcttatgtatgtgcaactacaactggaacaaactaatagaatttcttgctatttgtttctaactttgttactaaaaggaattgaggcacaagtttttccccttctcagcctgaagaacttgcaagcagaaatgaaaaatttctttccccctttagtaaagggtgggtctttgattccagcgctgtatatatccttagcagtgaccgagtggaggatgccatcattcttccagctctacataggcaagtaggatagacttaagtgagcagagaactcaggtaaataagttcggtagactctctgagaaatctgttagaatccacagccaccctggcaaataaaactgctcctaaataacctctcatgaaagaaagtgctttgctgctgcactcaacacatggcatgggtcatgcaatttatataatgtttat

SEQ ID NO: 113258 - DNA, 1007 bp, Homo sapiens
agtaattggagaaaattgttctccaattttctccaattaggagaataaggagagtgtcatattaagaagtacctgctttaaacatcatagaaaaactgtatacattataatagcaattgcttttccagtgtcttcattccatgatcctgagccaattcaacaacacggtttcagtttttgagagcctgaggcactaaccttggttgatataacattttctttcctctagatgttcaggcggttgcttatgaggaaccaaaacactggtgctctattgtctactatgagctcaacaatcgtgtgggtgaagcgttccatgcctcctccacaagtgtgttggtggatggtttcactgatccttccaacaataagaaccgtttctgccttgggctgctctccaatgttaaccggaattccactattgaaaacaccaggcggcatattggaaaaggtgagtttttgctttaacctctttcagatgtttatctgttgtgtccctgttcctccagagctgacttaaaatcattcctgtaacaaactgttgtagcaaagaccaggtaatgttcacttgctgcagtttgtaaatatttttccagtttctgctatctggaagctcttgcagtcagtgatttttgtggtcgatcaactcataatattgaaattaattagttgaaattatgatttgccattttaagacactattctgtatgatattttgctgcagaataaattggctgttataaaatgaatcacaacctaaaattaaaagcaaattacagttaattgcttaattgtatttcaaatgaataccataactcagtaaatagaaaagaaagaactagattttagcacaaacatcgtgcaaggtggcacgatagaaccctgcagtgattgtacccccacagggacaccaaattgaacaactgtccatataagacagcaccttcaaaagaacaaaaaatcaggcatggatatatttataataagaaaaaataaagaccaaaaaa

SEQ ID NO: 113259 - DNA, 1020 bp, Homo sapiens
taaatacagacatacataaaatgaatttgcactcctaccagaaatatatgagtgcctttctcccttcatccatgccagtattatagttgggcattgtgcctattcaaatgatatgattatttatctagaaacctccaaagaatctatcttttaaaaattatgtaagtcagtttcctttaatctggtaataaccagttagaaatataatgaaaggggaaatatccccttcccaatagccacagaaaacatcagtttcttggaaataatctgaacctgcaatatgtgagaattacatgaagaaaccaaattttactgagagaaagaaaatttgaataaataggcagtctgtgttccttaaagggaaggcttaatattgtgagaacattttaagcatattaattccatctaatttaatttataatttaaaacaactcttttcagaatcacaatgtgatttttttgaaaattggaaaatgtattctgaatattctgaatattacctggaaggataaacaagtgaggctagctaactttgtaaatggaaaagtaaagaaaaaattatcggcattagggttaataaaacattgtaaaactacaagtaaaccagtgtgtagacaaaacagaatgagttaaactcagactatactgttataaaaatataatgtatgttaaatgaagcatagcaaatcagtagagtcttctaatggttctacaataaccaagttagcgtttgggtgaggctgggaaagagaaaccctgacctcataccatatatgcaaacagattaatgagttgaatgtttttcaagagtcaaacaattaaaaagctagaagaaaatatgcttgatcagagaggtggaaattttttaagcataaaaagcaacaaaagaccataagaggtttaactaagagattgcaaacttctgtaggttaaaaatatgtcacaaataaaattaaaagacaaaggactaacagggaagcaaataagaaagtatatccttcttacatgaacagttcatta

SEQ ID NO: 113260 - DNA, 1096 bp, Homo sapiens
gaagaaattgaatgtcattctgtctagcatagcttttttgttttattttcttgatgataaaatgagaatttaataatagctattacattactatcagtaatgggcaattaaaagttttaaagtgtctttattaagataactttataatgtattttaaaaccttcattcctcaagaccagcaattcttattggaatccatggatggaccctggggagctaacatccatcccttgaaattgcctgcgaaattatgcgtgcgtttgtgcatgtgtgtttttttctccccaggggcgggggggtcagggaggaaagatgcatagctttaatcagagtctttggttatgtgaactcttcttacttaataagtttaaccactgagttaaacaagttaaatgacctccagtatgtttttcctagggctggggagcagaataccaccgccaggatgttactagcaccccctgctggattgagatacatctgcacggccccctccagtggctggataaagttcttactcaaatgggttcacctcataatcctatttcatctgtatcttaaatggccccaggcatctgcctctggaaaactattgagccttgcatgtacttgaaggatggatgagtcagacacgattgagaactgacaaaggagccttgataatacttgacctctgtgaccaactgttggattcagaaatttaaacaaaaaaaaaaaaaaacacacacaccttggtaacatactgttgatatcaagaacctgtttagtttacattgtaacattctattgtaaaatcaactaaaattcagacttttagcaggactttgtgtacagttaaaggagagatggccaagccagggacaaattgtctattagaaaacggtcctaagagattctttggtgtttggcactttaaggtcatcgttgggcagaagtttagcattaatagttgttctgaaacgtgttttatcaggtttagagcccatgttgagtcttcttttcatgggttttcataatattttaaaactatttgtttagcgatggttttgttcgtttaagtaaaggttaatcttgatgatatacataataatctttc

SEQ ID NO: 113261 - DNA, 1741 bp, Homo sapiens
ccagtcacctctcaaaagtttcacttctcaacaccattgcattggaaatgaagcctccaacacattaactttggggaacacattcaaatcacagcaaccctgcatgctttcttctactctcactattatcgtgataaaataatttattttttaatagaaagatttccaacatacagatctgtcccacatgtatctctttcaaggatttataaaattaaacatttctctttcaatagatcattgagaggattggggactataaatcacttttaattttaaaaagtatttttgacccttaaaaaggttttaagttactcatcttcacaattgtttattttgactgtcgattatgcttaatataatgagattaattttcaaatttcacttggtaaatagagttcatagacctttctttccagaagttgcctttttaaaaaaatgacttttatttaaatgttttttcaacctttatcttttacagtttttaacttcatgttacttctaataattctgaaaacaattattccattttggtataattttctaaactcacaggggaagtctgattttcttttcttggtatgaacataaagggaaaatcaaatgtgatggcatggtaacaactaatcgcagctgatattattaaactattttatggctattgtcaacatccctgtgagatagatgctactgttatcccattttacatacagggaaactgagactcagggagattaaccaatgtgcccaaatgttacatgatagtataaaagtctggctttgagctcatgtaattgacttcagtgtccacatacttaatcattggtgcttacttttctgtgaatttactaaagtaacaggattatttcagattccctaacttattatgatagttccaatttcagtgttatctatacataagatgtgatgaaatggcaccatgttggcaaatgtttcgatgtagcgcacaatttcaccacatgatggtgccagtgaagtgagaagtcatctgctgctagtatttgacattaggctcagacctaaatatgtcaacagaatgtagtaaaagatgtttaaaaatttttttaaagagcaatcataaataattatagactagagtgtcttttgaaaacataaggaatgaaaacatcacaaatacaaaaagggtaagagtaattgactcataaaacttaaaaataaaaaagatgagcttttgtattcataaggaagtatgtaggacagatgtcagagactttccacaggaaggaaaacaccaaaggaaatgaattaaatgagggcaggtgacttaaaaaaaatgagaccagctgtatagtgatgtagctccagggtcaaatggttccagtaagattccacaatcagtgcaaacgagttagcaaaagccaatgactaaaagatttttaaaaacctttaatagacattactacttccttttctaatctaaaataagtattatttttccctgcattatcaaagatggaaacaacaatagaaggaagaagcattgcttttcagaaattattgaaacaaatccttacatgtcattattacagtgattctccaagtttggtccctggaccagcagcattgacatcacctgaaatgttagaaatacaaattatttggccacgctcagacttttactgaacctgaaacttggggaatgaggcctttcagggcttttggatgcacccaaaagttagggatccactgtgttacttat

SEQ ID NO: 113262 - DNA, 1034 bp, Homo sapiens
tggagagtcactagccaatctgataggttcatctcatctcgatcaggaagctctagatcttcaaccttttccatttcaatggagaaagaactagtagtggaatggctgttacacttttgataacttggtttttcaggaacttcctgttgctgactcttgaggagcaagttttctaagccctttaggtttccccagacattagtaaagaaattgcaggctctggaagaagtctgtctattctccaaggtctgctttttggtgagccagtcctgggggttggtgctgggtatgtaaggagcctaatgaccactggcaggtttgcttccaaggagccatttgctgagagggatagctgcaatactggatgctgacttctgctctggcatagggatatagcctcttctccaggaagggcccaatatttgatgaactagcataagccatcaagtgctcagaaatttgaattgttttgagagacctaaatatggtgatggtctggcacagagcagttgtgtcagcttcaaagagtaggacatttgaatcttcatacttaagggtcaaactgcccagtctctctaggcacacagagacttgattggctagatctttgttttgggtacactccagttgatgaataagacaattgaactggcctgataaccagtagagctgctgagcctgctgttgaattgtctcctctttaagctgatagatgaggtccacctgttcatttagtcacacctcatggcttctaagacgttccagatgacgggttatgcaactgtgaatctgagctttgacctctcgcaagttatctttaatttgctgttcagcctggagaactccaccaatagcaagctccaagtccctccgtgcatcactacccctcaaaaggggttctctattactggagctgccactctggtcttggaaggtattcattctgctcacagctccaggtcccagtgcctctctggggcagtcggaggggaccttgggtggactgagacacggccccacacaaacctagggcc

SEQ ID NO: 113263 - DNA, 1035 bp, Homo sapiens
tcactcctgataactaagttcataacatatttaaccccatgaatttatctaattaaccagattttaaagcagcccataaattttttaagagccaatataactcagccttgtatgagcagctttctacctttatatactgtcacaggcagaacagactaattccactaaaatggcaaaattatgtaagtagagagaaggattatttcctacctgctcatgtaactcagcatcttttcctgctttctcatgggaagaaatcaaagaactagatcaataatcgaatcagctttgggccctaggtttgtgtggggccgtgtctcagtccacccaaggtcccctccgactgccccagagaggcactgggacctggagctgtgagcagaatgaataccttccaagaccagagtggcagctccagtaatagagaaccccttttgaggggtagtgatgcacggagggacttggagcttgctattggtggagttctccaggctgaacagcaaattaaagataacttgcgagaggtcaaagctcagattcacagttgcataacccgtcatctggaacgtcttagaagccatgaggtgtgactaaatgaacaggtggacctcatctatcagcttaaagaggagacaattcaacagcaggctcagcagctctactggttatcaggccagttcaattgtcttattcatcaactggagtgtacccaaaacaaagatctagccaatcaagtctctgtgtgcctagagagactgggcagtttgacccttaagtatgaagattcaaatgtcctactctttgaagctgacacaactgctctgtgccagaccatcaccatatttaggtctctcaaaacaattcaaatttctgagcacttgatggcttatgctagttcatcaaatattgggcccttcctggagaagaggctatatccctatgccagagcagaagtcagcatccagtattgcagctatccctctcagcaaatggctccttggaagcaaacctgccagtggtcattaggctccttac

SEQ ID NO: 113264 - DNA, 1030 bp, Homo sapiens
tgcgctcagatcttctctggtgatgaagaggcgaggaatcaagtgactgatctggaagaaatatctcgcagcactgcagctaacatcacagaacttaagtgtgttttgtgtgtgtgcccacacgtagacaaatgtgtacggtgcacacacacagtgcatcattttttaagggcagattatatatatatatgagatgtattaattcagtggttaccatttgtttgcaggaaaaagaaatgtatgggtgaaaaaatttatggttgataaatccagccaaggagattaaaaggggtttggataaattctgggtataaatgctcagactaaaaaaaagaaatggcagttttgcacagtgctatggtcttgcactagtttttgtttctcatctgaaaaaaaaaaagtaaaataaaaggaagaaaatgtaccttttttatggaatgagtagactgtatgtttgaagatttagccacaacctctttgacatataatgacgcaacaaaaaggtgctgtttagtcctatggttcagtttatgcccctgacaagtttccattgtgttttgccgatcttctggctaatcgtggtatcctccatgttattagtaattctgtattccattttgttaacgcctggtagatgtaacctgctaggaggctaactttatacttatttaaaagctcttattttgtggtcattaaaatggcaatttatgtgcagcactttattgcagcaggaagcaggtgtgggttggttgtaaagctctttgctaatcttaaaaagtaatgggtgatttaaaaagaaaaaaggaaaaaaatctttggctgaatatgttcattgcttgtatttttaaaacaacagaatttccagtatgaaacaggctgaaagagcaggaagaaatgttctttgtataataatgggaagtttggaatataaaagtttatatattatttatctattggagaactggtgtacaggaggaacattttcttactgtgttgctgttttccatcatgtgttatcctaagagttggg

SEQ ID NO: 113265 - DNA, 1069 bp, Homo sapiens
gatgcagatagctacctggaaacctcgttcctttggggtcttgctttcatgattctttggcgggtctagatcactaggcagtgatttatctaggtttaacccactactaagagacctttcttagttttctacctaatgccctgtaaattgtgtttttccaatctgactggtggaaacaggcattatttctagccctctctaagtgccgggcactgttctctaagcttttcaggtggcttttccccctccaactatgggtagtctcttcacccccgtgctctgatccatactttgctgaatactcaagggggaccctctctgtgtctctggggttgttcttctgtgctgccccttcctctctgatactccgtcctgcaaaatctggtcagaccctcagctctgtatccgccactcggagtctgtcaggttccacctggttccttctctctgcaatgaagcctggagagtctcaaggcaggaaactgatcagtcatatggctcacctcttttgtttcctgtctctcaggggccacttttcttcattgcctaacatccagtgatatgaaaactagcatttggtatattttgtctgatttttttcagttgttagtagtaatggtaaacccagtccctgacgcgctctcttgagtagaagcagaagtcttctgacactagattttaatggtctgctgacttgtttgtatctggctttgagggagagggtcccgagtactgatgaagagcatggaccctggagtcagacgaactcaaacctcttctccaccacttcccagccatatgatctaggccagattaacctttctgtgactccattccctcatcgtaaaatggggctgataacagttgtgccacacaggatttttgaaaaaacaaaatgagataatttaaagtataatacagttcctggaacgtggtaacatgtttagtatgtcttagctattactgtcgttttattttaattcatgtaagaccttaataaacacttgtcaaattaatgaatgcctgctcttggcccccagtaccacaaaggaggtaggtgccttaggac

SEQ ID NO: 113266 - DNA, 1041 bp, Homo sapiens
catcaccatatgtgacagtctttcaatgccccagtcttatgcctttgcacactggctctcatttaagccccatagcaaccctctaagtgaatactattattatcacactgtacagtacaggtgaagaaacaggcttaacagaggtgagatattccatccaaggtcagcaactaggggttgctgtggtcactagtttcagtcactagttcagtagtcactagtttcagtgactactgaaactcagcccagaacagttttcattccagagcttgctctctgtatcattgctgttctgacagccccgagaaacacttggcagagctttgaacctttctgttttcccatgccagggcactacacacctacttctgtaggctctgttcctctccagtgaaactgcagccctgacgctctccttaatgacgcatggcatgtgtgttcgcggccaaagaaaaccagattctcctgaaacaaacccatcactgtctaggccatggccaaggcttcaccagtgctcgcctgttatttaagcttcttgccattctggttaacttcttccatttattgatgttaacattctgacttcaccatgcaattatactctcacaagtgatggttacaaatgataccagcaaggagtcattaagtgagaatgaggaggagctccgtctgcatttgcggggcttacaaattaagagctgatgttgctgattgccagccctgggtgttgggtcagcccctcacatcatcagcacttgaaggattcgggaaggggaatttccctgacagttgtgctgacgatgtacacagcagaggaggatctctctgtgtttctctggccactttggctcagtggtgccaacagtaataaaagcttgtttttgtcagtaaattgagcagctatgacttggaggtctgcagagagccgttatgccaagtgagaaggtgccatttttacagtcagttgtctgactgtaaccacattagcctgtgggcagcaggtgagctgggaaacccatgttgaagacaaattaaattcag

SEQ ID NO: 113267 - DNA, 1010 bp, Homo sapiens
ttaggaaaactttaacatgttcaaaaaagtggagttttataaggtcacattctctgagcatacttaaatgaaattttaaataagtaagggtcaataaaatgtcctgcctaattggaccaaagaaaaagggagaaaataaaaattcaaataacagacatctaaaaggaatgaaatagagaacacttcatacataaacctggagcaaacagcaagagctctagtcagaggaaaatttatagaggtaaacattttaattagagaaagacaaaaataaaggaacttaatggtcatcttaaggaattgataaaacaacaaagtctagaaagaaatggccataaaatagataaatcctgttaagcctgattaagaaaatgaagcaaaaatactcaaagttaggaatgaaaaaggaaacctaatcatcaatgtggaagatgttaaagaattattggagaataatgaagctctaagaaaaaaagctgaacacttagatgacatagatcatttaaacagaatgactaaaattgacccaaagtggggagggaacttgaatcagtcggttcccaaagagaaattttggaaaaattatgaaggacataccgtttataaaggcatcaggtccagaaattttcgctggtgagttctttctaaccttttgagaagaggaaattccaatgttattaaacctttccaaatgatagaaaaagatttaaaaagctccacagtttcactttatggaggatgcataaccttaataacaaaacttaacaacctcacttattcatacaaacacaaaacttctaaagaaaggacacattttatctggacagtggggctcctcccctgaccctgctgagcccagatgccagcccttcaagatgttggggaccacctataacaataatggtctcatattttgtagagaagaacttttttccatgttcttctctgtgaactaaagaagacaggtatttcctttaagccaggcacagtaataccaagtaagcattaag

SEQ ID NO: 113268 - DNA, 1017 bp, Homo sapiens
aatactgaagaattgacaggggtcggaatccacttgccaccgcagctttcaagaacggccttcttagagacaggaaatgagcaggaaaaccagttacggagactcatttgcaattactagccacattcttcagagagaaggctctgctgaaatcctgaatgttgactaacagaaaatgtattcttgttgccttatttctcatgatgctttgttcttttgacccagaaacagaaaagatagtcctagaggcaggaaatggattaccatcctggaaattcaatgaccagctttttccctgtgacgtgtgtgggaaagtgtttggccgacagcagacattgtcccgacacctctcgctgcacacaggtgagtgagtagggcctgggctgtcagccctctatgctccatcaccaacttctttactctccggaaactgagtttctctaagagaggcattacaggaagtgctgggaatggctgaccttttcaagccattttctctggcatgtttaaagaagaccttggaaaggcttttttatttgtattgaaagggttcattgagttccaggtaggaccgatgagaaaatatacacaatttaggtttattcaggtaaaattcctaaactctgttaaaaaaaatgtattgagttcatcttgaaagtgaaggacagggggacacactccatcttactggttttatcttattgttgtgggtgggagcagccagggaaaaggcaccttggtggagaaacagcttctgcctttatttatgtataattgtggagaaatatggttggttctgagagttgggaaagggaaggcaaccaagttaacaaggaggaataaatagtaacttagtccacacagcaaaaataattgaagacaaaaagacataaggtaaaatcagtagtaaacataaagcaagatggaaataataaaatcaaacatttccatttttacactgaaatcaggtttttaaataatccagatatatcttatttacagggaacacaaaaacaa

SEQ ID NO: 113269 - DNA, 1002 bp, Homo sapiens
gatgttatctctgacccatgttgtgagcattttctttttttttttttctttttttttcttttttttttttttttttttttgagatggtgtctcgttctgttgcccgggctggagtgcagtggcacaatctcggctcactgcaacctccacctcccgggttcacgccattcttctgcctcagcctcctgagtagctgggatttcaggcgcccgccaccacgcccggctaaatttttgtatttttagtggagacagtgtttcaccgtgttagccaggatggtctcgatcttctgaccttgtgatccccctgcctcggcctcccgaagtgctgggattacaggcttgagccactgcacccagcgtgagcattttcatctgcgtggattaggagaagttcttaccaccattcaattatcaccacatggtgtccagttctataatgcagtactgagctttaaggagatttgcaattatttactgaggtaaaagacaagatattaacttagtgtgtcatttgtcttggtcttcaaagtgaggtgaaaagcctatcagtggcccattcaagtgtccttttagaagtgtctccttctctctttctggtgttctctgtcacctattttatgacattatcataggaggaatgtttgtataatctggtacagttccacaaaaagaaacatggattagaaaattaaaggtaatcctagggataagaatgagaaaataaaaactctttaagatgattagagaatgtattaaagtccatttatttcattcatggctatgaattatgggtagataacttgtggcactgttttcccaaatatgagacctttgggggaaattctggttcattcttgcattagggaattttctgtggcacagcgtgtggtagttatcactgattctacttagcacaaattcctcattaaggattttgcacaaactggaatgaagagcaaagctttcttcttaaagagaatgaaagcatatttcctttcaa

SEQ ID NO: 113270 - DNA, 1616 bp, Homo sapiens
agaagtgatcaaaataccatatgtcacaatggaaaacccaagcggccccagagcctcttcttcagtaatgagatttagttgatctgaacagttatttatgcattgaggtcatattttggccaatcttttgcttacagctgtcgccaaataaagccttctgtcttagcatttcttttaccaaaatcaggttgagagatggttctttgagaggactgttttgtcagggaatacagggatcttttcacacagtaaaatgtgcccacaaagccaaacaatacaccaaatatagggtcaaattatgttaaaattgaaaggaaacaaactaaagtctttttctttgtccctgttgttttttgaggttttgcttatctgtttgtttgtttaattttaccaaaaatgctccccaaatggcaatgaaaggttcaagggaactttcttcagtaataccatgtttacctcagagaggattggctgttaggacttccctagttgatcttcctcttgttccttctttattgtaagttttgacatattacactttctaacatctctgtgcctggaaatattctaggcttatacttttaataacagaaatggagaaaagtgctagtgtctggattgttgctaaatctgcacatgtgtaaccaagagtattaaactcagagccaaagaacaggaagagaagaaaaatccctcctttgtttgtttgtagactttggcattgatttcatgtggcttggaagagcttgaatgacaccgtgggtctgtctctgctctcccagagtcactagccaggttacctggggtaattacttaggttctcttggcctcagttcccttatatataaaacagaaaacattgaacaagatgatcgttcaggttcctccttgaactaagatttggggcaggatagagacttagttactgtggaaactgttgcccaaccttgggcaacagttgtgggttactctggggcaggagaggtcctggaatataatgcttcatttttatcctcctgaaaatgaacaaattggatctgaagataactgagtgctctacttgataataatgtattgtcaagcagattttgatagaactccttcctaaattctaccgaatgggtttaattaaggaaagtttttggaggcatgctggatgggtttcatcttcccaggacctacgcatgaaatgagacatgtccccttgaataactaggttataagaagcatagtttgctctattgtattttggccaactagtcctcatcattatggatgataggcctcagttcaccattaacaggaggagctgaaagccttgttttgggattgctaagatgagatcgttctccttacactgtgttcctacttttctagccatactgtaaggacaaaagtgcttaatcctacacacctatttgcttcatttaaaacaaaaacctatataaggaagaggaaaagcccaaatgacattcaaggcaaacatcataggtggaaaagtagagaaaaaacatctgatcacataataccgagtagccaggaatttctggaagcaatttatggttatcccagggatcagaatataagagtgtgaaatgaaataaaatgctttataa

SEQ ID NO: 113271 - DNA, 1256 bp, Homo sapiens
ggcagccatgtgcccagctaaaactcggggggttcctttattaaaggaaggagaaaagtatggatgttggagggcagctagcagtctctgctcagatgtctggttttaggttaattcttttaggttaaaccaaagactggttaataattccaaatggcctttggtcaggatagagttcacagactgtgacagtgtctgtgatggcctgttattttactctattacattcatcctgaatagtcagccttccgtgccagacttccttatttgtaaattgccagtaatacctaactcataggcttatggtgaggattaatgatgtcatatatatgttacacactcagaacagtccctagcacatagtgagctccactaagagctataaatattattgttatgggtgattgctgtgcccgactagctgatttgagccttaacttattcagcacacaaatgtctgttaatttcatttggtttgtaaatctcaatatttgttgctctgatctaatttggatttgtagccacaaccccacaaccccaataaagtatcaaaacgggagatctgctttgaatatgaagataatgctaaattggaattgatgtgggcacgaaccagtagactgccagcttcttacatcagaacattggtggccaagctagaaattcagtgtagttgtcaactttagataacattgccttgcattcatctgtttttcaacaatgtcagagatttctggtttggtcccatagagatcattaaatttgtgaacattctttctttacttctcaataaagacatttacaaactcacagtggaaaaagtgcaactcagatttacaaatggcagtagctctcttaccttttacattatttcagatttcaacatcatgtagcggataaccttccctgaaattctgcctcatctgttctaatatttaacatggctaaagataaggttagaacatctttttaaaaattattattattgttgttattattattattgagacaaatcttattcttgtcaccccggctggagtgcaatggcatgatctcggctcactgcaacctccatctcccgggtttcaagtgattctcctgtctcagcctcccaagtagccaggaatacaggtacacgccaccacacctagctaatttttgtatttttagtggagacgaggtttcaccacattggccaggctggtcttgaactcctgatctcaggcgatctgcccacctcagccttccaaagtgct

SEQ ID NO: 113272 - DNA, 1024 bp, Homo sapiens
agcttaataattatggttatacacaggataggtctttgtcagagactgctaaacatcttgtacaacaatcttgtgtaaacaacagtggtcaggaaaagactccccagaaggtgaaattccaacaaattttggcagagtcatttcagaaacgttaaagttacacatcctgtaagttattaataaagatgtgaaatccttgtatgaaatacgactatgatcacagtcatttccatttggaggttcacgaagcttactcaaggaatgattgaagtttgagggtggttacttatttttaaccttgcaagggagattcatgaattaaattaatcttagggcaccaggtgtgatagaagaactgcacgccattttctctatcttggttgttgaaaatagagtgttcaatgggacagtctgttgtactgtctcattgcatcattggtctcataagtatcagtgacttaggtataattaataaaataatagctgccgtgggagggtattttcagtcgttatatcaaaatgtataataagcattctaatttctgttatatctgtttaatttcctaacaaaggagttcagttagaaaaaggatatcagtggctcctgacaaacctgtccttaactttccccttagattattttcattcttctctgccagtgtcgaagaatacagagatgttgcagaatgaggattaaattaaaaaaaagatctgagtatcattaaatatttgatgagcagtatgagaagattgtgaggtgtgcatatcactggggtgaaaagaaagttcattcattcatggcccagcacaatgtctcacacctgtaatcccagcactttgggaggccaaggcaggagtattgcttgagctcaggagttcgagaccagcctgggcaacatggcgaaaccccatctttaccaaaaatacaaaaaaaaagtagctgggcgtggtggagtgtgcctgtgatcccagttacttgggaggctgagatgggaggatggtttgagcccaggaggcagaggtt

SEQ ID NO: 113273 - DNA, 2044 bp, Homo sapiens
gtagtgactgggatggggatgagaagggcttttaggaagctggggcattctctttctttatctgattactcattatgtatataggtaattttgtgaaaattcatcaagctgcatacttatgatagtatttctgcatttgtcaaggctaattgcttatttacaaataggtaggtctagatgccaagtggacaccttcaggctaataggagtgcacatttgcttcagactatgacagtgataatgatgacaacagtttttcaattatgccacttctagtttgcaggaacatttctatttgtaacacaaactggttgccctaaactaatgacatgtaggttgatatatcttctcctgttgcatttcaaatccaaaaactattccacactgcttatggcacttctttgatgtacttgcaggagataagctatagtctgtgcagctgtttactagagggagaaagtttcgtagttatggattttcttgatccagacaatgttacttgaggctaaggattgtgtgctccttgttagccccatctgtcccccaccagcctagtttggtcttagagtataggtgtatttcaaaggggagctgttgactctattagaaactagttgtagagaaagatctttcattaggcactgtcagctatgtgtctgagttagctcttctcagtaattaactaattaaattaagttgtcagcccctatagaccagcatttataggttcacacactaaagtacacgcatacttttttaagggtggtaacctttctaaaggagaaatgtgtatcctgtttagatgccttacctgaagaatctgtagaaagccacaaagataaagaaacaactgtgattgtgtggccacgcccctttatctctgcccatatggtttgagtctgcccagataggttgagtcacttggtattaaaaataattatcaacactttcatgtttgtgctttgtgggaaatggtaacatccgaaagcccttataaaacccagatccaagtcaaatgtggtggcccacacctataatcccagctattcaggaggctggggtgggaggatcagttgagcccaggagtttgagaccagcctggacagcatagcaagaccccatctcaacaaaatccaaattccatttgaggactttgtttctcaagtataggttatccccagggctgtggccactttggccttggcctggtttcttcctctgaacagagcaaatttatcaaatttatatgtgctcacataatattccaaacaccctttataaggcctcagcagtgcctgtggttgcttttttacttttgcaaagactatttagatgcctcgagaatgaatagtgctataaaaggccaaattcttgagtatgtgtaatggatgatggagagtatttgtttgaaaattgcaatgcagtgaccctggcttcagtttgggactggctaattcaatctacaaggccttttctgtatatacaatatgttcttccattcctttgctatcaaaaatacatattctcatttcatgcaatttcttctttgtgtttatttcttttcagggcagcaactgccctctggtaaccaggatagaaaaaagaaaagtaattccactcataaactagaccatctattttcattcaaacaaatctattctgtattctcttacctaggccaaatgagtgcctctctgtggtaaagaagacactcccacatcacaccatggctgtctcctgatgtagtgataggaatgatggtccaggacttcatttttcattttctgctattctctctcattcattgtgtctcttagcaagatacttagcttttctattttcactttatcattcagaaacaaaagatgttcactagaaatgcaaaagtgtggccagtgtttgcattcgcatgatatgaggttcaccacaccatccccagaagttccattcagacatcccacatcaaggtccctggagctctttcagtccaaagggcttcaaactgaagatgtcatttcccctgcctcccactttcttcatacca

SEQ ID NO: 113274 - DNA, 1051 bp, Homo sapiens
gaattatccacaatttacaaattactacctggaggtgtagagagatttaataacttgttcaaagtcatacagttgaggaggggcagcacaggaattcagacccagaactgcacagcacattttctctctttctgccctatcttgctgcctgctaagtcagataatatgtcaccagacactgaccaaaaggaacacacctcccagtgttgcccacatttaccgcagctgttggcattttaagtattactgatgcaccgtcttcttttagctagaaataaaaattagtcctttaagtaagatacttgaaataatttataattacttactgttgattaacagaattctaattgtattctcttctatttctatctttcctctcttcctttaatgctttgatatctagtaatatcatagtcacttggaacatttctttcagttaggatgtcagtagtttttaatggatcatctggttcatagaaatggttttatgaagctgtgttaaaactctcagttagataaaatatgtattgctgagtttagtgatgatctggtcagcagcatagaagaaacatttctagactgggaatcaggagaacttgggtttggtcctagcccagtttcctatagaaagagatgagaaggtctacaagctccttgcacatcccctgtattaaaagttctgtcatcttgatatggtttagctctgtgtccccatccaaatctcatcttgaattataatctccgtgtgtttagatcatggtgatggtttctcccatgctgttgtcgtgatagtgagttctcacgagagctgatggttttaagtgttcggcagttcctccttcattcactcacccttgtctgcctccatataagatgtgcctgcttccctttccgccatgattctgcttcttgaggcctccccagccatgcagagatgtgagtcaactaacctcttttcttcgtaaattacccagtctctggtagtatttttatagcagtgtgaaaatagactaatacacatctgttatggcactgtaattttagcccagac

SEQ ID NO: 113275 - DNA, 1122 bp, Homo sapiens
agcagccaggaaacttctgccagttgctaccttccctcccagctgtggagaggatctcagcagcactcggtagcctccatccacattcatttgtccaggaaaccgtggccacctgtgtgcagggcagtactcacagcagggttgttggccccgcagcctcttcaaaaataaagtccaagtctcctccacatactcaaggagccctgttttacagggcactggagaactaattaatttgcaatgcagaaagaatgcagtgacatctgaaatattggcctcgggtatcacaggtcattggaaatagtttgtgacaaactggggtggagggtgggggtggggaaggcaactctttgtcattcttgagtctcataagggtagttccatttcttctcatctccccacattcagccaaagaatccagatacctgcatgctttttagctttgcaggcagggcttttctattcaaacaccagaaataatgtgcttacacaaaaacacattacataatggctggttctagaggtggaaagaaattttgtctagtttatgtcttcatactcaaacaggggttcttggaactactgtttacttcccacagtgtcattttgaatagccatctccctggtcccaaaattattgccctgctgttaagttgatggattgtgactttctaatgtcaaaataactgcccaggaattgcctgtcagaatgctgtgacccatacggccagcatcccatgatatatatacaaaccttgcactgctggctttatgtttggcttggcagtatttaaagcagggtttattggtcaagttaaaacttgacctaaagagtgatttcattatatgcttaactgtgcatcggggggttttccgtgatttgcttgataaacttacgttagacattagatgaactcacactttaaaagcttaactcttatttgggggagaaggtcagcataactgagatttttaaaatgtaaattcgccctgctgaaagataatcaatctaccctacttcaccaaaacctttctttaggtagagaaaagcaaaatgactacatttacattttgttaaaataagcagctaaaaaaaaaagactttttttgttttaataagca

SEQ ID NO: 113276 - DNA, 1086 bp, Homo sapiens
ggtttgtggctgcatcactccagtctctgtctgttttcacatggccttttccactgtttctatgtcttgtcctcttctgtgtcttattaggacacttgtcattggatttgggacccacctagataatccaggatgatttcttcttgagattcttgacttaatcacatctgcaaggacctttttttcccaaataaagtcacattcgcattcacaagttcccatgattaggatgtagatgtttcttttgggggaccacaattcaacccactactctatctgtctgtctatcatctatctgttcaactatcaaaatcctctttgttttttgtttcccagtgtgctgagtacacagtagttcctaattattattattaatttgaaagtgtggccttattttatagcgacccaagttattttctgggctaattgtcccaccttgtttcaaagatgttttatcattaactctaagcaatagatggacatagacactccacccttacaaaacaaatatgtgtttcagactaaagacccagcatctaatagccacacctaaatgacacacagtaaattgtaccattattataacttgtaagattgctgtttttctgggtgttgctccttgggctgcagttaacttcctgcgtggtcttccatacacctccagcaaggtgcaaatgtctccgttgaattgaccctatttatccttgattaatgtatgtgccctagaagagagaaaagcaattggtcagagctttaaaaatagagggagaggccgggcgcagtggctcatgcctgtaatcccagcacttttggaggccgaagtgggcacatcacctgaggtcaggagttgaagaccagcctggtcaacatggggaaaccctgtctctactaaaaatacaaaaattagccgaatattgtggcaggtgcctgtagtcccagctactcgggaggctgaggcaggagaatctcttaaacctgggaggtggagattgcagtgagcccacatcgcaccattgcactccagcctgggcaacaagagtgaaactacttctcaggaaaaaaaaaaaaatagagggagaaaaccat

SEQ ID NO: 113277 - DNA, 1481 bp, Homo sapiens
tagagactggatctcgctatgttacccacccaggctgttcttgaactcctaacctcaagcagtcctcccactttgccctcccaaagcactgggattacaggtgtgaactactgtgctggccagaatttgtatattttagatttttatgttttagaggggatttctaggctgactttaatgtaccgtctcattttgaaaaacatctttattaaaagtgatcctcctgcctcagcctcccaaagggctgggattataggcatgtaccattgccaggaatcctgtttagaagccacatgtgcacacacacacacacacacacacacacacacacacacactcacacatgcacacacatcagcactctggttcatggaaggatatataaaggcctattattcacaacatataaggatggacagggcttagatttattaaatggcaaaggataataatgttaaatagctttaaggttagatcagatactttaattgaccctttccatttttttcttttttctgcctttttaatatgagacaggaaaagtatattctggacattagatgaaaaataggttaattttttttaaatgagatcatttggaatgttaccaaatggcatatatatagttcaaatgcacctctttagctaatttctagtgaaattattaaatgaaaagaaaacaagatgattgggagaggttttacatttaacaccaggacactcaaagttcaacagataatgactgagccacccgacatcatctgctgggctgccaaagctaatctctctgagctcccagcgactgaaggattttaattttgattttgatttggacaaaagtgaaattgagtgcagaatttgttatgtttgagggacatattctgatatctggtcaccagaatcaagttgaaaactcatactgcaggtgtgggcatactgttgtggccagtctgacaacatttgcagatatccaactgagttagctcagtcgaggacctgttgcattgataactggtgtagaggacacaagactaatttaaaaatctacgtaagagtaaagcaacaagcgctttgatcttgtagaaaatgatatgtttcatgtaccccagaaagaaattccaagtctcactaactcttttttacctgtagagtttgagctcagcatttttaagacatgtttgttctttgcaaattcaaaaagttagcaaaatagaatacctggtgcttctcaggtgtttttctaaaattgactctaagttgatcccctgctcacctctgtctacttaattatgaattctaatttgcatagctaattctaaagacatttgttaattttccttcctaaatttccaggtattatactgatatagagggaaaatgttggttactttatgattttgatgataaaattcaagaaatcaattctgataaaatacctttgaaattgttttaagaataagagtgtgtgtgtgtgtgtgtgt

SEQ ID NO: 113278 - DNA, 1135 bp, Homo sapiens
tgatcaaaatatctattctttcctaatagaggacctggcattttgtgtgtatttatactacactctttaagcaccattacaaatatttttcttaacttcataagcatttgagatggcacttgaagtaattaccaatagagtggcaataagagattttatggatagagaattttataatggaatattacaataattaatctgttcttaagattaatgaatcattctttactagcatctaaatgtaatctcagcgtattaaatgtagggaaaatagcttataatttgaaattcatatagtttggatttttttccacgtcatctcctatctgccctgtcctctctgaaacaggtaaaaacataatgtcttttcaattcaaagataggactttcagaacatggaaaaaaaaggttatatcaataataatacttgtcaagtcatatcccatccttagttcattacctcttaagcagaatttttagaaactatatttaaaatgctaatatgaatcgaaagctgtttttagtttgaaacttgctgtgcttggagaatgaaagcaagaaatgcattagagagactcctttaagacctgtaatttcatcagcagttctgactgtgtttctggttgactagtgggttggaaagtaagaaattaacagtgatttacttagtcgttatatcagaacagttgaaattcctgtacttaccagttggtggggttaaaaattcttttctttgatgttaattcaaagcacattggaagttcaaggtaacatgatttgttataaataaagcataatgcaatcattacattcttatcatagctctgtcttcctaaactttgcagagatagtgcagtacctcctatgcagatgagatgttagtaagattgtactatttgctattataaaagctgaatatttttataaaggatgttcaagtgaacacattttttgtatatttgaactctccttcctatgttaaatgatgcagagtaatctatttgttgttttctgataaattcaaagaggtcacatagctctgattcttcccccatagcatacactttcacattccagtgacttgaagtcttaaccaacagtgacccctgtctccctccttatggtcagattccag

SEQ ID NO: 113279 - DNA, 1845 bp, Homo sapiens
gaacactgtttgaaaaccattgctctgtagtcccttccaggctcaagagtctttggccttggtttagggtgagatcgtaaataaaattctcagtgggttgctttttcacagagcagttcagcatttataaaattgccatacgttgaactgaaggagagttctgtcttattaagctcaagaaaaggtgtcattttccttcaccagagggaaccaatagaagtatttattttgcagttgattccttcccttcatcctcctagtcaaatcttctcaggatttcttcctaccagaaaatgtcccttttcttcagacaaaacccacccttccctttctcatgaacagtgcttaattcacccacatcacttattttccaaagccattgttcacctgctgaggatagtgtcccttttaaaggtacctgggtgtcttggagagaaaggaaggggtttggatgcatttccagtgagaaactctgagccaagtgtctctgtgaattagatctgtgatttggggcatcagtttcttaacctttttaggaccttagtttcctcacctgtaaaatgaagatagtaataacatctgtctcctgtgattgatggaaggtttgatccctatgtaattactcaagagctagttgtatacgttgttaaaacaaatgatggtctttagaaggaagttatatagtattttccctagtaatagggaagttatatagtattttcccaattactatataactagaaaatattgtaaaatatatagtattttctagttatacagtaatttcctagaattggaagactggaatcatcttatcccagcagctttcccattcctttcccacatttgcctttatcttgaattcttcataaatcctcaaaaaagcggatttgtttcctttaaatggtggtccacctccatcaagtacataaactgagaggtatgtgtaattgatcagcagcgtggcccaggtcctacgatgctgggaacaaacagcgagagagggggcctcttgattaccaagggctttctcatcacatcaaaagtgcagttatccagaaactttcaaataaataaacagaagtcaaggcaggtgttgtgaaagtccttgacaagttgagttccgcacctgcacaaatctttctgtgttagtagtaggaataaagtgaagactatgtcatgagtcataaatggttgcttttctcttagcaatttccccaaagaaaaagaaaacatcttgaattccacctctcactgcacatgtgggtttttttgtaaagtgggataatttaaaagatagtaattattaagtcatattaattttaaaatataggctttatgtactgttctcaatgtaaatatttttggtcattgaaaaaagcaggttagccttcatatttctatttttacgtcttctattgagacccaaatgtttgggaaattaaaacttgggcaaatgagtgatttccatatgctcttctgatatgtcattagctatatttacatttcctcagcacattacaattttctgttattctctgtattgtcagaatgaaaaccaggtatgtagtgccttgcaaatgtataatccagcaatatacagcttgcctattgccttttaaagtgtctttttgaagttctattaaatccaggttgtgctagcaatgctaaatatctttacttttttccccctaagtctcttatagcatatactctgactaatgcttctagaaaccacttacatgtgcaggaagcatctgcttaatgatctctagaagttgggatttgctcctggggcctcaatagttttttttttttcatctctttcttagcttcatcttagaa

SEQ ID NO: 113280 - DNA, 1045 bp, Homo sapiens
cttttcctccccagcactgcccccacccatccacccagcatttctgatggacttttcttccagtacctcttgcatcagatcatgctcctgtctggctagctcttttccttccttcctcctttccttctttccttccttccttccttccgcccttcctcccttcctctctctcccttcctcccttcctctctctcccttcctcccttcctctctctcccttccttcctttctctctctccctttcctttcctttcctttcctttcctttcctttcctttcctttcctttcctttcctgtcctgtcctgtcctgtcctgtcctgtcctgtcctgtcctgtcttgtcttttttttctttcgagatgaggtcttactctgtcacccaggctggtctcgaactcctgacctcaggtgatcctcccacctcagcctcccaattagctgggtttacaggcacaggccaccatgctcagccctagctcctttctgctcagtaactatctctccacttctcttaagaaaactgttaacagtcttcaccagctcatgaacatacccctctcatttccatttttctacctttactcatgttgttcctggggtctgataattggaaccatggaattgcatgtatattttcctcctcttgggaggagctacaaagtcacactgtaaagaggtgggcctttggaggggggaatcgtagccatttcatggtctgccacagtccagagttcttcagactctctgggtgatccacaatgacaaaaatcatttacaaactgatctgtaaataagaatgtcagcatattaatttaaaatgacaagtatagcagtcaagaggagatgtcatttggggcaagtggatcctgactttcctgaaaaaggttggaaatatattatccagtcttcaggttttctttcttctagtctccaggcaaaccactccattgctgctcatacatttcattctttggccgtgttaatagtgggaatttaaaatacagccttctttcacatttacttagggcttgattggttttccag

SEQ ID NO: 113281 - DNA, 1051 bp, Homo sapiens
tgtgatgccctacctggctgtgtctgtggatatgatttagggacaaaaaggccaaatcccagggagctgcggctgagtttctagctcttcccatcatcaaatgtagtgaagtagtggctagtctcgggccttgtcccttggcgttataacggcgccattgttcttgcactgaattttttccctgggctctgtccgtgcacctgctggtactgtagggtgcagctgtttgtgggcactgagtctgtgaatctttgtgccagccagatcactgtctgcaaaactggagcacagtgacaaattcaagcgtgcagacacctacttgtttccaaaagagagaaaacacttgatgctttcttgcctggttattaaggggagtctttcttgctccttcaactaaaactaagcataaagatgattgaatggaaccgagtgggattaaaagtcagtggatagaatactgttttaaatggactctcaataccccccacccccattcctgttagaggtttcttaacgtgcatgattgtgaaataaaatcccttctccaaactatcagctattcttctgactgagcccacacttaacactgcttggtccttcaaaaataatgctgcttgcaaaacggaggcttccaggcccggcatcgcagttgattcagggaatagtatgggcagctttcagggctgacagaaaaatgaattttgtagatttcacccacggtttagactgaggcagacctgagaggactccaggcctgtatgttccagcagctctttcctggaagccagaaagcatatgcaaatcattgcatgtcagggcaggtgagccagtggtcacgtggctagggtgttcagggaaaaggtgttcacccgactgcggagagctaagttcctgctgattctgtgccttgtcacccatagccagcagcagttcttaacctcggctgcacattagccttgcctggggagtttttcacaaaatgccagggcccagaaattatgattcactgggataggccctggacattggtattttctttaatatcctcaaa

SEQ ID NO: 113282 - DNA, 1572 bp, Homo sapiens
tcacttaaaacaacctatttataaacccatggaaaaaaagcagggttttcaatagcaggaactactgaccctgaaactacagggagatgagttgggtgccttgatgacacagacggccggccatggcagtgtcacagatgagagctgcaagggctttgtgggtcgtggggtcttagaatgctttcagaacaaatcaataaccagtacgataaagcagttgtgtgaaattactactttattcaaactcatggtgtcctaacctgttgagctatgacttgagcttttgatacgggaagtgtgagaagagctcatgcaagtttaattttatcaaacggtatattctttcttgtccctgctttccacctcacttattggctgttctttttttaatcaaagcattcatgattttatttggttaaaatactttaattttgctacattttgcaaatctagtctacctggaaatataatggttgtagtcttatgggtagatatcctctgctacatccaccagagactacaaatatggacggacagatttttttttttttttttaatttttgagacggagtctagctctcttacccaggctggagtgcagtggcgccatcttggctcactgcagcctccgcctccgggctctaagcgattctcctgcttcagtctcccgagtagctgggactacaggcgtccgccaccacgcctggctaatttttgtatttttagtagagacgaggtttcaccatgttagccacgctggtcttgaactcttgacctcaggcagttcacttgcctcggtctcccagagtactgggattatgggcgtgagccactgcacccggccgtggacagattttcttaatgaattctgcctaagaagtggggtcagtacgggaggcggagcttgcagtgagccgagatcgcaccactgcactccagcctgggcgacagagctagactccgtctcaaaaaaaaaaaaaaaaagtggggtcagtatagccagagattaagatctcaaactgtatggtcagaaaaaccttagttagaatctcagttccaccttaggaactgtgagactttgaaagaatcatttaacctctccaaacctctgtttccactaatggagataataatcatacagtctgtctcatggggttgttatgagagttaaatgagataatgcacataaagcacttaatacagtgcccagcctggagaaacaacattcagtaaatgtagctaatacagtgatcattatcggaaagccatctcaatatacattaatgtttatttacatttagaaataatcaatgaaatggtataaaaaattactctaaaataaattttattccttttccctttttgtgatctgtctttagtgctgagaacttagaaaaactgataaacaaaggaatataaagttgatccttaatcccatcaccaagaatgataaataaccattatcactttgatgtatattcttctatattggtatatcgatgttttaaagaaaaatgggattctactttctttgttcaacaaatatagtacttactgcatttgtattatagt

SEQ ID NO: 113283 - DNA, 1047 bp, Homo sapiens
cttggctgttactgccttaccctccagcttgcaaactaagaggaacacacagagacaccgtgtaggaggcatgaagacagtgaaggcaccgggcctttaactttatttagccctgtgggaggcttgggggccctttctaacaagactgtagtcctcattgaggctgtcattgtttgagctatcataattcccaggattacatttaccaaacatccaaggacataattttcaatgtcctattaaaaacaactggggagctcaaacctacactaaacatgtacagaaaaattgactggaatccatgagtccctcttatatgagatgggggaaaacttagttagatggaaatctttttagctgactccgttaatgcaaagggttttgtctcaaaatccaggaggaaactcatgggatcaaaagagcatgggcttttgaatttgatagacctgaattgaaatcttattatgcaacttactagctaagtggccttgagcaagttaacctttagactctgaattttctcatctgttaaatgggaatcataatgtttgtctggaagagttgtcattagtatttaaggagagaatattaaccaaatatctgacacaggaattttcaatggaagttatttaattctaataactatcattgagcatcttaatagcaatcatatcttcactgatattttcgatatgatttggctgttgacattatttataaagtgtttactttcctaccataagaagtataatgtatggacataattaaggtatttgcttatttggaaatcttgcagtctaatccttttaaatagatcagtaatcactcttcagaattgtagctctaaaaaagtgtgaccagatagaacctctactgactttaggaaatagcttggaagattaagaaaatttaaatccatgatgtaatttgttttctatcatttgcctttgtctcctgggagtagcatgcccttcatcttcagaatccatttaaccaggagttctggttggctgaattttactcagccgacttagtttttactttaac

SEQ ID NO: 113284 - DNA, 1059 bp, Homo sapiens
aggactgaggagaccatgcgatttgagtccttttcctccccttttagctcccagtctgccagttctaccttggccgctttgtccaagaaggtcagtgaaagaagtttgactcctggtcaggagcaccctccaccggccagctccttcctttccctggcttctatgacctcctcagcggcccttctgaaggaggtggccgcaagggctgcgggcagtcttctggctgagaaatcatcgctgctgcctgaggaccctctaccgcccccgccttcagagaagaaaccagaaaaagtcactccgccacctccaccgccacctccaccacctccaccaccaccaccacaatccctggaattattattactcccagttcctaagggaagagtttctaaaccctccaattcaggtatggcatcttttctttcaatcatcgtgtaagtcctttagactataaactgcgatgtcttattcattgcttttttcagttgggttccccatctgatctgaggcaggaataaaaaagcaagagcacaacaaaaatactttaagtaagcagcatagtagtctttcatgtacgtattacacaaagacttcacaaatagcttcacttttgaaaggtaatgaataatcttagagacatacagcattccctccctttcatacaaatgatttttttttcttactaagttcaggctaggtccatacaagatatatttaatgggagaagatcaaagcatctttgtcatggagtgcatggcatcactgaacataaggggaaaaaaacccactgcttttgaaatagtggacaagggagagcccacactcctgctgcctccatcacaaatggacttttgtacaatcaggaactactctgccctaatttatcacaccatatacttttatgttagcatttttattactttttgtggaatttaagcccttttcacgtatcctattctcctacaatttcttgtcctataagaactcaaaaagattgtcaatcaaacataatcaacacatttcctgtgaatgctttatttaattcaaatccaatccaat

SEQ ID NO: 113285 - DNA, 1033 bp, Homo sapiens
cagctcagtgacttgcctagagtcacggagttagaaagtagggaagcgcttcccactgtctgtgtctcacggtctgtgtcccactatgccaggctgcctctctcattctgtcacagtgctaaacatactgtgctggtttttcacaaggatataggcttctttccatttccccccattccctgaaaatagcagtttcttcatccaattacctctttaccagatccatttttctttttccttcttttccctttcaacttatctggactacttgggtatgtttttacctttgcctgtgtagcattttttacttttttcaggcttctgccaagtctgtctgacattctgttaaggctgttgccacctttcatttggttcttgggtggaagggaagagaaagcatgtcatcacctccatttgaatgtcttgagacttacttattgttcactttgggagtaaacctgatcttcttaattctccccagatgttagtaggcaggaagaggcggagggagagctcagtgaaggagaacactggtatggaaactcttcagagactccgtcagaagcatcctatggggaagtccaggagaactataagttgtctctggaggaccggatccaggagcagtccacgtccccggacacctccttgggaagcacgactcccagcagccacacgttggagctggtggcactggacagtgaggtcctgcgagactcactgcagtgtcaagatcacctttccccgggagtgtcttctttgtgtgacgatgacccaggctccaacaagcccctgagcagcaatttgaggcggctgctggaggctggttccctcaaactcgatgctgcagccacggctaatggcagagtggagtcccccgtaaacgttggctcgaacctctccttttccccgccttcccaccacgcccagcagctcagtgttctggccaggaagttggccgagaagcaggaacagaatgaccaatacactccaagtaaccgttttatatggaatcaaggtaagtggttgccaa

SEQ ID NO: 113286 - DNA, 1192 bp, Homo sapiens
cttgcattcatttctcccaaagctcctctcaccatttatttaacctcaggtattgccagaataatttcagctatgtttctcctcaagtttctgctctttctctttctatgccatgcattaaaattatatggtaacttatttcttgaataacctcaatttcagtagcagcatcttcagaaaagtgattaacagagtattatgaatttaagagatactcttcatgcatccaagttttcttgcagtccagaggtgtgtgtatctcagtgatcgagtctgcaaacaacagagggatggatggttgagaaattatctaggcattttaggagccacaaacagttctgtttaagaaatactttgtttattcacttgtttattttgagtttgtgttttgacaagttaggaaagttgctttaaatgtagacattagctgttgtatctttcaagaaggttcagacatctttatcactgcttggtaggattagaacctgaattgacagtttctttagcctttggcacacttacctgtttgcacactcacctgtttcagcacgtttggagggggaatattcttgctcactgagggtgtggagggggttaggaaattaagctttgcttttgggactttgccagtagaagtgctaaattctttaggcatttgaatctccttttgaccgactccaacaaagaagaggcagaatgggaatgaagagattagagtacaggaataatgagtgttcacctcttaatgatttatctcaagataaagagtgaatactgtccttatctaagagaatcccttgctgatttctgattcaagaggttggcaggaaggatgggggaatggaaagcgggtgagcagctgctcagagctctctagaagtcgtcgttcagcggttctgtctgcagattgtgcagtggaaccttgcagagaagcattgggccagctgagagatttggggttcttggtttctgcattagctctacgtggtcgtgtgtctttgattcagccagtaacctttacttaacgtatttaatagtctgagtaaaatgacaagatttgatgtgtggttgtaacttcttgtggttctcaaaacctagattttaggtatgctgttaggtgaccctactgcattagtttggaaccattcttgactatcttgagctcctctggtatgacacacatatgacctaa

SEQ ID NO: 113287 - DNA, 1391 bp, Homo sapiens
gtttgagaacttactttggctgctggttgagaataatggagcaaggttgggaagtgaggagaccagttggaaggctactgccatagtacaggtgggggatgacagcactgggtaccaggttagtagtagtggtggaaatggtgcaaagtggccagatttggtacctctgttgaaggtagaaccaacggaatccgagaatgaattggatgtggggtctgagagaaagagaagagtcaagggaggtggcatggttttgggtctaagtaattgaaaggatggaggagttgccattcctgctgagacgggcaggtagagggaggaacacgggcagttcctcggccatggaaggtctggctaagcactttatatgaagaatactgaaactgacttagctactttttcgaactcactctgcagaggagtgatgcgttcatttgtgttacctttattttactcacggtcatttagaataatgatttgaaaatgttgctgtgtgccaaatgctcgtcttgacccaggagcccctccctccccccgtgtgtggactactctcgtctccagacttcctctcacttcctcatgcctttgcagcaccttttccctagctggactggtgacaggaatctggttgtcttctgcaccctggcagttttaaataactagcagttcttacattttcttcctgggcacgctgacagcggttgggtgtcctggacatccgtgtttcgataactgtaatctccgagtctctgtcctgtgaagcccattgccggccgtgcatttacctcagactgtggacttggagccttgaagacgcgagaggtctcttagtttcaggcagacctggtgtgggggatgtgctaaggctctcaggctacaaagggacaatttaaaacttggcaagtaaaaccggcctaaatgcggatgtgttttatgcttagcatcataaaattgattcagaacagcctgatatgcggcagaagaaacctttattaaacattatagaggtcattgcttttgtcttcctgatacctcttccctctcctttcttctgtgacccacattgagcccattgtagaacccgccccctggcttcagtgataggcccatggaggggaacatgacctccaacaggccaatcagaggcgtaaagacctttctctagtgggaagtcattgagagtgaaaacccagaaccggttgcagccaggttttcagcctcctgggaaaagtggcctgagaggaagagactagaggcgaatgagagagagccctgatggtgctttcgacatcctatctgatgctggctccattgtgccccttttattgtttggtacaggaactgagaaaattcccttattgcttcatgcggtcctgctggttttctgtcat

SEQ ID NO: 113288 - DNA, 2596 bp, Homo sapiens
aatgaaatcattaccagtatgatttattgctgttgctgtgattcaagctaaggtcccaatagttttacccgtcattgcttttgtatcatcattacagatgtcaatggagtaataagggcaaatgatagcttagtattattataaaaacagttttgatcttgaggatccctgaaagggtctcagagacacataggggtccacacaccacactttgagaaccactactctaagttgtctacatagtaatggaaatgccacatcttggtgcatgtgcgtcttcagctttactaggtaatgctataatgtagcactttgaatattttcaccaaagaccccaaaaggcaaagaatcctgaagatggggaatcctaaactcacaacggttctcacagcttctgtgagatttccttgatgtatctttgaattatcttacaatgtgcattatactgtatatctgttggtttagactaaaagtaatgttttcaataactcatcagtcaaattacctttgtttcttgtaaatatgtatgtatcagttttggtctgtgaagatgctccatatttatcctggtacctgttatgatttcctggaacccctgttggaggagaactccagtgagtgccttggtccagcatgatttatcttggagactgcatggtagcaaagaagagatgactaagatttccagtcttggggaattaggagtatttctggtcttcgtgtcttctttttctgggttgctgtcctcattgtccatgaacccactcatctgagacagaaacctgagtgtaatccaaatgccacccccttccttttcctcccctcattgaatttcttccccacccagttttgttggttctgcttcccaaatatctctagaataaatcatgcccaccccctgccactgctttggtttacactcatattttttctcaaagagaattgaaatggttgccagctgacctctttttttttttttttttttttttgcctgagtctcacctctcccctccccaacccctgcctctgtaatccagtctccacactgccaccatggcagactttctaaaacactcatgtaatccagataatcctatttaagatcttttaggcattttctaaaaggataaagtctggacttctagactttgccaagaagcaaatctagaagatgctttgtcatctaagcccctttcctctgccatgttgtatactccttgttttattcgtactgaactatctgttctgcaaatcatacttatacctccttttcttggcgtattcttttctctgtttctgaaatatcttcaactcatttatgtgcctgataacctcctacttagcctgcaacactcagttctctgagaagcctttcctgcttcccctcctgcattgtcccacatgctgggtagaattaggcgtctcctcccctggttcccatagctctatcataataactttgtgtgcatagtatacttccttactagtcgatgttcttattgactgtgagcttttaaagggcatggactttcttattcatttttgtacattcttgcacataacagtaactgattatagtaggtggtcaataaatagtgctgaataaatgaatgaagggagaagtaaagagctggtcacagaatccaagaaataggagatgttctattaatattgttgaatgaagaaatgaatgaaattaagaaggggggaatcccataggtgtttcataaacactgctgaatgaataaacaaagaagttaagactgggtcacagaaccaaagggttttagaggtggaaaggactttagagaccatctcctgctgtcttcctctttcaaaaatgagaaaacgatttgcctaaattgtcccgggctgggtataggaggcgatgaacagtaccctggacattcgcgtgaatgtagcctggagatgactggagggagtcacatgcttctcctcccttcctgaggagacttgcccagaagagcagaggccgtggcgtatgctgcaggggataccaccgtctaagtgcaagagagaacttttgtggttggaagtctgtggcacattccagactgtggagtctcccctcagctattggctgttgctctctttctgtcctcaaactgtgccaagaccgtcagattttcctgatgactgggcatattctgcatctggattccatggtcataacaaccagaagtttcctgtcttctttggttggggtgattatgatatagagctgggtaacaatatcaacagttctgaggtaagccgtcctctttaaaacataatgttttctcatttgagatttctaggtgcctgggaaaaagggaaagctattattcactaagcgtcaactctgtgccaggtgctttacttatgtaatgctaatttacctttacatagccctgtacaattgcagatattagtatcttatactctaaacaggagaaggtgcttgtagacttcaggtgggcctagtgtatagcaggataagattcgagtgggagtgtctggttccaaagcttgtgccctttctattttgccatgctgtttcatgctgtataaatagattttctgctatacaaaactt

SEQ ID NO: 113289 - DNA, 1080 bp, Homo sapiens
cagtctttttttttgagatggagtctccctctgttgcccaggctggagtgcagtggtgcagcctctgcctcctgggttcaagcggttctcctgcctcagcctcccaagtagctgggattacaggtgcctgccactgggcctggctaatttttttttttttttttttacatttgtaatagagatgggttctcaccacgttggccaggctggtctcaaactcctggcctcaggtgatccgcctgcctcggcatcccaaagtgctggtattacaggcatgagcctccgcacctggcctgcattcaatctgtgacatgttttggatggcatatctgaagaaaatctgacttcacaccaatatgtaatagtcttttcagataattgtgaatattcattgatattacaccaagactcaaaaagagatagcttcttaaagattagttgcaatgattaatcaaaacatttcaataaacttttcatattttgaagcattaaaatctactggtctctcttgtgctttgaatggatcaatgtgcatagaacatcttgtgttggacatttggaaaatattggttcactgagttatgtagatctaccaaatgttgacacattttgttataaaatataaaaaaaatattaatatcaacactgatgttatctgaaaggtgtttaaggaccgtattgggaagctgtcaaattcacagtgtaagatacatgttttccaaaattttaattcttgtttgaaagcttgaattttattgttggcaacaaacactgtcagtttttccttgaagtatcagtcttacttttcatttccaatgaagagtctgccaaataccgatacttgaatgaccatagtcagttatcctttcaattaaaagtgatgttcaaggaaaaattggctagttcggctcttaactcagtcacacatgtccttttccttgagacagccaccgtactttggtgatagcagaagtgctttatgcatgtatttcattacatgtgttattaaaaagatgtttactcaagggtcagtcttcaatgaaaataatttttactgcttcatcaaagacattcttaagt

SEQ ID NO: 113290 - DNA, 1485 bp, Homo sapiens
ctcccttaaactctcccatcaccaaggtttttcactggctttgtgaccttgggcaagtcacttaaccatctctgtgcttaagtagctccatcatgtaaaacggaaaacagtacattactcaaaccttctgtttgtattatgctttattcttcatgaagcactttatcatctgcctgtgaggtgggcagggaagggctgcttctcccactgattggacagaagtggacacagacccagagaaaggaagaaattagcttgtagtcaccagtgtcagcactaccaagggctggaccatttgatggtctcttgagacacagtgcagctgtaggtctgtgaaatctacatgggatctcacagcctgaaggagatggttttggccactataaattgcttagagcctctccactacaggagaaccccttaggtgttgatggaacgtgatggccccatgattcatgaaaacctctgctgccaatagtatttccctcctcaaagacttaagatctgagttcatctcagtcttatcaaatcaaatgtatcttccttctaacttctaccctattggtcctactctctgttttctgatcagcacttcataagtttatgaaaatacttttcaagctgaattttaattatttgtttccatctctttctctgctcacttgtctctgagctccttgagagcagggactaagcagagaatagtagaacggagtcacatgcagtgacactgtctgaggcctgaattatgtgctccatatggagagcactgcctttgcgtaatggcctagaattaggcggcgttttctaatctgcacttgtttggccgtacttgttaacccaacagtcctctctagagcatgaaacacagctgtatttgggaggaaacaaagtgtgggagaccctacgctccaggaaacgttactgaaatgtgctatatgatttctcccttctagaggaaggcaaacttcaaataataacttactgggttttaatctgaccttaagaaagtgagaaatcaaattacagtgagctgctttgtgacatttatagaaagagagaaatttcacaatccagaagtagggtttgggttggctactagatcgtagttagaagtgctgtgcacaaatggctactcacatacttgttgataggtgaaaaaatatgtgcagaagaagagaaaaagtatgagaagcttaaacatgacttgggcgtactccataaggctgaaaccatagaaaacacaaatattaactattaatttatttttaaaaattgatattggcttttaatgacaaaagtagtatatgcttagtataaataattaaactcatgcgataatgcttaagtatgaaagtcccctcatcccaacttccacccccagagataaccactgttaatcaacaattaatatttaaaacttggcctttatttgaaaaattggtacatttcagcatagttggctaaaagaatttaagtatggaa

SEQ ID NO: 113291 - DNA, 2873 bp, Homo sapiens
gtgccatctgtgaaagctgaaggcagtgtatttctgagattaggttaatatatcctttgtccccttttgaagttgccatgtcttcctccattcttcatttttaaatatccactgtagtattaggacaggacaaggaaaaacaaacagagtaggctggagctaatctctccattctgagtgatgtattggtaattttgtataatttaatcagactgatcacagaacaagataatcagagtatgacctacagaatagggctttagggggcgttaaggatttccagcataaggttttacaagaacatgagctttgtggcgaaggcatagattttaggttttctcttattggaaaaaaatccaggccaggcctagttatggtaggatgtgagctttttttcatcagatttcataactatattggcttagttaatgtactcttagaaccacattttaaaggtatagattgtaaatgatggtgcctgtttctgagatacacttttctgtctcctgctttgccaggtgtagctcagtaattcattccatctagggctaagtgtacaacactttatagttcatggtagctaaaatgtcttctatcatattttataagagaataatgtgtgaagcacagaccttagaaatagctaagagtacttgatgggctgacatttctggctgctttctcccttctgtttgggagtaagttttttgtatttctgtcctctctctgtaagttattttttatgatattggagaatagtgtgtgactaggtgctgaggcaggggcctctctgatgactcctgtcattccccagggacccaccttgggctagaattgttgtagttacaaagtagtttcataaattaaaatcagactttggcttgatactaatcttaaatggcatgggtacatgttgctgtttattttttaaaagttagcttcactgcatgtacacacatgcgcgcgcacacacacacacacgcacacacacagagaggctgcactgtagctaattttataaaatgcacagtgatacgcgcccacgatctgaggtcagaatgtggcctttagcaactctgctttcacagtctgacctagggttatactaaatgcagcaaattcagtgtgcctaaaaaggatattgtttccgactgtccattcccttcttataaaaaacagcttttactactgaagttctgtctctggagttcttaagtgaccagggtttagatacactttgcttctgtttttaagaaaatcctaattcaaccaagtttctctaccagcaaggaagaaatgcatggaccttcttggaggccagggcctgaaaaagcaaaccctaaaataacctgtctctctatctctttctctttggtcatttctacatgggtcggaaaagtggttagaccccattagaattgtgatgtgaagggaaaaagaaaaggggtgagagagagatgtggatctcagggtgaaatgttttgagtgtgctgaagaagctggccttcaaaggagactgaagaaggccaggaaaaaatgatcttttacatgattgatcagtagcactctgcttatctgagcttttgaaacaagctactgtgcttgtggagggtgatagatgtttctaaggttacatagtgctagtatcttaggtggtctggtgctgtattttaaaaagcttttgttgttgttttgtaatgagagggagaaagtatcatctgtgactgtgccctctttaactttgtctactgtgtatggcacaactaaagtagaaacaggattcatgtgctttcaaagttcgtagggcagcagtcaaacgtacaaactctggggccaggctgttcagagcccagctttgccactgactagctgtgtgaccttgggcaaattgcttatcttccctgtcctccactttactcatctttaaatagtggtaatagtttctgtatcacagagctattagaaggaataattgaatacatatacaaatgtaaatattatacatatacacaaaatcatgcctaattagtgcctgctgcatagaaaggacttaataaatattacttattattaagtatgtgaaaggtgtttcagtttgtttagattgtgaatagattacaggtatttctgacctggaactttttggtggtttctatggtttttttttctcaatatatctcattagtgtggtgagtaataataatatgatatggtaaaattcttttacaaggctattattgtagggcttgactaatacttgtttcataggccaacaatattatattaggcttttactacaggaatgagtttctctgtttatatgatttgacctgaattatatctaagttgtgtaataatcatatgcattataaccagattttactataaagtgaggatactaaatcctcctttagacacttagagtgagactcaaattagagaataggtattccataaatatttatttattcttctgttcaacaggcagcccactggttagagtaacacagacgaaatttatattaggtgttccatatgttacataggtaatagtttatttacacagaaagaaggaaaggcagggtctgctgtttctaatcacagagaaccaaatcaagagaatacatgcaatgaatcttaaatgaaggatggggttgtgtatatgtgagcacagtgggaaagagagatcatatcgtaggttacaagctggtgccatagtaatgtgttttgccccacacagatactgtttaaaaacttgagacaacattttggaaatcggaggtttcatataaaaatccaaatttccagcttcctttgaaaacttggaagagtcactcgcactgggcccacctccccacatggcagcaatctgc

SEQ ID NO: 113292 - DNA, 1351 bp, Homo sapiens
atttcactgatcctgtcatccagagctaatgattccaaggtacccagaagcagtctagattgatgctggataataatgcctatctgttctctaaaaagaacatccctgtattcctatacagtaagtagggtatcactgagctttcctgttaaaataggaaagataactcaaaatcacattccttctcatgcttcaaaatagtttctaataaaaacattgatttttaatttacctgcatgctgccatctcactctggggatgacacagctggtgtgagttgacaagtcttgctgcacaaagtgttaataaatcatgctggagaggtataaattggacagctttcggccagtgttagagcttgctgtgcatttgagattttagagtctgaatggcctctattaggagagttcgaagggaaatgtagaaaatctctgtcttgtgaggcttgtaaaatcagatggacaaagactatgggcacacctaagggaaagtgtgttggtggagtgacgatgcaggcttctcctgaggtcagaagttggtttaaaatacaagctgagcgcggtggctcacgcctgtaatcccaacactttgggaggccgaggcgggtggatcacgaggtcaggagatcgagaccatcctggctaacatggtgaaaccccgtctctactaaaaacacaaaaaattagcagggcgtggtggcgggcgcctgaggtcccagctactcggcaggctgaggcaggagaatggcgcgaacccgggaggcggagtttgcagtgagccgagattgtgccactacactccagcctgttcgacagagcgagactccgtctcaaaaaaaaaaaaaaaaatacaaggagttctattaatgtcaacatgttcttgtagaaaaggctggattggaaatgtatggtgcctggctgggttggtaaactagtttacttaagtaatcccagtagtttgcgttcggattctgtctggacaagttagtttcacaaaagagaaaaactctcatccactgttattaaccctggtcacttataagcaaattggtatctttggacttaaagatgacaaggtgtctcagaccgttggctgctataacaaaatatcttaaactgggtattttataaacagtagaaatgtattgcctacagttctggaagttgggaagtccaagatcaaggtgccagcagattcagtgtttgctgagggctcaatctctgcttcaatgatggtacctttttgctgtgtctttatatagtggaaggggcacacaagctccctagggccccttttataaacgcactaattcctttcttgagaggtctaccctcacgatctagtcacctcc

SEQ ID NO: 113293 - DNA, 2656 bp, Homo sapiens
caggcgcccccgcgcctccgtgtcacccgggccgcagccgaagtggcgagcaagggcacttgcaagcagtccgctccgcaaacattcctctttctttccccttcccggtacgcaggagtcgacgcaaagggcttgggttgtgcttttttccccttcctttaaaaaaaaaaaatgcccctgtgcagtcctttcttcgcctgcccgctagaggttctgaggataatatcacatatgtaatatatatgcacataaaatcactcgcaggcggctgcgtgtgtagggaaattttgtgcgaggaaggagaaggcggtggagtcggggagggcgagttgggaggctccgcgctgcgattcacagaaaactcgcagcagttggtggaagagtgtgcgtgcacatggccggactgccccgctgccgggctcttgtcgggggcgtgtggggggagggagaggaggcaggaatcctgagggggtcaggggaggtctgccgtgcttggacaaaatgggcttcagtgttctctgcgaacttgcccttagatggcaactttgggagctgatgagcttgtgtgcgaaaacagggcggtgaggttatttggtcattttccctttcttctcttctccccctgctttaaaaaaaaaaatgttggcggggttagagggagggtgggagaggagaagggatttatctgtttcgtctgtgacggagatggaacgccttccctcctcttgtgtgtagtgcagtcgggcagctgcagcgtgccctgctgatgaccttgaccctgacctcctgcgactaccctctccgtctgagaggaaattcaggctccattttagctcgtgtgcttggtgggcctttcctgcgcgtcggtgcctggtgatgaagttatattttcagagtgggctctcctactttgctgtctgattgaatcctgttagccactcacttaaaaaaatatcacctccctctttcagtcacataaagtcacttttactgaagtaagaagcaattacctttggaaacaccgtaaaagtccctgcagttttgaaagggaggccttaattttctaagcttttccacttacctttgcattgaatggatttttgtggatatgtgttgcctgtgctaagtgtgttttgcacatgtttttaaagcagtttgtgtttggactttgcaatttctgggcaaatggtgtattttgcagttcaatcacagtcacccaaggcttgctaactgctgagtgaggcttgaaacttgcaagtggtgtgaagtagtaattattgactttgggaaaaattagtgttaatttgtatttaatgtcgaatataattgtagttctaagtcccacttttaatgctagacactttgtttgtttgtttgtttatatgtgagaggaggaattctttttcactggagtactgttttgtatcaaatttaaaatataggaagtctggggattaaatattcctcctagaagtcatctcagggttttaagaagttaaataggggcagatttaaaagttgactctaaaagaaaggagtgtgtaacggaggaggagaagggagatcttgaaggaatgagaggggcaaaactgtttttgaagccaaagagcccttttgagtaaatacaaaagaggttaatagccactgttaatatattgttttaagaatctgtagaacctgtgaacacatttaagaagtgcaaattagaatacaaaaaaggaacttatgaaaactgaatctatagaaaattcggagggctttccacttcctcttaggtctctccctgtgtctgcacccccctaaggattctacagcataaagcattgctacttatagactctttctgtgttggatctatttttctgatattaagtacaatactagccagacacagtctggatctacaaagcccaaagtcctcccactacacagcacagacaccagggaacctggaagttccaccctggagtggattagtcctggaaatccagactagcacttggtattatctgataccaagtctggggtgagcctcagcccctggcacagagtcccagcaattccccagtctgagctccggcctgctaaggtttcccagctccttctgttcagttagacacccatgggactgttcagaaccgaattagctttggagatgggttagcctttaacctgacactactaacctaagccttaggtttctgatttaaaattctacacagccatttcctcctgggcctctgaagtaagtgtgtgtgtttgtgtctgtgtttgctttgttatatgggccttatacatatacagaaaaagatggcctatactgtagggttgaatggcgatcttactgtctataaatcaaaagaagtcctgtattaacttctgcaggtgaccctaagcaaagagtattaaacctacactatttttgaggggtggttttaaaaattattacacgagatacagcctttatttcttggcctagagcagtaattatcattttgggatttaaatatgattctactgttgttgatggctcttttacaaaagttctttccattaacaaggtccaatactatatttaaaaaaatgtccaagaggccctttgagctatatcacctgcttgtctttagcagaatcctgaactggataactttaaaaa

SEQ ID NO: 113294 - DNA, 1027 bp, Homo sapiens
tgctgtatcaggcagtctctcactgaactgtggcatagtagatactagaatttaaaaatttgtttacatcacctgggttattctctccttttaaaagtgtactaacagattttaatcatcggagagacctgtaacactgaaaaattggaaagtgatcattttcatggccaagactagaaatccattatttagaatggcaaccccttcaagattttgacagttgttttcaggttccctatatgttagaataaaacacccctgattaattataacctacactccatcatttggttagaatgtagcttttggttatcatttgcggtaccttggagatttctttaaaactcctcactttaaaaccaaagaacaattttttttatttttatttatttttatttatttttttatttagggcttatagcagagattgtcaacttccattgacattttgtgctgggcagtcctttgttgtggagggccgtcctgttagttgtaaaatgtttagcaacatccctggtctctacccactaggatagcagtagcaccaccttcctcagtcatgacagttcagtgtccccagatatttccaagtgtccctgagcagggtggggcagggttgggggtactgcccctagatgagaaccatttgcttatagaaattatctggagaactttataaaatgtaaaatacagtgcctttacctgagtagacttcgggaaaatctgcattttaacaagcatctctagatttggaaacagctggttcttgaatgacacaaacagttgttttctcagtttttggtgctcataatagagattacttggttagtatttgttgaagtacatgcatgatcctactggtcactgtatccatagtttgggctgatgggggctggacagggattttgcttggcactggccttgaatgtctcttccacagacttgggtagtgtgcttaggtaccagggacaccaagtgagtaagatattttccctgtccccaagaagctttaaattcgcacgggaga

SEQ ID NO: 113295 - DNA, 1068 bp, Homo sapiens
ttgtaaaattctgcatttacatgtttcttgccctctctggaatgtaaactctgagggcttaaggccttgtctttgtgttacattccccaaccctgtgcgcctgaacttgacaggtgctccgtgaaagttggaagtgttgattgccttcaggaagagattgatgttaattggaatacagataaagcataatggacaaggcgttatctttggtgagcttagaagaacatatctgtgtttataaaaaggtgtggaaagttaatattaataatacttttaaaataacctatactgtcaagcaactgatagtcaagatttgcattcttttttctgacagttattaactctttccagcttttgcttttcaaatgtttttaatctgaaactgtaaatactctatgagcagatgaaattagtaataattaaagtagttaatatctccatgaactagaatcacattacaaagcattttagtgatttttaacacaaaatagctacttttatctcagttttatacataatgaaactgtggcataatgggatttagcatctgtgataggaaatgcacctgactcatcagttgagtatcaggccttcagagttaatattctctctagatgtgttcagcctcaaaacagcatgtattcaaaatgtaaataaggcggtttatagatgaatgggaagatttgtgtattttcactaaactcattaaaggtactgaatctgttacagtatttattttgtattttttcactttgtactcagaacagtgtaaataaaattactgtgtgatctgagtcctgaatgaaaagtggttgtcctgaatagtagttgtaatagtagttgtaattgtagttatctgttgagattgtggagctaataaaataagctagaaattcagtggaaaagttaagttaacatttgttgagcaaaataatttattgcattttaaaaacatctttcaaaccttgggggcagtgtagattgtccaaatgatagcccaaaattcaaagataatttctgaaatttgtattttcttttatttgacttaggatgttgacttttcttggc

SEQ ID NO: 113296 - DNA, 1030 bp, Homo sapiens
ctcatggaaggaaagggttgtatttctaaccccctgggcagtttttttgttgttgttgttgcttgtttgtttgtttgtttgtttttgcctttgctgtgagaatagatattttaattagaagtgaactcttttttttttttcttttttcttttttgagaccgagtctcactctttcgcccaggctggagtgcagtggctcagtcttggctcactgcaacctccgcctcccaagttcagacgattctcctgcctcagcctcccaagtagctgggattacaggcacctgccaccatgcctggctaatttttgtatttttagtagagacggggtttcgccatgttagccaggctgatcttgaactcctgacctcaagtgatctgccagcttctacctcccaaagtactgggattacaggcatgagccactttgcccagcctggacatttcattttgaaattcttttcattggttttcaaacaggtttgcatattgtgcctcagatttttcttgctcatttataattgcagtttgtatgtaaaatagtacagcaggaaacgagctaaagttgtagcttaagctttcttttgctaggaaataattttattattcacagtccattctcgttctttgagagtttaccgcttttagcagaattctggtagattaatgtcttttgctgtcattacacaattttgaaaggaaacttttttgtttagaggataatgggggcagaggcagagagtgaggagcatattaatgaagttaagacatcaaatgagaaactatagactcgactgaattgaatctagtatttgtttttacttaaatttttttttctaggaaataccactttaaattagagacagaattagaggcttacagattttcatcttttgaaaaagatcatcaggtcaaattttacaaaatttataccatcttaacacaattaaagattgactcaaactgtttccttgaaagctccctcgaatgtttttggccattttctctattagttttgattggaaaatatt

SEQ ID NO: 113297 - DNA, 1098 bp, Homo sapiens
tcttcaaccccctaaatagttggatctctttgctataaactaaacttcctgacttttataataagagtctgtcccctatgcttacaggaccttatttcttcatatcatatttttacatacattatttcctggctttctagtcctttctatttatagaattatttatcctatttttcatatccttatttgacctcctctttttcctaagaaatgttatgatcttgtctcacctcaagacagctaatggcagcagtcactggcaggttgggttctgtgcgtgttgatagggtagatcctttaacgtgcacactacccctaggacttggggggcagggttggggggcggctgtactggcattctgatgcttcccttcatgtcacatttcccatgatgtaatcagtgacactcatctttagactcccaagttcacatcattggctcttaaagaggatcttgacttatttgattcatctgtgctatgttctttgatgaagacaccttactgttcgctttgagcagacctctcagaagccgagtaggcatggaaggtggaagggagaaccacctctagtttggccaaagtgacccaagcatttcattttgtttcattcctacggaccacacatcctacgagttcatgttggtagtcatgagaagaccactaagcagaacattaggtaacaccaaagtatgagacttttaacgggaactcagaataaggactttggtatcattaaaaaataaaaataaaaaataaactccttagctcttgtttatcctgttgcatttaagaaggtaaacagcaagtttagagtttgtattggggagacagatgaaaatatgttgtttattcttaatttgagatctagcctggttagatttactgatttactttctgaaaagcatctttttttttttttttttttcctgagatgaagtctcgctctgtggcccaggctggagtgtagttgtgcaatctcagctcactgcagcctctgcctcccaagctcaagcagtcctcccacctcagcgttctaagtcgctgggactacaagtgcatataccaccatgcctggttaattttttgtatttttggt

SEQ ID NO: 113298 - DNA, 3016 bp, Homo sapiens
ttcagccactgattgagtcacctaaataaaaaacagaattggaaagccaagagtgccacttgcacataaggagtgggaattcgaactgaggtgctggagaaatcctaaagatgaacaagatttcagtgaggagaaagccctcctgtcagtggtccccctgcatctccttatgcaattagactttttaggtttccctgctccctttcaggagcattggcatcaacgttattctctcagtttatgaacacagtaggggaggggccattcctgtacatctctcacagtcagattaaagcaaagcctagagtttgtaaacataattcaggttctaattgccgagctgagattgggaaagaatttttcctaactctggtctagcaagtggctgtagggaggcctttctcaaaaatcagctgtatttgcctttgacattgtccaggagcagagcaccaggctttatgttgcttggcacaaggcagctcctctggttatgtgactcctgctgagaggattttcacaatttattaatgagctttccacaaccctgctttattctccaaacagttttacgctgtctctaggaacaacaaatatatctgggcactgtggttgaatgaataccagacaattgtgtgaatgttgtattggacttcctcttccctcccttcccaatctaaatagcattcctatttcaggagccgatggtgtgattcgaaacaactgcttggttgaaggatggggggcaggatcgagaaggagagagggaaggggcagtgctgattctggagaggtgtatgtagtgttttgtcttggtttattttaaagatcagagagtaattggaaacaattattttttaattaataacttgggaaaggtgaacagaagcatttcacagggttttaccgtgtgcacactgaaaataaaacactttatgctatgcttcaataatttatcacttcttgacaggggcttggaaaaggtccagtatgtaagtacaaatcaccaatttgctcttttataaatgagttcttttaaggagaaaatggatggctctccaagtggagcatacatgttctcatttgttttgtagaatatgtggggctgcaggttattgtgtcccttcattcacttatatcagccacctctaaaagcaattccattgtagtctcccactaatctgtagcgtcctgttttttctaacttcttccctgacctcgcctttgatatataagtctttattttccccttgccatctctctagtttaatagctctacagtggagtactgttttcaaccatggaactacttttaatcaagatcaactttgggaagtgctgccatttttatggtaataaaggactgtattatgcacttgaacccgctcaagttgtcccctgtgtataccttcacatagtagaaccatgaaacaaagtgtaaatgcttaaattgctttgttcttaactgtagtctcctagaggtcagtgaatgatttctagttgcattgtagcgaagacatttgttccaggttgaagaattttttacttgagaacatacattttccctgtctgtgtgcccccaaaccctgtctgccacactctttctcttgggctgtgacaaaacagaatgtttagcgagaaacaaaattgtgctcgattttcagactatctgacttcattttctgttttggtctttgagctattccttggctaatcttccaacaagtcgaattgattcttatttcaaaactgtttatcccaaaacagagctgttgacaagtacaaatacagatggcagacatgtggtatgattttcatgttctcatctcagcattcaggaagggaatgttattgaaagatggtttacatctgaagctttctgctcaaggcaatatggaatgcatgctaggagcgcttaattatgcttaattaataatagtaacaaatgcttacgggatttccttaaggtctaaaagtgcagcagcattggacttgctgtgtaaggcttaccgccccggaggctataataatctgtaacaatagaagcaacctctagggggtaaaattgtctttgataatcactgactcttgggtgacctcagtacagcattccaggccaaagatccagaatgttcccttactgggggcagacacgcctatgattgcactgacctttgtcctccgagcagatgatcctccagagtactggctagctcttagattcagaggtaaatcccagcccatgctgtggccttgctgttccccacagcccaactgcattaactataatttttttttctccacaaaaagaaattgttggtgaaaggaagacaaccttcagtttttctccccaccgacctggtttcaggaggccgtgtgctcagtggagtgtctctgcctgtcttcgctaagcttgcccctgaccattgtggaggtagatgccacctaagagtggcagggttagtcctgacctctggggtctgaatatccagcaactatcttaattccagtcgctgctgtctgttgtaccaccagtacacagcagtacagctgtgtctctgttgttgaccgactaacttagattcactgttgaagtccaattagccagagtgggggtgaaaatgcaagagtggacggtgagagtggtatgtgtcatgtacgacaggacagtggagagagccctctctgatacctgttagtccctcctttaaaagatgcgggaggtggccagggagtggggatttcagaatgtggtggcagaaatcagtttggcatttattggatgacagctgtaggcaggcactgtgctataccttaggggggtagataaaaaaggaaatatgacattgcaccttccatactgagtttgtaggtttgggtatttatgggggaaagtggtaccctccatcctttttttaaaaaattgggccaaaattgtaagaattcttttaaaaacctgaacattttagatggatttgagcatctcaactgtatgttcgtatcttgaaattccaaataa

SEQ ID NO: 113299 - DNA, 2042 bp, Homo sapiens
tgccctgtttacccacaggcccaggtagttcagcctcccatctttgtttttttccttctcctagaaaagccagcttttgtgtggtttaactgaacagtcatgttggatttttttttatttgaagacccattttgactcatctgcagcactgaaggattttcttcatagtaatttgggagttatagcagatagaaaggcagaggcatattccaggaatttcatgaaatataaaacactgaaacacttgggataggctagttttcaatgcctaggttacacaaatgtccaaattcacatgggcttaatttattccaagttttataatgggatggatgttggtgagtttggcaatataccaataatttggattaaaggagaggttagtttatgaaaagtttacgtaacaatcttaggcaattttattaccatcatgtgcatacggtatttcaagtcactattcagtgtttatatcaaatagacgttttattgaacttggaaaaatgaaaaaattaaaaatgtgtaatatgtacggtagagtggatgttgctgggatacagggctccttataccccgcccacagtagtgtgttagtcacaaaccccaaatctcagtggtttgaaacaactaatgatcttacttatgctccatgtgcacaggggcccataggtgggactccactgattgcagtcacctgggggcccaggccgagggaggtagcaccttatgtttccaccatctcaacctgaggaatcagcatctgctgtggcaggggaagggcagaaaggatcactccctggctcctaaaaccttttgcttaaagctagtgtcacttctaccccattattaggcaaagcaagttacacggtcagggcttactttaagttttcagaaaagtataatcctttcatggacccaggagagacaaccagaaatactggtgaacagtggtagtaacctaccacatgatgtgtactagtcatggttcctccagagaaacagaaccaataggatgtatagagagattttaaggacttggctcccacaattgtggaggcaagcccaaaatctgcagggtaggctggcagcctggagacccagggaagaattgccactcaagtctgaaggctggctgctggaagaactcccttttcctccaaggaagtcagtgttttcctattaatgccttcaactgattggatgaggcccacccacattatggggggtagtctgttttatttactttaaataggtctacttatttaaatgttaatctcatctttaaaaaatagcttcatagcaacatctagagtaatgtttgaccaaatatctgggtaccatggcctagccaaattgatacatgaagttaactatcatggtatgttaaccatatcctttgcattatacattttcttaatcattagtaaagcattcagaagtataaagcatcggtgtgatttttactatattgaaaaaagaattctttctttgttaagacttgggttgagggacctgtgctcttggtgtcttaatctatttttcattagattccaaagaaaatagtaactggtttcttcatggtttcagaagctgagtctgaatagattgttttggtttggttttgttgctgcagtttaatttacaattttccaattaatatattcctatatttaaaagaaaatgcagaaggtgaccatctttcattagaccaggtaattttatctcaagccaaccaaatgtgttccatccacatactgtgaggagatgatcatggagtctttagtatacctcagaacttgcctcatgtaaaatgtgtctcaaaggcacagggcatgttacagctaaaactttaccttatcacttttcatacagtgggtttttatggctctcccttttcagtatattcaaaactctttacaagtatcttcctcctgagaaagtgcatgtgttcctgtcttgttcaaagatgtcccatcaacaggacctgatctccagtttgcttttgtctttttcctaattgtgatattcttggcagagcctgcttc

SEQ ID NO: 113300 - DNA, 1479 bp, Homo sapiens
tgtgtttcccccatgccgtcctgtcacatcctcttacacgtcctctcttgatttgatagacaatattggcatcctgggtctcactgaggccgtgctatgtcctcagcagctgtttttgttgtttcgttattatgcccacaacaaaaaatcattccttagaaactcaccaagtttatctactgtgtaaatttatattattgttactaccaggtctcatcttttgtcaatgtcattgaataaatttcataagagttattctcagtgtgaattttaaggctaatgccagatcctgcaaaaatctatgctaaccaggctgtagtacacactgttataaagaattttacttgtgtctaaaactacagtaattttgcttaggtaattgtgcttacctatggagcacaggaaggctcttaggttttgttcctacaagtttctttgaattttggagtaaatggaagtgtctgtctgtctgtcatctatctgccctatcataaaaatctttctccctaacattaaaatactgatccccgcccccaacttatctacctctattgtctaacacctatagtaggtgtgatcatgggataaaattcaactgaaaatgctatgataacattttatcgtttgctttaaaaatgtgctttgttttcaaataatctttacatagtgaactttggtggcgttagtgatatgtttatgcctatttcttttttttacacaaattccttggcatattttttcataaagaacaaaaaataaaatcaaaatttatttttaattcatgcttattgggatttaattattcagagcttaaaatattttgttatgtttatacactgtaaagctatctgttttatgcatttgttttgtctaaatgtatttatgaaagaaatacattagattatatttatgtttactcatttttccacctggattttttttaatggttgttacaaaattagattttttaatgggtaataatgttggtattttcatgttttttcttagtattaaaatttttgtgggttttttaaaatttttccctattctgttaaaaattaacacacctctagctaatgttcagtgtttgtgctaaataccaaattttttcaaaaggattggttaagtcataaagtggattatttatgatgactggaagatgaaaataattatatgattaaacaaagaatgtttcagaaatcacaagagaaactgtggcttatttttaacctgatttcagatggccttgtgatgccttctaagtgtctttagatttctcttgattcatttctgcaccgttatgtcatttgtcgttatatagatgtaaacttcatagtctcccgggtatttctatgggtacctccaccacaccatgatgttaaaatctagaggtagcccttgcctttttatgagagatattttctctgcatcaaggtttaggaccaaaaggaaaacatatgcagcagaagggacaaaatg

SEQ ID NO: 113301 - DNA, 1029 bp, Homo sapiens
taattaaaggtcatgttgacaaaacaaaacaaaatgtatattaaaaatcgttaatgtgcatttgggtcacagcctactcacatttactttttaactaacatttggaagccttctgaaagttccagtgtctaaagatgaaattatcaatgcagccttttagggaaaactacatctaggttgtggggcagtggcagagtcaacgaaagctcatgtcataccatccagctttgctttgcatcagactcaataggttcaagtgtttttcttcatttatataaaaatacatctaaaaaactctgtaaaattggacaacagttccagagccagtcagaagaggccagttctgtgttggtgactatgttaaatatattcttttgaccttgtgttatttttgtcatatgaaattctcattctatttttgatgttttcacatcctgtgagtgtgaacattagccagattgtctctttagaagactaaacaactcttcattcacagcctagaaaaggaaaaagtaatctcactacttcctgctaagcttgtctccataaacgtggtgacccctcctggaagacccagctagtattggaacgaagacttcatggctcagttctttaattcattcttgaattccctgtttgctagttactcctacaatgctgtcagacaggtgagggtgtacctgatcttctgaggcagaaaccttcaattggtagagttaaatctttcattgtcagcacctggtgagtcggctcaggccattcattaaacatcttttccaatcacaacatacctgtttcaaaacagaagcaacaccagctgctcattttggtcttttcttgcatctttatttacataaaactttcagcaaagtgatggggttacagcctgggtcgttgaagactaaaacacaatttttaattttcttaatgtcctaaaaatggtaatcaaccaacctttattcaaagcctgccaagtaataagcacctttattgaaaggtgtatctctcttgctttcagacttttctgtg

SEQ ID NO: 113302 - DNA, 1033 bp, Homo sapiens
aaagttagtgagtccagaggcagatgctgccagactcctcagatacacagagtgcagggatcgaatgagcctgtatccttagagcataggccgaaccatggctgcaccaaatacattcccacatttctgcaacaggcttgcaaacctgacccacttttttttttttctattttgaagattgttcttatttttcttttttttttttgattttacttcaagttctgggatacttttaaggacttgcttttgtcaggaaaaccagaaagggttttctctgtttctctgttctgtgctagagctagttgtgctgaacaaagagcaaaacgcatactcaggaagcacacagcagtgtgaacagtgtgcttttctataagcagaatatctacccattcagggttttttgtctttttatttttcttaatcctaaagtcatattttctgtcctttgtactctccaaaagctaattttcaggcaaacagataggtgctatgaagtagttgttttgctaaaaagggttgggttaaattggatttctgtttgcttttgcagtgttctaccatgaaatagatcctccaatatgatgctgtactagtgtaatatctatgtaatccttagctactttcataacatgatagacataggctgtcttggaattataagacctaaatactcatcctggctcttccactgatactttcctgggcctcagtttccttggttctaaaattaggtaattttacttccagctccaatattctgtcatcccttgatcatatttggcttctgtcttacagtctcttagatagtatttatgaaaatgccctctttgctgcttcccttatctcagacagatcaccgctatttcccccatacagcaagggatgtttagatactaatgctagaatgttcttgttaagcactataaatttactgtatccattttcacaagatccaatgcatggatctactggtgacctgacatctctggtacagaggataggccatgacagtgacctgagatataggctgata

SEQ ID NO: 113303 - DNA, 1013 bp, Homo sapiens
actcaaaatttctaatttctctttggttcttccttctctctcaaagcaataataataatatcaatatcccctagcttgtgttcaacatttacattgtgccacattcttaacaagcactggcatttatccccacaattgatcctaagagtcagaaggtcttatactcattctacatatgagaaaaaggatggcctggaattaaaatcaggtgtgtttgctccaaaagcctgcactcttgagctgttgggaggtactgttgcacagaagttaacagaaattcttttcatcctatctccatgtctctttccaccatctcctgttttcactctgattctttagacccttagagctccctgcttcctgcccagcctcaccatctttagtcttacaccatgctgtgtgatcacttctccttaagaatggatctacttatgtcattctactgtcccaactccttcagcagttccccttatcccatcatatcaactccatactcctgatcataagccagtgtccctgcacacaagtcagcctgaagaatctgttctttgccaactgccccctacactcccatactgcagtctcactgtcccctatctaaaacacacatctgcacatatctaaatctattctttaaggctcagctcaattgttattttttcccagaaggttatttgtgctctatcatcatctcctactttccctgccaagctagaggtgatccttctctttcagctgaaagcactctatttctctctcctctcctctttctcatgtatgtctgtagtgctttcatctctcagcccatgcatttacggaaccttatggaactccttccccattaggcctactgtgaggaataaagggatgaagaaatatgaaagccatgtaatgcaatgtttaaaaaacaagaatgctattacaatatcaatatgagaataaaatgtagaaacaattaagccagtcttattatactcaataagagtatatgatatgcatccatggggaatcct

SEQ ID NO: 113304 - DNA, 1066 bp, Homo sapiens
taggaaatgccctgctccagataacttctttattcttggcttctcaggcctctttgggacctatgttcatcaggtatttctctctgccgtgtcttcactttctctttataatcatagtcaaatatcctgtgacctttttcttccctttgccagatttcttgaaaacacagtccttaccactccaaagacggtccttctcaccagtccaaactcagtcgttctcaccactccagacacagtccttctcaccactccagacacggtccttctcaccactccagacacggtccttctcaccactccagactcggtccttctcaccactcgaaacacagtccttctcaccactccaaactcagtccctctcaccactctaaactcagtccttctcaccactccaaacacagtccttctcaccactccaaacacagtccttctcaccactccaaactcagtccttctcaccactccaagttcagtctttctcaactctccaagttcagtccttctcaccactccaaacgcagtccttctcaccattccaaacacagtccttctcaccactccaaacacagtccttctcatcactccaaacagtccttctcaccactgcaaacacaagccctcaccactccaaacacagtccttctcaccactccaaacacagtccttctcaccactccaaactcagtccttctcaccactccagacacagtcctcctcaccactccagacacggtccttctcaccactccagacacggtccttctcaccactccagacacggtccttctcaccactccagacacggtccttctcaccactccagactcggtccttctcaccactcgaaacacagtccttctcaccactccaaacacagtccttctcaccactccaaacacagtccttctcaccactccaaactcagtccttctcaccactccaaactcagtccttctcaccactccagagtccttctcaccactccaaacacagtccttctcaccactccaaacacagtccttctcaccactccaaactcagtccttctcaccactccaaa

SEQ ID NO: 113305 - DNA, 1090 bp, Homo sapiens
aacagaaacctatattgtcattagagtggcaaaagaaactgttaatgaaggaaaaggaagaaaacaaatatttgtatatgtgttttaattctgatcagtacatttccagtgagatatctcaatctgcctttcaccatagccctgggagaagcaggatgggagaatgggaaagggaagcaggcaaggaagatggcgatgatcattaatggtaagttttcttaccatttcagaggaggcaactaagccttggcaccctgggtagcttgttcagtgccacccagctaatgacggaagaggtcttctctgaaaacgagcagagacaaaacacaggtacagaggttaacaaagaagaggcctcacttggaagtttcctcctctgaaaatagtgggcttagacagaagtatctcaaaggaccttttctgttctacattctgtgattctactagtaaaacctgacatgttttcctctgtgggtactgcaaaggaaggcaaaataaacattatgtggaaaacactgattgaaagctttgtaagaaagaataaaaagaccagttgggaagaaaaggaaataaatatctcaagagaaggcaaagtgatcaaaagaatcattaaaaacaggataaaaagaaaatcaatattaaaaagagataaggtagagttagaaaataaatagtaatgtgattcctttcaagaatgtgagcagacccaatagagatgttaatcagtgagaataattttagtcattactactcaaatatgatgtacaggacacttgatttttctgggtcttgtcatgaccttgtaccatgaagtcccccttgacagagtatggctaagggtggattatttaccaagatagctgccctcacccattacattttgtagtgtttttggttttaatattgtctttctcaaaagggcaaacttatgaccaaggtttggggcaaccaacttactagttgtgtgactttaggggagttgcttaacctacttgtgtttccagttccgtttttggaaaaagcagagcaataacactatctgtttgtatggcttttctgagaaggaagtaatactggctgcaacgtgctt

SEQ ID NO: 113306 - DNA, 1025 bp, Homo sapiens
tcatcaataagaacagactgagtcccactaatttaaatgattctttcaatttagcaaggcatgcttgtttggtttatttgtttgtttttcttttttagttcctataaattttagataaaacaagtataccaataagtatgctacaaatactgcttttagagtgctaatttagattcaatctttttttcttcagtattttctatccagctgagttttatgcttttaactttcatcttttcaacaaggtaagtgatttggtatctcttgttattagttttctaaattaggaatcatgcggtctacttggctactatgccactatacacgtttatatttttttctccttttacatatgtttttctcctgtctccctgaccattctgcctcccttctgccaccttcaaattgtagacattacaaagggtctttccttggccttatcttgtctatccacattgagtgcttaggcaggcccttccattctactggcttgagctgttagcttcatactgatgattttcaggtgcaaaccatccattgcaatgtttttaactgagtttgaaccctatgtttcatttaccatttagatatctttacttgactgtcttaacaagaccttagactcaagatattcaaaatggagtcatgtttttcccaaaaactgcctctttctcttatttctttccttatttttagtgaaccaccatcctcaaagttactcaagctggaatccttcacatcatttttttttcaatttcccgatcctacttctgtaatattttttctgctccaaaagccacttccttaattcaggctcttgttgcctctttctctctaggctatttcaatggatatcttactgataattccatttctacacccaacttttgttatgcatttcatagtgcttccaatgactagaattctgatcatggctctctggttcagatatcttcaatggttatccagtgcctatagaatgaagtttattttgggggacaaggtactctagtctattttccagt

SEQ ID NO: 113307 - DNA, 1638 bp, Homo sapiens
catcagtggatttggtattcacagaggtcctagaatcaatcctctgtggataccaagggacatctgtattgcttatacagttgattaattattacagatttgtcttgggttttaaaatggttttcacttacaagttgcacctcattcatatttatttattttgttggagggcaatgctggtaggagaggaagacacttatttttggaattgggatcatacattctataacctattgcagagagagaaattttgtggtgtttttaaccattgtgtattaaaaacaagattgaagggcagcaacaatttcaataatttcatgtaatttccatttattttatttcctaaaggagttgaattatattaaatttgggcagctaccagttttgtaccaccaaacacaatagattatgaaatgaccctttaaatgaagtccctctgtggccttccaatgaccagctacccaccaaccctagtgacatatctgatcatggagacatctagatacccatgatacctatagcactgttgtccaaaatttgtgttctaatatgtcagtacataatgctgtgtgacagaactgcttttatttttctgtacatcactgtgttttaaatttaaagaaagaaatggatgctagataaattactatggtttgggatcacttctacactccccccaccttcccaaaataaaccccataatattttgtaaatccaggtgcggctttaattacaagatctacttttttaaagaaaattaattacaattttttaaaatatctaacacactttccatttattcccaccccacctaaccttcaggattttgtacctgtacctggtaccagctggccagctttctgccaagactgcctttaatacactgtcagttcacttcatgagtccctgagaacagttgaagttgatccaacagccagttgttcaaagattctattgagagtagtttattttattcttgagcatctgtaaagatatgctccattgcgaattaagcctttttagtgacagagtacctgatgacagaaccccatcagccttatcaggataagttccctgacctcattattgctaatggatccatggtaattcagcctgttgtgaattctcatgttcaattatgcaggataatgagtgactcaaaacttaatatgtctcagctatcgtccttatgatgggacttgtacagcttctttcaaaagtgaaacaatgttttaagtagagtggttcacttttatgtccaaacagaagttatcactaatattcagatgacctgattttaaaataagacagaattgctctataactttatatttcactgatccttttgtaggagagttaggacaggtttattcatttttaaatgttaattctggaattctaaaagtatgcaaatggcatttgtctttggattcacaaaaactctagatattcagagtttgaattatttaaactcccacaacacatgcacttttgcttttcaagcatgagttataatttaattaaaaacttctggtgcattgctagcgttttaaatattaatatgttccatggatcactttcgattatctactgtcttgaaattcttgaagatgtcagatttttaagattcccaaagtt

SEQ ID NO: 113308 - DNA, 1080 bp, Homo sapiens
tgatgatcaatctcaggcagcccacttcatagccaccatacctgtcctcacctactaagctcacatactctattcagtaattcttcagtctcaccaagaccccagattaactgacctttcagtcaccatcctcacgactttacttcccttcttacccagctttgattccttagtctaccattataatccctccttggcaattattctcaactccttcactctttctccctttgatgtacttgctcaaaaagccccaaccctggttaaagccaactctgcctactccatgcgtgcaatggagctgctcagattccatgacctgtcattcacctcactccctggcagagctctcagcttcttcacctctccattttacctgcttcacaaaggcccaaccccgcttctactggagcagctgagctttgcttctcagagagcaatacacattggtctcatcttgtgttgaatttatgaccccacatttaaggtgtcatctaacacctcccagaaaccctaccctacttccttatagtgtttctttttctactcttcaaagggattgttaccttatcctctatcttcaagtcccttttacctccccaacactctcccacttgcccattgcactcacgtctcactgactttgcttctgtttctcaaacatgccagtcttgttcctgccttagaacctttgcactggccgttccttctgcctgaaacaccttgccgcctttcacatcctcagaaagacctttccccaccctctccttgagtggctacccagtagcaactcagtcactatcatatcatttagtttaaacttcagcttagtatgtatcattattttgcctcttgtttatttgttgttttgctttttatttctctcttaaactagaatgtaaacatcatgagagcagggactttgtctacctagtttaatccactgagtcacctcaactgtgtaatgtaatctttgaggaccctgttagccgtacacatatgtgctagttcagaggaatcaggtgtcctgcatggcaggctactttcacaactgtaaccaggagtgccaaattatgaaaa

SEQ ID NO: 113309 - DNA, 1053 bp, Homo sapiens
ggcaagagcacctggtctttatactcttacactgaccagtcattagatactggcttccctcctaccctccatgagggctgtgaccttgggtgagtctgctctcttaggctgagggcaagtcccgaagaggaactctgctgacatattttactcacctaacactccctgcagctgtgggtataagtatctcattcttgaagagagggatctgggtggtgctccacagcatccacaacacatgtactaattttttttaattttatacttagaaaagggactaaatttagcataaaatgggggatttaaaagcactttaagaatagcatttaattaaatataaaatgatacttaaaaaatacttctcccacagtgttgatcacataacagagattctgaataaatgttacatccctgcctacctttctgacctctgccagatttcctacttccagcctctctggttttctcagttcctgctcattctttctgtttagagtgtctttctgcctaccctcccacctcaacttgtttctcatttgactctttaatgaagccttctttgaaccatatagctgatatatatttccctggttattcttcattgcaacaccttgtttgatttctttcttgacctttctcacaaaatatacttatgtttagtttgcttgttaacaatttatctctgccattcgactgtcagcttcttgagtactggaaccatattcgttttgtttatcattacattcccagaccataggtacccaataaatatgtgctgaaagagtgagtgaaagaatgaatgagccagagttctgtgatctgtaagggatatgctttgttgtatagaggcataactgaatctacctgtacttctcatctccacacagtttaaactgtggattatattagtttaaattcatacttattttctttgttctgaaaataattccatctaataatttaaggcttatgcattcttctcatggtagatcttggaaatttccttattaataataaatgcttggcttaaaacatacagacaaaaaatctgca

SEQ ID NO: 113310 - DNA, 1061 bp, Homo sapiens
ctcaggattaagaatctcactctaaaccgctcaactacatggaaactgaacaacctgctcctgaatgactactgggtacataatgaaatgaaggcagaaataaagatgttctttgaaaccaacgagaacaaagacacaacataccagaatctctgggatgcattcaaagcagtgtgtagagggaaatttatagcaccaacaacagacatctagcaagtctttaccttattctgcaacttttgataaggtctccgtgtttatgaccattgttgggaacaagcatctgtctttggttggtgtctttatagactcctccaacagcagttatgtttgtgaccatgtaattgataaacaatttaatcctattatctcttaaagtttatcttagaatatttagggtttactttgtcattcttattcaattggactgataggaattctattttaacttcttataacaagttagtagtaagcatataagcatacaaattgtaaaacaagtggattttttttgttttctatgaaatcataggatgccacagtattggagtatagaatttaatgcacaactaaagtgaacaagtcttaggaaagcagtacattaagagcaactagattctagacttatttctgccttttatttgcagtgttactatgggcaagttatttaatctccctagctctaggttcataatttattaaatattatgacaataatatctatcgtaaagggttgttgtaaagattaactgaaatatgcatgcctgtaaacttcttgtcatagaacctaacacaggtaagtgctctgtagcttctatcatcataatcattattaccaaattccctgcaaatactaaacaggaaacaagtctttgaaatattgaatataaaaaatgtatgtataggctgggctcggtggctcacgcctataatcccagcactttgcaaggctgagatgggcggatcacctgaggtcaggagttcgtgaccagcctgggcaatgtgatgaaaccctgtttctattaaaaatacaaaaaaattggctgggtgtggtggtgggt

SEQ ID NO: 113311 - DNA, 1033 bp, Homo sapiens
gatatatattcttggcattttgagtgtatgcagattggggctggagctgggggacagaattttatacaatgtgtcggagtggagaggagatttttgtaaaccattcatgcagaaatcagtgaaaacactgttcccgtaccacttcattcagagctattgacttcatgtagctaaatgtttgatctgttttgtttgacattctgtaccctcaatcatcattacctccatgtcctttcacaaaaattgttttccaaaagatatttccaagtgtaactaaacttaggtagatatgaaaactgaggtttggtctgcaggggaaaggcaaaaagtaagttccaagggccaattatcgatggtttggtagatctggttgcaaaatgaacctgtgaaagagaaaaacatctattgtttgtccagagaagtttgaaaaacaggagaaggttttgacaaacactgaaaagttccataggaagacttagcaattcttagtgatggaggctaacgtgagtgtgttactgtgtgtgtagataagcactcttgtgctgcagggaatagcatcttaatgaaactgagattgtaattgttaacgaagaaagaatcaaaaaatgaggaagaagaaaaataggaattatgaacagtgttaaagcgtacaaatttaggggagctatattgaaattttaagttgaaaaataagttatatttcaggatttcccatttgctagacattgtgtaagaaaaaattctacgggatctgagattcattatatttgttttgaaggagtcagaaagttagaaactatttcatttacataaataaaaatgttatcttgataaaggaatgagacatttattttagatatctacagacaggtgaaataaaaatcacataacctgtaattgttgatgaaatatcatgccatatgattatagactgtatgaaaacagaatgactttactaaaataataagcaatttaggttgattgcaaatcaatatttttctcaatcttagtctcccaataaaaattatatttt

SEQ ID NO: 113312 - DNA, 1144 bp, Homo sapiens
gcctccagcccttcatggcctggaagctcaattcttcatagctttcctctttcctctaggttagaacaagccaatttacggttcattttggcacatttcactaaacagactgtgtgggtttgagtaacctgaacctgtgattgcacactttaagtttccatcaaagttattagaaagtaaccttttcatcttacattttaaattagcgtataacatggatgaactggaggacattatgctaggtgaaataaaccagacacagaaagaaaattactgcataatctcacttatatgtggaatctaaaagagtcaaactcatagaaacagagtagaagggaggttaccaggagccagggagttggagaaatggggagatgttgaccaaaggatgcagacttgcagttataagccagtaagttctggacacctaatttacagcatcgctactatagttaataataaagtattgcatatttaaaatttgctaagtgattagatcttaagtattaagatcatacacaaaaaggtaactatgtgaggtgatgggtatgttaaatagctttatcatagtaatcattttgtaatatatatgtatatcaaaacatcatgttgtacactttgaatagatacaatctttgtcaattatacctcaataaaactaagaaaagaacagtagctagcatataaacaaaaagaaaagtgaagccatgttttatataatgtttttatattgataaaatctactaagcctcttttgttctttatttctcagagagggaaaaagactgtgcatataaatattaaaaagatactttcctctcctaaacatatactttccacacaataacccaattttagcttgatgcatgcaactgaatcagtatggctgtttaataaccatattcctaattttgataaaaatcatagtctttttaacatttgagtctgtcacctggtatacatttacttgacaattttatgtaagtttagtttgcatgtacccctgtgagagaaggagcagtaggaatgaaagaaaagctgaactatatcgtgtatagggaggggattggggcctggggagactcttccttcttctgtttaaatgtttatctttgtgacaggaaggagatatgggtattaggag

SEQ ID NO: 113313 - DNA, 1135 bp, Homo sapiens
aggggaccatggtggaggcaggaagaccagttagaaagctaatgatattatggcaagtgatcctgttagcttggaccagagtggttgagtaaatctgataggagatagttgtaagtagaactggaaagtagaactaagagattgaatgaaggttttttgggaaagagaagagtcaaagatgactccaggcctgagcagctggaagtgtagagttgccatttactaagatagggaagattttagggttgagcaggttgaaggaactcataaggataattcagcatgggagatacttggattccactgactttcagacatctaagtagagacatcaggtaagcaatggactatatgagtctggaattcaggaaaaagatcttaactagagatgtatatttgggagacgtcagcatctggatgggttttaaattagactggaagaaagcaataataaagaatgaaagatatcagaggatcaagtgctaggacactgcaatagtaagagattcacaaagtagaccaaggaatgaccagttgacttaggaggaacactgagaaattttggtgtcctagaagtttagcagagaatgtgtttcaaaaaggggagagtgatcaactacttcagttgctgctaatatttcaaataaaatgaagtttcagaattgaccattggttttaagaagacagaggtcattgaggaccttaacaagagctatttcatcaaagttttgtagttcaaagcctgattggatgggttgaggaaagaatggaagaagagttaaagacagtgataattgataactctcttagggaaatgtttctgtaaagggtacagaaaatggggtactaacaaagtaataaaatatgaagagaagattttgtttaaattgggaaaattagtggcatatttgtgtcaatcggattaacccagttatggagagaaaaactgatacagaaaaaataagggagagcttgtggacacatgtccttgagcaggagaaagggagtgagctctagtgcatagtagcctcctagagagagagatttattatgggaattgactcatgcaattatggagcctagaagtcccactatctgctatctggaagctgggaaaatggcaaaggcaatgatg

SEQ ID NO: 113314 - DNA, 1049 bp, Homo sapiens
tgttttaataagtaggatttaaagtgattcttagattaaaatattgtattctctttggccaattgcaaaagtgtgcacaataaaaaatgttcattctattatttaataacaaaacaagtctgtctgtggatattcacatgtgtatatgccccagaaagtcatggtagcattgttcatttaaggtaagccagtccctcttgggccacatgcaaaacacttgagtgactgttatgacacagggactttcatgtaaataccaaaaggactttttttcttccaaaagtaatgaagtagtcccagatctggatcttggacactgtctggatatatagtacctctgtctatctgtctctctctctctctctctctctttttctgtgtgtgtgtgtgtgtgtgtgtgtgtgtgtgtgtgtgtgtgtgtgtgtgtctgtccctctcttttctgtcttaggcacgcacaacctcagattctctgaaattttaaaattccaagtagaattcattaataaaaatctgaaatgttttttctggtataaatcataatgaaatgttgagagacaaaggaaaaactaaaacgggcaaataatcatctgctgctccaaaactgaagcctgtcattacaactcccaactcaaacacttagttttaaagatttgccttcaagaaacctaaaagctggtattctgcctcattggcaacagcctcaaactgttccctgtcatcgaagaaaacaaatcttttgctcatttctgcctaggggaggcagagggaccgaggtggtcctatgtggctgaattagatgaaagacttgccttccaccatggagacatgaagtctaatcaagtgaaatgagttttgagatcccagctcatttcctaggggagaccagttcacattacaaaatcatgacatctcattcatcacaactgacgtggtctttgctcaggagaggaccccaactgggactaaaccacctgtcttctctcaaaaaggggcattttatccaagttagagttgaaagccttggagtgaggaagcttgccagccac

SEQ ID NO: 113315 - DNA, 1050 bp, Homo sapiens
atggttacattcttatgtctgatgttattaaaacactaacactgattcaagttagttcaaaatacagaatatcaaaaactctaaattatactttcaaatgtttgtgtatggccatttttggttttgggggggtttggttttgcctattcttaataaaatattttatgcaacatattagctatatttggaactcagttatattgaaattcaatccaaatggttactaaagaacaatactgtgatcatttccctcttttatttaaattcctgataattctatcttagtgacctaatggttgctacttttaaagttcctgcaattatacttatattaatcataaaatgctaattactcattacatatattcaattcctaactactaatttaaaattccatgacattttataagctactgttagtgaaaatccattcataagcataagttatattgttttattttaaacatgcagtgattcatactaatgtgctgtgcatagatttttttttaaactgtcaaagtgtgtagaagttgccctctactggggaactagaaaaattatgttaacatagattttcaatttccttaaagacttaggtaaatccattgatgtgatttaccagatgattgcttcttgctctctggcacttttaaattctgaagatattgaaatgattagcagaagatatttaaaaataaatgtctgatatgaatatatgtacatccatttctaatataaagtcttggctatttcttattaaaaattccttagtaacaacacccaatggctaaggtctagaagtaattttattgggataagtctctactgaaacattaaggaaaattagctgtatatacctatgtaactaaaaatgactcagtactgtttttaataattcaccatagaaatgtccaggttaaaagtctaaaagtctaatcactctctctctctctctctctctctctccatatatatatatacacacacacacatatatatgtatatgtgtatatatatattttgttttttgttttgtgctagagcctttgc

SEQ ID NO: 113316 - DNA, 1040 bp, Homo sapiens
ccattcttactgatcatttgggtcttagtttagatgttacatcttttgaaacccctcgctcagttgggtgaggtaagcagcctttccttaaccccattatctggcctttacctttttagtttgctgcaactagaccgtaagatcttttaggatagagaccaggccacctttatctttgtttcccccctcctcttgggtatgcctatcatagagtaggtatccaaaaattatttgttgaatgaaatcacaaagatcctaataatataaaattgacttgaaacataaaaataatgatatggcttgctaggttttagatgataaattgttcgaatttataggtttcctggatctttgtttttcatattgtgatatattcttaagcatgctgtgataatagaaaaaatagattacaattatgttacacatttaaatactcatgaaactgttttgtaatttcaaatgaccaacttaatagaaataaaattagttgaaaaataaatatagctgaaaagttataattgaaattaaaccgagttgaaaagggagacatgtatctatgtaattctgaaacttaaggctcatagctttattttgattcactttctttttcaaaaatagaatttctcagaagatcaaaggttttctgaatcctaacatgtactatctagttctagatatccagaagaggacattgtttttgtcattgtttcttgggctgccctcataccttcagaaaatacattacacatattgcacatatatgtatttttctgttataaccaatgaaacataaaaagctaccaaagctctcacatgaaactgctgtttgttgttttttgttgttgttgttttcttaatactagttaatttcagaacttattccacacagttccccaatagagttggtcatcagtttgtaccttagcttcctagtttataaatcagtcattgatttctatgaggaataattttgaattccaaccttataaatggagattgggcccataaatgctttttcatccataagacaactgaactac

SEQ ID NO: 113317 - DNA, 1046 bp, Homo sapiens
tgtatagtaatgacaaagtgcgactgttacacactctttaaagtaatagaaaattattatatctttggctatctcacaatatttacatgtcaagtaaattattttataaaaatcaggcattaaaaattctacccagaaagtgttgaacaatgaagatatacattcaagaatgtgtggttcaggaaaatttacataaatttaaatgatacgtttttatgtactgtagttttctccagaagaaatctgtatgctttctgaaaacatgactcttagatgtttaaaagcttgtcaaataccctacaggaaaggtaataaagtcattttacttaaagcaaatcattttttcaaatttcctcaagcacatttatgtaggtactgagagagaacaggagttcttttacacgttttaaatacacagcacaccagctgctaccccagctatccactagagaaagggagaataactaaatttctgtagcaatgtgtaaaactaaatttattgaaatcccagtgaaagcttttgctgtgtttggtataatagggaaaattccataagatatcttagattgcattttcttcatgttaatctttatagtccttgtgctcccaggtcagtttgtaaacatacttcattcatttagaatgaaaactctcacctcagaagccaacgaggtttggtaattacagaacattttatttcaaataacgtgactactccttgttgtaaacactggatccattgaatttggttcagagaggttagagcttggtgacccccattagttatttttcctggaatatataagaaatgaatttgtattctaaagtgtgtggttttgatgtgctgatgtcagcctttcttgtgtctatatccaatgctttctcttagttatatttctggtttcaagtgcttttttaaaatttatttttcatttattataagaagccaatgtatgtattgaggattactcatattttctttcattttcttcctcttttcacctatcctgtgttttctaaaagtagatagaatcaagtgtttttgt

SEQ ID NO: 113318 - DNA, 1735 bp, Homo sapiens
ctcacaataacactaacttgtggagaagctgttgttatcactgttttactgaggaagctgaggctcagagaggttagataacatgtttagggtcacacagatggttaagtggtagagcaagatttgaacccagggtgtctggctccagggtccatactccttatacctgctggaggaatatacaagagatgtagcccctgtcctcagtggcttgctttctcatttttgtgatactaatcatgaataggaagttataatagaagacagactagtaagtaactgaataagtgcccctgataggtgttgcaggtcatcaagtaaaaaggaagattaatacaggctgggtagctctcaaaataatttgtcattatttacttaaaactgagatgcctaggaaaactttaaagttcctaaacaccgaatgttaataccaaaagcactttcatagactatagtgtctttgtttttacatgtgactctagacactaactagtaggagttgtcttttacgaattatcatttttttcccaggttattttgaatatttatatttctagggaaactgtccatttggagaactttcacttgtgacagaaattgaatatacacttgataaaaatatgttactcaaagccaatttaatagctagtgggtttgttcaggaaggaaggaaggggcacaagttgtattcttttatggtttttaagtctttcttatttaaagttttaggctggacaaaatgttcctttgttttctgcagttaatcaaatcagtgcagggttactacctacgtaaaaataataacttgctaatttaatgtcaaagccaagaatgaattagtttcatgtgattagttgtcaacagctttggagatttttggcagtctggttaagaaaagctatgtaacagtaccatggagagaacatttgtactgttaagctttcaaactcttattcagctgtcaacacatgggcattttctgcagccagatactctcatgctgtgtactgcctgcagcttgccggaagcccaaccttgactgaaagggttgatttctctgctcttacccttgttctcatttagtgttaaaacctgcttaaagtcctctttttattctaaaaagtacacatgcatgtgtcatctcttaaacaattctggtgtcaaggtaaggggccccaaagaaatgctggacatctgaatgcataattgattagaaaggagcctggcagtgttaattctgagctgcattataatgaatgctgaaacagagctttcgggattgttccaaaacttaaggaaagtttttaggactgggcaagagggtcagtgtcctgaggtggaatttaaaggagtgtttttgactgtgatagttttaaaattgcctttgtcacttgctattgttctttgattgaaggctcatttgttatcaactattcattgttttattgttgtttgttttgtttttaatgtttgcctgaagtcactttgtgaatatttatttattagacatactggtaaggtagggttggtagaagagtataaataactactgaataaacagaagcacaaatgttggataaagcaatgagttcttaagtcaatacccaacacatagaaaaatgaagcagaaactttaattctcgggagatctcacaatttatattttaaatgattcttttcaagcaaggttgttagaaaagacctcttaaatttcactacatggaaaacattacag

SEQ ID NO: 113319 - DNA, 1092 bp, Homo sapiens
gtgcctccccaatctgctcaggggactccctttaggaatataagctgacaccaccttgcctgagcttctttcaatcaataacatggcagagtacacatgatatgaataggcagaccgataagaaagaaaagcatatctcttgatacaaatggagcgataaaaggactggtttctatccaaggactttgaaggagaaatcaaggagagaaagatggccaaatgagaatgtatagtcaattaatttttcttctgaaggattttttttattacttgtgttccgaagagaatggtcaagttgttctatgccagaaaggaatttgttactctgattcttggaacaacaagcctcttgggagcatgcattttgtgactgtaaatctacagtggcaaaattgtgttaatttgactgactagaaatattaaccatattatatcaaataactgccagaaataattctctatcatgccctctgactttattttaattgatttttttttactttcagcttctgtgatttttgtttattctgacatatatttattgaatgcataaagaaaattgttttgcaaattatttttagtgtttttatcttgtttaaattggtaggttaactctttttctgcagaattccaaggttttttattttcagatgtgatactgctgatttagctttgtgggcccactaatggcattattgtccacatcagcagtctgtacaattaagttttatgcttatagtatcatttgatatttatcaaagatgtgaaaatcaaaattgaatatgattgattgctatgagatatgttaatattgggattcctaggctatgttatggaataaagcattcgctgtaataacaaagataaggcctctaacattactcattttatgttctatcagtaatcaggccttaggagtaagcgtcatttgtctgctggagatccctcatgttaaaggaatcacaaggtgaaagttcactgaatcatcatttatgatagtaggatctaccagtcaatatcaccagtaaagaaatattcaaagggagataatccatctgttttatcagcgtgtttgcttctatttgccttgac

SEQ ID NO: 113320 - DNA, 2189 bp, Homo sapiens
tttgcacattgatggcaagtagtttttatagagcagaactctctttttcagaaattgcataaccatgttttgcaagtacaattaatataatatcacaagcctattaccacattattacctgactagtgaatgcatggttaatttaggcaacctatgtgccttttctggaaattcacatactgtcaaaactatgggatttttttcttcattattattgtgattttgtttctctgcctttgatagggttgtagattgatccagagggattaaaactaacatatacctggttttaaacaaaagtgtatttgacccatagtactccttgttatatatttggatctgaaacatcttttggatagttttcttcccaatgggtattagattttcctcagactgctttctaagagacagaagctcagctctcttgcttgcttacccatattcttgcatacacacacgcacacacacacacacacacacacagagagagagagagagagagagagaattatttgtcaagcagatatttgtgtagtatgaatcactgaatgaactctgaactgcatagtttgacaagacttggggccattcttcaagctatcaagaattttaaatctctcagctaggaataatatatctgatataatactcaatagtgggatgatctagaaatactcaatgaaagagtacttaatgcgatgttctttggagaggataaaaatataaggaggaatacactgatttagaagaaagtaattaattgctaatattgacattgatgatttaagtttttcttccaagtggacagttatcaagattggggtttttgtctttggagaagactatttctcacttttctgatctcttcagttattctggcagtttcatagccaattacatgagacaaaatatttgtttcattttagatcagctatcctagttttgaatatacattagtcttaccagcaacagtaattataatattaagataaccagtaacttttttattggaggtcttatttctcaaagacctgtttatcctgatgatgttactgaagcgtctgataaatctgcatcaataaaatctgttgtattcatcaattaaacaaagagaggctgcagatacatgtatatatgtgttaaagatggtcactttggatagttgtaaggataattgctgagaacaatgtagacctcagtgaaacagactgatatgaactattctgagctattggaccagcatatgtctaaatgaataggatcctaatggttttgtgagctagaaggtagaatgaaagtaatttggtcagcattcctaagtctgcaattctgttaggctagttcagacactctccacaggaagtggacattgaggtcagaagttgggtcaaagccttttaattgtgagcctccatgatgcctctgggcttgggtcaataccctgaaaggctctgtttgtgggcctggaaagggtatattatgggggctcaggtggtctcttgactgttctaatactcaattgtgagaagcagattatctgctttgcagattatctgatcttctatcatcagccttcccattgggctttgagttgccaaggatggggctaaaatgtgaagtacaggaagttaggcacagtggactctgtgtgcaatcccattacaaaaccaaatataaataattcaagaaccactttgttaaatgactttagttttatttggtttggcctttttctctatcttaatctatattctccagagttgactaagcctcatttattttattctcattttctagaaatctttagactagaaaatagacatgtcgtaaaatctattcaagttggaatgacacaaacacctttccttcttttatgtactctataatgtagattgagcattatggcataatttaatttcttctctgaaaattcatgaaatcattccagtctaggctgtccttagcaccctggtaatcttggttgattgtgtctcttcaaactgtggtttgatcagaagaaagactggttatctttgtgattcagtttctgtggattaggaaattggagctgtattgtggattatgttttttatttaagaccagaacattatcgttattctcccatgttttctaaaataagaagagagagagagagattataattttctctatagctaggcagatgaact

SEQ ID NO: 113321 - DNA, 2653 bp, Homo sapiens
agtagaaggactacctcagtgaattccacctccaccatttacaagctctgtgatcttgtacatatttcttaatctttctaggactcattttcacatctgtaaatggagataatgctaataagctcatggggttgttataaaagctaaattttaaaaatgcatgtaaagaatggagcataatgcctaacacacagaaacacttagtagcaattgactttttttttttttttttttttttttttttgagacagggccttgctctgtcatccaggctggagtgtggtggcatgatcacagctcactgcaaccgctacctcctgtgctcaggtgaccattccacctcagccacccaccaccctgcaatagctgggacacaattgacttttaagctgagacctgaacaatggaatttcctaagtggagaacatttattaagagagaacaccatgatcaagggccttgaggcaggattgcccatgttgtttttaaggaactaaaagaaagccattgtgccatgagctcagaaaatggagaggagaattgcttgagatgaggctgaggtagtcagtggtagcaaggtcatgcagtgtcttgtgggttttgttaaggaggtatcagggctttactctaagggcaataggaagaattttcacaagagaatgatgctattcaatttgagttttagaaagattattctggctttagtattaagaattgttcaaaatctttcaccaggcattgaggggtctggctcatctcttaagggacctttggggaaaaatattggtggatatttttgctattgtcatcttcataggtgatgagccctgggacaacaatgagtgacataattggcattgccaattttttgtttttcagtaaatctgaaggtcataggtatgtgagtatgagtgagtgtgtgtgtgtattcatctttgcacacatatataaacataaaaatatatacatgcacatatatagacccacacatatatacacatacatatatatctcccactagagagacagccaaggtgtttttctctcttttctgcctctgaccattcaatctcaatgttttttaaattatggcacataggtttaagagataagggagatagaatatatttaccaatccttttagtctgtatggtataatgacatattatcatggttacccttcatgtgagaatgggaacatattatgttatgcataatgactttataatatagattcacgaatttcagaaattatagagatacaacagagtcctgtgttcttttgcatgtcatgatgaatgcagcagttgtatgtatatacaagaatagatcatactgagcatcccctgagctccgtttgcagacaagtcgtatctccaccatgacaaaattcccacaagattttgaattattaatgtcttggaatctgcgggtttcagcagatatgttcagtgttattgatggcaaactttatctcttttattcctgagacgcataatgaaatagggagttcctcaaataaccacagttactgtttagggtaattttgtaggggccagtgggcttttgccttaatgtgtatgaatataatttttctctctcacagcagaatgtatggaagatagagggagaatgaattggcactaatttatgaacctccagccttctcagtgcagtataccttgtgagggcaagatgctctaattgcacctacttcacataatgagagcttttaatgacaattactgattagagttagggatgtatggggactttagagaagatgtattgaccttgagaagacaagacttcatctgccttttatacacctctgtccctaacaattgaccagcggctcaatgaaatccagctctacagacttgcaccaaatatttgagcagattttaaaactgaggggctgaggtacactttatttctcaactcaaattatgtcagacagttcaagaattctgtttgcttttagcagtgtttttactttacgctttttcttccttggtgatggtcacacagactgtttttctgtttggtaacaacaataacccatagttcagactgctctttttagagacattgatttgcaccatcacaaatggagacctgacattgttttcctcttaacacatttgcagtgttcacatttggaaggccaatatttaaaaactggtatattttatataatatgtatatgagaactgtaagaaagatgaacaaattaaagaaaattgctgattgttttattaagggcaagagtttatatggtctacatgtccttttttgagcaaagcagtttttttaataagtcaagatgacattttatgtgcatgtcatctttttatgaacatttagacattttaattacacaacacacacacatttaactagcaagatgatagtgtcctttccagcttcactatctagctctctccttaatgaaaacagatcaaagttaatttgtttttccctttcaagttgctctgagcgttagtttcttctaaaacccctcttgcttccgtatttcccacctttacaaccattttttttttgttttaacttttctgtatgtctggaaaatctgattttagaattaaaagcaagaagtacttacaatgcaggcaagtttaaacccagtaga

SEQ ID NO: 113322 - DNA, 1562 bp, Homo sapiens
tgcctctccccgttacgtggtcttaaaaatgttccttgatttctctctttccattgtcttcccctccccgtatctgatttatcagaaaatgctatcggatctattttcaaactgtatcttgagtttatcaacttctcttcatcttcactatgactattcaaattcaagatgccattaactcattttgcctcttgtgctgtaattatgcctgttgtgctgtaattattccctaattggtccacctccttctactctaatccccctgaaattttgactccacacattggctgtagtaatctttaaataatataaacgtttacattgtattcccatactctctcccaactctttcttggtgttaaaaacctttcttaacttcctattgcccttaggttaaaatctacactccttatcccaaccagtaagccctgttatctagctcgcccttcctctgtggctccaccttatgctacaccctccacagtcagctcaccacagcagcaaagactttctcccctcaagcatttcaagcctgttttctcctcagaacctttgaactagccaccccctgtgtctagaacactctttcctccgatcttcactagatttgctcctcttgtcactccagtgtcagctcaaatgacagctctacagtggccttccctgaataccgccctagtgctttctatcacattaccctgtttattctcttatcagctaggttaccactattaaaagttaatcttgttaatttccccattgcctgtcaatctccactagagagtcgggtccttgtctgcctttttcactcccgttctcctgctgcttacacagtgcctggcacctagtatgtgctaaatatctgtagaataaatgaaccatttttctaggattcagctagagcaaaaaccctgggactttgggagtcttaccagtcactggtctgtgatacctagtcacatgcagagtttctcttttcccactttggctattttttctctccattcttttctcctttttcaggatgtacttgttgtttgtttctgcctctcaaagcctttacaaagccacattttattcttgtcttttgacatcacccacagattcttttctgaagaatagtaattccagcatgctgtggtccataaatctgtttcttattatgtcaaattagaggacttcctgatcactggtcctaggcttgtctacttttcttataacaaatattccacggtttggtaagaagttgatggaatatagattctcctttggtgtttctgcttttcttgatcttaatttttcttctctgacttcttttgtgatgaagaatctttttgatactacttctctaactatatctttaaccagaaagttaactaaatatttaagctataatggatgccacacattcattttctgtgtatgtataaatgtgtgtatatacgagtgtatgtaattattaacttttttacatggctcttccttatatcctaattgatactttattgccaaaataaatgtcaaattgtaggatactgactcatgtaaaaagatttatctat

SEQ ID NO: 113323 - DNA, 1987 bp, Homo sapiens
cgcctggccacgcacaataaactcttaaggaaggatcctaggaactaggcattgagcagatggctggtggttggcttcttatatgtcaaattggcaagaatgttctggcaaatccttaggtctccaatataattaaacagcacgctccatttgagttgttcatagcagagtgtggagatcagctttcaggacatggcaaggctttcccatgcaaagtaccaatgaagagcttatagatgaggacatggaactgtcagtctaatatggtccaaaataaatagatggagtgcctaagctaaagcaggagattggtttatatattaggtattcagcgataggcttaaaagcaaaattttaaaaaacacagaaatataaccaaaattgctctagagccaagagttccttagcctagggacctgagatcccaataatttatagaaacttacattgaaaattctataaaattctataattgtatatggattttcttggttttttaattttgtttgttttgttttagaaagaaaggctgtagcttttatttaattttcaatgattaagaactgagaatctactgaatgcttaactaacccagactggaagtagttttccagatcttataagttactttaagagaagtacagctcccaattgttctatgatctgatataatctatttaaacagtaatctctctttgctatgcaaatgctttacagtacttgtcaaaaatggctttatggaaaagatatccttttttctccaaaatacctgctagtcttggatccacaaattcagtttttctcttgaagaatataaaatacattctatgggatgagcaaaattaggcatcatcttgtaagtggtattgcaagggagccaaaaaaaaaaaactcttccttctgcctccaagattatatagcattaagagttagttaaaataattaaatgcttaattatttgctaggccttccagaatttgaatatccaaggtatttgtacatctacccagttagacttttaatcataacaaaattttatatatggtagacaggcagatagatagataaaaaagaatgagtttttctcaattataaaacaattctcagttcttcattgccttcatagttactcctgtcctttagatgtgtgtgtttaaataattttttcttcatggatgaagctgacagcattttccaaattgattttctatctgtaatattctaactgtatttcaaacctcattaaagcccttttcatcatttctctgacttcattagttatggcagcatctcaaaatctggttttctcagtaaatttcattattgtggtgccaatttattataaaatgatcagagaagtaggagggagtgaggaggaattgacatataaggacaaagtgaaagattaggactctttggcctagaaagtaaaaatctatcaaatcatgaatggtatggataagatgaatatggaccaagatggtagatctggaaaatagaaagttgaaggggcattctggaaactttcttaaaatataagtaaagccactaaacagaggcaaaaaactgattttaaaaggctttgggtgaatttatttcataaccagtgaaagactaaactatagtaaatcttcctgtaaactgagcagatcctaattgattttaagtattattctgataaacatgatttcttgttttttatcatgttctccaggtcactcgttagtaacagaattttgcactggttaggcgagatgggacctgacctagaaagataattcctatgctcttttcacatgaaatgtacaaacaaaactgtcaataacaaaaaccactgcaatgtatatcagtaaagacttcatctttagtttatttttacagtgaaatatcagggaagtgcttttatatccaaagttcacgtaacaaagacgcaacacataagccaggtgcggtggctcacacctgtaaccccagcactttgggaggc

SEQ ID NO: 113324 - DNA, 1063 bp, Homo sapiens
aaaattagccaggcgtggtggctcatgtaattccaattactcgggaggttgaggcaggagaattgcttgaactggagaggcggaggttgcagtgagccgagatcatgccattgcactccagcctgggtgacagagcaagactctgtctcaaaataaatacataaataaaggtgaagaaactatgaacaagatatgccttaaaagatcttttaaaacaatcttcattaagattcaaggttatggaactactgaaattttgactcaatgtacaagtgtgtaggtttaaaatatttttcttttggctcttaggacaaagggcttcagaatccaacaggcttggattgtaatccatgcttggatgaatgctagtttatccatccttgataaactaggtaactttggacaacttattagccttgatccaaatttctctaaatgtaaaatgaggataataataatacctattcttagggatctttgtgatattaaatttaaaacagtcggcctggctcattgtaggaagtctatgtgtgtctactttcctttttattagagcagtagctttccttgcctaaaatcctgcctgtgctatattctcattttaatttaataggaccattttaaaagctgtagagctgcatttgagtgttgatatagactttttgtcagttttagttggctttgtagtttgagatttggggaagagttttgagatatattgtctttaattggcagactgatatagggaggaaattattagatttgggatcagaatatcttagtttatttcctgactattaatactaatgttagaactgtagacaaatcatctaacttattaggcctctatgttctcatctatatagtggagaaaaataatactaccttacctttctaaccttgttggattactgtgagaatcagatgatataatgtgtgagagatactttgtgattattaaatgtccttaaaaactaagtaaactattaacatctgcaatttatcattattgaatatatcatgtgtgtctccttcccattggaaggtacaattatgctatgaa

SEQ ID NO: 113325 - DNA, 1752 bp, Homo sapiens
ctgcaaacgatagtatttacatttgaataaaaaagcaaaagatactgtttaatattttcataatatttctgttataggttagttatttagtgaatctttaattcatcctgagtagtaaattaaaacttattaggaataagaacctgtagtgaagaagcagctagaaggtaaaatactgaaaatagaaagcaggaaaggagacaacaaaatgattaaatatgagtctatgttggtaggtccctttggtttagggacatattgccttacttatctcactagtatctgaaggtactacaatattatatgacagaatgtaaaagcattttaatacacaattttggttataagacattaataaattacgtgaaacctatttttaaaaaacaagctaaagaagtaaataatgatgtgtgtttgaatgacacacttaaaataattggaattaaactgtcttagaatcttaaaggtatcatctttggctatctgagaaaatcagcttatttagaaaatcagcttatgtattattctacagtgatcctagataaatgaagttttcccacatatatttttccataaatatcaatttttaaaggataaatgaagtttttaaaggaatagagaagtttaggaagtcctttggaatctcttctaattcaatctggttgaaattttaaaaaatttgtttgtataagaaatacttattgagtatttactgtgtgcctggaactaagctagacattggaaatggagtggtgaacagccagatatgatccttttccaggtgaaatttacattcaaatagagagggaaacagacaacagatataataattacattataattaagtgctattcaggaaataagcagagtaagtaagaacaatagatagttcaattttgttctagttcttctcccccaactgctccccatttctcctcctgttctaagataatttttgtatcagagaattcagcctttaaatgttttgcttaaatcatccatataaaattgtgtaacacagataaagaatgtataaatccttaaaaatgtattaatcctttgcttaaatcctccatataaaaatgtgagtcattgacagattagctgaagtcaaaaattggctgatgtttatgttgatatacataaaattttaacttaggtcatggtaggcaggctaagctagaagaacatcattttaataacaaactataacaataacaagcttagtaggcatatttgtgtgctttataaatgttatcagtcattacagttaatggctttctttctttgcacccaaaagaggcactcattgcagagcaagtagatgttgttatttctgctatatacaatcaatactaatgtttgagggaggtgtatgctataaagaatgacaacattaattagtaacttgttttaaaattatctattgataagataaaggaaaatacctttgagaaagtcatgtgaattactccccatatcttttaggccaagcaattatattctatcacgtaatttttttttggctagatggacagagtgaagataaaagacaactgtagagataacagcgtacttcacagctgactgaagcaggtgttagaaatgcagatgaagtgtattgactaaagactatacaaattcgaagtgaaaatgccactggtctgcatgcagtgttctgcacatatgaagtttcaggtagttaaattattcattttattgtgtgaaatagttgaggagttagggaaaagg

SEQ ID NO: 113326 - DNA, 1109 bp, Homo sapiens
catatagagataactcaaagtacaaaggtattgaggtaggagaatagccagaacagaaaaggcaatgaagatgaattcagatatgtaataagggtccagattataaagttaggaccttgtgggtcattgaaaagattttggctttaaatccaaatgagatgggaagacatttgtaagttctgagttcttttctagtagagtattcagaaagaccagattctctttctgaatactctcctggtaagtagtgcagttcctttaaagcacctatcagaactttaagtaattattgtgaaattttttttgattcctgtcttccatcaccaggatatcaccaggatgtaagttcttggagagcaagggctgaggctcattgatatcctagcagagtttctcaaatagagtcaggtgaagaaacgaatgtgttcacgctttctagctagctcaggatttattcttttaaacaactctctaaacatttttttattatattaaatacaaatattttaaagtacgtcatatactctccagtcttttgaaattctctgttgtttaaccttttgttggtgaccctatttggtcattactctattgacaagcatactaggcatggctctcatgctaaccatgctgacttctaaccctactgagtttttgcctccacactaagtgactgctgtgccacagtgctttttgagttagattgtttttgctttaatttctggcatctcccttgctctaagctgatcattctcactcagtctttcagccaagtgtctgctccatgccagacactagactaggttctgaacatacctgagaataggtatagagtatgtctgggagagcagccaattttttaaaatttctccagacttggaaagcagtttgttggaattggattgaaaaaggaatagtttctgagcaagatagaggctagggagctttcctcactatttgtacagtgctctttgtggctgtgtacctaactaattcgcaatctatgatatttcaagctggttggaataggattaaagttgatcaaaaatagtcatactgcaaataattttgtggtagatatttttaatatacttgagaaatgaactcaa

SEQ ID NO: 113327 - DNA, 1071 bp, Homo sapiens
gtggggaagaaataataaaatatttaagaaagagagaagacaggaaggaggactgtcttcaatgcagtgctttccagcattcagacatcattatagcttttgccatgtcagcatactgtttgttaaataagactcacattttcaatttaaatttatttcaagccaaaactttacatcaacactataaataaagaactatcttgtcgtgaatagaaggtaactgaaattaagtcaatggaaaaaaaagctactattaatttgtagctaacctctgctgcgtattcaaggctctgaatctgatgcctgcccttcttttaataaaaggtgaaattagcaccagcaccaaacaaagcactttctccttctgcaatccaaaggattgaaagagagttgaaaagacagtaagttgcattactaattctctgtgcacatgtcctttgagtcatcttgttttcatttatactttgggaaacactgttctctgaggtcgcttctcaatcacgccatcaaagaagtgaattaaaattatttggagaagtcaaatgaagaaacccctagaatcagggactctggcaacctgaacatgtttgtgtttctttcactagatcattttttacatgacacctctctagaaaaacagtgatgtgtgtgccaaagtgacaaacatatttgcagagttaaaaatatggtataatgctccaatcaagaagacccactgatagctctatgtgggtttgtttttaaaacaaactcttatctgaagtacaatcattgtaaataaaaaatggtctttgttacttaataaaaatgtataggatctgtacctattccattttagcagcataatgttctatgctgtctggcaggacttgtgtagcaagtaaatgcattagtcacagtgatcatttttcttgcaaatttgtgacacagatttaattataggaatgaccagcaacttacaaatctaattttggtggaggctgaagcaacttttttttttattttaataatgatggattttttttaaagcaatgatttcattaccatttaaagaaatctactggtgtagaa

SEQ ID NO: 113328 - DNA, 1534 bp, Homo sapiens
aattgatagtgatttatacaagattaagatttatttctctattatataacatttggagggagctgtccaagtatggtatagtggcttcatggtctcatcatgggccaagactcctatctctctcctccaccatctgcagcatgcagttttcttcctcaaggctgcctcatggtccaagatagttgctggagccccagccagaacgtctggatagcaaggtaaagtagtgggaatagaaaaaagagctccctactccagcctgggtgaaagagcgagactctgtctcaaaaaaaaaaagaaaagaaaagaaaaaagacctccctaaaacctgagtcttctttctttgaacagcattcctggaattctaacacaataccagcactccttattgcagaactcagtcacatgatcactcctagccactgaagttgggaaatatggcaatttactgcgagctaaaaattagatttctgttactaagaaagaagaggaaaatagatatcgagacatctagtacattctacatatgagcaatatacaacaattattaaaggtttgaagaaagagattcatctcagttaaatgacatgagaaggcttcagggagaaattggtgcttgagttgggattaggaagaagatttattttagaggagtgaaattccaaattgtaaactttatatttttattttattattcttaaaggatggtacttgttacagctatttgtgaattttctctataaatggaaaatatccacctgttcttaaaatttaggattatgggtagtagtatggtttctggagctagactgggtttgaattcttacttgactgactactagcctaattatataagcttccctgtatataaaatgaggtaatgatagcgcctaaactgtagacttgtgggataatctatataaaatgtgtatatgatgtgataagaaataactttgagctaaactttagatctaggtttttattgaagctttgtcatgaatgtttgtgggtgtgactatggatatccatgaaataaggaaattggttatctctgactaagcttggcaagatctaaaataccctgatccaatgattattctctgattatgagtgaccattcctgtggtataaatataatacaatctgaaaagggtatttatttcagattaccttaaaactttgaatgaaaggcttttattaaaagaatttttgaagaaagaactctgagagcatttttgttgattttcaggcatctgggtataaataaaatactgtacatatttatagctactttaataatgtcccaggtctaatttaaacagtgtttttaggaactaattattatagaacgctgtttttgttgttgttgatgttattgtttttaatgtatctaggctggtaataactaatgataggtgaattcaatttacataaatttgagaccaagaaaatattttaaaatcatgccatggaggattgctttaagttaagcagttaatgtcattatctcctcctctcatttaaattgttcagt

SEQ ID NO: 113329 - DNA, 1916 bp, Homo sapiens
attcctatcttagatgaccagcggagagaggcatgtaagtaggtcatttattttcatttttttttttttttttgagacagggtcttgctccgtcacccgggctggaatgcagtggtacaatctcgactcactgcaacctccacctcctaggttcaagcaattctcctgcctcagcctcccaagtcactgggattacaggcatctgccaccatgcctggctaatttttgtatttttaggagagacaggtttcaccatgttggccaggctggtttcaaactcctgacctcaagtgatctgcccacctcggcctcccaaagtgctgggattacaggtgtgagtcaccatgcccagccagtcatttcaatacagtaggacaagtcccatggcagagataggctcaggatgttctgccagcaggtgtggagatactcagtccatctgtaagtgtagatatgtgtgtatgctaaggtgtgtgtgcgtgtgttgggggaaggtcattgaaaacttcttggaagtgatagggccaggaggcagagaaatactgggtagaagagggtggggttcctggcgagagctccaccctcaagcctggacccacggcccaaagtgagaactattcttgttttcccacctgaaattttaccttttggactgccccaccccctatcctgtgcccatgagaactgcaaaccccagactcaggggactcccgtgcacgcgcgtgcgcacgtgcacacacacacacacacacacacagaagagagaagagagaagagagaagcgtttgaacaaccagaggagaagaggctggacgtcagagactatggtcagagaggagttcgattagggatggccagactcccgcggaagattttcgtcccattccaccccgtttccagctccctttccctctgaaagccacttccaccgctcaacaaagtcctccacattaactaccctttgatttgtttgtgtgacctgatttttcctggacgcctgacaagaactcgggtaccaagagggcagagtgtaaaaggctgtcaccctgaccctccgctgagctagttaacacctagccatccacggacggcaaatgctaaaagagcagtgattgtaacacacgtcttcttgggcttcgagggtcacagacaccccctcctggatggcagagctaacggagcattgtaacacacttggacactgccgcgggtctgcacaaaccctgctcccgccagagaggtgcgaccggccagttccagtgttcctttgtgcgcgttcccacacccgtttgcttgtgtgctcgctcctgtaaggcatggagcacggcggccaagtaaatgagccaaccccttcgcgagtcccataagggatcaagggaactctcccatctcagaaggatgatgaccaagctgtgttattaaaattaaatagaattaccaaagtagaagagggggaagggtatttcaggccagggagcaaggagataagaaatggcatgatgagtttggggaattgcaagtagttcattgttgtcagaatgtaaaattcgaggcagggaatgagatggatagaaacatgttcatggaaggccctggacgtcatgccaaggagctgggaattcctccctaagtcaagatacatgcatgtcttttatatatcaataaaatactctaaatatttattattacttgttgaaactctggaaatcatggttctttcatagactgcaaccacagaattgagccaactattaccttaattatcggttgctgttgagcccaagatccttggtttcagtgtctgatttcacgtggtcttcagggtacccagaacctttaatcaatcatttcacaaaagattgacggagctcactgcacaggaggacagtatagctgactgagtgagttcaaatcca

SEQ ID NO: 113330 - DNA, 1394 bp, Homo sapiens
tctaggcagcccctcacctttgctgtttctagtcaggaagcaagtatttatttctggttcacttatataccctccctatccctgtcacccagtgggaaatgcactgggtgagaatgttcctaagaactcttacagggtgtatccgatgctcctgtggtggcccagtgtggaatttgtcctctcactaaacatccagcatggaacagagatgctattctaatttctttgctgtttgttctagcacagtttcttcatttgtagatatcaccctctaccccaacttgagaggtgtggtgaacagagcagctttctcctgtagagaaggaggaaaacaatttcattttatcaatctcctctggaatttctggtcttcacctatacagcctgcatgtgaagtggtccctgacccacttttggtgtcttttttataaataccaaggtatgtgtctggcatcttacttttgaatgcaggattcttctcccaagtttggtattctcctaagggtattctcctaggcttgaaacatcattagaaattctgagataaccataaatatcccgtttttacattttggtaaacatttctatgtattttgactaagaatcaggtactcaaaagcacaagctagaagtttaatacattaacttgccataaattattcatactcaatgtaaataatggattttaccttttttttatttagtaacctcataagggaaggaaaaagaggggtgttggaccagcattatgaaaatttttgatataatgtcataagagaagacttgggtaggagtcagcagtgtacatatatttgaaatgcatttataaaagggatgagacatatttatgtaactccagagcacagaacatggtccagtgcatggcagttatgagaagttatagatttcaggcttatggtaggcttaaggtagaacataacgtttagagcctttcagcaatgaaagagcttgcttttatcagagaattgtttttccccatttttttaagttttttttaaaattttttttattttttaattttattattattatactttaagttttagggtacatgtgcacaatgtgcaggtttgttacatatgtatacatgtgccatgttagtgtgctgcacccattaactcgtcatttagcattaggtataactcataatgctatccctcaccgctccccccaccccacaacagtccctgatgtgtgatgttccccttcctgtgtccatgtgttctcattgttcaattcccacctatgagtgagaacatgcggtgtttggttttttgtccttgcgatagtttgctgagaatgattaggtttttttttttttaagaaatttacctttgttttaaataattccaagtagtttatgatgaaattaa

SEQ ID NO: 113331 - DNA, 1070 bp, Homo sapiens
gacaccatctgtgatttcagtatagtcctttttgaggaaaagtgccttgatgagatgatctgcgaagtccattgcagttctgtgaatctatggtaagttatttcccagaagatggtaggaaagctattttattgctaatgaaaagctgatgagagagttattgctaagggattgatccattgccttcttaagaagctttgagattcccagacctaatggatggaaaagagcagaaataacagagttaagaaagctagagtctaaaattcgtaagaaacattagatgctttgacataggctgtcacttaggttttgtggatgcacttctaaacaaagtgttaggggaattcttggccaattcctctctcagtgtgctgagagcttagttcaatgtgttggtattaaatagagcttccattaattgatcagaaaagtgcttgttgtatttcactaggagatattggaaaagcccattttaaagttaatttctgtgctgccataactctttgataccattgatcttcttgtattgtagttattatgatgtctgtcttctagccctagactgtgagttggtactctatggtatttatttttgtgtttgcttaataaatttaggttgaaggaatgaataattagagaagcatttgttttattcttttctggaagagataggaaacccaaaggattaagaagaattaaacttgaggaatactgagaaattgattttttaaaagatataatatcaaatagtatataacattttaagtaagtttcattcagcttaatcttagagatttacaataaaaatcttagatatttatcaataagctattaatggataaatagtataaataaatagtattttcaatttaagtgttggtattctgggttatacccatggtttgttcctgtgaatattcagtgttagcatagcaaagaagactaagtagtttagtcttttaactacttttaagtagtttccttttggtattatcttcaattcattcaatttttagtcagacattgagcatctaatatgtgcacagcattgttcaaagtttgcctaa

SEQ ID NO: 113332 - DNA, 1089 bp, Homo sapiens
tcctacctcggcctcccaaagtgctgggattacagatgtgactgaattattttctgagataaatttttacaggagacattgctgggtcaaggggcacgtatggacatttgtaagatactgatatttaccacactttcagcaatattataaagcgtgtgaagttaacttttccctgaactctcattaatcatatgcaatattcgttgctcatttagtgtttttctccccttacaacttttgtttttctcctcccaatgcaagttagtctatatattataaagatgaggagtccacataatattttatagacacatgtatttaataaatatttttatttcaggccgttttcccaattttcatcgcttgcattttagagtaaaatctagagggcagcattttaaaagttgctgtatttctttattttacttcaaccaaaagatgtacatggtgtagttgctgagtgtgttatttaactggatctctaaccatgttataaatggtgcctgtagaaggatctggggacaagacctttaagctttttttctttttaatcacagcttaagatcttgaagaatctgaacttacataagaatgtttgggctactgttattacagtgaaaccttctgagagtatcttcacaggtgatttttttttagagaaagtcgcttacagatataaaacgtttgaccaggagaaagcctcaggttgtcagagttacttacacaccgttgttcagctgggcctctttattaaatcatctcttggcagtccattagttgtggtggtacagctattgcatggctcactaagctaatataccttcagtcactaacggaaggataaccttaataagaatttgaagtcgatttagtgcttcactgcttactgactagtgttttactttttagtgtgtctatacaatttccatgctgtgtatttttgatattcatatatatcttagctacatagcatattagagtcaaataaaggttaatggtgtggagaaggaagagtgtttggggggagctcttccttgtaatcctgactcagccactgttagacattgtgtgatcttgagcaagtcactt

SEQ ID NO: 113333 - DNA, 1116 bp, Homo sapiens
gatttctgtcttttgtagtaaagtaattgggcaccactgcttggcaggagctggtgctgttgagctagctctagctgccacaggttgataggcaggtgataaggcagcttccaccagggtctgcacaggaggcctacctaatatgctgtctgccctaagggcctatgggaacacagttggattattatgttaatgcatgagcccgctgccctcttcctatcccagctgggttccctgttgttaggaactgctttgcactgacagtggagtaatatgcttcatgattgaaagggcaaaggggcttgaaaggaaaaaaaaaaaaaaaaaacagaataagcctgcacagatatgtaaatgagagaaggaaatctgtaggaagatttcactctaagtatagacagaaagtttattagaaagttcttcttatagcactctgtaaaaccacccatttcttaattaatttctgggtttgtttttcttcctaacactggtatgtatgccgtacatggaagtgtttttctaaacaggcgcttaacttgatttgttttaaactaagatgctctaacacatttgtacccaggtataatgctgacagcagtgcattttttttgcacgttcattattctttaatgtttgtccctcagttattccactatattttatagaaaagtttatttttaagatgctgaaggatttatattttgtattgagatgtcacttttatttctctttatttttagtgtatatttggaaaactgcatgagctatcttttgggagtgggggggtatggagaacaggaaatgggtgggtcagaagaatattttcttgagttcgtgaatttgatataagtgatggttcaagcattttatgtttagtcaaggtttttaatgttgacaccttaacatagtgaaaagagtgtggcctttggtgtctctagacctgttcaaatgcaggctctactaattaagtactatctgattttagataaattattttacttctcatttacttcagctgtaaaatgggtataatatgaattttaaatggaaagataaagcatataaataatttggtgtgacatagagtaactactcattaaatgcttgccataatga

SEQ ID NO: 113334 - DNA, 1037 bp, Homo sapiens
aatagatacgctatcaagtgtgttatcatttatcatgaaatgaatgggcattatggttctaagttaaaattatacatcaatagttaggaactacatggtttgtatgtacaaaaagctattcttaaattcctaatcttttttaagcacaagtatttcaacttttatctgttttagagtggtgatttttagatcacagcttcctgttcctaaaatgaattcagaataaatcccagtggtgggaaatctgtatcttattaatagttgacctctttcttttcacattggtattactaatgaaatgctaattaaaaattcttgttatcctttacctgtttgcttttatgatataatcttgcattacttagacatgtacaaaattggaaaatacaaatgcatttgctattttaggttattcttaattctagagcccctaaaaactttcagctgaatttatgcaagggatgagtaaaactctaattataacttttgagtttttagcctctagatgagagtatcagaaaagaaaacaaaagattttggttgactttgctacttgtttttgtttctgtttaacattatcatgtaacaacaaaagtgtgtaaaagccttattcttgcttttcctgagatgtaatcataaaccattgttatcaagagcatgattagtcagctttagagcttttaagcgctacaacgcattctttagcatctagtaatataaacttggcataaaagctgtaaaaatgtctttaaatctaattggagatatgtgttagcaatttagtgcagagatttcatattctttgtgtagtggtcaaggcttcttttaattccttgaggaaaatgaagctcctaggagcagtttataaggattaattgatttatatctttgtttctagatttaagtattgaagcaagaataaaactggcttattgtacaaagaactggagaaacaactgtattttttttttttcagagcagaatttgttgttacttcagtgacaaagggtgatctgtgtttttcactctttacacct

SEQ ID NO: 113335 - DNA, 1574 bp, Homo sapiens
atttgaatgacctgcagtttctagttgagtattgaatggtcttattgaatgttgtgttattacttcaggagttgtgatatgtttcaccttggtttagaaaaccatagttttatcatgatacctgaaaaaagatttagtattctctctttttctgaagttgcctcacacattcacatttctttttacttcataaggctgggaaaagagaataccataattgtccacttgatttttaaaatcttcatttttttaatctctatatttttaaaattcacacctctcttttctgagcttcttgccttctctttcctgccttttccctccttttctttcgtcattgtctctccttatctcttctggtgaattttaattccttcaccaaccaggtcttcaccatgctagactctttagaaggaccctgcatggtcctctggcccctgtgttgttgtcatcatccttatgactgtcatcatcatagtctctttctctggtcataactgatttttcagcccagagtaggactttctcttggatttccaaatcctgaacctggacttatatgtgctttcctggtactgtgtcttcttccagaagccgtcatagttagactgtctgctctggcagtaataaatactctgaaggtcttctaggacaggagattaccttgaacaccagctctttgtgtggcaggcatttccagggcctactgggactccctgaggaattctgccctcagcaccaaggtgttaggaagcttcttccaaactatgtgaccctgttttgctgtgaccacaaggtccattccaaagcttgctgctgctgtcatgcccctctaggactctctgctaggtggccacctactctttgaagtcctgcttccaaagtcccctcaaaatgaatcactgcagctttatttggatgttgtaaaagccaaggagatagatggtcagtggacagcagctgtatctctaactaaaaaatctctagtcacagtcaaataagataatcttctttaattcccgcctgtgtgactctgtacaaataattctccatttgatctgggagatagacacaataggaagttggtttggttatcctaagttttactgttttgcttcttttcctacatatttttttccagtgggtaaaagggatgaggtgggatagtagaaaatcattgacattggtctatacagtttgttctggtccccacatttgactctgtctaaggcaacacagaatattaactcattggaaggatctgcctatattattattaagtactgaagtcatatttaaggaaataaaggaagttaatttgttgcaaggaaattaattccttgtatctgtctttaaattgggctttattttcttgaattgatctaatttaaaatttcttattttcattgtggtgatatatcaataactcccactcttttatctgatttatgctaatctgataccagtaataggaataactttattttcccttttatttaaaaaaatcaatacttacctacaatagcataaatcccatatctggcacaattttattacctattgtcctcatgtgt

SEQ ID NO: 113336 - DNA, 1067 bp, Homo sapiens
atctttaacttccatataattgtatgaagtacataggactgcttttatattattctggttttgtagttgggagaatagggattgagaggtgagatgacttgtccaaagtcccacaggtgggaagtcatggaatccttcttcaagacactttcatcccattatgcattatctcaggcaaaaacaacaaaactccataaatcagccatgtaagatctagatcttgtattggctcctcattaaagttggatggcttgacatttttctgagggatgactgtcagtgtactattagctaaaaacaaattattgagcacttgtactttatagagtactgaattaaaattctgaggagtggggagctctagggtgcaaggaagctcaaaccttgtatgttttcacagaggttggtaatgaactggggggaaattggcagaaacataaacaacaggtgagtgtaaatgtgcaagtcaggtaaggagagggcagagaagtctctagagcttgagtcaggctcacgggtcctggttggaaagttggctcttggaagtaataggttttcacattcttttccagtggttagggcatttttttgaaaagcctctcctgtgtggttaaggtactcaaactggctgaaagatacaagagaatgggtctagtagagaaggtgctgcttatagattttattctggggacctggtcaatggaacaggattacctgcactgggagcaggagagcaggctggctgaggaagcaattgcagtttggctgacaatttgactgaaaggttgcttccttatggtgagttggtggcagaattattgctttgctgtgccctatagacatgaatctaaatggaataaccaaatactgggtgatatgggtgggccaggtgcacaggccaagcctgtgtgtcctgcatcactggcagttgtagatttaaaagagaagactgccactgccctataggggattctccgtgttcatctcagtaactcctattccttgtaggatgagaaagtgaaagcaaagctgaggtcttcttgtacacctcaaacataaaagaactt

SEQ ID NO: 113337 - DNA, 1050 bp, Homo sapiens
ccttgctggcttttggtttccccatacaaggagcaataatatttgcattctcatttcataggattgcttacaaggatctcatgcattgatatgtggaagtacttgtaaactatgagggaacacatcaagtaagcatcagcattattatcattgcagaggtttatcactgatgaaataactgggttttctgagtcaatattattgctgtctcaagaacttgatcttctaaattcgctcattcattcacttcgttcatttattcaaaaacgtatgtcgagtgcttgcaatagcttgctgtatatacatattacatttatagaattttcagtttagtaagtgatataaaacaagcagtaaattgcagcttaagatgatttgtatttaaataaatttaataaactggataattttagtttattagtttgcattataggtcttcaggttttttgtataagtatttcttgtcataacctggaatattcatgtcagatacccaagatagcccgtttgggaattaaagggcatggggagccaaactagtaattgaaagattgctttcagagtttagaacgaggtaaaggggattgaagattgaatagatttataggatgtttctctgaaacagtaaagcctagaaaagcatcccagctccattccaatgaacaacaacaaaaaaacacaagccacaaaaacaatcaggtatatctctctctccctctctctcttttttttttttttcgagacagagtctcgcactgttgcccaggctggagtgcaatggcgcagtctcagctcacttaaacagttctacataaacattgaaaatgggttatcaacctaaaactccttgttcagtatcagaatatctgcatgtatgatgactagcaaaacattttttgataatttggtttattttgattagttatattttaaatatcaggcttcctatttagagaggcactagtctaaacaacaacacacttctaacttttcttttagctaatctaatctaattaatgtttatatttttgcatcttgttatacagaatt

SEQ ID NO: 113338 - DNA, 1121 bp, Homo sapiens
cgatctcctgacctcgtgatctgcccatctcggcctcccaaagtgctgggattacaggcgtgagccaccgagccctgcccattttggttatctttcaatgactgcactcactataccttgactgctttttgaattgtataataagagcttaaatagcttaaaacagactcactcaagcctatggaatagcataagagattagaacccatacatttgcagcaccgtgtaagccacgttgccttgtgtagacttgtctaaattcaacaggggatgtgcatcaataaatatgcccttatattcatttgctcagccttgctattttagaatgaatgtagtgaaagctgtctatgattataaaattatttatagttggattttcttttatttttcagtttgcagacagtaggttgcatgcctccgcctgtgtcttctgcagtgattttaaccaaggcagttggtggaaatgaggtgagtcatggggctaccttatttaaacataagtgcatgctgtgcttttatttcaaaaatatatcacatttttggacatgaagggttgatgttgcagaaaactcctagccatagcagcttgtgaaagaaggaggtgtactcacatactagcatgatgctaaaattgattatgatggatggaatttaggatttcaaagagaagagcaagggaaatgagtgaaatagagatagtgatttttcttctacctcagtggaaattgggagacaaaggacagagaagacctgggaaaggcatttttcatccaagattctcagactgagggcatccagtatggcgattccttatctccaaaaaatttgttaacaaactaaattgatggggaaaagttaaatatgtttaatggcaagtgaggatgatataaaaagaagaaattaggttaggtttcttagatgaattcaaagagattattcaactgctaggggactatggcacaataattgtatttgtatattggagtagcaattgtccaatgcagaagctacttatagggggttcttccttggttgaaaggtgctatgactttatactgacggacattcatttgtgatagcttatttctccttttctacttatattctctcattcagaaaaa

SEQ ID NO: 113339 - DNA, 1036 bp, Homo sapiens
tactttgtttcaggagttattatacatattggagaaacaacagtgaaatgcctgttagttttgcatgttggggagtctcagggggtgttgtatcaataaacaagtaagtagatgagcaagatagagataaatgatgtaaaaagaacaaaacagtgagatatgtgaaagtggttgggtgggcaggcttttgattaatttagatttcagagttctgggggcagaatgttctagggaaaggaaacataatgtacaaaggctctagggcaggatcaagcctgttgtgttttccagtcagtaaagcagccaggaaggccagagcctggtgatgtagaggaaaaataccatgtcctagcggtataaaagtaggcaggaatgaggtatgtagagccttataggccgtggtacagcattcagattttattctgagtgctacaggaagctactggagggattggaatgagagagtgatgtggtctgatttatgtttgcaaatgattcttctgatagctatgtgtagaagagatagtagaggggcctgagagaaatcaactcagagagtagtggtgaggtagcagttcaatagagaggaatgaatgtgtgccagatagattttacagtagagctttcagcagtgatgggtgaggaggatgtagaaggaggacagaggaaccaagcgtgacttctgggttttaggtatgaaccactgggtaattggtagcatcatttacttaagaggggaaaactaggttaggaggcatggtggaaatcaagagtgccattttggccagatttagtttcagagaatgaacataaaatttcaccaaaaagtgtaaaatgccacataaatatgatgacatcattttagagcaaaaatgtattatgcatatcaagaaccaatagttactgaatatctgccatgtgtaggccactcaaggaatacaaagatatttactcatttttgttgtcttctgggaacttccaacctagttggttataaaggacatatatatgtatgcctcctagtaatcactaaaat

SEQ ID NO: 113340 - DNA, 1047 bp, Homo sapiens
catttaaaaaattttaggccaggcgtggtggctcatgcctgtaatcccagcactttgggaagctgaggggggcagatcatgaggtcaggagatcaagaccattctgcccaacatggtgaaatcccatcctactaaaatacaaaaattaggagggcatggtggtggcaggcacctgtagtccaaactactcaggaggctgatgcaggagaatcccttgaaactgggggacggaggttgcagtgagccaagatcgcgccactgtactccagcctgggcgacgagcaaaaactccatctcaaaaaaaaaaaaaaatttaagaaattttaaacaaaaatactttatagccttcatgagtaacttttttatcttgcattctgtcttgtatgcatatacttatagataaaaattttagctatgaaaaaacccaaaattaagaactaactcatgtgatgttattttagtagggatctcctttcaggaatagttttcttacctttgtttattttgtttccttaatttttccaggagctgaccagtgctttggtgcatctaaaactgcatctttttattcagatctttactcttgcattcttcccagcaacaatatggctttttcttcagcttttatcaatcacacccatcaacgaatggcttttaaaagggtatgtttaaatctttaaaagtgggtccacttttaatggggcatctctagagacattattgtttctatggcaactatatacaaaagggcttatgtgtaccatcttaaaaggaagtaaaaacacatctttgttttcctttaaaacaatagtatttcatcaaggaggttcatcaaataattaacagaatcttaagatacaccctcatgcttcatcctgtggttttacgacgagcacttttctgagaattttagagtggtcttggaagaaaaatgagaaggactagcagatgtaagatctgtatgcaagtcaattggatgtcaattaattagataatagctgagtataatgtgtgttttagaaatgtttaaggaagaaaacatacata

SEQ ID NO: 113341 - DNA, 1089 bp, Homo sapiens
ttcagaaaagttatgccattttttattcctgtcagaagtatatgcagtccgggcacgggggctcatgcctgtaatcccagcacttggggaggccaaggcgggtggatcacctgaggtcaggagttccagacaagcctggccaacatgtcaaaaccccatctctactcaaaatacaaaaattagctgggtgtggtggtgggcgcctgtaatccccgctacttgggaggtggaggcaggagaatcgcttgaactcaggaggcagtggttgcagtgagccgagatcgcaccatcgcactccagcctggatgacaagagcaaaactccatctcaaaaaaaaaaaaaaaaaaaaagagtatatgcaaatgccttagtgtattctggctaatcatttcattacagtattttaaaaaataaaaatactaatatttgtttagtgtttatcaaatgcctctgagtatatttaaatgagatttggcttcaaggctgttgagaattctctggaactgctggtgctcaagttttctctggagtagagctctaagaattctgattcactgtaaggatggcttgctttctcttaggtctgatcccaggacctaatatgacttctggtaggctgagtgttttctagtggtcctaaattatactcagatcgctagaaattctttagatgtcatttagggatgtcttgtgacctaacaggaaggaactgctgtgtgtatctccacacagggaagtagacagtgggaagtgatgagactaatctcagaatgtggtgatgagcgaatgagtctgcattaacgtactgttgattaaactgataaactttggctaatgtccctgaggctgaggatctcttgaacatcttacctgaacaaaggggccattgcagttctatacttacaaccagtaactctctggcatagttgaatatgttttaatgatcacttgcttgttttaaaggactatagtttttctagcactttccagttttattttagttttccattttgtttttatttcaacacaatataaactcaaatgcaagtatttgtgagtttatatatatttgaatcctagaggttaact

SEQ ID NO: 113342 - DNA, 1032 bp, Homo sapiens
tcttgcttggaggtcttcctgctgaccttggctaatgctctttatggaactgctttctaacccaagtcctttacttggggcgttgctctatgtcccctggtggctgcttaatggctacagctgttacttgtgccatgggaaatccagaaagcaacttgatttctctcactccttagcttcttacttaatgcgattctgcgaagcagccaactttgtgggatgcaggagttgaagaaggaagaatgccacagctgtcagcatttctctaaggactgacttcttttgtaagcacctaagaaaccttcagagtcatccagctaatttggatctaatgaaatgccgtgatctcgtgctttatcgtggtatctaagcagcaatcaaagccatttcttccatcaaaagcccttttcaaaagaatacaacattaagtcattttcaaaagccatataacttaagatgtcctagattgtatcattgtgtaatattaaaccacttctaaagcctgctaatttcatggttaacttgtaacttaggaggtagcagtcatatttgtttactagttagtaatcctaaattcatttcagtggggattacgatttatatgtcttattaggtcctaaaatagttcatttttgcatacaagagacagtgaattattattgacttgagtttatttggaagcatttgtgttggtcccattcaagtttgatttatattgaacatttcttatatgactcatacattgatttaatgacatgtattctaaaatttgttttagtaatttgttaaaattataaaggacactgtgctaatgcaatgctgagtcttcagttttatgacaacttctagttttttgaaattttgttgtattgaagtgaaatatggttacatttaaaattcatatttagttcacttcaaacctgtagtttcagaggctttgtcacttagccgactgtggcagggcgaatttgtttaaacaagtatcaattaagtgcttatggccacaaggcacggtgctggggatagaaacaa

SEQ ID NO: 113343 - DNA, 1053 bp, Homo sapiens
tgacactgatatctaaagtaccatttgttgtcctgcagtagattattattgttgttattattattattattattattttgagacagagtcttgctttgttgcccaggctggagtgcaatggcgtgatctcagctcactgcaacctctgcctcctgggctcaggtaatcctcccactcagcctcccaaggagctgggaactacaggcatgcaccaccatgcccggctaatttttgtatttttagtaaagactgggttttgccatgttggtcaggctggtcttgaactcctggcctcaagtgctctactcgcctcggcctcccaaagtgctgggattacaggtgtgaacaaatagattcttcttttgtgccaagttatctactgaaattcttttctagcaataactcttttttctctttttaggaccactgaagccagaaataactgtatcctacattgctgttgcaacaatattctttaacagtggactatcattgaaaacagaggtactgtcatctatgggacacatgaaaagcagggagaaaaatttaatttgtacttacttaaatttaagagtcctttggtaaagctgtttatagctataatctgaaggattcactatagcagaagataacttggtcggcaaaggacttgtgtttcattcctacatatgtgtattataaaagctgtacagttgagcagcatgggccctgaggatgtggttataatgagtatgtttttaatatgacagctgaactgaagcatctactttagttcttcctcaacttatggtggtaactacagtggtgcctgctatgcctgggcacatttgagctgttgatgttcagtttggttttcataacttttgtggatcatctttggttcccaggactcatgctgttcaaataatgcttaatttgtcataacttttaattaatttttatttagaaaagcttattgttccttagcatatctattaaatattaatagatgtcttaagagaaatattgatgtttttcatttgacacatatatgtatgtgtatatgtatatgtg

SEQ ID NO: 113344 - DNA, 1554 bp, Homo sapiens
cgcttcttcgggacattacggcgcttccacgacgctagcgctgacgtatgcgcgggggggaggggaggccactctggatctccgagttcccagcctgagctgccggagttagaggtgtccgcgcgggaaagtggctcgctggtgggcggggagccttatctctggcggtgggttgaaaatccggcgccgggcagatgcccacgttcgctggacccctgcttgccggcgtccgctacaacccaaggaaggtgggcccgacctcgccaggtcgctcgcctgcgggtgggcatttggtccggatccccttccctctgcggcccacacctgtctccgggactggggagggctgcagggatcggggcagatctgcctttgcgggccgagagtgacagctgaagtctccccaccaactaagctactcgcgggcggagtggggtctgcgctggcaagcccctgggcgcgcgggtgcccgctctggctcgcccccagggctgacctacccaagccacaggaaaactctgggaagagggtcgcggattccaacgcggaagtggtgggggattgagtctgagaggttggggagtcctaccttccattgccacgagtgctagttctatctgccagtttcttccttgaaatgtcttgtggcaaccagtgacattgatggtttcatgaatggacttcctaccggtagaccctgcaagagcatgaactccactgtatcattcatccaaatgaagaaagaaagaaaatagtatgtgatattttgaaataacctggcatctgccacttaaatggttaaaaatagaacttaaggtttggaagagattgtttcgtgatgacagactttaattctgaatttattcaaagctggaaagacactcgtcgtgtcatttcctctatttaatttagctttatcttgatggcaagacttccagaaactaagccactttaagagttgtgctcccagttgtaggttacacagtaccaagtgtcatctaattatacatcaggcaacatgaaaaaaaattaatttcaagataaaaagaacttaacagggagacatagatgacattaagcagtttactctgaaaagagacaggtacatgaaatataaaatttgatgttagttgtcaggcagtcagaagataagtgaagataaatgaaagatagtttacaacataattattttcttatagtaatttcttagtaggttaaagagtcatacgtctcagtcattgaagggatagttttgtattaaaacatcattaaacattaagtttacagaaattgagctgttttaactgtacagctattcacaaattatttactaatacctctttgatctgtgtagagcagaatctaactcagagatttttttgttctgtttttaatggtacttaaaggaaaagaatataatgtaccatgaattatattctcttaaggcctgtatttgtttgctgtggatgctgaaacaaatactcgaacttggatgccttcaaacaacagaaatttattatctcacagttctggaggacagaagtccaaaatcaa

SEQ ID NO: 113345 - DNA, 1044 bp, Homo sapiens
aactgtatccaacatggcatctggtggataacagatgaaaatcatcattttttcaaagaaaataatctggggctgcggtctataccattggacatttctttataacatttcagcaggtagaatacaatgatgtcttgagaaatcttgacttggaaaaatgtgttatgctatatcactacactcatagtttagggtcttcaccttgcaaaaaagcaaaactgtacctaatgtattacctgctccatcccctcttagaaatgacaacacaactatttttgaaggaactagagctcattattcttaacttcctcctaagtatctctctctctctctctctctagatttagtcaaaagttaaatcaatttaataaagcaagtaatttgtgaataaatatttgtcactaagatctttttctgtgggttttgccttaaattatgaaaggactatttggcagtagtactttatctagtatataatgctcattatataactggttgacttttcagtagctgaaagggttatcgaatgatgcaacttgatatactttttttatagtagaagtttgtagtgacttgtataacaagtttattttccctgcagacatatttacaggtaacaactttagcaaatcactttgagatgctttcatgaaatagttgtagcagttgtgaccaatttaggtacagttttctgacataagagaatatatttaaggactctgagggaaatcttcctttgctcctatgagttactattttttttatttttttactttttttgagatggagtctcgctctgtcacccagactggagtgcagtggtgtgatctcagctcactgcagcctctgtctcccgggttcaagcaattctcctgcctcagcctcctgagtagctgggactacaggcacgcaccaccatgccctgctaatttttgtatttttagtaaagatgggtttcaccatgttggccaggctggtctcgaactcctgacctcactcaggtgatcccccgacctcggcctcccaaactgctggggttacagg

SEQ ID NO: 113346 - DNA, 1029 bp, Homo sapiens
gctggtgtggaaatgcctggtaaatttgagagaacaaggaaggataggttctcagctgcagaagatgggggaggagatctggcttgggacatactaccttcccttggcttgactcttgttcttcaaagccacatcttataaaggggaaataaatacaacagataaatgcctgagtgacaattagcgagatagaatgaaaggggaaatagagtgctatgtgtgaaaacaaccaaggttggaccctgctcaagcaagctgccaggcatttcaggtgacgttgaaactatgacctgaaaggatctggccagttaacatttggggaaagagctttccaagcaaagggagcagagtgcggtgtgtttgagggactgaaaacgtgtctgagatgagttgtgatagaaggtgaagtcgtgggagtatataggaatcagatcatcttgagccttttgcaccatggaaagagcttggattttaatctgaaggcacaagaaaccatggaaatatttacataggaaagtggtgtggtttggtttatgatttaccagatcattaactgatatatggacaagagattggagaggaagcaaagttcctagagtcatgatattcaggaataagttaaaaaagaagttggaattctctaaaattttaaagatatttataaattagagaaaatttacaaatcataaatgtataaactacaaaaatttacaaattatatttataaatactagaaaaaagtgatagtagtgattctgatggctatcaaaatcagacctaaaataatcattgtctcacttctaaagacccattactgggcatggtggctcatgcctataattccagcactttgggaggcagaggcaggtggattacctgaggtcaggagtttgagaccagcctggccaatgtagtgaaaccctgcctctgctaaaaatactaaaattagctgggtgtggtggtgggcacctgtaatcccagttacttgggaggctgaggcaggagaatggcttgaacccgggagcagag

SEQ ID NO: 113347 - DNA, 1029 bp, Homo sapiens
agcccgtctgaagttactttagtaaagtgactaagtttagtgataaaacaacacacacctgaagagaatgcctgatcgtcctggtgggtaatggggtcatgagtgtcagttttagtaacagtcgttataataaaagcagagatgaagagctcagccttccaaagtcacaaaataacagtacaatttgctgatttaatccaagcaatgttttaaaaacagaactggaaactcagagtttataaagacttacaccctctgtcatcaacatttttcaatcccacaggagcccaggaggttcaatgtataaactaaaaggctgaatataaataaagtgacttgtcccgtgtcacatgactggactaacaaatcatggaatctgaaatgaaaactgttcggtttcacttcagtattgtaatatccagtgccattattgtgatttcgatgctgcatgttgttcttaatcattgccaggttttgcagcacggaaggctgcataacatgaatggtgaaagatcaaccaaaaacatgtaattctggaacagtgtctcttattgtatgtttttttaattgaaatttttatatgctcagagccgaatttattttctattataacctcatagttttatgttcatggctactcaatagcatggttattttaaaagcagtaatcaataattatatgtccatagtcattattacctaatatggtaatgaacacagttaaagactatagacttgcagtttcatccagaggttacgtctatcttctgttaaaatgtgaacttctctttgatgtggaataatagttgagaaataaagatggctggccatggtggcccacgcctgtaatcccagcactttgggaagccgaggtgggcagctcacgaagtcaggagttcgagaccagcctggccaacatggtgaaaaccccgtctctactaaaaatacaaaaattagccagacctggtggtatgtgcctgtagtccagctacttgggaggctgaggcaggagaattgcttgaacccggg

SEQ ID NO: 113348 - DNA, 1025 bp, Homo sapiens
cctgcctcagcctcccgagcagctgggattatagatgcacactatcacacccggataatttttgtatttttggtagagatgggtttttaccgtattggccaggctggtcttgaactcctgaactcaggtggtgcacctgcctcggcctcccaaagtgccaggattataggcgtgagccactgcacctggccagaaagtcctgatttaaataataaagttcaagagtgtgtcctctgccatcctcgatttactagcttgctctgctttagtgtatccatctctaaaatgggaatattattacttacagttataaatagctgtaacagagcatacagtaatggtccttgagcttctcagtgtcagaagattcatgttttaaacattttaaattcttctgcttatctatagcactcaagaacataaagtgctttgaaatagtccaataaaaaggccaggttttttcctgctatagatatgtgggatgaggtacattcaagtggtaaatcagtgacacccagtggctgctgcttttatatttagtttttaaattttcaatttaactttctaaagttctgtcccaaaacaaatgaaagaagatgatgagagcatggaagttatagatgcctttaaagaaagagtttctcagcagtgatatgattttcctaggacatgagagctattgaatagcaataccaaaaatagagagagtgcaggacagtggaaaacggttctgggaatttccagccccatcatttgcatgctattaaagagtgtactcaagctttcctgtcactgttggatttcccaagaaacattctcatccttgaagtggcatgttaactgcccaaatccagcgaaatccttatgtgttagagacagttgggaacattcactggatattagacttcctaggtgtaagcaagacttaactggaggtttaatccatagcccgcaccaaaactcccctcagtcgtaatatgactcgctgtaactgcctcaaatccccacacacatgaagttgagta

SEQ ID NO: 113349 - DNA, 1036 bp, Homo sapiens
aaatatctactcatttataaactggttgggcatgggtgcatgtgttggtttggtggcagctgttataatttttactaggttattgaataagtgacgattagagtggagccaaggaaagtgatacgggtgatcttaaacacacagggtttctaaattttgcttagaatttccttggaatggatttagagacctaaaaaccagtatcatgaaatcaaagaccactaggacggcccataaattattgtttgacttgaaatgtttccagtaattcagagagggcagaggtgaatgtctaggtttccaatcttatgatctaaacttccttctttccccatttgctccatttgtttttctagaaaatttgtccctgtaggaggtagctgagctattggaagaatttgatctcaataaattactatagtagtaatactgtaacacatctttactttttaaaaacagagcttccttatccagccaaaaagcatgtaggtctttgcatacacaatacatttctacaaaagtaattaaaacaacatgaaagaaccatgttggtggagagccttttaaacagcccaacgagtttgtttataaatgtggttttctagatcatgctcagaattctttgcaaataaatatttgcatgatatttttgttcaaagattaatttttcctgggataaaatggggttttagaaatattcttgtgtttagcttcatattgcttttcagtgatattatggatttatagaactatttctattaaatggaaattgtacactgagcacaaaattttgtgaacttaatttgaaatgtgggctatattcaaactacagaatgtgctgttttaaataattcacagtagagatagacaaagacaaaaatacatctggacagcagtagttgagctggctattttaagaaatcaatctcagtggtagcaaactcactctcttttatgagattgtaatttctaaagcacagttaatattgggccctatcacatgcatctgggagtaactgcacatctgtgaaatgtt

SEQ ID NO: 113350 - DNA, 1021 bp, Homo sapiens
gacctcatctctacaaaaaactaaaaaataaaatacttagccaggcatgacagcacatgcctatactcctagttacttgggaggctgaagtgggaggattgcttgaatgcaggagttcaaggctgctacttgaggaagtgcaaaatagattcacattttggcattttgtctttttttgaaggggtcaaaaataattattttagaaaatggaaaaatgaatataatctgagaagaaaaaacacagctgtttatcttagcacttttgaaaagcaagtagagaaagatagcactctacaaacctagatttaaatccaaaggtggctgttatcttattgttgttctcataggattttattatctgtattgagatgttcctcgctgccattgctcatcattacacattctcatataaaccatatgtccaagaagcagaagagggctcatgctttgattcctttcttgccatgtgggatgtctcagatattagagatgatatttctgaacaagtaaggcatgttggtaagtaccagctatttaattcaaccaaataggttgggtaggatattgaatttctcctactagggcaatttattatctatttagagatgaaaaaagactttaaagcagtaccacagtgcaggctcatcaactttggggagtgggagagggggaagtggggagcttatttttagaatggtaagtttataatggtaaaaataacttttgactaacagaaaactttatattaaaggacggacagtcaggggacatcccaggaaaaaattgtttcccgaggatcaagatcaaaatgaacatacaagtttattatcatcatcatcacaagatgcaatttccattgcttcttctatgccaccttcacccatgggtcactaccaagggtttggacacactgtgactccccagactacacctaccacagctaagatatctgatgaaatccttagtgatactataggagagaaaaaagaaccttcagataaatccgtggattcctgaacag

SEQ ID NO: 113351 - DNA, 1222 bp, Homo sapiens
tgtcctgtttcgccttatacaaggaaaagtggtttttaaatgacagtttcctttgtttcaaatgaggatgaggctaaaaatcattagtattaatagtagcattcagttgctactaaacttgatagaacacttaatagtgattcacaactttgtacattggaaacatctggggatcctaatgccagatggtttggggtgtggcctgaacagctgggcttttaaaaacctccccaggtgattttaatttgcagccaagattgagagccactgccttctggaaataaacttattttccaaatgaaatcaactattgtttgattgaatctggcatcatttctgagacaattcaattagtgttgtaccattatttcataagcaaatccttgggttaaaaattttagagctgtttggcttaagaaaaaatttaatctgctctcatccaaatgaaagatctacaggtaatggaaaccagagcaaattatctaacctgcctaaaccttggtttgttcattctttttgtactggaacaatgaaagttctaatgaaagccagccttagcttgatgtgggaatataaaggaggtaatgtaaaaagcattctgtcaagtactattgagtcaagtacaaagcaatccctgaccacaaaaggaatgtgtaaaagtgaaaaacttgagccctgaccacaaaaagaaaaagtgaaagtgaaaaatttatactttctctaggtacctatacgtgtatttttggacctatcctcattgccctgtatacctttaagcaagccagtggaactcttaagactagatttaatgactccgtatttgaacacctctaacagagaagtaaaggtaaggacaacatgcaaaatgatttcgtttgttattgtttagaataattatcttaaattaggtaatacttttatacatacttttagctactttaaagatttaaatctagtgaaatgtattttaaatttttgtatttaaaagtaactaaaaagagacttatctaagtctactctatgcactctgatattttcctaatttctttattttcataggtatacgtttgtaaatctggaagactgactgctattccattttggtatcatatgtaccttgatgaagagattaggttggatacttcaagtgaagcctcccactggaaacaagctgcagttgttttagataatcccatccaggttgaaatgggagaggaacttg

SEQ ID NO: 113352 - DNA, 1051 bp, Homo sapiens
caggatatttcacattgataaaacactattatataatatatagtgcatattaaaattttccattaccccagtaatattcttcattgcttttcttcccagtctagttctaatcaagagtcttacattgcatttagttgccatgtcttgtcattataatttaattgtccttgctttagatatcttttaagtggttataaaattgagataatcagtttagtaagagaccagagaattaatttaaatctaattcaagagcagtagtgccaaagtagttttgaggaatggggtgttttatagcttagcttgtttaggttttaatgatctatttagggagactacatagtatataattttggaaatgtatatgaattactttttaagatatgaaaaaatgtgttggtgaaatgtttagttctgtatttttataagtggattcttactctatttaacttaggagtaaaaacatactgtgaaatgtacatatgataatataaagttcacctgcctagtatcctgttctagaaattcaagtaggaacaagcttggaatattcagtaaaaatgtagatttgacatttgattgtaaatgtggcaaatgaaaataattatttggtttaaagtatcctccacctccatttcactggatgtcagtaggtggcccacccacccttctctcccttcacacatagcacatagctcaggtgtgaggaaacaagattacataggtaggtgtggaagctgccttgacttaacagcccttagcttcatatagcaactcttctcccatgggcacagcttccacggcctagcaatatgaacacctggttacactctcagggaagcccacatgtggtatgggttcccgtcaggcatttatcctttgttcgtagttctctccatccagatatagtctacctattaagaggcattctttttttttttttttttttttaaccataagcagtgttcctgataaacacagctgacattctattcttataagattttcagggaaagagaaggtaaacccaaggtcaacgtaggaagagaaa

SEQ ID NO: 113353 - DNA, 1032 bp, Homo sapiens
atattaaatgagtatttgtaatcctttctatagtgatctaaagaatggggggctagatggaggatggagatgtttatgtgatcctctggcttataagtactccatattttttttcttccttactatttaatgaagactactggataaagcctggagaccatgtgatgatggaagtatcttgtcaagactgttacttaagaatccagagtattagtgtcttgggtttggaatgtgaaatggatgttgcaaaaagttttacccagaataaagacttgttatcgttaggaaatgaggctgaactttgtagtgccctcgctaaccttcagaccagtaaaccagatgctgtagagcagacatgtatattggaatctacagaaattgctttgcttaacaacatcccatatcatgaaggctttaaaatggcaatgagcaaagttttgtcttcactgactccagagaaactgtatcagaccatggatactcactgtcagaatgagatgagctctggaactggacagagtaatactgtacagaacatccttgaacctttctacgtgttagatgtgtccgaaggcttctctgttctgcctgttattgctggcacacttgggcaggttaaaccatacagttctgtggagaaagaccagcatcgtattgctctggacctcatatctgaagccaatcactttcctaaagaaacacttgagttttggctgagacatgtggaggatgaatctgctatgttacaaaggccaaaatcagacaagttatggagcataattatattggatgtcattgagccatctgggctcattcagcaggaaataatggaaaaagctgcaatatccaggtaaaacacaaaataataacttttggctttgttttttttttgaggtcagattttatgtaaattccttaagttctttaatcgcttaactgtaaaaataagtcaagatcactgtatgctcctcaagcattacttttcaggacgtgtgacttcatttgctgctaaaatcatcgctggtttggcca

SEQ ID NO: 113354 - DNA, 1017 bp, Homo sapiens
tatgttgcctaggctggtctcaaactcctggcctcaagtggtcctctctccttggctttccaaagtgctggaattgcaggtgtgagctgccaggcctggccaaaaatacttttttttttttaaagatggagtcttgctctgtagcccaggctggagtgcagtggcgtgatctcggctcactgcagcctctgcctcctgggttcaagcgattctcctgcctcagcctcccaagtagctgggactacaggcgcgtgccaccacgcccagctaattttttatgtttttagtagagatggggtttcaccgtgttagccaggatggtcttgatctcctgacctcgtgatccgcctgccttggcctcctaaagtgctgggattacaggcgtgagctacagtgcccagcccaaaaatattttttaaggaagaaaaaaaaacctttaacttactttatccttacttattgtctttttaggttttttaaattatattttcatagcttatcattatgcacacacatttttacatacatgtgataacataattcttattgttattttttttagaccaaaggtgaaagtgctaattgtgaaaagtatgggaaagttataccagcaagtgctgttatatttgggatggcagtagaatgtgcagagataagaagacatcataggtaagtgtattagtccattttcacactgctataaagcacctcccaagattgggtaatttataaaggaaagaggtttaaatgactcacagttctgaatgctgaggaggcctcaggaaacttacaaacatggcagaaggggaagcaggcacgtcttatatggcagcaggcaggttatggggggcagagagagagagagagacagcacgagaccacgtgggtgagtgtaggaaaaactaccatttgtaaaaccatcagatcttgtgagaattcactccctatcatgagaacagtgtggaagaaaccgttctcataatccagtcacttccctccctcaacttgtggggatta

SEQ ID NO: 113355 - DNA, 1004 bp, Homo sapiens
attatgttttttactataacttttatcaagaactggacataactgctaagaaaaatttgggattattgaaattttgaataatgaatttgagtcttttttatgttaacattctgatggaatctagttgtctaagttaaagcccattagtattcattaaagatacaatgccagttgtgtctttaatagagtagatcccatggtttattgtatgatttgtttctagacaagaatattagtttattttttaatgcagagtgagtaatggttgtgttaaagaataaaaggaaaaaccccacattttagcatcatcatttccttaaaatttgagaaaatacagtagattattttttcttgatggagaacttttttcccttgtagcatgtttgctaaaaaagctggagcacattccgtgtatgcctgtgagttatccaagaccatgtatgaacttgcctgtgatgtcgtggcagcaaacaagatggaagcagggatcaaactcttacatacgaagtcacttgacatagagattccaaaacatattcccgaaaggtattatcatgtaaactaattttagtgtttatacttctctatttttaaaaaactaagatatatttctagcttttagtccaaacaaaatgctacaaaacccttattttgtaaagatatggatataggataagatagtttattataagacatatttaaataaaattatattctttattaaaaatatttaaagatcttgagaaaaatttgtggcaagggatcaaataaacttgatcttagcaagttactttacctttgttaatttcagtgttctcattgtaaaaatggataattcatcctgtgtggtcaataactgctaaaaagttgtacttaaaaagaaaacacaagcagttcagattcaatggacttatcacattttgtgttaatatacttgtttaaaatgaaagctttggaaatgtcagctgtcagtatattttggcatgggccctttaaatgatttg

SEQ ID NO: 113356 - DNA, 1099 bp, Homo sapiens
aaatgttgtcatttctcagtttcaaaactttcatctcgtttaaaattttaaaggccctcgaattggaaatgaggtctcacgtgatcctcttctccttatatctaatttaagcatgccctggcttgagggcttttggatttgttatattgtgtgtagtaggaatatagtgggcctctagttgaataaagtgtgtaattagcctaaagtgattatcatttaatgatgcgttctttaaacttcaattattggattatttgcaacaattactctgttgaaatgctgttcttttttgaagtacttttagaatctaaattacgaaaaatgatttaacttaaaattgcaattactttgcttcatttagactgagggtttgtcaacctcagcactattgacattttgaatgggataattctttgttatgggggaggggaggtgtcctgtgcattgcagtatgtttggcagcatccttgatctctacccactaaatgtcagtagcgtctagatgtttgtagttcatgtaaacttagtgtaaatttcaggaccagctgtcctacttgaggaggagatgatatgttgagatacagtttgcttctcttggtaggcagcaatagaaaaatggatcaactcaagtgatctttcctcagttacttgtttcttagtttcctcttctgtgaaacagggacgcagcctctcttaaaaatgtttactgggtattaaaagtatatttagactgggtgtgctggctcaggcctgtaatcccagcactttgggaggcggaggcgggtggatcacaaggtcaggagtttgagaccagcctggccaatatggtgaaaacctgtctctactaaaaattaaaaaattaggccgggcgcggtggctcacgcctgtaatcccagcactttgggaggcagagacgggtggatcacctgaggtcagtagttcgagaccagcctcaacatggagaaaccccgtctctactaaaagtacaaaattagctgggcgtggtggtgcatgcctgtaatcacagctactcgagaggctgaggcaggagaattgcttgaacctgggaggcagaggttgtggtgagccgagatcacgc

SEQ ID NO: 113357 - DNA, 1039 bp, Homo sapiens
atcccccatctcactgttctcccgaccgcgccccgccccatttttcagtaagggcgattaaaacatattgattatactgtctcgggcacccagcatggtgcctggtacagtaaatatgcatttaatgaataagttgaagtacatttctgtgggaagaatttagtgagccatccctgtaattttggaggcaagtcactcaacttctctggatgatctccaaggttccttttggttctctgacctctttggtgttgcaaaatcaggactgggactcacttagggtttttttgttttgtttttaagtctctgctgcttgaatcagaaatgggactctgggacatgtgacaagtgggcttatttggttgagggctctccaggcccttggcatctggtatgtgtgttgggtgggaagtaggggggcgcctatacatatggaggagtgagcatagaaaggaggagttgggagcgggggtgcagagtgaacacgagagaatgaggactgaggactctttctgtaacttgatgttaaccagagtcagtggccgggagaatgtaccttctctctcattggttgtagtagttccctctggagctagagaggtgtggagagaggcagagggcaaagccagtttggccactggtagaaagctatttctgtgacagcatattagctttcctgccatcaggacacatgcgttaggttccagcagcagccagtgcatctggggggccagatgtcagctttcctccagactgtagactttcttgaatttgtgaattagtatcttactcattttgattctcgtcctttagcataagaaacataacttgtaatcatgctttgagagtaattgggaagtgtctttttttctcgttatgttcattaagaatttatgtttaaattctttcccagaaggtgacaggaacacagctgtagctcacatgccttttcccgcttgctccataaagtttacttctagttcctatcaaagactaagagccttggactaaagtcaggggacctgaatttaattcttct

SEQ ID NO: 113358 - DNA, 1018 bp, Homo sapiens
tagcaatctgcaaatatttagcacctataatttgctaaatactggaattagatacggatttataatggggtagaggcccttgcccttgagtttactgtcctgtagttgaaattacttcaatctaaggaacatttttgaactccttcctgcactgtgctaaattcttgaagaaacaaaggatatagacacatacctgtgacaaggttaaacatttagtgacaagtattctaacttttccagggacaagggtttgtatgttagagtggaggaggtttgtgaaagttttggaactcactggtgataaggagtagaaccttatcatattggaaaccagaagaaaccagaacactcgagtgtttgaagagactagtttggctggaatggtggtttttcagggagtagtagactgggatggatggagaggtcagttttagattatggagggccataaaaacaaggttaggaatgtggactttatcttgtggagagttactgaaggcttttcagcagaaggctgacataatagcaaagagatggtttagagacagtatcgcacatttgtgtgtagggtgaagttggggatagcgctaggggtggggaggaactccagagagaagagccagtcattttagtggtggatttggagattattcactcaattcaatgaattctttgttcaaatggcttttttagttttctttttaaagtactttcttttcttaaaataaccagtgtcttctttaaatgcagtttaaacttttgtaagccttcgtgatgtctatgtagtttcagttgcttatgattcatacaggtagatagcacagttgccagaaacagcaataaaccatatatgcttttctcataaattttacgttaggcagtcttgagaaaatgtatcttgttctttagagaaaattttttaaaactaacagtccttacagttattaagcactaatacagtgatataaaatgctctgtagtgaacttaaattgtctagctgtgtgtgtgtgtgtgtgt

SEQ ID NO: 113359 - DNA, 1077 bp, Homo sapiens
tatattcacatatatatatatatatatatatatatatatatatatatatttatttatttatttatttattttatgatggagtcttgctctgtcgcccaggctggagtgagtgcagtagtgtgatcttggctcactgcatcctccgcctcccagattcaagcgattctcctgcctcagcctccaaagtagctgggattacaggcgcctgccaccacgcccagataagttttttgtatttctagtagagatggggtttctccatgttggccaggctgatctcaaactcttgacctcaagcaatccacccactttggccgcccaaagtgctgggattacaggtgtgagccaccgcgcccagtctacctgtatgttaaagcaaatccagcagcaaagaaatctgttcagctttgtttaaacccatcagttcctaagtttatttaaccagggcctctcttctcaaagcattcttttctttctcaaaggacaaagattggtaaatactagtttaacttctaattaaagttggctgggtgaaacataagtgaagccttaatatgtgtgggctgcagaatttatctttttttttttttaatccacatggcaaaaatcatataggggttctgagtggtaacttagtttccctgcatgtctagtatcagaattttgaaaaacattgtgaggactgagagttacctaaataataactttaaaaaatagctggttttgctcctataaagaagactgagcctatattaaaagattatcaagaatcgtcttgaaaatctaggcataagtgtgcacctgtagtcccagttacttgggaggctgaggtaggaggatcgcttgagtctaggagttcgaggctgtagggtgccatggtcatacctgtgaatagccactgcactccactctgggcaatataatgagattacatacctgaaaaaataaaacatgttagttttcttctaacctgtggcttttgtccaactggagtcctttccctagcaaaaaggcaaaattgaaaataattgtgatggcagtggaggaccagtgaataacatatttgtattatcaagg

SEQ ID NO: 113360 - DNA, 1042 bp, Homo sapiens
gtatccatccataactcaagatgatcccctatttagagaataagtatacattctacaggcatctaaggttttcatgtttctctgttctgtttggttttaatggtataatatacattaaaaattgtgcatcaaggattttatttcaggtatgtgctgcattgcttctctttatgtaataaattccttgttaactgacattgtttcccggggatttccgtatgttaacaagttctttctacagagatgattaatacttacggtgatcaccctgaggttccacaaaaccctcttgaatcatcagagatgacattctactcattgtaactttaatgccatgtatttattgtcttttaattgttttgaaagttgggcatctgtttgagatatttttttcttttggttataatgacccgtttcctgaacttttcagataagaaactataggatactatcatggaacctgttttctcctgtaccctggttttaaaaccagtggctggaattaagacatgtgttgagggaggaaaagggaaaagagaggagcctgaagggactgccacttttctctagcagtggaataaggagtacttcattgagctaagaataattaatgtggagtgttgaaagatcattctgtattttatgcacatgttccagataacagcataaggacctatgaaaagcaagaaaaaagttttctggggctgtcatctttgatcacatagagatggagtgtgtgttcatacaccagccattcctgtccgtccttgccaccactgacttagaccaggtgacacatgggccttagtatgaatgttgtaattggagaatctgcctcaattttgagctcaactccagtctgtagacttgctgatacagtagtatttgtctatcacagcacttagaaatgatagcctgtggtcaggtgccagtggttcacgcctgtctgtaatcccagcactttgggaggatcattggaggtcaggagttagacaccagcctggccaacatggtgaaaccctgtctctactaaaaatggaaa

SEQ ID NO: 113361 - DNA, 1056 bp, Homo sapiens
tctaaaaataaaatcacaaggctgtagttttgcttttagatttcccagttttcaagtgatggcttgttgtgttttatttcttctgttgtgtctccaatccagtgctccatttttgcttctttctgttctctggtcccggatttgacatgtattggtacagattcccagttgctttcaaaaggtgccttgagaactttaggcataagtgaaagctgtattgtgcccgtcagatcaatagtgtgtaacttttagaacacaaatattgcaaagataatgtttatgataccataagtcctgccatgaattccctgagcatcccatgggtgtatgtatatgatatctaggacataaatgacatgtagtttatgctttcaaacagaagtcatccagacaaccttccctccccctacaacattatcatgtctgagctcttttttcttaaaatgaaaatactaagctgcttgaagaaatgtactgctaagaggacaggcatttgattttcactctgtcattgttagctgtgactttggccaattagtgtggattttcagcaattatttcatataaggaagattgtactctgagattttaatataatagatttctaaataattataaaggcatagctcatagttgacttaagtgatgctcattttctttatcctttagataggcaaaccactccctattttcataatttgtcaccaaatacatttttcaagtctctagtagtgaaaaactgagtgtattaactccttttacaggtcaaacttctttctgatttcgggaaaattgagatttgtgtgtttattgacaagaatttttctgaggtagattgttgaaaagctgttggtttcctaatttccaggtgcatggttgcttttttggttaaaagtaagacagggggagaccctgggctgaggagctgtgaaatctctaaagaggtctgtgaagtaggttattaagaggaagtaaccttattagctggtagctggagagcctggaagcctctcttaagcagctgcatcatatccaagaactgatttgcattcatgt

SEQ ID NO: 113362 - DNA, 1026 bp, Homo sapiens
gcccggtgagactgggaagtctaggagcctgctgcggcatcctgaaaagcagcttagttcttagcaatggcagggagaagtggcgtgagtctcaaaatctgtaggaaggattttctttttccgctttttcattgatctctttcccttaacccagatactttcccatctgcaggagcaaaaggggggaaaattccatgaaacgttgagtttcaatgtacagcagtaggaaaaaagttttaatgtttcaaaggataatggaggataaatggtaacttaaagcattggtaaatattatgcaggtcgtgcatatgggatggcatacatatgggatggcatagattagtttttgtgttggaatttattcaacagtgattactatcttgaacctgtaagacctgttaaagctatttgagggtatgggtggaggaaaggtgggttacagaaatgagtctgtattcagcctgtgctgtctttcctcctgccctttctttgttcaacactccctgctccacagttctctgctgtcctcactcttgtgacagtggccttctccagggtcacacctctgacctccctggactcagtttagaggatgcttttcatttcttatctccacctcttgggagcatgtgatatgttgtcagtcacttttttgttcctgaagtgctttcttctctattgtgaagggacctggagtgctcggcctgtgtgctgaagaatgtgcagctcttctcactagtcatatctcctcagcagatgaccaaggtggaagctagaagatcagggttgtcacataatcgggtgctggaggctttagaagcaaggagggtattttcagtgggaggatcaggtgtgacattctggtagaagtagtatttatttatttattttttcttttccttgggatttgagatgcacttggcacagtgagggctcaatatttgaatgaataaaggcagggttgaaacacacagatgagggaggagtattttcagtttaggaaacacatgaacacaacatcagcag

SEQ ID NO: 113363 - DNA, 1050 bp, Homo sapiens
caagggtaaggagatcagcacatggggctgggaagggcaggttcctccattaacctctaccagcctgctctgctcctttttacacatttgcggtatttggtgtgtagaatttgcacagtgggttataaacagtctgattatctcaaatgatatccatgcttgatctctcttgttggtaaaaatggggaacaatattcttgaggtatttgctgagagctctaattatcagtactttagcagattcccatgacaccaggaaatctagatattttcacatgcttgagaaaacattcatgctttattaagctacaagctgtacagcaacatctggaaagtcactcagatggaataaaaccaggttttggttgaaacatcagttaatattatgaaagaattataaacatgatgttcatgccataaacttatccggttcttgcagcagcagctctcttcagctaatgaaattttcacagaactgatgatatcactgaaaactgcaaggtggtgactgcttttgtgagtgtgacctcccctcttagcgtctcccactgtctttgggagtgagcactggggaaggaggctatttttgtgaacactatctgctgctttccattcagtcgtggagaagtcaattcaactgtaagcttaagttcagcatggcataattattatctaagcaatatttcatcaaggtgcatttctatttaagtgggctgagggccacttggttgtgttttccacatattttatttatgtttgagtcagagtctcactctgtcaccaaggctggtgtgcagtggcacgatctcagctcactgctacctctgcctccccggttcaagcgattcttgagcttcagcctcctgggtagctcgtattacaggcatgtgccaccatgcttagctaatttttttgtatttttagtagagatagggtttcactctgttgaccaggctggtcttgaactcctggcctcggcctcccaaagtgctgattacaggcgtgagccaccatgcccggcccacatgttttaaatgacatattttaaat

SEQ ID NO: 113364 - DNA, 1053 bp, Homo sapiens
gcagtgagccgagatggggccactgcactccagcctgggcgacagctccgtctcaaaaacaaaacaaaacaaaacaaaacaaaacaaaaaaaaccaggagaaaattgtggcatataccatgctggctattttggcagttctctgaggccttgctgctatacctctatgtttattgggcataatagcttctacctccatccacacccctacattctacttaatagttgtactgtaacaagtattggatatttgagaaaattccatttctgtttatttttgaagtctattttttcttcccaagtagccaaatgatatttcagtataataataatctacttgagaagcagatttcctaaataactttatgtgagacttgtctactttcttacatatatttacagcaggaatggctagaaattagttgataatcaaattgaaattgtgtatttgttaaaaactagtgatttgcttggagtagtaaaacgtatagtgattgccttttagatttggtcaggctgaaggaaatcattttgtgaccctagttacaacttggacgtccatggcattcttgtaagtgagggctgttgtcacggaatttttaggatgtctcttttccagccagaaatctctgtgtctggtgatgcctttgcccaagttttgctctggcccgctgggcttgttctgcctgctcttcctggcaggctgcactcggcttgtgctactggcctggatctcatgcctgccaagggcgagccaggcacggagtggcgaggagttcgtgagtgagttcagggtcatccggccactgtgcacagccgggcatgccgactgtggtggggcaggcagctccaggcacaggcactggctccgtgcaaggctgtggctggaccaggcatactgcaggtcgcttccattgtgggcactgggaacacggtggcacccggaaacttggagacaccaggaaccgcagagccccaaagaggatgtcacagccctggcttagggagcccctaggtctgggctccccgaagggccgcagctcttctctccttc

SEQ ID NO: 113365 - DNA, 1099 bp, Homo sapiens
attccttgccagccctggttttggcagtgatagtttttaggtaaggctgttctatgtttgtataataaaagcttatgagatttgttaaagcaaaagttcaggtcagaacccaggaatacaaaagtaattaatgctgcttcctctcttagatgatatagttgagtctctgggagtagtgcagagaggaaggattagtggttcactttgtaataaatgaattgaagaccatttattgtacataaaaacaggcccttaagcaccatgataagtttggcactactgtgaaaaggacaagtggttaaataagcgttttgccaagataggaaaaatatgaaagagaatgtcagtgaaaaagaggttgggtcttgctatgttgcccaagctggtctcaaaactcctggactcaagcaatcctcccaccttggcctcccaaagtcataggactacaggtgtgagccaccatgcctggcctaaatttcaagccagtaagaactcttccaaactttaagaagggaattagtcagtgtaacacaagtcgagcatacatctgtgcgcacacacccatgggtggcattggattcctttctgagtgccactgttctaaatgcttctgtgttttatctcagctaattccttgccatagctctctcaggtagttgttactgtttccattttatgatgagaaactgaggcacagagcatttgagcaatttccccaaggtcacgtagctagtgggtagttgaagagctgagatttgagcccctgcattctcctcctagagccccacatcttacctttttcttttttctttctttttttttgagacgagtctcactttttttgcccaggctggagtgcagtggtgtaatctcggctcactgcaacctctgcctcccgggctcaagtgattcttctgcctcagcctcctgagtagctgggattatgggggcacactaccagacccggctaatttttgtattttcagtacagacagggttttgctatgttggccaggctggtcttgaactcctgacctcaagggatccacctgccttggcctcccaaagtgctgggattacaggcaagagccactgtgcc

SEQ ID NO: 113366 - DNA, 1035 bp, Homo sapiens
catccctttccctccagtccctggcaaccagtgatctttttactgtctctgtagtttgaccttttccagagtgtcatctacttgaatcacacagtgtgtagacttttcagataggcttctttcactgagtagcatacatttaagctccctccatgtcttctcatggctcagtagctcatttctttttagcaccgaataatactccattgtcaggatgtactacagtttattcattcaccttctgaggacatcttggctgcttcaaagttttggtggttgtgagtcaaacataatttggtagttgtgaataaacatccatgtgcaggttcttgtgtagacatagttttcagttcctttaggtaactgccaaggaatgtgattgctgtgtcctacagtaaaaatgtttttacttttgtaagaaacaaccagactttgaaagtgtaccattttgcattgccaccagcaatgaataagagttcctgttgctccacatcctcttcaacatttggtgttgtcagtgttttgggttttggctgttctagtgagtgtgttgtatttcattttaatttgcattgccttgatgacatctgatagggtgcatcttttctttctttctttctttattttattattattatactttaagttttagggtacatgtgcacaatgtgcaggttagttacatatgtatacacgtgccatgctggtgtgctgcatccattaactcgtcatttagcattaggtatatctcctaatgctatccctcccccgtccccccaccccacaacaatccccagagtatgatgttccccttcctgtgtccatgtgttctcattgttcagttcccacctatgagtgagaacatgcagtgtttggttttttgtccttgtgatagtttactgataatgatgatttccaatttcatccatgtccctacaaggacatgagctcatcattttttatggctgcatagtattccatgatgtatatgtgccaccttttcttaatccagtctatcgttgttggacatttggg

SEQ ID NO: 113367 - DNA, 1107 bp, Homo sapiens
tttaatacttacctatgcctgggcacacacatgttagatggattttagttgtaattttggggtatttcttacagggaaggtattagaggaaaaaatactagaaatatggttcctgttcttaaagatgagcttcaatctaaattcaagacagagattttactctactttcatgttaaccagttatcctgcatagttccacggatactagtagaagacacaagactcctggatctttgacacaggacagtttattactgtcagtagctagagcagtgcattttgtgctcattccctgagccctgattcctcagggcactgcaaagatggccaggtgatacttatggatgatacagttggttgtgttataggaggaaaaactctgaatgcagaaaactcagatcttttataatggccagcaaggaagccttttgctctaggagacaccatctctatttgctaaggctgcaagcaaccctgctctttgctccagagggtagatattggaacagagggtgcttccaccatgctggggtggtgttggtagtggtgagtgggtggtatgatgtggggagatgtttgtgagcagttgtatccagagggtggcagatcccaggtgctgtgctgcattgtctgccttaactctttctgtaggctgtggtgagctattgacagatttggatgggagtgtgtcttgagatctttgacagagaatagaattggtgggaatagaatgggggtaagatggaaggcagggcggttgcttgaatttggggagtaattcagataagaaatgatggaggtttaaactagaatatttgcagtggaaagaagggatggataggaagagagacttcgcagacaaacagaatttgatgacctgctggatattggaagtcagggagagaggaaagtgaaaacgaactctaagcctcccagaccaggtggatgagacctttagccaaggcagaatgcaagatgagcagtaggtttgggagggatagagactggttttagatattctgaatgcaagtggcatgttataagaaatagaatgaaagcaagaggagagatggcaggaattatttttaaagaggtaaggttttgagt

SEQ ID NO: 113368 - DNA, 1014 bp, Homo sapiens
tgtgcccttctggcttccaaaaagaaggaaggattgaggctcaatcttttttcctgtatcgggctcaaaaggtctctgatttttgtgtttcttagcaactttcttttcttttttccaactcctggcagggctgtgcggcctccttttcctctcttttttttttttttttttttttgagatggagtcttgctctgtcgcccaggctggactgcggactgcagtggcgcaatctcggctcactgcaagctccgcttcccgggttcacgccattctcctgcctcagcctcccgagtagctgggactacaggcgcccgccaccgtgcccggctaatttttttgtatttttagtagagacggggtttcaccttgttagccaggatggtctcgatctcctgacctcatgatccacccgcctcggcctcccaaagtgctgggattacaggcgtgagccaccgcgcccggcccttttcctctcttatagttgctgaatgttcgccctcaggaaggtgtgtctctgatgctgtgactccttagtgttctgagtagacttaggtagactaagggctagcctttgctcttctggttctttaagctctaatgagatggagagtaattattagcttgcttgggctgccataataaagtatcacaggctgggtgacttaaatcaggggtccccaatccccagaccgtggcctattaggaaccaggcctcacagcaggcggtgagcagtgggcaagccttatggcctcagctccgcctcctgtcagatcagtggcgacattagattgttataggagtgcaaaccctattgtgaactgcacatgtgagtgatctaggttttgtactccttatgagaatctaataataaatgtaatgctcttgaatcattctgaaaccatcccccccaccccaatcggtggaaaaattgtcttccatgaaaccagcccctggtgccaaaaaggttggggatgggggctgctgaataaacaatagaaatcaattttctcaca

SEQ ID NO: 113369 - DNA, 1001 bp, Homo sapiens
ctcattaaggtacaaaatgaagtgcttggtttaccacccttcttcttttttaatataggtgtttagtagcataaaatgtcatcttagtactgctttaccaacatccctcaaattctgatatgttgtgtttttatttcgttcttttcagaatactttctaacttctctttgagttttccagatatctttctgttattgatttttaattcagtttttgttgtaatcaaaaaacaaactctgtgtgtcttaaaccctttttattttttgagatttgtatcatggcccagaatatggttaatcttggaaaataaatggcctgtatgcactgggaatgtgtgttctgcttttgagtggagtgtcatttaggtgaaggacatgccagttggattaagttggttgatatttttgttcaaatcttctgtatcctgatttttctacttgttctgttactgaaacagagaggtgtttaactctctgattatagttgtggatttgcccatttctccttgtagttctgtcaatttttgcttcaagtgttttggggctctcttattagatctgttaacatttaatattgttttggcttcatgatgagttgacacttttgtcaatatgaaatgaccttctttatctctggcaatattctcggctttgcatatgttaaaaaattttgtttgtgcatctttgattttttttttaaacatttgaagcagaatttctgagttacaggattgtaaccttttaaaagttcttaatatcttgcgagattaccctccagaaaggctgtacagaccgacacttgtctaggtattctttaagtgtttataaagctagttgctctgatcttttataattttaagatatgtagcaaggtggactgaactgtagcatttctgttgatcacaggataaaataaactaccttatgtaacttgttttgtagactctgaaaatgctgtgtatatttttaaagttgtcatcaattttatttcatctctcatct

SEQ ID NO: 113370 - DNA, 1045 bp, Homo sapiens
tgtttaatcatcatagtcttctgaagtacactggtgttaggtatttaatagtgaaggaaatgaaggttgagacatgttaagtaacttgccagattatagggagccttatttaaaattcagaaccctagttctactagctaaaacctgcagtattggttttcacaggtgcactgacagtagctgtaattgtattttcatttccttttattttctcctcttggatgtattccatagtttaatctgttgaaaaacttagagcattccctttgggaccaatgttaccgctgcctgaacattgctttaaatgttaccttcttgtgaggtccttgctccagccagtgtaaaggttcctcctgtgttgcaggaaggaggagtgtgtaggccccattagactctacatataaaagaggcttttggaaaagcaaaaactggttctattcgtttttgttttcacatggggagaggattttttaaaaaagagaatttgtgagatcaagggagtgggggaaaattttttcggcaaaaactcaagtaaatgcttagttgttttgatttcttccctgtggcatttttggcaaactggggaaagagaaattaaacttagttggaggacaattgtttcatgttgtttgccttagagactggaaaaagcagaagagtgccaattttaatctagaatcctttgagaattagagaaagataaagtgattatggaataaggtttttttttttcctttttttttttcttttattattatactttaagttttagggtacatgtgcacattgtgcaggttagttacatatgttttaaatgaccacaatcattagtattattacgccccataactgatggcagtgtttttgaaatttgaatatcagtgtgttttaccaaatgaagaggttcctaagaggtaggagcttatatcttaagaggtaataaaatctatggtggtagaaaataagtttaaagagtttgttgaaggcatctttgagcagagtggtgaaaacgattgcagaaacgcagacaagatcatcacctgtt

SEQ ID NO: 113371 - DNA, 1011 bp, Homo sapiens
tgttttataaaataatcattactttgactcttcacaattagattcaagttacatatttttgggaggtacatagatgatgctgattgttctaagtgcatcacaacaagaggcacatgacatcagtttgttccattattggtgaaattgatcccttggttgggtgttactctggttatttatcagagcatagcacatcaccccaaaatttagtgttttgaaacaatcttgttattttcatgattatagagacaaattcaggcagggcagggcgagtttagcttgtctcttctccttgatgtctagagcttcagctgggaaattttgaatagctgtgggctggaatcatctggaggcttctgcactcacatctggtgcctaggctgggctgactcacaggctgggctcccctgggactgttgagcacggcacctatgtgtggcatcttcatgtagcttgagcttcctcacagacatggctgcctaagggctccaagtgagtgttccagcaaacaagctagagactgtagggcctttcatgattgagcatcagaagtcatatatagttcactttcacatcagctattgattgaagcagtcaggagcctgtgcagatttgggaaatctggggcagggagatagactccacctcttgacggaaagagtgtcagagaatttgtggccatgttttaaaattgccacaggtagtgactgctttatttcctaattgtaaatatagccattttctctttggaattaactgtaatctatcaggagacaccctgagaatatttaagaatcctgttccttggcatctttagccagttagttttagcattaattgttggctcctttatgtttattagttgggatttgaattacataaaaatctatgtgctaatcccccagtaactaaacgcgtaagaataacagatagtgctgggttcttaaaatcccttcttggacaaagataagcatgcatgacccaatttgacaggtgggccatgtcttactg

SEQ ID NO: 113372 - DNA, 1020 bp, Homo sapiens
gtattcttatgcgtaactgctttgaaaaataggtttagtaaaaaatggtgtagaatgtcttggtataaatagtgtatatggaaatagtgtatatgggaaagtcagtagaaagagagaaatagtaaatagttactaaaatattccatgtgcttagaaaaagaacagtcctataactatgagcaaagtacagctcatttttctccaatttttcctcacaggcacatatatccacgttcatccataggctcatattaagggatgggaggccactcactctagtgagacccttcattagaagccaaggatagctcacattcacggcagcggtgcactctgtaatctcagctcccaagagagcatctatagaatgcctctttatgaaaatgtgctttcataagtgaattgtaactactctgtctttcccacgatgttagcaggacacaaactatgtggaggtgtgagaaggacaactggaaaaccattgttggcatggattttcgttgacattctgtagctatagatgtttccttgtaaacatgtgatcagcttgatgcagattataatcaatccaggtaactggactaagcagacctttgcattaagatgggcagtctgtcttttctccatgcttaccaatttttttttggcatggcatttcatgggtgggctctggataataacttcccaagcccagaagccctttgccatctcctcacagcagtgttatgattccttgacatggaattactgtgttgtgaagtttaatctaagaccaggcttgaatgtgtgacagtatatgtagacagattatttcttaactcacttttacaatgatgagatcaatgggttggaaaaggcagccagaagattcagggctgtaattgagttgtggcgtgcctagaaattatgtgggatgcctcccctgcgttggtgtctccccagaaacctcccgtgaggctcagcatccccccccccaccaaccccaatgctagtgacaaagtgaaaggcaacttcttctat

SEQ ID NO: 113373 - DNA, 1049 bp, Homo sapiens
cagtttaagtatctgagtagttttgggttcccaagaataataacacatggctgttatattttttgtttatatgggcaaaaattttagtctttaaacaatgccccaggactgtgattatgacataaaaatgctctttgctttgtagagtaaagcaatttgctttgacttctattgacattgcaactgaactggtcttacttgctttataattgaattgctgcagatttccatcgacctttgcaagaggtagaggtggttcctggagttgtaacctgatgcctattagctgttgctataactttataatggggtctttattttttgtcatgtgattggttttaacagctgattctctcatcagcttttcctggcatgtacttttggcatattttagctgtcatagtagctttttgggcaagcattatgcttaatttctttaaatctttgggcaacagaaaataaaatgtacttattaagtttatggcaatttcattacatcttttcatgccttaatgtgacattttaatttatagttcaggagttgcctttttagttttggggggaatgcagagctgtatgtagttttgtttctgtgcttttgggattgtggagtaggaagctcttttcttgagaagtcacatttttctttttctagagagaatttcagatacattatattagccaagtgaattattatctagcaactgactgtcattcatctgtacattatttggcttcattatagttcccattttgtcttgccatgtttcagagggaaaatgaaacgggaggagtgaggtcgttctgccccttaccctggatggcattacttgagcttgcagtgtaactgagaattggactaagtggaattttaggaagctctaccatgcggcagttataacctgcatctcagtgcacctgcccgtgctgagaaacacagttagcttctttccttaatgggcagttggcagggttaatgtcttaatctttctccctttttccccctaatgtaagacttaaggaagattttctgatcaaagaatctggac

SEQ ID NO: 113374 - DNA, 1094 bp, Homo sapiens
agcactgtcataatttcatgttttggggtttggccccactgctgcacgtgaaagctacaaggtctttccccgaaattcaggcccatgtttccaagcaagagtgttgactctttttaaagaagagagtttcctcatcctttacacaaatgcatattctttccctgcttactgtcttcccagctcttccacccaccccacctaaacacaggaaatgcctccgtggcgtcaggaacagtcaggtagactttcagtctgtgcattttcaggaacgtgtttccaagttagcaatttgaaatcttcatgtgcttttagtgaaacactcttgtttctatttgtcccctttctttgagaaagaaggacggtgatgttggccttccgtgctgaagatagagaagaatcctgttttaggagatgccttttgcagtgtagtgtgttaagttgggaagatagcgaacagatattagcagttctgtatatttcttctgtcttggtaaacgtggtttctgagctttttaggaacagttgacttcttcctccattttcgcaaactgcaacttggctttcaggaaacttgtggcacttaggtacttttttgtacttggtcagtagcttggcattaaacagaattggtggtttgtgctcatgccagtcttactaatcaaaaatccgtagttaaagggacaacaagaaaaaaaggcaataaatagattttttaaatgtttaaatttgggaaatggtaggaaaggactctcaaaaatttcattatgttctagcacataatgagcttttaattattatttcactaatcacctttgatctttttcccaaagatgttctttgggaaaaagctggggctctcccctgaaccacagagtacaaaaaaaatgatctggtgagtgttttagttctcccaaggatgatactgtcaagaactgtgaagggtctgaaaccgtaccctgcttgcgagctaccaaattagcctaccatcgtttccgggatgctggcagaaggcgtgggactcgcggtcagagccaacagcctctattaatcacagcaatgacagtatcagtgttttcttgtgccagttccctgag

SEQ ID NO: 113375 - DNA, 1514 bp, Homo sapiens
cctctgtgcttagaggccattccaggtgtctgttcactgacctgtttacattaactttaaaaaaaaagggaaatattaagaaatgctctggtcaccagaagtttttgctgttcattggtttcgaagtctttggccctctctagaggaagcctgaatccagtggcattttcttctgaattgccacacgtgtaggagcaggtgaaagatctttaaatgtttagctgatcttttgcagctgccggtcatgtgcttgatgctagattcctgtggttttccttataattagaaaaagtgaataccttgaatgtcccactactcctttgatcaattagattctggttttctaattagtgaactcatagggtgctagcaggttggacagattggagaacctggagaaggacagtaagacagcttgagtttggggctgtggctggtttctgggttgttggtatccgtagtttgggctgcagccccggcaggatgcagagaggactctgtccctactggtcaggcatgataggggaattagtgacctagtcatctgggattgggatgttgtgcatttcgtgttctgtggcctttctgctattaatcctgtccttcaaactcctacccttagcccaggccagacccgatcgtctatggtccagtggcttaacccacagtctccaaccacaacaagctccaactcagctgtgacacctctttcacccgggtcgtcccctttccccttttctcctcctgctactgtagcggacaagccacctgaaaggtacgtggtttggagtggaatgtggaatatggtggcagcacacacagggggcttgatgaacctgagcaggttcttgtgttctctgctggcaaaagcttgcccagatacccccagcatcctggacttcatggacagcacttaccaccttgtatcagggccgtgcctcacccagttcagtagcaaggacgttctttggagaatttgccttacatgagacttgcttgagcctactctgtctttgtggtgctggttgtgcatttatgaagaagttcttattttggaagaacttcttgctcatgagtataaagcacattcttcgttttaaaagtaggcaagctggcactggaaacattcgcttccatggcatccagtggccaagtccatagaggacagagctgctgccctccagcagcctcttccacctgtagtggctcaggtgcttcttcctgtcagtggcttcccccacaccagtgaggtgaggcgtttcctttggatttgattagactggctaaaagcatggtttccgtcctttccatgaacggacacagaggttgctttaacaaatggtgagaagctgggcctggtgtgcctttcttggggcggaggcagggtgtaaatacagaagactcaggcaagagcaacaagccccttctagagcggtggccacccggagtggatctgggccagtggtttctcacctgtggagtgtggctgtgccgcctccttctgccggctggcc

SEQ ID NO: 113376 - DNA, 1005 bp, Homo sapiens
tcttcctgtctgacaactgacactgagaagacagactggcaggtcatctgaccacggcttctgtggagccaggcagtgttccaagtggccactctagacagctcagcccacaggagtactgccgggaatgctccctttctgcagaccagcaatacttagtgtccctggaatgcccaagacatttttcctgtgttcacttatccatttggagtcttccagcctccatagatgctcttgcagtgcaattcctttttgtacctcatacaggcaacaaaggaaattggtttatgccacccagtggcctttggagaaaacaaactggaggtcagagtgacccctgggcggcctcgtcagtagttatgcgtttgggatgtgtgcagctgtgagatatcctgacccagagtgtggttggcacaggggtctttagcaattgtgtagctccatgactgtccttgttctttgctcttactgggtgggcctggacttaagttatgagttccagttctaggcggaagatgtgtttctctagtagactcactaatgcctagctgtttctctggggctatgcctcccaactcccccgccccccaccctcgggagagggctgtgtttgtaaggtctcagggcagtgacgttcctgtgatggccagagggacctttcccttttctctgggcctggggaatcctggaaataggttttgctggtgaccaccagccagtcctgctgtgtctttccagtcaggtgcgctccagttagatgggcagtggttgcctcctcaggggcagggttgggaggggtgctgaggcaggtggtttccaggagcgaccccacgtggcagcggcagcagcagcgggactgctttcctggctgtcccaggctctttgtcaacatccacatgtagatgtgggggagcaggtgtggcccaaattaatccttaaaagcctctggcgattaaactttaaaggtctcagatagacacagaataatccctggaaaacaatttg

SEQ ID NO: 113377 - DNA, 1032 bp, Homo sapiens
tactttattatacataactatacagtgcatataaaatgaaagcataaacaaaccaaaattattcagttataccacagatgaccactatattatatgtatttccttacaatcctgtgtgtgtatgtgtgtgtactaacacattgcatataagtgagaccatgtttcatattacaattattttctgctattttgcttagcatatcgtaagcattttcgatatgaaaaaaattgtattaattgaaaatcttaaatcctatgtcatgttttacaacatgtttttctacttttaaccattctagttggcattattggttttccctcatataacttctataatgtgcaaatatgcatattatagaagtctggtctgaattctgaatctttaaggtgaattccaaaaacggagattgtaagaaagatttttggaagtatatatcacaaaactgttttcattactgcaatacaatttacattactgtcagcattgtagaaattgtattttaccatattctcatgaattttaggaatttgtgataacattttgcaacttgaaggtttattgtagtgattgattcatataaggcccctaaaggaaatttccaaaattctttggctaaagagtttattctaatttttcaaacagaatacgtaagtctttagggtatgtaatgccagctaagccaaacagcgttttattctgttgttcataaatacttctgtttctttagaatgtttgtcagaagaagtgttttggataattaagtctaaaaaaactaatttgcagagttacatgaatgcaaaacattctcataggctacatcaagaaaaatattcagagggtgtaaaatcttgcatcctgagagcatcgttgtgaagaaacattggttttggttagacagagagtgaggggttcagagtttctcagagaggtttatttttatcttcttcaagtttcatttaggagttaggaatactgagacaacttaacatagtaccttggagttgatgccacagatcattttgcatgacagg

SEQ ID NO: 113378 - DNA, 1094 bp, Homo sapiens
ttacagcatttttctttacttctattataacacttagctttgtagtctcatgatatattggatctgtttttgcactcaactgagagaagcctgaggtcagggatcttaaatacagtaaattcattgattaaataactcagacaatgattttacctctaagtcccttagttgtctagggaagttttgtatgagttaagctttaatgggattcctagatatttgtgaaaatatatgtttttggaaaattggattacatgttagataaacgtataattttgggtgaaattctgtgctaaccattttggagggaatgactcttccataatatccccttctataaatctggttgtcccatctcatttccttaaaaacaaggaaaataagatgtgctataatacagctgcataagaagctctttcccgaggtaagaggaaaattttcatttaaagaataaatcctaaaaggttggggaaggaaaggggatatgtgagagagcatttatgagattagagtatgacacagtgatactctggaagttataagacaagattaatatctaatgggtttttaaactatggaaaaggatatttttatggtcctgtaatatgaaataaaggaaaccagattctcttgggcagtgatcatctaactgctttcttcattgctcgtgaggccgagaggagttgctgcggggtgtgtaccgcctggctaggtcttttttctgtatcccttcctgcccatgctaccactgcatctgtgtttttatgtcttctactcgtaaagtaaaccattaccgtaaggattagagatgcttttcttctctgcattgctaccatttactagatgttttatgagcagtcattgtgtgaggtactttacatatttcatctaacccttgtaataccttctgaaatatggctgcattgtcatccccattttacagatggggaagctgaggctcagagatggtagagaaattgctgcattgtaccaatgtaagaggtagagctggcacttgagccctttctccctggcttctgaaactctgtgttcttaactactacattctactactacattctaccacctgagag

SEQ ID NO: 113379 - DNA, 1378 bp, Homo sapiens
atccaaattgcagaagccaagtattgccttaattacttcaattacattagttacattgtcacttaaatgtttgtaaatataaaattaggtatgcttatgtatataggttttacatagtgatacaacccaaacacactgacagtgtaaataccaacaaaagtgcattaccagtaaaaatgcaaaatagcaatataaagctagagatactctgctcaaactaaattggtgttcccagtgtgaccgtggcactgagtgctgagttaggtatgctgtatgtcagaatgccgtgtaatgagtcagttttgcacagctaatgagtattcctgtagagcaaaattttgtcctctcgccttaacttgctgtgaacatgtcttttatacgtatgaagtccacttccctttttccttgttgattcctggcatagttagagtagttgaagccaaaagactgttaacttagaagtagttgttcagatgttccagaataggattacataaacatttaaagttttatcatcaaaataaacgccctatgggctgggcacggtggctcatgcctgtaatcccagcactttgggaggccgaggcaggcggatcacctgaggttgggagtttgagaccagcctgaccaacatggagaaaccccgtctctactaaaaatacaaaaattagctgagcgtggtggcgcacgactgtaatcccagctactcgggaggctgaggcaggagaatctcttgaacctgggaggcagaggttgtggtgatccaagatcgcgccattacactccactccagcctgggcaacaagatcaaaactccatctcaaaataatgataaaaacaaaacaaaacaaaacaaaaaaacgcacaatgaaaattcccatagtgagctcctgtagattttgggatattcttggccccatgtatgaggagcaaaaaaaccagatcacagatctgatctgctggttccatcctacccaggagattagatacgatttcttcctcagtgggtaagctacaaagctttttggttactgggtgggttttcgtttttacatttagctaatttatttggccttaagttaaactcctcccagatttcaatgctaaaacatggatttgtggacatacctatttcttcatagatattcgtagggtcaaagcagattttgtacccccttctcggtagaaggtatcacagaccatacaactggatgtgactttaggagatgatttggttcagtcacttgcctgcaggtgtattgaaaaagtaatggtctttgaggtgatcttattttgtgtccccagccccgctctgcagaaataggtgttgtattcattgagcaaatatgtaagtaatggttcagagacaaggcaaatg

SEQ ID NO: 113380 - DNA, 1050 bp, Homo sapiens
ccctgtaatccttgttattctctcaaaaccaatctagactatttaaaagaaaggaaggtgggagaatgccaaaggaaaagggtgaacatccccttttagtgaacccactaaggttaagggttcacttaatgggtttccagcatctgttctttagaccaaatgcttctatgatagagataatcatgctaataaaatcaaattttgctttttaggtgagagttacgtgtgtgcatccaatgaaccatttcgtaaagtcgattacaccaaaaatattaatccaaactggtctgtgaacatcaagggtgggacatcccgagcgctggctgctgcctcctctgtgaaaagtgaagtaaaagaaagtaaagatttcatcaaacccaagttagtgactgtgattcgaagtggagtgaagcctagaaaagccgtgcggatccttctgaataaaaagactgctcattcctttgaacaagtcttaacagatatcaccgaagccattaaactagactcaggagtcgtcaagaggctctgcaccctggatggaaagcaggtaagatgcttctagctcccagctctccatctgacttttaaactccctgtgccatggtggctacatagtcaacaatagaaatttagtagtgtgctagaaatccttctgggagtcatacttgagattgtgtgtgtgtgtgtatgtgtgtgtgtgtgtatgtatgtaaaattaaccatttttgtgaaaaatgtaagcgacttaagtacctcaaaagtgattatagagaagtctatcatatacttcttttggttattggaaggaaaatgtaaatttctgagggaaaagtataagttgaggagacatcctacgttaaatggcatgtcatctatttatgaataactgttgatttgtaaagtcattatggacttgggtatcacaggagtcaaaattaaaagtatttaacattcttagaaaaaccttttcttccccacttacatataatagggaaaatgtatttcaaaagaaagtacttttataggaatgtctgtaaaagtttcataggg

SEQ ID NO: 113381 - DNA, 1046 bp, Homo sapiens
aaatttttttgaagaggtgcctaatctccattaatgatttggcttttcatgcagttgtatttgcagtttgtgtactaatatatttaggcgaatttggtgacattatattgtataatggttcctggttaatggcttatttgagctatatctagagcaatttagcactgatactgtataggaaaatgagagaacgggattaaattcgtggatgttttgcacggaagtttttaataggataatttatttgagcaaacatccagtctatttaatgaatctggaatgctgtggagctcagaagtccttaatatgtattcactgagagccccccttacctgcctagctcattcagatgaagtgaggtccctgttcttcaggcatcaaactctatttgatgaggaaatctaaaacacataatgagagaagtgacaaaaggctcgtggatactactagccagccagaagacagaagtgtgagccagaagagttgggaagtgttcgtgaagaaatagaatgcaaacagggctagaactggggagactgaagtagagagactgttcccatccatcacccagccacacccgtacccacacatgtacacgaacatgcatgcacgtacagcagtagcagcagcagaaaagcaagtacaaagatggttgacagtactaagggaaatgagaataatgtgaggacatagtaggaaataagctgggagaaatttggagatggagagttaagtttaaacagggggctatgtgaagactatatcagcttttgacaaaactgatataatgaaaactgctttggggtcattctgccagctgaactgaggctaaaagagaaggaagaccaccggcataaccagtcaggagacatgctcactctagatgtgatctagactagcatggcagaggatacggagcagagaatccagactgaaagcaagatctctaaccttggaccaccgaaactggagatcactgagagcaatatggaatttttaaaaagcttcttcattgctgtttatacaggtgccaagcctgtgtagct

SEQ ID NO: 113382 - DNA, 1025 bp, Homo sapiens
tgtgcatgtatgagaatgaccacgaaagtaccacaaatattgattttgagattaaagataaattttagcaagtagggtgaacttgtacttacagaatctgtgaataatgagcattgaacatactttgagtttcaactaataggtagcagtgagcaggtctgaaatgcaaaaccacctatcaacatggcaaagtaagtttactgtttggttttaaagggatgatatagcaggatatagtacattcatatataataaaccaaggcagtgttttttaaaatttgggagaactggttcaaaggatggaaaaagttcctgtgtcaacatttccaaattaaacatgaaatgtatatttttctctctgataagagaatgtgaacaaggtgttgtgggtttgataactgattgtgctaataatcattcagtgtcagctaattacaatgtgtaaacataaaatgtccatctaatagtaggttgcattagattcagttcatgagtcatgtaaacaagggttgtagcaaagcagggagatgaagagagtacagttgggataggaaaagggttctaaggtctttgcatgcttttcaaggaaactcatgtagccccaaatattgtccagttctaattatttgctaactaaaggagtttcttcagaaaacagaatttagtagttgtgatacaatgttgaaattcaggaaatgagaattataaattttgaaagcattctctcctgcatgtcatttttgcgtataaactcttttttttttttttttttttttgagacggagtcttgctctgttgcccaggctggagtgcaatggcgcaatctcgggtcactgcaacctccacctcctaggttcaagtgattttcctgcctcagcctcccaagtagctgggattacaggcacccgccactacgcccagctaatttttgtattttttagtagagatgcggtttcaccatgttggtcaggctgctctcgaacttctgacctcaggtgatccacctgcctcggcctcccaaagtg

SEQ ID NO: 113383 - DNA, 1091 bp, Homo sapiens
tgctcatctgtctcacaaacttgaatggagtgtacaaatgttaataagacaaagtgtctgctctttcaaagcttgaattccagtgtggcaaggcagataataggtaagtaaacttaaatttaacatttttcatagtgaaaagtgctataaagaaaatgaggaaatagctgatgtttagtaggaagaaagctctattaaccaaggaagctgcttgcttatggaagcagctttgaaagtgagatggaaaccatggacttattagtggcatcgtgaacatacagagctttgtggggtttctccagttgcattcactgacccaagtaaagtacaaagaatgtagagaattgtgttgatcaagatttggagtgttctcagttatgggcactcacaggaaagtcaagtcatggatttttgacccccttaaattgtggaccgtggagaggggagtgaaaccaaggatggaggaatctcgtggaggaagggaggaatgtaagtaagagactgaaattccagaggttgatgtatgggtgtcataagactgagagagtcagaagaacaggaagtttgtaatcatgaagatattttatttaaaggatttagaagtacggtccctctgaatgataaagtccaggatgtggcagtgggctgcagtggcagaagaattttagtggtgctgactacactggagctgaggaggttgcctgaccatcactgtgatctgtgatatcacccacagtaattgaagtacctgggatggagaagacatgaacccagttctaaagccttaactgaagaggggattgtcagaactgaagaatacaaactggtgtcattagatggcatgagattcaaaggaatggggtttttgtttttattaagggtggagaagtgattggaaaagtcactgtgagcaagtagcaagtgcttacttctcatcctaactctgaggaaatgagatatgggagaaggaacagcttccagggaacctgaaatgtggtttgagcatatcattctgtggtctgaagaggctgtgacttttctatgtggttagcaactggcagacactaagcttcaaaccaagtctccaaact

SEQ ID NO: 113384 - DNA, 1007 bp, Homo sapiens
accccaatggtgacgctgtgtgtggcagaccaggagcaagtggcagagttgctcacaaaacacactgcttggaagaaatggactttttcacaaaagcctttgcggtatccatgaagtgtgcactgccttatgctcatgacatatcttactgaagataagtcagtgtgctagtgagacacctactatgttctatttattcttcctattcttttcctatttacttttcacaggaatccatgtaggtgctacttctttattttttaaaatgagttttttataggttagtgtattattttagatattaagaaatactataaagaggttaaaatcatttgagaataacgatgcaatgattggtactagtaaatatgtactagattataactaactgtatttgtgtacttgattttcaaaagttttacagaatgtataaagaagttggatggaaacttatttgttattcaggtgttttcctacaaaacagtctacctagccaggggaaagaataatgccacttcattctgactaattctcttccttcaaatatggagattcatctaatccgctgttttatttatggttttgaaaccaaagtggcaactgtgtgtggctttgggtgttcttgttttagggtggcagaagttggcatggcatttccttagcctaagagttttaatttcatagtgtttcttaattcttaacactaggcaatatgtcagtaaattctctgaaatttaatcttataaaagttctaggatgattcatgctacccttccttcccccaaatcgtgactcattttcaaacttgtgtttgaaaagctttgtaagttagggtgaaatatttagagtttggcacttggatagttccctgaaaactcagttcgtttctgccagcagtgattgcgatgacagggttagattttatttctcaggtgtttctgttggtgtttcattttgcagatctgaaaagggggttaaaagggagtgctgaaacagaagaataagca

SEQ ID NO: 113385 - DNA, 1140 bp, Homo sapiens
ctactggggaggctgagatgagatgggaggataactttaaccatggaggcagaggttgcagtgagctgagattgcaccactgcactccagcctgggcgaaagagtgacagactgtctcaaaaaaaaaaaaaaaaaaagaaagaaatggagaccatggatacctgaaagaaaagaaaagaaagaaagaaagaaagaaatggagaccataagatacctgtgaaccaatctgaggacagaatccatttaaattttatcagaccccccacccctcaaatgtaagatatcttgacaacatttaattcagtagcagtttattttagtaattatggagcttttccaaataattttagttaatttctattgaaaaacttcatttttatattcatattttctcaatttatataattaaataatgttgtcaggcacaactggtgtaaacaggtttgggaggaaacagaactgactcttggtatatattaaactcagctggtggaagtgggtgtgtttgggtatcagaaagtagtctatgagtcctgggcatccagtgtccttcagccaggatgtttcacagagggaatagagagcattgtggagagagaatcagcaaggttttattgcatcatttgttttggcaattggctgtaaagatgcctggcatgaagggaggtattttggtttttggtttgtggagcttttttgcttaacattttgtgaagactaacttaaggtcatttggcagacgtgttatttcacacataaaagcttctattctcatgaggcaaggaagcaagaacacatttttctttgccaatgaatgtctcttgctctgttttggaattgtgtttaatacataaaatctgcactgattctggacttcattgaaagagattctgtaaggttgattggggatggaaatgaggtggtctagtaattttcaaagtgctactgaattacataacagtctttgtaaaaccaaaggaacccaaattttagagcaaataaaactttacattttaaatttgttcatgtttttaaatgaatgtctttttgcttttttgttcaaagagcattttgacaaagaacataattgaagtgtatgggagtgtgtatagaatatactgacttcttaaaaatggaggt

SEQ ID NO: 113386 - DNA, 1382 bp, Homo sapiens
tgttaaataacaaaacccagtgagaaaaacacacataatttgaaagcacttatgacataaaataactgattgattgattgattttttatttttttgaaatgggatctcactgttgcccaagctggagtgcagtggcacgatcttggctcactgcaacctccacctccccggttcaagagattttcctgcctcagcctcctgagtagctggaattacaggtgcccaccaccacacccagctaatttttgtatctttagtagagacggggtttcaccatgttggccaggctggtcttgaactcctgacctcaggtgatctgcccgcctcagcctcccacagtgctgggatgacaggcttgagccactgtgccgggcctgattttttaattccatattcagaatagagaagtgaaagcccagtaactgattcaaaacaataaatgacccatgtactgccctgagagaagcggaatgctgacttaaattttattttttggaagtgagtttagttaatggttaagatacaacccaaaatatgcattattgctgttcaaagaataatttttttaaaatcctacctcttttatttaaaaagaaaaaatactccttatcatgctggtgcttgaatatacaaaatggtgctttaagtggaataggcttgtggaacaaattcaaggccaatatcattcatttgtgagtacgaacagctgaataatgagcttggcaaatgctttaagatgttaaacaaaataccgttagaacaaaggaatgactcaatctgaccgtgagagaatcttccctcctctccagagttggaacatttaaagcagggctttgacaagtgagcaggacttccattagtgaaggagtaaatgagaattttattggtctaagcaaaggcatagaagtacatgaaagtccatggagtagtgggccaccattgaaggatctaccattgcagatcccaccattgctatgcatgcttgtttgcctttgagtatgggggtggggatggaattggtgacaggatgaatcttttaagggaggccagaaccagattgtgaggggccttccatgtggtgctgaaggcagtgagaagcctcaggagtgcttgatatgatctgatagccctgtcactggattggagtaatgctccaggcctgccagccttgatccctatttgtgcactgtcctctacttgacaaacttttttttttggaggtaggggacagggtcttgctctgtcatctaggccggagtgcagtggtacaataatgactcaatgcaaccttgacctcctgggcccaagcaacttacccaccgcagcagtagctgggaactacatgcatgtgccaccacatgcctggctaatttttaaataat

SEQ ID NO: 113387 - DNA, 1079 bp, Homo sapiens
cttttaaagattttgagcacaccaatttatgacaacacttgttttggtttacatgagtaatctctgattttgtagtgaataaatgggtttaaccatcctgagacaaattcattcataatctttagagaagattccctgagggcatgaacattccatatgcctgtaatgatggaatataccttcgggagaggaacttccttgtttaaaaacacttttaacaactgctgaggactatgggtgttgtgattaaattaaagtggtcattgagctgtggagtgtttaattctgtggtttcttctgatctttgtctgcctttgagtacaccagcactgtttctgttctatagatctggcagctgttagaaatgccatgcgtgtttgctaagaattgggtggtaattttatatacaataactgctgattgggttgcccagggttgagttttttttttgatttgtcttcccacatgaagttggttagattggaaaatttgctccaattgctaaagattgcttttaaatgtgcagcatattagccacagttgttgccataagcagctgcatgctgcatattagcttgaatacacaataaacattttatggttggaatagtgaatatcgctggaggagagaacctatttcaaagagaacataaattggcctataaaaaagtaagcagaaaccttaaaccttagattgttaggtttgtgagtcctctgcttagaactgatggaagggctaccttgttacatttacagtgttacctaggttcattttaattgtttcacctgatgctgtggtttgaatgtgtcccccaaaagttcatgtgttggaaacttaatccccagtgcaacagtgttgaaaggtagagcctaataagatctgattggataatgagggcagagccctcatgaatggactgtcattgttatgggagtaggtgagttatgagagtgagttgttataaagtgagtctggcgcctggtgcctctgtcttgtgtgttcacttccaccttcccccttcaactgtgggatgaccatctgtagacaccagtgccaagcccttggacttcccagcttc

SEQ ID NO: 113388 - DNA, 1023 bp, Homo sapiens
tgaagaaaacaaccatacgctgaacagaaccagcaattgtggtctccagattcaggagggaactaatttctgggtgtttgagccagtctttctcctgtggctggaggggaatgaaatgggtatttccatgggtcggagaattgggactcacgacagactaaggcagaacacgtgagaaatgcaagtgagggctgtccttcacccagatgaaggagcccctctttggtcccctgccagggcttgttgtcaaccggtggaggtggtggaggaaggacttggtgagtctttgtcccaggcctcacagttttgacggtttcatatttagtcttgaaaaatgatcatgtaatgaatgtatacagttgtaatttctgtgagcttaaataatgtgttgcacttactgtagaatatgtcttgattcctgtagctcattttggcgtgtcttcatgctttagtaaggtggaagtggccctgcctcttggcattggagaagccctctctcccctctctgtaccgtgctccttcctaactcttggcctattcttctgtccataatagagctcctgcactgaggtctacacgggctcccatttatctttgcctgtgctgtaagccagagtatctttaaatcgtgtaagttgcccgaggcaaccagctatggcagaagaagataggtggctggaatttattgcggaagtaacatttatttacgtttgggatcccactaatgttcgaatccttgcttctgtgctgtcatgcctccctcttgtctcatcacatctgttctctgcctaagccccatggttttccatagccatctccatgcctatccttgtagtaaaagctgtccttccgccatgaatctaatactatgagccctgagcctggagtccctgcctctgtgctattcatccactcacccatcactaaatattccctgagtgcctacggcacaggcgcaggcacagtgctgagtgctctgggtgtaagagcgagaaagatacggtctccaggtgctgggtgtct

SEQ ID NO: 113389 - DNA, 1094 bp, Homo sapiens
gtaccaaaacatcttcccggagaggggctgagaggccttaatgctgtggtaaggcagggtattcattcaggtgccaagatggattggaaaatatccaagaagtaaggaggctcttcttctcaggctaaataacagcctccttgttgggaagggaataatcagtcccagctggagaaaagagactgcattccctttgcttttccattcaaatctaatcttatgacatgagtttctgacatgagtagcattcttgcccagacttgtggccccagggaggggatggttatttaagacagctggctcctccagcaaagcatagagcttgatgataaatgcttacagacaacttcccttacttgctggtcccagtcccagtttaattgacacccctagagatttgcaaaaaagaaatagatgtttctttgaacggatatcatgtctctgaatgcaagaaaaagataagatgctacatgcatacagttcatcagtatttcccagcttaaggaattcttcagggagggattccttttatgcattccctgtgaaacaagtgtcctctgcctttaaaccctgtcttgtgttataatgtagaataaatctcatatgattttgtttttccttcctttgctttgtttttttaaaggaactctttctatgaatcagtgattttaagacatcttgcagggttttttttgttttctctagaagcttagatatagctccaacctgaataattttaggttttagttattttaaaatgcttttttttccgagttgatgctccttttggtcaagaagccctgtatggagtaacagctctgcataaatatttaggcccaaatgtcaagcatttgcttcacatttctttttcataattagagatgtagtctatgggcgaggaatgaattgattcaaacatcttttcctccatcgaagaactttggtcactaaaatggttataacacatacactaaattgaacattctgagaaaggcatttatttgaaagaatttggaagtattaagggtataaagaatttatctttgcagtttatgaaaagtaatgatattaatgatagaattatctttcaaaag

SEQ ID NO: 113390 - DNA, 1069 bp, Homo sapiens
gagtcttaagcctataaatttgtcataattttgactggacatttttaaacattaaaaacatacataaatatcttcatatattgattttatgggtttgtttatagtaattaagaataagcctgttaatatcatttcctctgaaggaaagaattgtgaaaaaccatgattttacagttggtgaatctagaacatgggaaagttgtatcaataacaatggcctcaagcatcagactttataaaagaccaagtttttcagacattccactattcgccctttcccctttcagcacccccccccccactttctgtagggcaggtcgttttacccttttgaacgcacatttagagctgctgaataaccactctccttactgtcttctactctgtgtatactgcatgtgtacagtaaagcggggtggccactactccagtgcctattctacagccaaatccccaggtgagccatgactattgtggctttgttgctctgctgggtttttgtttttgttttttgccacttttctgtttccttttgctccatttccatgaatgtatctggcttattccagtgcacatctgtgtggtatgaaatgctttgcattgcacaagacactttagcctcctctatttattagagaactggttatcatcagaagattaccaagtgcctgtctgtatagtcaggaatacaaagcgactgaggaggcacatcaccgcaaggggtccatcttctagttaatttggagcaatgttctgctactgaaaaaggctgaagtttgttggtaatgtgaaaatagccatagaagcaattttgatcttctgtgctcaccccctccccaccctggggttaacagtttagtaatcactgaaatcttagaattattagtacttcataatagcatatgccagcataggattatgaggtgtttcttatacatacagggaagcaacactgcaatatttctagttgtcaaatatttattttcctagagttatagactcaacctgttctctctaaaaatgtgacaattaacaatgagcatttttatctgaaaatatctctgttatt

SEQ ID NO: 113391 - DNA, 1073 bp, Homo sapiens
tacttagaaactgattaaggaaaatcgtagcattctagtacacacaattttaaattaagtccacatttggatttgagttaatagagtaagcctcaaactcatcaagtaaaagttgtaagattttaaaaccacattttagagagaaaatgatcttttttataagagattaattcaaagtgtgttcgacactttagctatagaaaacccaaagcctgagtcaaccactgggatttgagtgaatctcaagaaagctactatatttatctgtatagtgcttatctgtatagtgctatatagcgtgttctttccactttctaccaccaggaagaagaggattttgtattattaaaagccatggtacccaggagtgcttttacagattactttagctatggtgtatttgttgccattttaaaaattccatgggactaattggaactcaaactgagctggtaactttatgaacataatattgtaccttttcaatcttggggcagaagtcctaaatgaagtcttgagactgccttgagtgaagtcttctggttgactaaatccttcaacaaaactctgtcagaatagctaaatagtatgtaaaaagcacatagatattaagctaggtaacataaatgggtaaatggttactcttgcccaggctggagtgcagtggtgtgatctcagctcactgaacctccgcctcaggagttcaagcgattctcctgcctcagcctcccgagtagctgggactacaggcgtgcgccaccacgcctggctaatttttgtatttttagtggagacgaggtttcgccatgttggccaggctggtctctaattcctgatatcaagtgatccacccgcctcagcctcccaaagtgctgggattacagacatgagccaccatgcccggccattattttatgattttagcttgtgaatctttcttagtctgccaaggtagaaagtattcaaagaaaacaaaaaagcccccaagtttctttctttccttagagttgaggggagggggataaaatttcaggagagaaaatccaggggtgtagcagaagagtggaagcatg

SEQ ID NO: 113392 - DNA, 1055 bp, Homo sapiens
tagcagggtttctggtggtaccagcagactccacacaggtaaatctattacaacatttagggccaggtgcggtggctcatgcctgtgatcccagcactttgggaggccaaggtgggtggatcacgagttcaggggttcaagaccagcctggccaacaatggtgaaaccccatctctactaaaaatacaaaaattagccaggcgtggtggcaggtgcctgtaatcccagctactcgggaggctgaagcaggagaatcccttgaaccctggaggcagaggttgcaatgagccgagatcctgccacttcattccagcctgggctacagggcaagactctgacttaaaattaaaaatggaaaaaaagcacatgaagtccaagtgcctgggtttgatcttggcatggccactcttaagctgttttaccttggataagtcacatcacccctatctgtggaaaaagggattaataggacctaccgcacaggattgagattgattaaatatggagaaagcagttagggtagccttgttattctttcttaccgtaaaccttggcatttccaggttccattttcacgtgaaggcagttttacttgcaaaaaactaacatgcagtagcgtacaagggggaaagagaaggtgagagaagtcagactccagattttattacctcctctgcttttctatcaccaacttttcctctcaactctcccttcacctctgctttcctgccctcttcacatactccaaccctatcaataatctataaatgactctactaggaacagattatcccacctgggaggctgaggcaggagaattgcttgaatctgggaggcggaggttgcattgagctgagatcgcaccactgcactccagcttgggcaacagagcgagcctctgtctccaggaaaaaaagaaaaaaggttattctggcaaggcacagtcgctcacgcctttaatcctagcactttgggaggccgaggtgggtggatcacctgaggtcaggagtttgagaccagcctggccaaaatggtgaaaccctatctctactaaa

SEQ ID NO: 113393 - DNA, 1071 bp, Homo sapiens
caagacgcgtcccagggctgtagccgcctgaaggcttgactgggaatggaggatccccctctgtagtcactcattcacttgctggcaagctggtgctggctgttggcagaaggcctcggttactcgccatgtggacctctctgtaagttggcttgagtttcctcagaacacagcaggtggctttccccagaaccaagtgataagagagagagagagagagagagtgccatacagaagctgtccattctgtgacctagccttggaagccagaccccatctcttccataatatcttggtggtcacacaccagcccaactcagcatggggagagacatcacaagggcatgagaaacgggagctggggctcatgagggctattgtggagtctggcagtcacaccagccttctctccattttcatctctttatcagccactcaaaatttctgccctgggctggtctggcttcctcatcctgtcctttccaaccttcctgtccatcctcttttttgagggctgccagagtctcaccccatcaattttattgctttgttctccttccagtccttttgttcgtcagactgctgactccctactcattctttttccttctcttcaaatcctagaatcccacccctgtggacctcgtttgcttcttttaatgctcgtcttcctgattctccatttttctgcttgaccccaacctatgatcttctgttccctctgtgcaagttcctcagagtctcttcaatctagctgataacttttcccataggaatatttgctatgcttaaatcacagcattttctttgggacagataggcaataaagagtagtaaatgtgtcatcagctaccagatggatgaagaaagcatttccctgaactttaattcatcattcatgttccagtttaagacttttaaggcaatagtaacttcaggcttcagagtcacagcacatctgtggacactgagggataaaatgtttcgtgttttgatgctgaagtgtatgcctggaggctctctgctgtgagcattcttgccggttgaaagaaggaagaaaaaagtacattt

SEQ ID NO: 113394 - DNA, 1025 bp, Homo sapiens
aaaattaaattttgaaaaattgcagttgtccatcagttgtcatttatcatgaggaaataaaatgattaaactcctaggagtcacatggttagcctggaaccattagaattatctatagttctaagccttattgtgccactaataactatcttatccagctatcatgccatagagtcttttgattccttttatggaagtaaaaaataacataatttcaaaaaaaggtaactgatgatttttcttatgtctaatctgaatgaaatatctaaggaagaaatgcactgatgtgatgtgcataaggagagaggtgagatgagaagaaagggaacgcctcctcggtttctgtgacacatttttacattctgtaagcattttgtgtgtcaacggattagttagctagggatttgtaaattatcctgataaataatggtcattctcctctttcagcagatttctgctcatggcagatcttcttccaatgtaaacggtggacctgagcttgaccgttgcataagtcctgaaggtagttctcagtctgatcattactttgataaaggaaatcatgcatggggacttggtgctcacctaaaactcacttgtgctaaattacgatcttcctaaagagggatgtgatcacatcacctgtcagcccctttggccttagtaagaggcggggatgggggttacttcaagataaagaaaaatctcattgtcattaactaggttattgaagcttcagattttagacttgggcttcttttatttttgtggtgatctgatcacaacttctaaatatatttcctttctctcaattagataacaaaactgtgttttcttgatttggtgtcttctgtgtgctggacactgggacatgtagtgagaagtgggcagatcttaacccttcccccacatacctttttgagaaagctttgagccaggaattagccttaacaaggcatctatcttatctgggtagaattttctctactagaaaatgttgaagagaaatcttggacattttgaag

SEQ ID NO: 113395 - DNA, 1024 bp, Homo sapiens
taacagaattgaaatactttaaatatgagtttcttaatattatagttaatatttatgaaagaatatttaattaacatacagtatggctttgtttttgtttttaattttttgggtacctttgtcccctgactccactagatattttctttaatgcacagagaaagagccaagtttttccttcctgggtctgtgctgtagaatacaacaggaatgggccaggtgtggtggctcacgcctgtaatcccaacactttgggaggctgagacaggaggatcagttgagcccaggagttcaagaccaacctgggcaacataatgagatctcatctctacaaaaaaaaaaaaaattaaagtataaaaaagaaagaaaacaggaatgatggtatttaatttatgtctttaaatggtcttcctctgattattccataggtccactggaaaggagtttgccctaaagattatagacaaagccaaatgttgtggaaaggtatagtatgcataacccctagttctgaaagaaactagagtaacttggtgaggtgtttactgtgatgaaggaatttaagtggggacttgacacaactatcacagcaggagtagagaccagtaatagtgggaaaaacagttaagcggttttattcctgctatttttcagaaactttaatcctaaaacagtaaattgatttgatcttggtcctaactagaaaacgtagattcttttctctgggagatacctattttaacacccaacaatactcaaaaggtgcgtcaagaactctgagggacctgggactttacttgcaagctaacaaagccttccagcttcatacaggccagcagaacacaagatttctgagtcagagacaaaaggatttgttattcctgacacagcaggtagcatgagcttcatgcttgcattggttccccttaactcccaagtcccatagtggtgaggctgaggagcccagctggatgatttacacacagtgggtttatgtcatagctggggaactctgagcttagga

SEQ ID NO: 113396 - DNA, 1033 bp, Homo sapiens
tcctttaaaatgtggttattatcgacacctagaacataagattattgtgaaaattggttgaattaagccatggaaaacagagaagtgctagtatataataagaattcaacacatgttaactgctaacattattaatatgccagaggagtttagaatttataattagcaggatttgatctgatagttgtcattttatagttatggaacccctaaactggtcttcattggacttctacaaaatagtgtatttttaacaggaaatgtaaaatattctgctcgaatggtttagaaaaatcttctcagaactccagaatggaaaatccaggaggcaaatttgtcatttacttttttttttttttttaaccacactgtgataattactgaagcatagactgcatagactgtgcaaaatgccccttttcctttgaataaggttttcttttgcttaattttctttaaataatttgatatgcttttacttattgttctagcgatattactaatgtttttcactgtaatagccttttctccatacatgtaagggttctgctttcgatgtggtggtgtgtgatttaagcagaacgtatcataatttggtgagccaggttctgtagaactacattaaaaattttttcaaaacagtaaaaaaaaaataaaaaggtgctatggtaaggatatggtttacgtgattaaaatttaaacagctgtttccatggttggaaaaaaaaggtctttgtatgcaaaaaatttacactaagggctgaggcaaatggataagtcagttctaacatttgaatcttattttttctagtctgtgaatgtcattctatttttataatgcatgatcaaatatttttccacttttacattttgcttatctaaacaactatttccacattaagactatacaaaattataattttaaaacttgattagttacaaataagttgatttttcccattacattttatttttagaaaaaaattatatagagaatttttgttaatttgagggggtggtattcagtcactgt

SEQ ID NO: 113397 - DNA, 1023 bp, Homo sapiens
ccaaggaggtaaatgggcagacattggtgattgtgggtatattatccacccgaaaggaggaatcggtgcaattcctgtttctgcttgggacagccaggtttgttgaataagatggagaacacagaggaaaggactgctttatgggctgggatgggttgagacaagatgattagtctggtttgagagagttgttttgtctcctattatacccccccattcctctctctttgtacgttaaaaatcaccatgtccaaagataaggcagtgtcctttgccaagttagcagttttgtcatttactctcactcagaactgtggaacactgccatgaaatgattcatatgtaaattatttggagttagaatcatgaatcacttaacatatataatggtagataattgaataatgtaagttcagtatggctcaagacaaaagagatattcatattatatttagaaatattctcttggaaaatttagtctagagagcattttttacatattagaaacaaagactacatacaggttgcacaagaaatagataacgtttgtaacgatttttatgcagtactttattttgcttctgatgatgattagtttcaaaagtggattgttccttcatagacaattttacagggacagcaagaggttgagaaaggctaacagctcccatgttttaacaaaaacattcactctgtgcttagaatattagccattgtcaagtagaattcagtaggctaataagtggtggaggaaatgttgctgcagtatttgaaaggtaacactgctgatggcccttaggagaagttccacaatgtatcccagaagaccttctgttgtgccttttattgaaaaagataataacttttgggagttgtagtctccttatgtggtagatatcttatttacttcaatttgagagagattcttggggtactggtgaggggattatcttacagatatcactaaattagcaacacaaacacagcccccagggagaggcgaatatatagactcttctaact

SEQ ID NO: 113398 - DNA, 1055 bp, Homo sapiens
agcaggaaggagaattgaagtgatagattcatttagctttaaaataaaaaacctatttaatgacagtagcaactgttgtctttgcttcacacggagggaaataaattgatgtgcttgcttatacatgttcacaaaagtgtatctaaccctgctttttagtgtgattgaggatatgcttggtgcagatgatccaaaagcttcaaaatatgtgaatcaatggagagggtttgccaagtcttttgtctttgcaaccatgaggggctggctgtacagctgcttcccaagggaggaaacggggctctgtctgctgctctgtaacttagacagatgggcttggagacagataggagaccctgttcttgacttcccagctgtggtttactggggtctaagaaacaccattcttcagattttgaagcgtttgttgagtcctgagccagtcaaagacttcctagccctgttcattaaaagaagcatagattctcctccttgcacaaaccctggtgtgattcttaacccccaaatcagtgtggtgctactgcatgctcttatctttttaaggaattaaatattttcagcttacagctataatttttattttgaagaattccaacttggcatttactgaattcttcccctttggaaggtgataatgtgtgtataagaaagatgggcttggatgtcagaaacctagtttacattcaacctccagtgactgtttccaaggataaagtgttcaaacattacacaagtaccttacacagctactaacaaacagtgactagattcctagtaaatgttggtttctttctttcccatacttctgtttagcaaatttgcactgtcactcgctaagatttattgagtgactgcttggacaagcacagtgcattcagtgctcaagaaacacaacctaccatgtgcaggagcttgaaacagatttttctccacatgttatttattcatttgttataatttctatttccagctattgtccaaaagggtgaggtggctcttagcttcatgcatccatgtgtaaaaatacatgtacacat

SEQ ID NO: 113399 - DNA, 1090 bp, Homo sapiens
catgttctgttttcttctgagttttcttgacctcttttcactttaatctcttccctttgttcattttgtaactgtctaatgagtagctactgtgtgccaggcatgattttaagtgctaggaataaagtggtgaacaaaacctgaggttgtggtttcccttagtttatttgactagccataacaaaatatcatatacagtgtggcttataaacaccagaaaattcatccttccagttctggaggttgagaattccaagatcaaggtactgcagatttggtgactgttgagggctcacttcttggttcatagacagccatctcctcactctaaccacatacagtggaaagggcaagggaatctctggggtcttttgtaagggccctaatcttattcatgagagctccacccttaacaatagcatggctgcccaaaggtcccatctcctactaccatcacattgggcattaggttgcagcatgtgaattttggggagacatgaacatttagcctatggcatggtgtttatagtgttgtactgggtcactatgtgaaaaatggttttatcttcttttccatccaacattttattgtgaaaactttcaaacatacagaaaagttgaaaggattatctttttaaaattctcggttttcccattgcgttgaacaattttctaattggcattgcagtaaacataagactgacagatgttagtctctacttttgaaagccttatgctatagataaagacacacctcacaagactattgatcaaagagaataagcagagcatgagggagtgcttagttcagggctggaaatcacaaggatgtagcattcatgaaagatgtagcatttgagtgagacctttgtggtattagtggagtttttgtaggtggaaagatatttccatctggccgtcaacatcgtggtcttccaccaaagtcattaactaggtgggttacacagactgtagaattactgtacatttcagttagcttttgctgagtaacacactacccctgaagttaggagtgtgaaacaattgcatggatcagttgagtgaatcttctgagctggctggctcagca

SEQ ID NO: 113400 - DNA, 1032 bp, Homo sapiens
ttcaagtttttcttaatggacatttttagacttacggcaccttggtccaaaggctatattgttttagaatttaaaaatgccatgaaggatctcagccagattgtggagtatcaatgcgataccggatccagtgtggatttaatcagaacagcttttcttacatgactgctaagaaagataaattagctttctatttttctagtgcggggcaggccccaactgtcaaagctcttgcaacttacagtggatacttcagggtcccattctcattgctgagacaccctgtggttttgtttgttgactcagggtattttgccaagaaccagctgctataaatgactgctgtgcacacacttccagctttttagctatttattaacaaaataaaagctgtatacattaacaaaatataagatatttgagattccagaaaaaataagggggagttgagtggaataataggtaaggatgactaaaaagaatgattgtggaaatagctcattttaaatatctttttctaacatcatatgttggagccctctggttctctgaagttttccactaaatctaataatcttagatgtattctgtactcactttgaaggagcagtaagctgagttcactcagcagggaaataacagtgaaaaggaaagaaaacattttgacactaagaaacgcgtgtgcattcacaggaaatcactctttgggacagtagtggtaatctctttctcttgcctggcccagttatctgtcctgactttcactcctcagtgtgcctcttcaccaaactctgtggaccagtgggtgtccattcagctgggcttgcttttttttgttgtttttattttatttaagttctagggtacatgtgcccaacgtgcaggtttgttacatatgtatacatgcgtcatgctggtgtgctgcactcattaactcatcatttacattaggtatatctcctaatgctatccctcccccttcccctaccccatgacaggccccggtgtgtgatgttccccttcctgtgtcca

SEQ ID NO: 113401 - DNA, 1132 bp, Homo sapiens
aacacaccccacataacccccacataccccacacccacaccccccacaccccccacacccccaccccccacatacacacccacacaccccacacccccacatagcccacacagcctacacaccccacacccgaacacaccccacatacctccacacaccccacaccccccgcccccacgagcgtgcagcactctgttatatgcattgagcatacaccaggtacccccacacacccccaacacccccacacaccccacacccgaacacaccccacattccccacacaccccacacaccccacgagcatgcagcactctgttatatggattgagcgtccaccaggttctcagcacccactgggccgtcattctcttctgtcccccggctgcgtttatgtggccaccctctgtgtgtccttgcaactccccagctgctcccctgccagaaagtgtgctctccctctctccctctctccctctccagacagagcctgggtttgcaagctgagtcttttgatggcttgcaggactttgggggcgctctgtgccaaagcagtgagaaggccttttgagttgtggtttcccttgaattttagcagtgttttgctgaaagcctgagaaagtcagagttgtcaaagaattacagcttagacactttgaaaagaaccatcttgattgagccaacagcatgagaatgtttccagcgattcccttgcgagagctagcattgatggatgggctcagtggtacacagtcttgctgtgcactgcgttgtaaggcagcttcttggaaaatttagaaaaataaaacattaaaaattggcatactcaacgtgtcatgaaaaaaccttaagaagagagattggttaggatcaaaatttaataaccatgttaagtcttctgagaggaagaacctttaaccgccctgtgcccagggcttaggagagtttgctcggagactgtgaagggagtcattgctggggtcactttttgactcaggggcccagataggaatcagtggccataggcctgtgcccggcctctttatggctggctctcagctgacattctggaatgattagctgttctacaggctctgtcctagataatgacgcttagaccccctcagacaga

SEQ ID NO: 113402 - DNA, 2281 bp, Homo sapiens
ctctgacagggtgtttgtgtgaacaaacaacccgttattgtttgcagctctgatggtgattgtaaatgttgtatgtttatgtgtgttcagttgtcattttgcgcatgttggcagggtgtcccctctaaccccatgttacctacacaactctgcaggctgttagctcagaggaactgctgatgtcatgatcccattcagtacctacagggaaattcaatcagtcttgcctctggtggcacccattctcgatggccaaaacaccagcctgtgacttttgggctgtcccaaaaagtgggaggggaaggcctgctgctgatcctcccctggcgcaggacctggtctggggcatggttgtgtgggggaacttgcgatgctgctgtattgtcctcctcgtcctcctcatcctcctcgtcctcctcatcctcctcatcctcctcatcctcctcacgtcactgtgtgtcctgtcttcggaacagttttaagtgtttttacattaaaaataacctcaaaatgactctccctggtactcataggtcctcataactgagactgtggggccaacctggttttctgcagatacaaatgatagtggaaatagtgtcaaccgtctggaggttgaatcatcagataacttacagacaggaccttcccatctgctgtcaccctagtgttctcatccccagagctggggcctgagacttcagtgagaaaatgatgggctagaaattggtccataaaggtgaaaaaaaagtaaagttgatggtgttatctgcattttgtttgacagtttgatttgacagtttgagaggcacctcagagtttccttctttaccccgctgagacagtgggagagcctgaagcagaatcctggtattcaccacgctgcgtccgaccagcgcgccccatcctcagcccctctcacgcctgcatgcttgtctcagtttctgatgccgccgtccggctctcagctgcttactggtgtgggtcttttgtacctactcacatcctttccagccagccaagcaggcccctggaaaactttattttcaaacttctcagcttaccacactgcctgcctttccagaccaacagctggtgagagcacgggaggagtcccatagttctcctaccgatgctgtttcccacttaggtgaaaagtggcttttcggaaagagcagcttaagatggtgccttcgtgaaggcttttgttctttctccagctgcatttccaaagatgagtttgtatcagtaagtgtaatctcagccagcctttgggataagagaagataatttaatgggtgaggccttggtttcaggcagggctgaggtgtgggattacagttcccattttcttggacttgtccttagcatgcgtaagaaaggacagagcagggtgcatgcaggacggcctcccatgtaccccggggggctcgccccagttgcagagaccaggagagaccatcttgtggtgggaagggaatgccgagaagccgccgtcactcggcgcctgcggtgcagacttgagaagggacggattcaagggcattgccttcttcgctgggggattatgccttgtttcagggggaagttggggaaggatttgggtttattgccttaatttaagatagacaaaactgtttcactcgtgttgcttctgttgaaagtaagtctagtttctgtccctgcttctctcctgccttctgcctctcccgccgcctgcattgcttccctctggctaggtccaaggccatggtatgtactaaccgcactgccagcctgccttctgccacacacgcccctgtgcttctgacaggaagagaaaaggagaaataacggggggattgttttcttgtacccaggagacattttgtggtaggaaaaacctgtatgctggctctctgcttcccatgtaggtgggagcatcttttagtggagttttccacagttaccctttctccaggtagttgaaattgtccttggaaattgtagggatttggggagttttgtttattgagacaggatcttgctctgttgcccagactggagtgcggtggtgtgatcctagctcactgtatcctcaaactcctgagctcaagccatcctcctgcctcagcctccaagtagctaggactacaggtgcacgccaccttgcccggctaatttttaaattctttgtggagatggagtctctgtgttgcccaggctggtctcaaactcctgacctcaagtgatcctccctccttggcctccggaagtgctgggattacaggtgtgagccact

SEQ ID NO: 113403 - DNA, 1001 bp, Homo sapiens
tggagattctgccctgtggtgtcttggattcccagcctgtggcttccttcctcgcctcccgaggtagtgagctgtgaaagtatcagtctctggagctgtgggcaggtattgctcattttaggcaagctcgctttaatcacacagttgccacttgcaagttagcatgataaagtgcaggagtgctgggaaaaaggcaatggattgtttaagcctaaaatccagtgggaaatattaaagagggaaaaagcaatggctacagggcagagaggagaagcatgtgtgtatgaatggtctgcagaaagcctcccactgctgcctcaaggaacttcccagagcccctggtactaactgaaatgccacagaaattgcttcagtcagccagggatctcaaattattttacagatttattagcgtagctgacaatataatcgcaactcaaagtgacagattatccacattattattgtaaagaaaagaggaaaagaaaatcctctgatgtgtacttggtttaaatgcagcattatgggaaggtagggaaaaataaaagcgagtacgagtgtgtctctgtgcgtgcctcgtggaggccggcagaatgtgatggagagaccgcagagaacagtggagacaagaaggaagccgtccactgaatcaagaaatgaatcccaggagacagagcagcaagggtccttcatttcctcaatgtaacctatatgtaggagctttgttccctgagaccagtatttacttaggagaagggggtgatcagactagatctgggaaagtgggagaatttatgacatctaagctgcataggtcagaatagcaatgagtgaaatatccagagctagcccaacgccagggtagaagcccctgtgaccctactcctgcccccaacatgtcctgggtcccctcattgtatacagctcacatgccccgccctccagcctgattctggaaaatgaggaccaccccagctttattttactttaaccttcaccaa

SEQ ID NO: 113404 - DNA, 1035 bp, Homo sapiens
tttctgtttggaaagcctagaaacaaaatcttggaaccatataactcattctcactgcagtgttctcagaaatctgcccctcccaactacttgtcagcccacatagttaatacccagggagaaataatcagctcaaacaagatgattctggccatatgttacttttcaaagatgccaaaactatcaataatctctcattgaagtctctaaaccaaacgaagaacaagaaaaaaaaatcttctgaaaaatatcaagttaattcttctgataaaaatttgcaatagttaagggatacaaaaagtctttacctttgctttctgagatagtaggatctcccaaaggctagaccataaagcagaacagattcccttaagaaccttttaaagtcttactgcttgaaaaattgtcatggccttcaataatgctgagagaaaaatttatcttgctgctagtttaagggactacatttcaaactcttcttaaagaaaaataaaaagagaaagaggacagacttctaggactgctttgaaaagcttgagcaattacttcaaaggaaagggtgtctttgtccagagagcacgtttatgactactgatgcaaatcctaaccaaaggctgaaaaggatacccagtgcatctttatggatggccttaaaggaagatgaacaagtcaaatgagattaaagacagcccaaattctgctgcaaataccagggcacatcaggttttacagaggcacttctctcagtacgtaatactagatatcaataccaacttacagagacaactataacaacctaacttgcatttaagcaacacaagatctctatactaaccacttagcatttatattggacttatgttttatttatttattttttattatactttaagttttagggtacatgtgcacattgtgcaggttagttacatatgtatacatgtgccatgctggtgcgctgcacccactaactcgtcatctagcattaggtatatctcccaatgctatccctcccccctccccccaccccaccac

SEQ ID NO: 113405 - DNA, 1032 bp, Homo sapiens
ttaaaaaaaatttagaatgccttaaagttagaattcatttttaattatagcaggaatgtctcattagggtgatactagtaaaattaacaacagtaggatttacggtaatgacttaagtgattgatgagcgtataacaaaatgaagttttagacagagaaaaagcagggcagctatggcatacagtactttaaaaaacagctctgtggtctgttagtgctagccttatggttaataaaaccttctttctaattaacggtgctgaaatattcttaaagaacagaatcttgttgttatgaagaaaagttaggtttttttctcagtagacgccaatcccataaaggagaaagctgacatagattagcatgtctgattgcaatgaggaaaagaaaaaaaatgccacctttcaatcaaatcaaaaccagaatgcgagaatggaaaatgtattactgaaatactacacacacaaatctgtgcaacaccctcacagttagcaaccatttgcttctgaagctgatcgaatgtggctttaaaagatattattcagatatctaaaaatacctaataaacatttaattttttaaatccatgtttatgaatataaaagtgaataaataataactgttttgtatatattcatcttgcttatctaaataagatcatgtcaaagtttaaagtatttatttatcaatggaatgcactggggaacattttctccaaaatttaaaaatgtacagtctggagagcattattctgaaggtgaaataactatctcaggaaaagcactttggtgacaaggctcagtcctaaaacacagagtactaggacaaggagagagagatgccatgctttcatgtacaaaacatctctcagtgaaatattcttggttaatttcattttttaaatccctaattaaatggaatcctatattcatttttcttctcattgaaaaaactgcattccacaggagataattattacaaaacaatagagtcaaagatgaaaaactatctggtatacaggaaaataagcct

SEQ ID NO: 113406 - DNA, 1157 bp, Homo sapiens
atgactgtctgccccacaagactgtaaaggctatgagggcagggaccatgtctatttgttcaccactgtatacaggtaagaaggcctaatgcttggcacttaataggtgctaagtatttgttgaatgaaaactaattgtgataactttttggaaaacaatcaaaacactaaaaattttgaaaaggaaccaccatgactgaatgtatgtttccttacactgacattggagaaacagagcagtgacttcaactcatgagaattaccatgtgactcttgtaaaactctgcccctatatttaatccatcccacctttacagctacattttttccctttgtcctcacatgagttggaaattaagttaccaagtgaatagctgttctttgcaagcctcctactgcactaagaacacctgggtttcctctatgtcgtctacctcaagtacctggttagttatttcactcctcctcactcctacaacccactgattgttgggtttcaaatctgaaataagcctgcccatacataatctatttaaatcacacctatattttatgtgctctcagcatttaggcataggctaaagcagaagtcatatatatactctatgatcacatcactatatgatgtattcatgatgtatgatgtatatatgatgtatttctttcagtagttaaaatacatggatttaacctttgattttctagttattaataagactgctttcagctacctaacttttgtcttatcctatgtaaggcctgcgtgtaatctgatccccgccagtttaccactgaacctccacattctgtttgtcatgtaaattggaaatgaagtaaaaattattatatatttcacatttaatttgctcaattttttttagttcttgaaggtcttggattcttttttattctttattgatataagcttattttttaatgaaatgttttggtgtcaacttaaaaggctgaagaaattcaaaagtgaacatcttgaacatttagcagctagagacacttgctttgaagtctgctctcccttaatcacaggagaaaaaaagtactatattagttttgcaacttgagattgaagtgaatctgattttaaatttattagaagtaggctatatgcaagactgccactcatgaatgaaaacatg

SEQ ID NO: 113407 - DNA, 1021 bp, Homo sapiens
cagttcagagcggcactaatctaaaataaatgtttaataagctagccataaaagcacctggatttttgttctttaaatttcacaaaactgcatgaaagatttagagattggaaacaattctacataaggtttgacttatgcatttttatgtagtttagtatataaaaaataatgccttttttctttatcttttgtgaattccagctcatcaaggtgctgtacaagaccagccataccagctgccagtggaaatcgatcctctcataggtctgtcacttccttctctctttgcgattcattaagctctgtatggtggccctgaagtgtagattacagttgtttttcacttgctggttgctgggaatggaattttcctgataaaccatttgcatgcaaattggaatgcaatgagctgtggctatgctggtatttcatcaactccccctcgttggtttgcctaatttgaacaggcctaggacgcgtgtcactgaaaattaatatggatgctgtaataatgtgtgattgagaatgcgcatgaagtactgtcaggataatattggatcttttcatcactcagacttgttgatgagcaggagcaaggcacgttatgatgaattggtgcaccggtaatgtgatggagctcctttgctaggaaaattttcataataacagtggggttcttagcagcactgcgttatgaaaaataaaactgtagtgccagggtttcatcattaaaggagatcaatcctttcttcctagaccttctgttcagtctgaggggattaatgtgcaattgcagagcagtttcaaagttgaaatatattgcccagccaatggtagtgttaagatatttgtattcattttcctagggtcctacagcccaataaattgccattggaggttaaatttgttcaggggagaaaaaaatagggaggcgaccagaaagagccattgggatgaaatgagcatctgcagcagatgacttagaatatttaattgctgttaggctttttgagtagat

SEQ ID NO: 113408 - DNA, 1040 bp, Homo sapiens
ttcctccaagaagcactcagaatgcatcaggtaactggaaacaaatacatatcatgatggaatggagtacataaaaaataaagagaaagagcagcttgttaaataaagtaaaacatattttaaaataataatgcaaagaaaagggggagaaggaaaattagggagggaaaggagtatttatactagcatatctactcaaataatattattatggaagttactaatgtaaaatatgatgtaattataatttgtgaaaatgcacacagatttttccattagtgcctgtaacggagcccgtacttttcaggcacattaaactgagtcccaacccagcctcactacaatctccagttcttgtagctgtccatctactacagcataatcccagctgccaatctgaaagaaaccagctagtcagagcagacacaaccaacagaaacaaacgtcactcaataatgttcagcggcactgtgttcatggataatttcaaacagtatctctgtctagaacattgatgtgctcattcaaaacacctccatctctggctactggaaatgagtagataaagcagcctgcctagaaaaataagtggaatgtcttcaaagaggttgccaatgctaagaagcaaatgttgagaaaacacagtaaaggtcttaaaggaaaaaaactcaacaatatccagagagttaattttcacattaagaaggttaaattatttctcaaaaccaaacaaatatgtttaaactatgtcatgaaaagcagcagtcattggttattcatttgctaagagtgacctagatgaagtaaagatggtgcctgaaaggaaacaggggttcatgacaaaagtcatcagtataatagaacggctcagaattctgtaggtagttaataggaaaaaaaatcataaaaatattaatattttgcttcatgtccttgagtgtataatttagttacacctaacttaactagtaagtctgcaaaagacataataatgagcaaaatacaaagagtagctttactgacaactttgatgctcattt

SEQ ID NO: 113409 - DNA, 1017 bp, Homo sapiens
tacctccctgatctcatgtcgtctgttctcttcctcatcgatgtgtcctgtcacactgacatttctgttcctgattacatgaaggggaaggcctttgtaagtctaatatcaaagctaaaaatccttaaggaaattaatatattcacgtataaacactacatgaaaaggatgtttctgtacatctaaagcaacaacaaataacaaagtacaggaatagaaaactcatgaaagatgaaatgcaagtcacatatgaaaagcactttaagctgggcacagtggttcacacctgtaattccaatgctttgggaggccaaggtgggaggatcgcttaggcccaggagtttgagaccagcctgggcaaagagcaggacccagtaagagaagtagttcatcctcactattaatcaatgacattaaattgaacacacaataacatttgtgtccactagattatctaagattaaaaataataaaaattttaatgttggtgcagtatgagaaaacagatactgtcatatatttggtgaggatgaaaataggttgaatctttatagcaatctgtatcaattattaaaatgttcatgtactatttacttagaactctaaccaaaagtaataattgaccaagtgtgaaaaaaatattcagttatatagttcatatgtattagtctgttctcatgctgctatgaggacatacccgagactgggtaattctaaaggaaagaggtttaattgactcagttccacatggctagggaggcctcagggaacttacagccatggtgaaaggggaagcaaacatatccttctttgcaaggcggcaggagagagaagaatgagagctgagcgaaggaggatgcccgttataaaaccatcagatctcgtgagaacttaccatcacaagaatagtatgggggaaaccaccaccatgattcagttacctccgacggggtccttctcacgatgtggggattgtgggaactacaattcaagatgagatttgggtagggacgcagc

SEQ ID NO: 113410 - DNA, 1112 bp, Homo sapiens
ttcatttttttgtaactaaaaatgtagatctaaatgagaattttctatatatgaagaatttttttaaaaaatcttaatatataaaaaagctattttaatataggttttatgatttatgtttttaaatcttaaaaatgggagttataaaaggcaacctcagggtattccattttgaattacattctgtttgtattttttcccttaatttcttcctgcctgtccttctctctcccctcaagtcttaagtgcattacctacttttggttaggcagttgtcattcactgatagcaaaaggatgttaaagttcggagctgactttgtactgaaatgactttgaaacttcttggaattctcttatacttaccactttgttcttttaggtccctttttaaagctttggtatattgcaagacatgcttgaagctgactaatggaatttttagttgagtgtttgagaaattatttaaagtatattcatgaaggtaacgtgtttatcaacttctggaagtgattttgccaatagttccgcgaattactggtcaactccttaaggactgacctatgacaatgtaaggtgaggtctgaaccatggcattgtggtgatctctgcatgtgtgtttgcagcatgatatgagcacacggtagctttcctttcagcatttttgcttaaaattctgatgcagtatcaagatgtaaagctttaagcatcgaaatctaaccaactttaccattttgagtgtgcataaagaagtagtcaaccgtaaggaaaattcaacagttctttgtttggtgacacataaaataaaattgccctagtttttagagctttaatattgagaaaattcatttgtactttgtcatttgctgagccttctagaattttatggtctcaaatcacaacaccatggacactcaggagactcctgactgttttatcttattaaacaattttgaaatcattaatttttaattagcttggatgcagggtttgtttattgtttcaatagtgtgtgtatatgaactacacgttttttatttaaactactggcaagagtactatttacataaataagtataagttctttctaagagtatatactgtgagtatata

SEQ ID NO: 113411 - DNA, 1030 bp, Homo sapiens
taaaagaataaaatagacatagttctttagttagcatatctctccagatgaaaaagacaggcatatataaaataatttttagtacaaattagatagtgataagtgctatatcttatatagtaagatataaacaaaattaaattaattctgactgggggagatgggattgcaaatgactttacagaataagtgatttttaagctgtatcttaagggatgcaggagagtctaacagacctcccacatttatgtctctagcctgtgcatttctcctgatatctgactccctcctcgacatctccatttgaatatataaactgtatcttaaatttaacatgttcaaaactaaattcctgatcttcatttcttcaaagctattcttacagtcttccccctatcgtaaatggtttcctatttgagtataagctgaaatctttgcaacgtaagaccctacactacctaactcctttccaaaatcctattacatcttgagctcttctgtttgccaccccgttcactctgttctagctaaacagggtctgcttggtgtccttcaagtacttctgacctcagcacctttgattttccttttcctttcacctgaggcatttgttttagttatctttaagaactcattcttcatgcctttcaggtttttgctcaaatgtcaccttttcagtaaggccttctctctcctccctatttaaaattgcccccatcacctcatgcacttttacttactccctgacttcatatttctttatgtcactcaccatctgacatacttatctcatgcttattgatttgtttattatgtcatatcccacttgaccattagctccatgagatcctaaatttttgactgttttcctcattggtttatccctacaatctacaaaggtgtttggagcatggtaggcactaaattaaatatgtattgaattaataatgtgatgaaatgaggaagagggttctgagcaagggaagtgacatgaacaaagctcagaaaagacgtttggcacattgcttat

SEQ ID NO: 113412 - DNA, 1033 bp, Homo sapiens
ttgagtcactttcctttaaaatcttgctttttaagaaaaatactttgtcaagcttgttacattgtacagtaagctctatgtaggatgatggtgctagcatcttcccaaactgacttagaattttgactcttaatatactatataagtaagaggatccgtcagcatttacttttagttcttttgcagagatgaataaacatcctgaaatgctgatttagacaatgttttaaaaatgctttgatgcactttggtatatgactgactcttgcttagttaaatgttttgcagcattataacatagttgaattcagatcatcttttaaagcagttgtcagaaaaatgtgggccagcatggtagaatgtattagctcaatacattgtctccattttattatgaagctgctgaggaagctgtgatatacagcactgtcattacagatctattgttaggatggttccacagtcttctttgcactgccattaatttatagcagtaaacaatatgtagccttccaactgcagcaaagcagaatcttttaatgaggtggatgttattaccacaataaatcagtgctttcgcgtaatgtataattcaatgtgtgtattcccactgtaacttctctgagtaagctgatagtgtatcattgtcattgcacagctccactggtcttttttttttaactttcttttatttggggacttcttttttatatgcttgcaaataaacgtggtatgtcttgatagctgtcgtatagcaggcttcagaaaccaactgtaacaataacagccaaaatcaatactgtgggttctaccaatatggatctctgcaagatgccattttttttcagatgctagtgaaatcaatcctaattggttttagcattatattcaagaaacgtgattctataactattgattttgggggttactcatttggagagtaataaaaataggagcagataaagtgaatacttattatgcttcagaccatacaaaaggagcattgattctatttttaattcatataatttgt

SEQ ID NO: 113413 - DNA, 1089 bp, Homo sapiens
attccttactagttttttcctcttactttgcagtggttttcttttgtttcctgtggcctaccctacttttagggaagaatgaaataacatataacctctaattgcatgcaccttcttcagtactgtaaggcaggctttatctgtcatcacgaaattaaaggatgtttctgatttcccagtcatatcaaatgaagattacattggcagatggctttcagccagtcatcaggatcctaagcagggttgtaaagcagtcctgctcttttgcctccctttcctgagcttcttttcagttttgacaacttttcttcactcctctgtatacccacagaatgtatcttgataaaatactatgcttaagcattttcaagcaccctatttattagtgttttggtttagagttacctttttttccttttctttaaccccaatcttttctgcttctcatctccaaacgttggagtttaatgattttccaaagaaagcctttacagaaaggtgtgaaaaactcccttgagacttttgggttttaaaagagaagttagctaacacaagcaaatctctgctttgtaaaaaatctgagatttcttgccaatttcccagaactttcttaccttcaataactataagtatagtccagtagtttggaatttcacttctgaaaggttgatattaattgtaatcattcatatataaatttcagaaggaaagaaggaattatagttatggtatataagcacattaatagcagctacacttgttaagtatttttttgtgtgtgtgccaggaactcttctaagtgcttacttatattggcctttaaatcaacctgttaagtaaagaaatatttgaaaaattgagattacagcacatttttgaaattaggaaaaccaacttgtaatacaatagttttaaatataaatacataacatggcccagagaaggacttttgagtactaggtttgagtcttctaaatttatgttgatttcgagctaggttactcaattcatttctttattattaaaataggaatatctagattacctatttattatgagaatgtataataatgtttaataaattacaaa

SEQ ID NO: 113414 - DNA, 1026 bp, Homo sapiens
agatcttgttatatcagcattctttatcattttcataataacttaaaacatttttagtaattatccttggattttttggactgtctatggggtcgttataggcatttagctcagcagtggcattggattaatagattatttttaacagtttatgtgattttctcaaaatgagataaacacctgtagaaaaattacttaatacttactgtgtagctgaataacatagaactatgaagacatcactagtaaatctatcagtgcaagcatttgaaatgatttagattctacataggcacaataagtaaaatggaatactttcttttccccaagatgtgtttgttaaatcgaaatggtgtagtgagtatatatttaatgccacttgtaagaagatgtgttttcaagggattaaaaagtgttctggtacttgacaacaaaagtgcttatttgttaactctaaaagccacggtggtgtgctgatgaaatttttttcttgacagtattaaataaaatctagagcatgtgaggataagtgccaaaccatttcggccttatatagcatataacgaaataccctaaaagccaaggttgagtgaaaatgctgatcaggctgcctgttatacttgtcatttagatgaaagagcgctacagttgaaagaaaatagttgctgcaccccctaacagtggcaatgttgctgaaatgacagacactatttatttatttattttcttcactagagtggtgggggaggaaggcaggtgatggagacactgggaatcaaattcattggcttctataaaaagcctcagcaacacagaaaattaagggctctcatttgggttcatggaaaagatagaaaagaaaaaaacagaaaagttaaaaggaagataaggcaataaactttggtgacaacatttaccttttttgttcacattttttaaaaaaactgtatttgccaagcatgtttttgatgtccccaagataaaatacgctttttaaaaaaattcggttttgatgccttcttctaa

SEQ ID NO: 113415 - DNA, 1035 bp, Homo sapiens
aattaaaatacaaatttttgaggttggttgtggtggctcacgcctgtaatcccagcactttgggaggccaaggcggtcagatcatgaggtcaggagatcaagaccatcctggccaacatggtaaaaccctgtctctactaaaaatacaaaaattagtcagatgtggtggtgcgtgcctgtaatcccagctacttgggaggctgaggcagtagaatatcttgaaccagggagttggaggttgcagtgagtggagatcgtgctctgccctccagcctcggtaacagtgagactctgtctcaaagaaagaaaaaaaaaacttttaaatcgttttgatcgaaacattcacatgaaatattcaagtgaaatatgaaggactattatgaattcttacatttagggttgaatttttcgtacaggaaaaggaagaaaagaggtttaagattagtcagtgttaaatgtataacacttgctggtgtcttgttggtagaaaggaagatgaagatgtgccagttgttcccaacctgtgagctctggtcacttgaggggactgtgggtttgttgcaagagatctgtgaatagatagtgtacgtgtatatatattagagactgtcttacaggaaaagttgaaagctgctgatttagattatgtaattgactatctacttattttgacccaatggtgttaatgggttttctaaaaacaacttggatcaaacagaattattactattcttctgtattgtggctgctaatgctacttattttttgtctagaatgtattgtaagttcatggtaagagttaaggttcatttttttgtgtgtagaagtccaattcttctaacaccatttgttagaaagactttttctctggaggtctcctggaatctttgttggaaatcaatcggccatatatgtgtaggtctatttctagactctgttcttcacaattaatcagtatatccttatatcagtatcacagtcttgagtactgtggttttatagtaaatcatgtaataaagtcatgtgaatcctcca

SEQ ID NO: 113416 - DNA, 1053 bp, Homo sapiens
tcattcatttattggttgttaattgagtactgtaatatgccatggactgctagtttctgaagatgtgaaagaataaaatgaagtcattactatcctagtaaaagaataagctgaagatttgggagaaacaggaatggccaagataaagcaaatacttactttttaataattacaactcacatttttaaaatgaaggaaaatagagagtttgaggaacaaggtaaagaaaaatctgtttttcatctttagattgtaaccacaaaatgagctgttattttggtccatagtgcagaaacaggaaaataaagagtagaagaaaatgaacctgcaccatgatctcctgattcctatcttgcaacataggaatcagaggaaaattgactaaaactgaattttaaatttttgtctaagctctaagaaatcatgtttgttttgtttcgttttgtttttaaacctatgttacaatgctagactattcacactctgttaacctagcagtttacattgccctagtttggatccaaatagttctaaagagtagattctgacaaaaccgaagagaactgagtgacagaaccatagtgaatttgttattcattgctgagttgctcctgtttgtgcttagtatatgtttctgtttctcgctctctctttcaggaaaagtaagtgatttttttttctctccttcatgtatctcctaccatttggatgtatatttttatgtgtgagatatttctgtttaacacacacatttaatatacagcatgcatcttgacctggaattgactaccgacatttaactgttgttgatcagacagcacttctttatctctttaagttttaagtgctgtttctgatgaatgccagtccttttagtctgctctgtaacagatacactgggaatcaatataccatctagatgtcacagagggaaaagaacactcttgggggtggggggaatattgtttaaacttgttaggtgttatggcttttacttcatttttctatttattgggcttcagtgaagctaaaggaattcaagcttaccaaaag

SEQ ID NO: 113417 - DNA, 1072 bp, Homo sapiens
gaaccatgtggagatgtgggagaacattccaggcagagtggaaaacaagggcaaaacaaagccctgaggaagaatgagttgaactcatctgacagtcccagatatgaggctttatgcagtcataaagagcttaagagtttattatacatgtcatgggaagtcactggatactattaaatataggaatgatgtgatctgatttgtattttaaaattttgaggtgaagggtcctctggtcatggtagacttcagaggtaagaataaaagagagaacaaatagatgcctctgaagaccttggggccatagaccaactggtggtatctctggtcaaagtgagagaaagggatacatgcaatctctgagagtaatgttcatatttttgtcctctcgtttcctgttcatttacctttattttacataggcgttgattatattactgaattagtaggatttctctctcatccatttcaaaactgcacgcatgattatcttgtcttttgaactttttgttttgtattttcaagaaacactctcccttagagttatacccattctatttctagattctgtggtgtcagaaatagaatcatttttgtagaaagactgaaatacatacttactgacttaaataaggtttgttactcttttttttttttttcaaaaaaactacattctgcactggagaatgtagatttatttgccattaggattttgaaaataaaaatgagtaaagacaaaacagtttgagaaggataaatttttactactcgttattttacctctttgctcatcccatctttattcctacaatgtagtatcataatcaaatgtttcatttgtaatttttaatagtggttacttttgagatatatttcttaattttttaaacttaatttgctgtcatagaatatcaggttttgatagcaagtgcatctcattttcttatgtattatgtatagtactggtgtagagaaatgctgagtctggttttcccttaacgctttcacaattaagcttttgaaatgaacgttttgaaaaacaaaacttgaatcaaagcaacaaagtgggtta

SEQ ID NO: 113418 - DNA, 1083 bp, Homo sapiens
aaagtgtcttttgattccatgtcctgtgtcttattttaattaggagaatccaactgtttggacatcagttacagttaagcatggagtgccacttaactttaactgggtcttttcagtttcatattttgtattggtacttttgaagattatttcagaaaaccaaaataattttatggaggttgttgatatcatgacattttaaatttatattgtgcctatccactcattcatcaaaatttgttgagtgcctgttacatgctagaaaatttattctaagtgttgagaatataccagtgaagaaatgtggacaatcttctcctcttgttgagcttatagtctagtggggatagacatggaaataaacacgtatgtcatatggtgataattactaaggacaaaggaaagcaataatgtctcttcaataaaagagatctgaatgaagtgagggaagaagccatgaggactgtctaatgaaaagaacattctaggcagagggaacagtaaatggaaaggcctggagggaggaatgtgactggaatggcaaggaaacatggtgtttctggaaaatcagcaaagtgggattgagttgcaaaaaatctgggaaagatgagttacaaaatataagccaaaatattttgattttaagaatcattctgaattattcatttagaaaatattaatttgtgtctaaatgtacccatggctctggagatatgccaatgaggacaaaagtccttgatcttatgtaccttccattctaaagtgggtgggagagagagacaataagtaaacaaatggatatacaagataatttcaaatactacagtgctttgaggaaataacactgggtaaaattggcttgggagttggggcatatggaaattcaggtttactgaattcgtgtcgctggtgcttttcctagtctttatttctgaattcagatcccagtggtgagatcacagacacaacttctgagcttccctatgtgtataattcttacttcacattatcattataagggtttactaaggtaatttttgtaaagtacctaatacaaggtctttcttttccttttttgctcat

SEQ ID NO: 113419 - DNA, 1047 bp, Homo sapiens
gccaaagtttttctgaaataatttgtatgcattatttttaactgagattaccttgattatggtattaataacaaagatgttaattcattttattatgaaatgcttcatcgtttttaaaggctttcatgagcataattttattaatagatcccagctctttaaggtttgtgggacaagcattaatattttctattttacagaagaggaatatgaggctttgtgatgttaagcacttcacatcatcatataggtaacaggcgatacaatctgaagtcaaatctagggttctgactccagattcaccacatgaaactgaaggcagtgtagaaacaaattgcaattttttcactttttcttgtttgttttggttatcagaacattttatattcatatgaaggaatttataacgatggaagagagtattttaactgaatgttgcaatgcatatgagccctgccttaatttgatatatgtaagcccaattttagaaatcaaatgagggtgtgagggtcaggcccatatgtttagaccttgggaattcaatagtgagcaagacaaacatggtttttcttaatgttacagagcttacatgccaacagggggtgaacaacaagcttcaatatactgtagaaattgctgtggcaaggaagtgtggagtagcatggaaatgtatatctgggcactgaatctatttgggggtcagggataggagaagggaattaaaggaaggcttcattgaggaaacgacatttgaagtgtgaactgaaagatgagcggttattgtattccaggcttagggtaaatgtcagtttaaagagatagtttgttgagatggaggaatagaaagaattatggtatgggaggccaaggtgggtgtatcactggaggtcaggggtttgagaccagcctggccaacatggcaaaactccgtcactactaaaaatacaaaaattagctgggcatggtggcatgcacctgtaatctcagctactcaggagactgaggcatgagaatcactggaacccaggaggaggaggttgcagtgag

SEQ ID NO: 113420 - DNA, 1066 bp, Homo sapiens
cttagttctctcttcttcctataatttgcataccaggaggttaagaccttactttctcctctgtcctctaaacatttactgagaacatacatacatagcagggtgtgggaggatgcctatgtatagagaaaatgaatatgtacttacattgccattatcatagttgcccatagcaatgagagtatacttgtaactacgctatcattattcctgctgctgtcccattacattttgcagataggctgaatatatatgtatgtatgtatatccttctaaagaaaaatttaatgcttattgcaaatagagggagaaatatccctggaaagcaaccggtgaatactcagcaacaatggaaagagctgaggtgcacagaatattatatgttgattggtagatttgtagacaagggtaaaaggcattgaatagcctcatgtatttaaggacagtcttctgctagagccaagaagctcaggagatactgtgtgagcaaatataaaataattgaaggagaggctaagggggaaagagaatagtggacatctagggtagtcagtggtgctgagggtagagagagcacagccattcacagtagatgaagggtagtaatagataatagatagaacatctctgttatcaaaagattacatgaaaactatattatattctaaagcatagatgtgggaatctatatatgcttggaggtagggattggtagggtgttgtttagtacaggaattgattcctgcaatgatttgctacaggaagttttaagatcaaattatatttattacactttttgtaagagaaaagaaaatagaatatatattaattttctgttgctgctataacaaatttccacaaaagtaatggctttatgcaggcctcacagaagtaaaatcaaggtgttggcaggactgcattctcttctagagcgtctaggggagaattcgtttccttaccttttccaacttctagatgttttccatggtccttggcttgtggcttccttccttaattcagcaaagtcagtaaggacagattgagtgcttatattgcatcactctga

SEQ ID NO: 113421 - DNA, 1048 bp, Homo sapiens
cagtgcaactgaaaatttctcaaaaaaaaaaaaaaaaaaaaaaaaacaactaaccagtaggttaatgcatactaaaggtatgaatgcttaagtattttcttcagtttatagtgatatttctgtgtgaatgcccctgtctttttgtttacaaaatggagaatacaaatttgaaacctagtgaaagatggcaactatcaaagtgttatcttagttttaaagaagcttgggattatgttaatatttagggaagttttatttggattccttgaattagttaccttttgaggcttatggattcttaaagcaataaagcaatattccttttaaaatcattgtttttcttctgtttattaatcattgatttaatctgtgtttttctgttggattagagaaaagatttacctgagaatcttgcaatctctatatcattagctatattataggtagagcttctttgctttatctgtaatctctcctgaacacgttgctttttcaggaatgaaaaaaaaaagaagctgcagaaaggggtacaaattaaattttcatgaaagaaaatcctaatcagcagtgacagtgtaagagaaagatgattgccacttggtcattgtggagaggcacttagatttggtgtcagtgcttctgttaatgatgactaatgtctttcttggagcaagtgcatgctcaaacatactgctacagcatatagagggagaggcctcagtaataggcatcagtaagcaaaagcattagttgtcttaaaacaaagactttttaatacagtcaatttgacactctgtattattagaaaaatacaaacataattctaaggcatttaaccacaaattttgaactattttatgttcagtactaagaggtaatattttttaattaaaaggtaacgaaaccaaggaatgttaataagatatgctctctgttttgtcacttacaggaatgggcacctacattgcactgcacagaatcacatgtgctgagaaagttttaaaaagaagccaacttacaacagatttttttcataccctagtgatgt

SEQ ID NO: 113422 - DNA, 1032 bp, Homo sapiens
agtaatttggcattgatcatctgctaagattacaagaaatacttaatggactttgtgttatttttaatggaaatgttaaaaatctagcctgcctcatcctttaaatgttatgaattagagtaaaagtgatgtgcagagaggtttctctgattgcttgtagtggttaaacaacaacaacaaaatgcttcattggttgtaatctatgtatggaagacatctgtgtaatataaatgaaataatatttaatgatctaaggaatggaaacttttcctttaaccatctgatataaagctaggatataaaacagctgtcttggcctatggatatcaaggttctgccagtctctttcctgaatttttccttcctatcttcccttattatctttggatcataaagagtcattctcttattttctgactgatttggtatataggtaattaggtttaaaatcgaggttagtacgtttagatccatctagactgagtagaaaatctttgacctgtagctatgactgttttcaaatgatttgcttgctgggatcagacactatccataccctttcactttgctatcagctatgtacacacaaaggagcagaaagatgaccagatgcttagttaatcatcatatttggtcagtaaaggattccaaccatacttaattgggccttctatttctaatatttgttgggtaactttttggttaaatgctctacgaataatctaatcttttctgctaatcaaagctttctataaactttataaattaaaaatgaatgatacaaatctatagatatgtattttaaatgtaaggtggttgctatccagaatacctggatagataaaaggagacagtgtgaacgtatcagcaaagcatcaatctaggaaacaaaaagtcccaaatttttgtcctggcttggttacctgggtgactttgatcaagtcactatctttatccattattttctcaattgctaaatgagtgggttggactaggtaatcttttctatctcttctagttaaaaaagtctaa

SEQ ID NO: 113423 - DNA, 1034 bp, Homo sapiens
aaaacactattaagttctctgaatttaaaaattatttcactaaaaacagaaagaaaagtaaataacccagatatgatttgttagtgtattctagttgatgaaattttattgaagtaattatatttaaatatatgtaagatgtgttaatgacagtcatcaagattatactgtccacattataagtcacagtaaaactacattctcttttattctctgtcaaaggatttaattttctaaaattccaaagtgttaaggagattgtttctaagctacttgtaattattattctggaatcaatctaaaataaccagtaattgaatgtttgccttgaacagttcaccatagtgcctgttaataattttatatggtcaagcatgctgttgaaacaagttattcttcccccctcacaaaatagccttaataaaaaaaatttttttttactctctttgattagtaacccaagggtattgttctcatttgaacaggttgaacttcagataattttatgtcaggtaaaagcagtagctttaattttgtacagtaagcctatcaaactgtactgaaaaataaaatgcttttatgtacttttgatgagtattgtttgtgggccttttaaatttgtttggattgccttagataatatatatgattagagatgtttgttacctattagactttacaaatataattcttgtattatatagtggaatgagaaaattgagagtatgctgtatatcagggttttcccccaagttgaatagcaactgcataaatgagtactttattaaactatacataatttgatgtcaccaaaaatatacaatgatagagtaagggacttgtgctcaggaaaattaaagtaagcagcttttagcctgactaagaagtaaatgccattatattattgcgctagaatgtgcaatgttaacatccaagttaattcagcaagtattttttagaaagtttctttgaacttgctatattcacacttatattggcatatgtcttttgaccttaccaagaaatcgtgtatc

SEQ ID NO: 113424 - DNA, 1555 bp, Homo sapiens
atttaaaaataaaagcgaaacattcagtggttcattcttaaacttctcttccacgctgataggacttcttcgctcagtgtaggtgagtgccttcttcctcaccctcccccaaatggaaggtgcaggaggtaattaatgtccagagagctgcgaagtacaactcagtccgccgtgcacttggaggtttgctgacgccccacagtctcagcgtgttggtctcgtctcttctcggggggtcgtgttatcgcagttttcctcttttcctactggaggcgttgtttggactgggtttgtttgtttgtagtgggttctccttgtgtttctttaggtgcaaaccgctggaagttgtttgataatcatttctgcttcgtaatttatacttttggccctcacaaaatccgttttagtgtgacgaagtcgttgcttgcgttgcatctggggtgtagttataacgattcagggttttccttcttctcctctagcttgcttttacagattccactttctgagtcgtctctccccctcctctcccctccgacctctttctcgccccgctctccccctgcttctctcccccgccccccttcctcgtgctcgctctctcttctttcctctaactctctctgtctctctctctccctctctctttctttctctctctccctcgctgtttcctggagttatttagtttatgaatggtcccagggccatcatgagggggtggagcttcagttcctacaatcgctatccgagctgtcagtgctttagccaatccgagagagaagacaggcacgcttggcgaacggtagcagccaccactgcacttgataaagaaacagggtaaagagagaagtaagaaaataggaggagataatgggagtcaaatgcttgcacacattttacagccgttcctctttatcctcctctcttatcagtagcaaagaagaaaaagagtttatatagaagggactctcctggagatggctggaataacgcgagggagagtagcaatggttcagaaaggttcactttttttttttttaaatgattctatcaacattgtgtagtagaaggtgcaaactgtaacaaaattactttggcttgaaggcaaatgggaagcgaaaggggaatctgggaaaggacctaatttttccaggttttttcctcctttaaagtcatcctcctttctcttcccctcccctcccattgttgccaagaatcagagcagttgctgtatatgtgcaccagtgagggttggagtggatataaggtgagggtttataaatctctttttagtaatttcgatatgctgtttaaaaacagggcagggcaaaaactagtccaagcaccttgtttgataattatttcataattaagattcacatgtatttaataccattattttatcgttacaagaattaactagttacgagagagaaaatatctaagttgtgagaaatggtgcaaacttacatgtcgtagaacttagtaggatatacttttaaaataagctactaaaattgcttcaaacttaatgaaaaacaaggcaagtaaa

SEQ ID NO: 113425 - DNA, 1040 bp, Homo sapiens
attattttgtttagcctttatgttttctggatatgatgccaatatatcactctccttgctttgtccccatgacttactactctgtcgtgcatgcaagcatgttttgtgtgtgagatacctctgtttcccattacctatagtagattttacaaggcactgcataattttctattcttaaatgaaaatgtaatttcccctttaaaatatatttctcattacttttcagaccctggcaactttgtttttactaagaaacatttgtagcacagtcataaaaaccaaaattaggtttatttcaagaaaaagaatggtataatttgctctgagaggaaacagtttcttttaaaaatgagcaaaataagcaatctgtagaaaaaggtggcttaaaaagtggaataatttattttgcaggctgatagcatatgttatgtacatgtatatacatacacatattttgagttttttggtaggttctttgattttgtaatcatgtgaatttttaaatctgaatgatttagaagtatttcaaagtagtagctcttgatgaaaatattataattttgtttaaaactatacaaacaaatcatgtctcacacatatttctagcactttgtttcaatattgctgcctttattaagacaggacttggtagattgtatgaaactgattgttttgagcttgataagttaactaatccaatgtagagaaaacttgctaattctgaaattctatcaattaaaaattttttctactttgtcccatgactgaaatgtctgaaaatgcattagtttctttaggaaaggaaggttaccaaaattaaactctctgatttctggtaacttctgaatttaagaaagactgggatttaattcaagatattctatcatgcttttaaacacatatagagcaaagcctaaaatttgatttaatttaaaagtgtctaattaattgttctgaaaattagaatctctgccaatgtgtgagattaggttctttgaagttatttgctccttttagagaagttacaagttttgtctctc

SEQ ID NO: 113426 - DNA, 1050 bp, Homo sapiens
ttacattttggggaccagcctctctctcttaggcctttcattgttcttagcctcagtgaatcaaatcatttttaaagatgacatttctgacagatttctccaattttatgtaacaattgcagtttaagtattaagttaggataaatattaaactagaataaaaggtgaaattaaaccagaataaaaggcatttcttaataatgatatgaaaaatttaaacagcaatcatgttagtaacaattttattagccagaaatatctgaattgagctttaaaatggaacccaaagtatattctgacttcatccaattaacttttagacgtgtgtagaatatgctcacagaagatatcaaaatacttgtttataatggttgattgagaataaggcaaatgaaagttaaaaatatacttttccccagtacatataaacatgataataatcctttattttatgcttggaaaagttttgttctaatttttttttaaggttctttagcagaaagctattagaccactgagaattgaacaccagcgcatgtggtgtatattagagtactgttggtaattttactgctgctaacttaaaatcctcaagggggagttaattacaggaaaaccattctaaatatcagtaagctgcatattttccatgacaagaggtttttcagtggagcttgaacaattccagaatctgagcttgtaaaaataagtaaataaataaattaaagtgggtgtgtgtatgcatacagtacacctatagtatgtaaaatttttaatgaaactttaattcagaagttaccttactgtgttttaatataggcagcatgattagaacatatttaaaaattttttaattgcaattggaagggataattatatttctcgtggtcatttataaatgaatgtgaatttattttttgagctattttaaaccattacatattgccactggggactctcatttttttgtaaatgtttgcagattaaagaggtttcttcttttttcctttcacataagcttggtgtactttaggacatgtatggcaataa

SEQ ID NO: 113427 - DNA, 1043 bp, Homo sapiens
tgccctctatagcctcttgtttgggcacttcttgctttatgccgctccaaaaattctggaaacatttaactttagcttatacccaattgtttcttacttgtttggctttgctaatgctgttccctcagaaagaatgattttccttttcttattctggttaacatctgttaactctttgactcaatttgtggattactcacttctaagaaggcttctattactttggataatgcccttcaactgtgtccctaaggtaccttttgcatatattgtaattatctcttcatatatctgtttctcttattggattttgaggaccttgagaataatgactttctatcaccaaatgaccgaatctcctgtctttactcattgttggtattcagtatgtgtttttgattaaatgaacaagtgagtaaatgagtgaaatataagcttattagtttttcattcctgattttttatgttatggctctaacttatctttcatatctcattttctattggaccggctaaatgagactgcttccaattttcagacctctatacttttacttaagatctcctaaaagcctaaaatgtcatcgtcttctttgtgtatcaattgaaaattggcctcttcttaagggtatttctcaaaaatctcttgctctttaaagcttcttggtccctttaaaacaaatgtgattactctttgcctttctatcactctgggtttttacttttcttatggtgtggattttatgtcatataattttttgtttgcttattttatcccatttattagattttaagtgccttgagattagagacttgtgttttcttcatatgagtatttcttaaggcacctcaaccagttctttccacacggtagcaggtactcagaaaatatttgtaaatgaatataattaagccaaagtagagatggtcattgagaaccagaagaaatgaaatgtagcaaagaaagagaggaaaataaatcactttagaatgtaaataattgcttcaaaattgaaagtactagaaagtatctaggagatgac

SEQ ID NO: 113428 - DNA, 1029 bp, Homo sapiens
atattttagttcttgaaattaacatagatagtattgctgcttgttagagctatttcagctcccatcaatgaattttttttcaggaaccattttttcttaatctttctcttaactttttgattctcctcaaagttgaatattgatacttgagtgtcagtatttgaagtataaaccctagttgacaagcttgctgacaaaatgtactaaacttgcctttgcaggttaatgaactgaacatgaataagcccttagaagtttgcaggctttgtgattttgactttttatcttttcaaattatatttctctatatctagtgtattcttacgatgtgtcagggtctactagaatctctttatgttgtaaaattctatggcatttgtaaagtaccatttggtggattatttgcattcatgctttcccccccaaatgtttataatgtactaaatccagtatataatttaagtgacttctgtactacagttgaataactgaaagatttatttctacttgctgagtttctcttctcctattctctcttgaacttgcttcactcaagctcttttcccaccatatactgaagctgttcttttcaaggtcaccagagacatcaatattgttaaatccaatagtcattgactagtctttaaataaataaataaataaatccaatagtcaagtctcagttttcttcttacttgactttttgataccctttgatatggttgattactaccttctccttgacacatttttttcatttggtttctgggacactgtatttttcttgttttcttcttactgccaatatgagatgagtaaacaggtgttcctcttactactggcctctcttcaaaattccttgctggttcttcctcgtcttttcaatctctttattgttgagctggtacaggccttactctttgtacttttacttttccattttcttctccagctttggtcacttgcttgaaagtctgagccagtccacacctgtattatgtaaacactagtcatcaatgtctctcgaat

SEQ ID NO: 113429 - DNA, 1099 bp, Homo sapiens
ggctgaggctgcagtgaatcgtgattgtgtcactgcactccagctgggcaataaagtactgggattacgggcatgagccatcgtgcccagctggatatatttcctagctttgtccactgagggggcctgggaatagtgacatcctggtagcaatgaatgcacctaaagccttgatcttctccattgaaaccagggctctgtggagcaatggctacttccaggactgtggcagggaaactataagatgagctcatagcacctttttgtgctagaatgtaaagaagtgctcaaagaatgatggagacatgtaagaaggaaaaagaatcagcttgaaaagaatcccactggccaaatcagtgaacagtcaaacgtcaaaatagataatattatctaatagatagcaataaattataatccgttgaataaaatagaagatcatactaatataaataaatgaacaaatggaaagtttgatgaagatcagaaaatttgcatagttccaaagtacctcctcaaaaaatattcattaattacaaagggagaaagagtaattcacgtaaaaaaaaaaaaaaaaaaaagcttggtaggtaccatgtcatcaagtgatcaaaatggacatcattagtaattagagaaactgaaaccatgtgcttccttttaggctatatctattaagaagatcatagtatcactctgtgatatgcccagagtgcctagtctgagtctaatcatgtagaagaaatgtagaagaaatatgagttaaacccaaattgagggacattctacaaaataattgacctgtaatcatctaaatgtcagtgtcttaaaatttcaggaaagactatagaactattctgccagattgttagagaataaagagacataataactcaatgccagacatgattctcagctgtgtcatcttgctataaggattactggggtaattagtaaaatttgagtggtgcttaaaatcggaaggtaataatgtatcagttttagtttcctgactttcagttatattattattatgtagaacaaagtccttgtttatagaaagtatctgttgtcaatggggcatcatgttaccattttccac

SEQ ID NO: 113430 - DNA, 1056 bp, Homo sapiens
agcccatagtaaaagtatacactaaacatgtgctttacagtataataattagcatataattttcaacgtttcaatgaacttttgccataaaatttaagaggattttaattgcaagtaataaggtttgcttgttaataggctgtagataattagggagctatttgcattctctccccacaaattttcttagtgttctgagcaccacttaattcataactttacctcatgaggattagttaatcccatttagtcacagtaataatagacatgatggtttctcctctttagttctctccccaagttctaatgattcatgtggaaggattataatatggattagttttatttattgtaaatagaagtagacttttttttttggtctttttgtctaatgaagtaaaacatcatggtaagtagtactgacattcatggcagttaatttcagttttaccaacataaattttattttttatagcattttaacataaacttcaattcaaatattaacagtttactatctgaccagaaacttttataggaaagtcctagcatgagtgggttggtacaatttatacattttgttgtatccttttgctgactctgtgagtgttttttaaaataagaagatgtttacaatgcttttcagttttgagttttgagattccttactctatttggtgctttgttacttattatatactactttcattgttcatttggaaacaaatattcattccaaataacaagttttaatgtctgcttagagatattaggaaaaaatagaatgttttcttggttattaaataacatattacattttatagaaattgggaaaagtagaaaattttctcagtttttaaatgccttattacgttttgtagatgtccacatgttaatattaataaagcaaaaagaagcacttgcccaaatttgtatttctttcaagcttaagctgtttgggccttctcactaactactctagagcaaagaatttaaagccagaaaggctggctttatgtgtatcctggctttgcaactttgaacgagtcacttaac

SEQ ID NO: 113431 - DNA, 1972 bp, Homo sapiens
ctaagcctgctaaaagaaatatgcacaatgagcaaaattctagtgaagaggattaaattaagtataatttctttgcattttatctaaagaattatagtagcattttgtcttttaactcaatcatattagaatatttagaaatttcatttgtggcattttttttattttgaccctcctttggaatccacgtaatttgcttgtagccatggttatgtaggcctgatactttcccattaatgtcatttattttgtttcactattgatggcttttctaatgccacacgatcagtgggctgcaatgctggcagctggcctgggatcggcagtggttttaataaatcacaatcagacccatgccattacatcaatatttttagtcaattatagagaaggtcaggtgctacattcagtataggagcctcagcatgtggcatttgagaaacatctggtcctgcgacaaaactgcaagccggggaaaaaagaatccaatttatcccatctaaagagaccaaatgaaatctgctgctttatggataacacaatgatgattatagccattttgaacatgttatagttggtagacttaataccctttataaagacatattcccaaaagtttccattcaataaaaactgaaaatgaaaatattattttctcagaggcagatgggaattgttgtttcctcacagcaggcatctaatatcttttgacacctagtgacctgcctgaatgcaatttgtgtcttaatatctcgcttacaccagcttttgccatgagagttctttctctctctctcttttttctttgatgcctagactattgcattggtaagtaaaggaaagtattcctcccttggagctctgataactgtgccctttactgtcattgcattttttcaaatgcttagagatttcaggaaataatgggacagacaagtacctgttcatccatacattactgtcacctggagtgaggctcaggtgaaaactgagagagcttgataagaatagtggaataagcaagaaagaagccacaaatgaacagagtggcagaagtaatttttttccggtgcatggagcaggcattgtgtttatttgggtcaggagacaaatcatctttcatgtagatgacacctggtaaagtggctgaatgtaagaaggatgaggagagatgatggagaatactggatggaagtctcagaggacatactacccttttctcatatcgtccttcattgcattctaataggctgactaatgtaccatggaaattcactcttggtattagtctgggaaagaggtggttctcatctctaaaaaatgcataggtagagctagagacataaattattttagaagtaataaggtttaggaatttttaacggaacctcatatcaaaattcttgaatgcttttgattagtttaggagactgtttaggtttagatttctgctgctttaagaaactccttttcagattgcttgagtgtgttctaatggatgccctcaagctagaggcgtctcttcctgaaagacattcatcttttttctgtgtcacaggcttgccggtaaaatctttgtgatgctctctccaatttttcttcagtaaatcaaatcttccttctttcagaaagatgaatgctgtaaggttggagtgttataaaaaaaaatcaatgcagacaaaattgaaacagtatgcctctgtattgattggccttgtgaaatcgaaactaacagctttgtaactgttccagtggacagttagctgacctgtaatggacaaactatcaatattagcattactattttatcttgtagtatgtcattttaaaatccagagtccaaggaaaggcaggcctaaagaatttttaatcttctttgtaggaaatatcccactttgtttttatgtaccattgtttgcagaaaggagtagctaatgtacttgacccgttaaaagctatggctagggtggtg

SEQ ID NO: 113432 - DNA, 1033 bp, Homo sapiens
tcgtctccctttgccatgctgcagaagccagtttagctctccaacagtgagagctcttttgaccagattctttctcgagttcaggatcacctgcttcctctcttagagaagaatcttgctttttcctcagtccagtgttacccttttttcctgcctcaggttgagtgacaacggcaccatcaaatttttttaaggaaactcttaccccaatttatcatatatgttgtagcgtctatagacctggactatgcagtaataatatttttcagttttcatatccaaagtcttgtgtatttagtctggaacacactatttttagaggttcttccatgatgtgttttacttgtcatactctcaactttagctttttgaaaatgaccaggttaaaagaaaggcctcaatattttctgctgttactcttctgtaggtatcttttgaacatcatattcttacctgtataaaggacaggtatatacatacatataacaagaaataataatttttgagctgtttgtgaaactaaaggaactatcattggtgggataaaggaagaccacttaaaagtgaatcgatgagattttgtttgcaaattgttaagtgatgctgcaccaggttaaaaaaacagctattttactcggatgcttactattactatatttctattaaagctagcaagctagaaaaagcaaaaggtttatatgtaggtaaaactgttgcaggcattgttgatcaaattaaatccaaactggaagagtgttttttcattatcttctcagtatgttcttgtaaaatatattttgaaaaccagaccttttaatgcattgaaaatctcttcaaagaaaatgtctgaatatatccctcatagatatatcaagcctttacttaagctttcagtttatggtatcttctggttatcttaaccatagaccaaattatgtactaatgtaaagccttccttttcttaatggattttaaaataaagattaataagaaactaagctaattaaaaatctttacagtgtattttatacaa

SEQ ID NO: 113433 - DNA, 1092 bp, Homo sapiens
ttggaggtactggcacaaatgctaatactcctgctattgctatttctgaaaatttggtgaaacagttgtttgaataatttatttttatatcatctgttatcattttcatagtaccctttctctgattttttacctttgcttttcttattctgttgagattttttagcttcccatagttagaaactgtcttctttacttcagtgcttagcctatagagaacactcagcctttatcttttacgtgtttgaaataaacagtggtggaagctaagattcattagtgaaatagtggaggtaaaattggaaattttcgttctctctttatttacagtgtagaatatattttaaaggaaaattttagtggtttatttttctaaatcagtggatttggctttccttttataaatatttagtgccttgaggttaaatgagttttcataggagtagatgtgtttgtgaaatagtttggagtgtttgactactagacttaatcccaggggcaggaagaataataataatgattttcctttttactgcaaagactaacctttttttcttcttattatgtaagtctgacctgccttgacctcatttatagagtagctgctataaattttgcccttgattaatgtcgtatttgtgtaaataacatgaagacctttatagacagactacagcataaggtctaacagacttgtagagtgtcattagcaaatcaattactaagttcagacataagtaattgttgtttggtagaaactgctgatgttgttctagctatgatcaaggcagctgctcgatgagatgttactctgtgaaatttatagtgatttgctgatggtctctttaacttacatttgtttaataagatatttttaaatacattgttttggtaattttgagttcaattattggtatttttcatgtaaacaacactccattttaaacaaatttattttagagagctagaataattgataatcactgacgtaattgttacaaccttgatgactttaaagagaaaaaaatacatatacttataataaaagatttcagttaaataattaaattttcacaagttatgagcaagaac

SEQ ID NO: 113434 - DNA, 1375 bp, Homo sapiens
acctgaaaaactgtaaatacagatttttagaggtacttgcaaatatattaatatttcatgtgcctaaacataaaagcaagaggattttttgattatttacaaataattaaaaatgtgtttatagtaattacataattgatttgcatggttatcttaattttttggagtttaagatatttatatattttgtgaatgccatgaatagttactttctctttattcagttctttactaactgacctgtaatatttatacaagctacaggtacatattagatgaatatgttcacaaaaataagggaaaccaaaactttccgaagggcagtattctattttactatttcacagagtgattaaagacacaatagaataaaatctttcctttattgttacactatattcttttgtggtatgtgattatttaagtttgtgttagatatgatgttgagagagtgctgacacaaagtgcaaacattgttgaaaagttaatgatagtttactttgagcacttaagattactgtatcttgagcatgaacagttttgcctagtttttttttttttttttttttttttttgaaacagagtctcactctgtctccaggctggaatgcagtggtgtgatcttggctcactgcaacctctgcctcctgggttcaagcgattctcctgcctcagcctcctgagtagctgggactacaggcatgcactatgcccagctaattttggtattttagtagagacggggtttcaccatgttggccaggatggtctcaatttcttgacctcgtgatcctcccaccttggcctcccagagtgctgggattacagatgggagccactgcacctggccagttttgcctagttttgacctttagtcttgtgtgtaatgtgtttctcagttttgtgttaatacattcccttcctcatttgagctatcctccctggctttctccctgaactcctaggagtgtttctgtcaactatttaggtaattggaggtacatccatccaattcgcttcgttttacaagggcatagataactacatcttaacaaatcaatgtggatatttcattgaagaacctaaacctttaaatttttatatttttataataaggaaaatgaaacagtttgacatgagttcaggtttaaaattttttttttctttattctttaatataaattatgtttggtttctgagagcaaaacttataaaaaagggtagtattactacgagtagaaatggaaataaactcaaattccatttggtaggttacaatattgaatttagatccggtgcagtggctcataccaatattcccaacactttgggaggccaaggcaggaggattgcttgaggtcaggaatttgaggct

SEQ ID NO: 113435 - DNA, 1030 bp, Homo sapiens
tattgctgatatgcaaacatgctttattgattcaaaattttataacagataactttctattataaggtggaaacatttgtcttgaaacaatagcaaaaacattaatacaaaataaatcggagtaaagtactttttttttcttttcaaaaataaaataggttgatgggttggtgagcattaattgatctttatttgagtttccataatattgatttaaaagtgctgttacaaccaaagaaaaacataatttaactttagattcaggatttgacctgaaatacaggcgtcctatggattcaccagcacactaggatttagaaaacacaacctttgaggtaaattttgtggaactggcagtacaccctgtggcttggcagtctagtcagaaggatgataccatgctgactatataactagatctttgaacattattctcaagggtggtaaatgcaaaacaaagtaatatcaactggcacttaattctgcaagttccctgctgattggggtattcaatgaaatggaactcttcctgacaggaagtcagcctgtgagtgtggagacatctgaaaataaaatgtgttttaatttggcaccctactgttttacaactagtcttttaaatttgggattaagaagagagttaggaaaagggagaaatacacaaatgggaatattctgagcataacatttttctttggttttaatgatgttgtgcacatgtaccctagaacttgaagtataaaaaaaaagaatacagatcagtgtctctgtttctcagctatcattgcttgcttttacttagtacttttttttcctattctaatcaatctactgaagttaaggaattatagagaggctaggttaaaagtgtaaattttgagattgcctttgtttaataccaaactctctgataacttttagaagttttagctatattctcatactatatagtttttgatgaatagtatataatttaatggattttagtcagagtagtcagagttcatattaggcatcccagcttctcagg

SEQ ID NO: 113436 - DNA, 1026 bp, Homo sapiens
aaagaataaaaagacaaagggaatggatagggtacctggaagagttttcttcgggagaaaaaagaaggcaataggatgtttaagagccatcaggaattattttagatgttataccctggaacctaagcctgtgtttgcttagaaaaatgtcgaataaaaaaattgtaatttttttgattactagtaatgcaatttaataatttagtccctttaattattggcattgctttgttaagatactaatgaactactttatattttattggtaattaaaaccaaagacttctttaaataggtattaattatataaaatatccattctaaagatatttttggtgaaccaaaatgaaacataaaagtaaatgaattaatttataagaaatcaagaatatataacagacaacggcttgcatttctgttaaggtttagtgtgaggtcagaggtcaaggtactaataagagtgtttgggatgtctgctgccatgaaacaaaatggaaacttgattgatagctagagggttgaagggagagagtgtagtggagaaagcaaaggtcagggagccatttcccttctctgcatgtataacgatcaactctctccaaaacaaaatgtagatgatattgatcaatatggcatatgttgtgcacatttctatgagtattgtgaattgtcattatatatgaagttgtaataaatgttttagtattttgaaagctgaaatgaaatactttacaaaaatggtggtagttttgaagccagctttgaactaactatagtgtaccttatttgatcatgtgattaaatgtgcactattaatagtctgaaaaaataatttgaagaaacagtttggatgaaattgtaacaaatcctcatttgttttctttataacttcttttttaaaattctctttaaaataggtctggtttgcatgaagtcgagtagttcagttgtggaattggttatgctactgtgttctcaggtgagtggcaagaataaatgttgaattaaaagtagattatcacatga

SEQ ID NO: 113437 - DNA, 1020 bp, Homo sapiens
aaagcatttagttgttaattgttagattttaatgttatccaaatagtaatggacataaaaatacgttataatgcttttattgactggtataatgacattctttttatttaaatcttcatatctaaaagcagaaaattcctatagatggttatttttcttttataggcagtagatcatctaatgcaaaattgccctcagttccaacagttgattcagtttcacaagatccggtttcaaatatgaggtatttaagctactaacttgaatattgtgatttataccttttgatgactttttaagctatctaggtttattttacttcgtttcatttcatttcatttcatttctttctttcaacatatatgacatttagaggcttgggaacattttagaagttcattttcttttgaaagattataagatgtacaagtcatttgatgatgtacaagtcatttcatgatgtacaagtcacttcatgagaagtgactatttgtggtaaaaaaataattgctgcatgcataacaaatatttacataagcttatgactttctttcaaatgattgcaaattgaaagtgtggaatttgttgtttctcctctataaaatactgatataggccaggtgcggtggctcacgcctgtaatcccagcactttgagaggctgaggcaggcggattacttgaagtcaggagttcaagatcagcctggccaacatggtgaaaactcatctctactaaaaatattaaaaaaaattagctaggtgtggtggtgcacacctttagtcccagctactcgggatgctgaggcaggagaatcacttgaacccgggaggcagaggctgcagtgagccgagatcgcaccactgcactccagcctgggagacagagtgagactccatctcaacaacaacaacaacaacaacaacaacaacaacaaaatgctgatataagtgatagccagtcagccaaagccacaataatactgaattgtagatagatttttattgttacttaccttgttt

SEQ ID NO: 113438 - DNA, 1043 bp, Homo sapiens
catttttaagctataaaatatttttaaattatgtgcgttttttttagatacaatgctgttgtacaattaatagattacagtatagtgtaaacgtaacttttatatacactcggaaactaaaatatttgtgtgactcactttattgtgatagccactttattgcagtggtccggaactaaacctgtggtatctccatggtatgcctggatttatctgatagggaacagtgttcttcatgttcttattttaaatttaccttctgcttgagcctttggttttcagaatttgatagataaatttgagttttttctttaaattaacaagttcaaacatatttgggaaagttagtagaatagtggtgtgtgtaggttctccttgaagatggggaatttgacaagataaagaggtcagtgatatataggtgacctgtagagctagaatggagcctaggcccttcaagaggtcagtctagtttgtcttctttctcatagatcctttttttttaaatcttgatatataattgtttgtactattttaaatactctcaagaattcctttgtggtcaggtgtgggagctcacacctataatcccagtgctttgggaggctaaggcaggaggattgctcgaggccaagagttcgagaccagcctgagctacataacaagaccctgtctcttcaagaaattaaaaaacaaaaattagctggatgtggtggtgtattcttgtagtcctagctacttgtgaggctgaggcaggaagatctcttgagcatgggagttcaagggtacagtgagctatgattgtgtcattgtactccagcctgagcaatggagtggggccctgtctcaaaaaaaagaaggaattcctttggcatcctattctgtatctaatagcttcagtttttttcttctgcatgtttattttttggcacttttattgtgatattttatgtattttagtttttatgattacagataaaaataaccagttatcctcatatcattgtttatttatttattgattgattgcttgattgagatag

SEQ ID NO: 113439 - DNA, 1050 bp, Homo sapiens
ttcctttagggaaatctgcagcgaaggtaagtatacagattaattaattttcaaaaagcatactcctattttacaattaagatttttatttgttcatttcaacataaagttaaataaatctggcagagattaaaatagttactttaggcctgcatataacattcaaatatttgtgtttaaatacacaataaagatttgtttatatttaaacctctctgcttttcccagtgtttactttgattgtttctgtgatgccttttccttcaaatatgtcattttttcctgcatgccatctttctccacctctctccccaacccctcaaagaagaaggaagcatacacacaaaaaaagtggggaaaggaatgctatagctttgcttttctggttctgggaatactgtgtttatttttaaagaatatctgtgtaatgtatatatgaatatatatatatacaatttttttttaatcttaaatagagcccagtggacattgtgactggcggtatatctccagtaagagatcttgacaggcttctacaggacatggatattaatcggcttagggcagttgttttcagagacatagtaagttacaatatgtctttcacatactctcttaactgatgcatatttcctcttaggcctaatgtattgagattaaaaattctttgtgatatcaaatagtggagcagagatagaaaggtctagaaacgacttcttttgacaatgattttagaaacagaatattagaaaagatagtttatataaagcgagctagcagatcagcatagtgatattaaaaggaataatgcattattacatagtaagcagtctaagtgatatacatgtattaattaagtccaacaacttattgagctgtactattgtaatttccattttatagatgaataatctaaggcacataaagcttgagtaacatctccaagctagtgttgataaacaatgataaaatcaggattcaaacccagcagtcttaattctaaaattgatgctctgaatgtaataaaatgttcaacttctgaatggcata

SEQ ID NO: 113440 - DNA, 1704 bp, Homo sapiens
catcccccaccctttttagatgaaataataagtataaatcactctgtgttactaggtttctgaaagtctgactacttatgcaatttataaattttaggactatatctggtaaaatttttttttcagaatatatatatataaatgtcaaactttattctttacagcatgaactggaaaatattgaacctactcaaggcctttcaatagaagcctctgtgacatttttgcagaggctaattagccttgtggatgtgcttatatttgcaagttctcttggctttactgaaattgaagctgaaaaaagtatgtcatctggaggaattttgcggcagtgtctccgactaggtgagctgctaaaaaccgttgggaatttactaaaaaaaatttttcagtaattcagagatgacattgaaaattatccgtcttctgttggtgagaaaatatatgttagctaatttgtcatatggttactttttttaatgtacatagtagtagttggtaagttggatgggcaagaaggaggatgtattttgaaaaatttactaaggtgattttggtcaggagtttccactctcccctatcttttttttttttttttttcttttttctccctgaaatggtggttctgctttcttgccaaggctggtgtcaaaatcctgggctcaagtgatcccgcctccttatccttcctagtagctggaattagaggtgctcccctatctctttttgctctaaagtagtgcttctgaaattttaaggagatacataaacttaaggtgattaaaaaacacaaggtgattcataaatttgatgatcttgttaaaatgcagattagattatataggtctaggctggggtggtggctcacacctgtaatcccagctctttgggaggccaaagtgggtggatcccctgaggtcaggagttcaagaccagcctggccaacatggtgaaaccccgtctttactaaaaatacaaaaattaaccaggtgtggtggtgcacgcttataatcccagctacttgggaggctgaggcagcagaatcgcttgaacctggaagttggagattgcagtgagccaagatcacaccactgcactgcagcctgggcaattgagcgggactctgtctcaaaaaaaaaaagggttatagaggtctagggtaaggcctaaaattgactaccaagtcccaggtgatgttgatgctgcttttcttacaaacacactggaataacaacgttctaaactagcatcattcaagtacagcctttattcaaaaaagctgtggtaatttgttaatgcagttaataaaatcatgaaatctctgttcttctcctggaaacacttcttccctaagtaaaagtaaaaatacatgaaatgactttttaatgttaactggacttcttaggtgaagcaaaaaacaaaacaaaaaaacccttttttgcataattttccttctatatagttgtaaatatcgagactttgttaaatgatttgattattaagtgaagagaaggtggtgaggagagaaggcacaagaaatggaagcaaaccattaggagccatggtcatatgaagagataaagcacctatgaaaacataacatggaagtggaaaatgtagttaatgacatattttttcatatttagcaagaatgtctgttacataaactaatgtatacctgtgctttttgccacaagtataatt

SEQ ID NO: 113441 - DNA, 1007 bp, Homo sapiens
aatacaaaaaaattagctgggagtggtggcgggcgtctgtagtcccagctactcaggaggctgaggtaggagaatggtgtgaacccgggaggtggcgcttgcagtgagctgagaccacgccactgcactccggcctgggcgacagagcgagactctgtctcaaaaaaaaaaaaaaaattgttataacattatcaatatttccaatgtatttttagcattaaaaaaaatctgtgtacttcaagttatcccccattgtatgatttatgattttaaagtgacctaatttatttttttttatttgtgtaagattcttgttatgtttaaaagcattttataggcattacagaagaaaattcatttttaatagcacatttaccagtatttacctcctaatttttgtcacatgatttcttagttttgttcccagtaaggataattttcttcaactttttatatccagtgtaaaatgaatagtatttatgtttcagcactgaaggagggcatggatagtaactactgatatggaatggtctgtttcttctgaagaagtatacaccctccaaatgcctgctgcatcatcttccttcagttttcaagatgaagcaaaagcaccttcttatctttcctcccctcaagtaggcaaactgtgatttcctttctttagctttatcagtaaatatcatttatctttggacagccattcaacaaagacagttatggacttcgtgaatagcagtgataatgtcatctttgtacacaacacaattcatctcatctctcaagtgatggacaatatggtcatggcttgtgggggtatactgccattgctttcagctgctacatcggctacagtaaggacttaattactatagaaaattggtgtgaaaacatgagtgttatgcaactttattgactaaaacttaaatgtggtggttactatgcatcgtaggtgctataaataaaaaacaataggatcttttacttgagaggaccttagaatctgttct

SEQ ID NO: 113442 - DNA, 1110 bp, Homo sapiens
gtagaatagtgtatccttttcctatacatgtttaataataggctaaataattatgttcttcttgtggtttcatgctgtgttacttgttaacattaaaattggctgtagtttttaatgaatatttagatttctgtgattgacttacatttatcattctactaaaataaaatataggaaaattaagttttattgtattatataaactatgtatttgaaaattatttagttttatattttgtattctgtcttcatttctcatgcatattttaactgattgtacatttttcacctaggtcacttttgaaatacacaaagaaaaccttgccaatatatttagggaacagcaaggaaaagttgatgaagaaatagggctgtgttcttcaacttcagttcaagcagcctctggcattagaagggatattaatgtttcagtaggatcccagcaaccagatacgaaggattctcctgtctgtcctcatttcaccacaaatggtaatgaaaattcaagtatagagaagacaagttcactagaatctgcatctaatattgaactgcaaactactaatacatcttatgaagaaatgaaagctgagcaagaaaatcaggagttaccagatgaaggcactttggaagaaacactgacaaatgagacaaggaatgcagatgatttagaagtatcttctgacataatagaagctgtggctatttcctctaattcttttataacaactggcaaagattcaatgactgtcagtgaagtaactgcttctataagttctccttcagaagaggatgcctcagagatgccagaattcttggataaatctatagtagaggaagaggaagatgatgattatgtggaactgaaagtagaaggcagtcctactgaggaagctaatctacccacagagctccaagataacagtttgtctccagctgcatctgaagccggtgaaaaactggacatgtttggtaatgatgacaaattaatatttcaagaaggaaaacctgttactgaaaagcaaactgatactgaaactcaagattctaaagattctggaattcagactatgacagcatcagggtcttcagctatgtcaccagaaacta

SEQ ID NO: 113443 - DNA, 1035 bp, Homo sapiens
tagtgcctacttttgaccaagaaccacactgacttaagttttagtattcatttataagatgggataatgctaagttaatcatggagtctttttatctgagtaaaactagacctaccactttttgctgtcaaagtatacttttaaaaatacatgctaaaacattacttatgagagggaaaacaaaagtttaaagttgtaagttggttcttacatttgttcaccttttattttagtgtttcatacatgtcttttattccttcgtgtggattttcttcatttttaaaaggcttttctgtttcatgaggcttatacaaagtaatttatttgaatgctgttaagttttttggaattttaaatctttatagctatttttaaaataagacagaaacttataccctaaggctcttcaagtcattatttaataaagcttagaatagagctgtagtgattcagtaagtaggtgaacaatttttagcagctattaaaaattccactggaattattggaacaaaattttcttttctctaaaaatataagttctgaagattttataatacttttatacatacagtgttaaagtgatgctttttcctttttgcagtcattttgaatctcaatatcccaaatttataacatggttcttgataaagaactgatgtgtaaagaactaatgttgcagaattggatagcttttgcagagttacatcaggatacatgctgctgctataaaaagccaaagaaactcaattgcagttttattgtccagtttgatagatttcctgccacctttgtagcagggaagctgtttgtcactatatgcctctcctccagcagctgaactgggttttataagcagtaataggctcttctagtataactgcactatgttggttactttgatctcagggttttaaagagtgcacctagtaacgtttgtgatttcattgtcttatttgttgtctaggttttcatttttttttgtttgtttttggcttcaaattgaacatttttctgtgcttaagtaatacttttttt

SEQ ID NO: 113444 - DNA, 1136 bp, Homo sapiens
agtagagatggggtctcaccatgttggctaggctggtctcgaactcctgacttcaggtgatctgcctgccttggcctcccaaactgctgggattacagacgtgagccactgcatccagctgcctcatagatctttaaaaattaaattagattactatataatttttgagaattgaatgagaaatttatttttagcagttctttggttgtaaatctttttacttttgtaattatttctgataatcatttattattagcctactgtcttgtttttcatggcgacaattatttagaaatttaaatatgtgctaccattagaaatgctttctttctactgacttaaaataacaagttggtaaccttcagaacatttacaagcctgtagcagaaggaaaaaagtatctgaaagctagcttgatacacacgttacatataagtatgtgcatggaaaagtcacctcatttcttatattccaatttcttctcatttcttagttttcattgaaaggaactctagcctgagataagcagattttttatatacagaaatctatattaaatttccttccatattatttgaaatagatttataataatatgaaaagtatatattttaaacctttccatttaaaaattatactcaaaatagtttgttttaaatttttattcattcagtgttatctacaaacttctggcatcgaaaagtgaaggaatcagggtacaagctcttaaggcaatgggttattttttaaaacatctggccccaaagtaagtatgccgaaatctaagatggactgttgtattctacttatttattttataaatctttgcagtagtaattttgttctatagtcctctagtttttcttttatttttattcataaattgctgtataaatgtaatcccactagtacatattttaaaaattaagtgaacaggattaatttttttgtacataaaattatttaaattattcatgtatttaatgtgaattatgagaattagtttggacagcttgcattcaagaagctatggagacttgatttcaggtgactcacaccatttttgctttatctgtattataaagtaatacataacctggatgtttgtcacatagtgtgttctgctgtatgcgtaa

SEQ ID NO: 113445 - DNA, 1017 bp, Homo sapiens
tattggtatatgcaacaaaggtagtgaaggattttcatgaagtttttttgggggtctagaactcgtttcttgtgctggtattctgtaaatgttatcaaatactaccacatattagtggtatgttgaccgagtaaacatttattggttatctttatctttatagggacaatagataataccgtatatgaaaatgatccggttatcatttcccacaaagtgttcttttagaactagtttctggagaggcacagtgaataaaacattccagatcagataagtttaagaaatgatacataatatcttagccctaccactaccaccagatttgcaacatttagtagcattttagaagctctaatatatttttctgtaatagagaataacccttccccacaatttcttgatatataagccttccttaaaaaaaagtcatgttggatatactgtttctaaaggttatgttttacaaaatcttgattcaatataacataaaaggtattttatttctttgatgaagaaattgtttcgaggccgggcgcggtggctcactcacgcctgtaatcccagcactttggaaggccaaggcgggtggatcacgaggtcaggagatcgagaccatcctggctaatatggtgaaaccccgtctctaataaaaatacaaaaaattagccgggcgtggtggtggccacctgtagtcccagctacttgggaagctgaggcaggagaatggcatgaacccgggatgcagagcttgcagtgagccgagattgtgccactgaactccagcctgggcgacacagcaagactctgtctcaaaaaacaaaaaacaaaaaacaaaaaaacaaagaaattgttttgaggtcaggtgcggtggctcaacttgtaatcccagcactttgggaggctgaggtaggcagatcacttaaggccaagagttcgagaccagcctggccaacatggtgaaaccttgtctctaccaaaaatacaaaaattagccagatgtggtggtgcactcct

SEQ ID NO: 113446 - DNA, 1429 bp, Homo sapiens
atcaggctcagcatcttactttttggaagaagcgtggtgaaaataaaacagcctggaagtgttactggaaacagataaaatgctggtggggttctctaagttcttcatttttattctgtaggttcaactgatgctctatacttatctgtccacggaattcattggtacagtcaacatatataacaccattcggagagttggaacagtgcttctcatcatgcacacgctgaagtactactactgggcagtgaatcctcaggatcgaagtggtatcaccccaaaaggattaggtatataatttctgtctgtatattactttacacaaatgcaaatcaggatttaatttttctttttgttttaaccagtactatcatatatttgggcagtttttctatattccattatggcaaaattttattttaatctcattgataatgttaatagtttgtcctaaattgtggtttctagagtttaataacttgctacttgtgtggaagaatactacttgtgctggtgtgagttgtttggggagctaatatgactaggatggttgttgtaagacactgaaaatgccaagaaattcttaattagtttttagtaattgatgctgagatggattgtcacaatgagattccttgaaaatggtgttttgggaatatggtggtttcttgcagaagtaggagttatctgcttctcttaaagagataatgaaattacaaaatgttagcaattattttcttacataatgaggactaacttgctgaaagggtaatattcattcatcatgtctagcagttcatataaggggtcaaaataaaacttttgacatatagtggctcttttggttgtaactataacagtctccttggaactggcttacatcaaaaagggaggtaatcagctcatataaactggcagttccagatacaacttgataaaggtattctgagtatgaccataggactgaatttgtctcactgcacttgccaattcttctgtgttggctgttttcacatattcgcttcctttgtagtagcaagcagccggtcccctttcacatccgtaacaacttaaattcagtgtaagagcatctgcctatataatgtatttccagtgaaagtctcttttagtctctctgttgctcattggctttgattgtatcatgtgcccatttttgtggttgtagttgccctgattgcttagaaatggaggcatcccctaagttgaaagacattgtctgaaagtgaagatgacttcagtcacttggtaaaaattaagagctgttgcttgaaattaagaaatagatgctggggagtcaataacatacattctgattgcagtaagaggctttggttgtttagtgatttacaaagattttcaatttgcatactactttttatatcactttcaaaataagcttggtttagcc

SEQ ID NO: 113447 - DNA, 1037 bp, Homo sapiens
tctatatcatgaacatttgtcattgtttctaagtaattcacctatcaatgtgtttgagataaagtatatgaaataaatatctgagtaactcctaatcctacattaaaaatctagttctgatgtaatgttggaagcagttttagtggagcttcaatttctttgaaatggagaactttttattaaggtgaatggaagggttacatctatctaacctaatttaaaaaaaatagaatatgtttttttaatcatcgcctttttaaaaaattctagttcaaccttgctggcctttatcatggaattgttgaagaactcaattgctatgcaggaacagatgcttgcctgtaagggcttcttggtaataggatatagccttgaaaaggtaaagtatgaaatattttatgtttttgattcttaatttacaggccatacatttgttctctaagtggctaaggaattctgtctgcaagaatgtctccttggttacagaaaattacctaaactaaaataacattttgttgttttaccttgcctccattcctctatcaaacaaatgtgatagtgagcttcatggcatctttaactttgagcataatttgtgggccagtttttttcctggtagggacagcctgtaattcacttactttgacttgaatttgtggtaacatttgaactactttttttgcagtcttccaaatctcatgttagcagagcagtacttgaactttgccttgcattttcaaaatatctgagtaatctgcagaatgggatgcccctgctcaagcaattgtgtgatcacgttcttcttaatcctgccatatggattcataccccagccaaggtaatatatatctatatattgatattgttttactatctttgctgtttttgtgcgtgaggagagtgataattaagaggattttcttttttttatgtactattatgcaagacttcagtggattgctttttttgactaagcatccttttttactcttcaggaaaaattgcaaattgtgtgtgtgtgtgtatgaatatataca

SEQ ID NO: 113448 - DNA, 1065 bp, Homo sapiens
tgaatcatctcctaaggacaacccttcaatttttgttcattcaccacatgcactcatgctccaggtactaactgtgatcttttaagaacatttataatggtaatttttgatgtgttattgagatgtatttggtagcttctgttaaacacatggaatgtcacgtttatagtgtttctgcatttattgttgtgccttatttttaattgttttggaaaaaaaatcattgaactctttactgtgtttttgatcttacaaggatgtaaaggcagttttaacacattccatccaaagtgcaatgcattcaattggaggagtacaagtactatttccactttttgcacagttggattacaggcaatatttgtctgatgagattgatttgactatatggtgagtgcctttatttgtttctttaattggctgtgagggttaatttcatcactgttgagctatacaatattttgcctttcaggttttgttgtgtcaaaataatttaaacttgtgaactataaactgtattacaagtccatattaattatgtcagtattaacttaagttcttgtttatcagtaggaaatatggaagctgtaagaaacacaataaattggttttagaataacattataaatggcaataatgggttactcaaaaataaatacatttttttgtctaaattaaaaattttttttactacccattactcagaatgcaataagaaatttttaatttctgaaatatttaaaattatttggtaatgatttattatggaacttaacttttcatattttaattatttattactgattgcatttatgtaattggaagtcaaaattttaatagtgttatcgaagtgaattagtctttttgaaaaaaattagattgtacatttagcacatttttgtctcttgtgttgtagtcctgagtctaaaaaagaaagggatataagttatagggtaagtcataaaatgtaggaaaggagtctcaatttctcatggctatatattctagtgaaacaatgtatagtgaaattattgtttcatttgtattgaaattattgtttcattt

SEQ ID NO: 113449 - DNA, 1047 bp, Homo sapiens
aatttagttatttatggagattaagggagatacaagtaggaaatatctacggcatttattttagtattgcaaatttaatatgtgtttgcttttgtaccttaaaatttagaggttaataaatggttcatcaacaaaatgtataagtagataggtagtcagatagattaagcaaatatggcaaaaaattgacaattatggaatctagttggtggaaaaagggggtgtttgtacttgattttcagatttttggggtatgtttgaaaatttccataataaaaagctggaaaaatgatctagtgattaagttcttatcagttgaaaggcccatgaatagatattgttccagaaagtaaatattgaatttaacaaaggtagtcttgttttatttttaggttgaattacaacttatcatttaacttttactcatcagtatggttgcgttattgggataattgttatctttgtatttttaactgttttttgcttctgcagtggtatatggttaccatagtacacatctataaccgatggaagaatagtgaacttcgatgttatgtgaatggtgagctggcttcctatggagagataacatggtttgtcaacactagcgatgtaagtagtttcaaaatgttgcaatgaaaaaagtgattttaaaagcatgagctttttaaacaagaaaaagttttacaacttgaatataaaattcaaagtattacaatggtagatttttataaacataatttggctagcatgttaatagaacttaatatgtcactgaaatattagtccttgttataaaatcattccatataggtagaaataaggatttatagctaacagtggctatatctggggagtgggtcattggttcatttatcaaaatgaacaagagctccactatagggttctgatcatttttctgaatgagttaaatgatgcatgcttataaatcttgcatataattctaactgctatagttaactagtatgttgttaacgtttacaggtttcaaaaataaatctataggttagaatgaaatttaaaatg

SEQ ID NO: 113450 - DNA, 1004 bp, Homo sapiens
tatctgtaatgtttcgtaatgttatagaagcacattctataatgtatatatgttatttatggaagtttctaaaatctcctcattattacattggtcagtctgttacaagcaaaacaaactttttttttattttgagatggagttttgctcttgttgcccaggctggagtgcagtggtgcgatctcggctcactgcaacctctgcctcctggtttcaagcgattcttctgcctcagcctcctgagtagctgcgattacaagtgcccacgaccacgcctgactaatttttgtatttttagtagagacggggttttgccatgttggccaggcttgtctcgaattcctgacctcaggtgatccacccacctcagcctcccgaagtgctgggattacaggcatgagtcaccacgcccggcccaagacaaacttttaaaaaagatatttcagtctattcttttcctgagcttatctttcattcttttttttatgttagttctcataaaatcttatattaggccctgtgtagcctggcagtatctgcagaaagataagaatatgttttaatatgacatttgtgatatttaaatgttatatacacaatatacaactttctttgaaaagttttattgcccaattttttcctttacagtttttccttacagtcgattttagatttgtagcttttcagaataattttactttcttatcatagcctatcattgcctctaacattaaaaaaagtgttcttatgagattaacctttttcatgcctcatgttataattttattatttacagttctgagattgcagtgcatgcatttatcttgaaagtagggcaggtgagctgaacagcttttgaaacttgaagagaatagatgttttaaatatgtttagtgacttcctttccttaaacatagcttttactgggaatttaaagtagtcatgaataaagtatttttgcaaagcttttacatctttgctatcgtttttggtgagagagaaca

SEQ ID NO: 113451 - DNA, 1025 bp, Homo sapiens
atattaaaacagtgttgcattcctggaataaaatctacttggccatggtgtaaaattcttatttattgccgaattctacttgctaattttttgttaagaattttggtgtttatattcatgagggatattggtgtataggctttttttttttttggtactgtctttgtctggttttagtaaaatagtagcttcgtaaaatggattgagaaatttaaaattggcattaattttttaaaaaatatttagaagaattctccagagaaaccatgtgaactttgagatttcttttttgaattttaaaattatgaacttaatttccttaataattataggattattcaaattatttcatattgggcaagtagtggtagcttccagttttgaggaattggtccatttcctctaagttgtcacattatatgtttagagttgtttgcagtattccctattttttttttttttgctgcctctaaggcctgtagtgatagtgttttctccctgatactagtaatttgtgtcttatttcttgctgctttttaagtcctgccaaggtttgtcaattttattgatcttttcaaagaactagctcttcattgattattgttttcctactttctacttcactgacttctgcttttgtctttattatttccttctttctgcttgttttgggcttattttgcttttctactaggttctttaaaatggaaacttagattattgatttgagacttctggttttagtgctacaaatttccctctcaggtatggcccacaaattttgatatattatatttttattttgattcagttcatcgtatttaaaaaatttatttgagacttcctcttttgacacataaactatttaggagtgtaatagtttccaagtgttcgcacatttttctgtgatctttatctttctgttattgattcctagtttgatttcattgtggtcagagaacccactccatatactttcaatatctttaaatttgttgagtttgtattatgtcccagaatataat

SEQ ID NO: 113452 - DNA, 1047 bp, Homo sapiens
aaaaaaaaaaaaaaaaaaaagagtgcttgcttcatcacccaggctggcttgcagtggcatgaacacagctcactgcagcctcaacctcctggggtcaagcattccttctgcctcaacttcctcagtaactgggactacaggcatgttccatcatacctggctaatttttgattttttgtagagatggtttttgccatgttgcccaggccagtcttgaacttctggcttcaagtgttccgcttgcctcagcctcccaaatgctgggactacaggtatgagccactgcacctggctaaaaacttcacttttctaatctcttatttaattttgtggtagaaatatttgagttttataatgttgttttttctttttctttttgtttttttctttgagacagggtcttgctctgttgcccaggctggagtacagtggcacagtcactgcttactgcaaccttgacctcctgggctcaggtgatcagaaagttttaaagtggaaaaatcatcagactggataattcctaggaaataatttggtatacagttttcttctcccactttccagttctgcaccttttgtgtaaatccatagatcacagtgtaggttttcagatggttgtcccagctcagtgaatttatggctaaatttgttccattacattcatagtctcctgattcacttggttaaactgataagcattgccctacattctgtggcttctttgtttacttgttgtcctctgttgttacttgacccatcttagtaatcttcctttaattccttccagaaggggaaatgtggtggtaaaaaatgcaaattacaagagaaactggtattttttattctatgggtgttttttttttttttggcaaatacaaatgaaacaaaattaaaaaatctctgataatcctagcattcattttcctagcattacagggagtttactgacagttgaattgtcttcttactgtatttaaatcccatatttactgtaaccttacattgtttccttttgttacacattttattttggatgatcacctatta

SEQ ID NO: 113453 - DNA, 1224 bp, Homo sapiens
ctgtcgcccaggctggagtgcagtggtgcgatctcagctcactgccacctctgtctcccaggttcaagcgattctcctgtctcagcctgcagagtagctgggattacaggtgcctgccaccatgcctggctaatttttgtgtttttagtagagacggggttttgccatgttggcccagctgttttcgagctcctgactggactaagtggtctgcccgcctcagtcccccaaagtgctgggattacaggtgagccaccacatctggcctgaatgaacttgctgactggcacttttatcctttctagtagagatttatatgcatacttctgtaagtaccttattttcagtaacctttaaggcattagcacaatttcttcagtacttactgtattggctttgagaaagacttgatgtatttttgttttgctcttgtcattactggagtaggagtaaaatattcttaattgcaaatcaaagtctgtttacaatcctgggagcttttaatcattgggaccactgtgtaatttaagttcttatttctagctggaaatgccaattaattggttatagatgaggaaaacccttcttatgtaaatctgaagacatgaaaacttgatatggaacaaaactttaagaatgattttgcctgagacatgtcaaattttgactctaatgaggctgttttcagctagcttctctactccctggccccagagggtatattgttggtcgaatggaatatcctatgatttttttctgttctttagcagaaggtggaagtttccacagattccctttctctcctttcacctatcgcacgagtatcattttctttactgccttccccctcacttccttgccccttgggctgttgcttttccttgggatctgtattctgttcttctgcagttagaagcttccttggcatcctgtgtcaagtaaaaaggcctgtaaaatctttgttttcagtcaccacaacatgagtagatctctgttttgtttttatggtacgtttgctaccctttatggaatgacaaaaattagcatgatggctttgatttgtgtattggagatttcagtgattggtttggaaacagttgggatagcagtctacttccttccctttattttaaccatcttaccagattgacagattttgtcagatttgtctacattctgtttcagaccatgttttagcatcctctgatggttaagaaggaggcc

SEQ ID NO: 113454 - DNA, 2690 bp, Homo sapiens
gccggcttgccggcgcgactcggctggaatgttagttttgtgggctcacgagctgcctcaattctgcgagtgtttgatggcactgcgacagcaggagttgaggaaagcacccttctatccattcaggacccgtcaatctcgcctttgcttggtcccgctggaatctgcgagctcctgctaagctttggggccatgcagtctcttagttaccagtacatgccattacgtgccagcaaagttaatgagattgcatgttactcgtgcctgtgtagtggaaggaccgatgcatgttattctaagtgcctgtgtagtggatggaccgatgagggtgggaagtggacataacctttcaaagtctgatgcatgcagtgaaacgtacagtgggaagagctagatttatgtttgttcccctcacctcactgtgagatatactttggtatcaaattgccggttagctttttaaaatattaatgggaaataccattaacagtgaaaaatacagtaagaattgatctgcaatggaacttaagcatcttcttaaaatccagggttgatccattttctaagaaagattggtatgatgtgaaagcacctgctatgttcaatataagaaatattggaaagacgctcgtcaccaggacccaaggaaccagtaagtagcttattcttggtttgtattttccttaagttggcgcttgtatattgtagcaggcatcttggtctgttgttggtcctgtggtgggagactttaaggaaatgtcagctcttggttgcagccttggcacctgtggtgatcatttttagtacagcacttggagagaagcaagatggtgctttttgaattaagaaaatgtgccatgggtagttctgagcttcaaataagtactgttgataagtcactggtgtctggatagatttgataacaaaggttaaggtctttataatttaccattaacttaatttctaccctcagtttacaggcttgactttgcttatatggttcctaaatgttaagatacttgtttttttcttttgtagaaattgcatctgatggtctcaagggtcgtgtgtttgaagtgagtcttgctgatttgcagaatgatgaagttgcatttagaaaattcaagctgattactgaagatgttcagggtaaaaactgcctgactaacttccatggcatggatcttacccgtgacaaaatgtgttccatggtcaaaaaatggcaggtgagacccaaagttccttagagtggttgtgctatgggtgtttgaccaaggatagcatggtttgatgactggaaggagcaagttcattttatttatttattgagaccagtgaaatgtccacaaagttcattttaaatttttgttttcttgccgttgttgagtgctaactctggggttgccacaccatattttacttactatttaaatctaagatttaatagtggtgtatcatcaaagtcagattttcttgctgcatagattagtggttttttgaggaacgtttaggtgcaggtgggcggttttgcctgtcttaaggatgttttttgacctcagaattgagtgaatgttgattaactgtggcagtagagcataattgtggcagagcctctggagtgaggttaaaatctgggctccatttgcctattgtgttctcgttggaaagtaacttgttttctaagcctcggtttctttatttgtaaagtgcagataagagtgtcattttattgaattgtgaggatgaaatgaaaatatttcagatgtgtctggctaactatccagttggaatattttgtgggagttttttgtttttgggagattgagtctcttatcgtccgggctggagtgcagtggcgccatctctgctcactgcaacctcctcctcctgggttcaagggattctcatgcctcagcctcccaagtagctgggattacaggcacccgccaccacgcccagctaatttttgtatttttagtagagacagggtttcaccatattggccaggctggtctcgaactcctgacttcaagtgatctgcccgcctcagcctctcaaagtgctgggattacaggtgtgagccactgcacctggcacagttcgaatattttgtatgtgggaatgaatgatgacaaaatgtttcagtcccaaatgatacatactgattataccattatatttatcctgacattcctctaaggctttatggtttacatttctagaaatattttaaggtcccttagctgtaaattgtatttgattagtttttttttatactaaggtataaaatttacaaaatgcaaacaaggtaaatcagttttcatcactacccaagatgttttttgttttttcaatttaggcaataatatgaccactaactaggggtttttaattatattttagctctgaaattgggtatttaatcatcagcatggctttagtttggaacataaaagacgtctttcaaagtgtgcatttagagttatagcagtcacctatttacaacacagttttttgaaaaatgacataatcactgtagatgtgttcataccatagaataccatggatcctctcagacctattttcctctggtgtagttttacacttgagggggtatgagctgtttaaaggggtatatgtatatgcaatggatgtgggtttggatgccgtcaagatagtggtagtgttaa

SEQ ID NO: 113455 - DNA, 1775 bp, Homo sapiens
cactgtaaccactgcttcctgggttcaagcagttcttgagcctcagcctcctgagtatctgggaatacaggggactgccaccatacccagctaatttttttaaatttttagtagagatggggtttcatcatgttggccaggctggtcttgaactcctgacttcaggtgatctgccagtactctaaatgataacagttttttcgtgtttatttattttgaatgaagctgtctcacagtagatggagttgaaggacaggaaatgtttttcccctacttggaaaatacactgaataagttgagtggggtgggatgtgcctggagtcccagctactcaggaggctgaggtggtaggattgtttgagcccaggagtttgaggccagcctgggcaatatagggagaccctgtcccaaaaaataaaaaatatacgtatatatatatacacacacaaagaaaaaatacactgaatagacaaaacctttcatgattaatgatgcacgggaataagtgatgaaaaaagtttcggtcccagatgatggccagtgataacaacatttttctgatgttcccatgcaatatacagttagctaagagggtgtaatggaaaaagcataaggcttggactcagaagactctactaactttgccactagctagctatgtaattcagatcatctatcctttacatgtgaaaggtaaataatggcttatcttaacaggaggatttatgcaggttaaatgaggtaggtgttatgtgtaggtttattccaaggcttctctacttttaaaggaaatggcttatatctgagaactaggacttttagaaaaaaatttactgttactggtttgcaggattccagacagcattggaaaagacatagaaaaggcttgccaatctatttatcctctccatgatgtcttcgttagaaaagtaaaaatgctgaagaagcccaagtttgaatgtaagtgagaaatcacatgattcctgtagggccaaatacattgtttttgggtggaggaggagtgtggggccatatcatggccttctttttcttcctgtcatgcttgcatagtagtgatgaccattatttcaagatatactaacagttttttggtttttttttttttttttttttttgccttttagtgggaaagctcatggagcttcatggtgaaggcagtagttctggaaaagccactggggacgagacaggtgctaaagttgaacgagctgatggatatgaaccaccagtccaagaatctgtttaaagttcagacttcaaatagtggcaaataaaaagtgctatttgtgatggtttgcttctgaacattctttttttaaaaataatctgacagcttggtggattagacagtaaatttgacagctggtaaacttttctgacccagacaaattggatataaacatactactatgcacctttactgtgaagctgaaatggggcggagaagctgttaccaagtgggcatttagtgctatccacctatagtcactcattcattcagtttctacctcttctcaagccttttcagttttctcatttcttgcttagctgataaccttgcttcctttaatcactaaaaaagtttaaagcagagaaaagaaccccacaaatttctgttacctatattctgccacctatgcatgtgttaatcatactaccttctgtcataccactggatggattgtgctaagacataagacagccttttttttttttgcccaatcagcctcatggcttcagcaattcacaccttt

SEQ ID NO: 113456 - DNA, 1054 bp, Homo sapiens
gatcccatgtgatcttgcatctgacttgtctcttactcctattccccttgctcttccctgtgcttgaaatattctcctttacatggccacagtgtttatttcacctccttgaagtctctgctgtttgttgtttatttttaagcaacctgaatgaggaattgaagtttgttctaataatgtctcctccgtagaatctggtggtgccctctgacacttgtgatttttttccagttttgtttactcgtgtctatgagaaaaattccatgaggacagtgtttttggtggtggtagggcactgattaattgtcagatcatcattgcctagttcaatatttgttgaataaaggaatgagtgatattccctattaatgtcccttagccaagaaacaaatgccttactttctactaaaggctggtttagacatagatatgggtcccaaatggcaggggctccctccccagggtagaaaaagaggtcatgggatgaggactgattattacataaatggtggttttcctcttgatgcactgaggctggatatcatttagtaaggtaatagtataatccataatcaagctctaatctgctacaccttggaataggggttggcatagtattctatttttagaagggctcatttgaaagaggttccaaaaataatgctttttttttttttttttcgagacagagtcttgctctgtcgcccagactggagtgcagtggcacaatctcagctcactgcaacctctgcttcccgggttcaagtcattctgccttagcctcccaagtagctgggattacaggtgccggcctccacacccggctaattttttgtatttttagtagagacggggtttcaccatgttggccagggtggtctcgaacccctgaccttaggtgatccacccgccttggcctcccaaagtgctgagatcacaggcatgagccaccgcgcctggccacaagtaactatgtttaatgcccaccaccagtctttagattgatggctctctagttattttggttgtctgaagcatgtcctttggtaggttc

SEQ ID NO: 113457 - DNA, 2259 bp, Homo sapiens
atcaaagtgcagcaagggtggcagtggcaaaggaatgagatttaagggatagaggcttacaagcaaatggcatcattaggtatagatcattgttgtcatttaattctcaacaatcaagataaatgagttatacagagaagattattcatgctgccctaggtaggccactatttaccatgcttattctcaacagaaaccagtaattctaactccttttgtcttacaggctggagatataataacagagctggaatctgtagatgatgactggatgagtggagaacttatgggaaaatctggaatatttcccaaaaactacatacagtttctacagatcagctagaggagaagcttgtctgtgttccttggcacaagaactcacttgaactatcaccttgactatcagatatgtttttgcactattttttttaactgaaaaagaaatatctaagctgtacatggtacactagaattttctgaaagcagaaaacgttcagattttgtagttaattttcattacaatagaaacatgcacatggaaacccatgagctaggattctaccgaggaaaacatctagtgggattagcaaggtgaagggaaagcatctggtggcatggcagcatggggaggctcacacacagaagttgcacgtggacatctgttttaatcagcacaagtgaattaaccatgcttcttcatttttttactttagttaaaaaagaggacatttaatattctacatgctgtaactatcaggacatggttagcaatctcaatttcatttttgatattcaaattaattcttacagcttgagcatatcagccttattaccagagcaaatccttccttcagatgggatagtttactgactagttggagcatttgtaagcacatggtgaaatcagcccctgcccaccaaaataatctttatgttaccaagtgattcccatttgtctaaggatttgaagggggtctaaattggatgtatcttacttagtctaaagaaccaaaaccatccctgaaatgccttgctaatacaactaatccttccatatatgtgccatacttatttttttcctcagtgtatactttatgttaacagggttattacaaagcacattttctgaatctgcaatcattcctttgacaattactggacccaaaggaaaattcattttctttgcattattccagtaatatataaaaactgtgtcttgttatagtagtacattatgaatcacatataaaatcttacaatacagaacaactgttaagatggaaaacagtgccaaacctccacagctcatttctttgtaatataatcagaatgaaaaataatttaagaggacagaagactggtacttttttgttttattttttctctagcttatccctgcacaattattagagtgaatgaaaaaccactttcctgctttccattgttataaattctaagcttaagataaaagtggttctttacatgactgaatcaattacaatttatgggctagagccaaataggttgaagacaatcatccaaacagatcaatggaatagaatttcattggaaatgtaaaacactttcccaacaatggtcatgactttcttctgtttttgagaagagtttcatatgctggaccacattttagcttttattgttttttttttcccattgtccaaaaagttaagcaacaagtggccacacttttacgtgactacaacctggagttctgcaaagaaggtaatatttacttggtctttgactaaagttatctccccattctatggttacattttattttggactatggggacttctaatacgttttggtaaagaagagagtataaagaaaattcttgtcaaatttcactcaaaagtaatttcatgagaaatcaatgatttaaagcattatccaaattaaattatcatttgcagcaaactgtacaacagcaggaaggatatggaatggaacatgaggtatatatctttgcctttataattttaacatcttatattgaagattctgaaaacctatctttattagaggaaaatctcaatcttcagttttggccttctgtcagcagaatgataagtgcaatagttgtaaatctacttgacactgtaataaactgaactgaactttcaaagtccctttctcatactagactgagttttttgagaatggaggtggtatcttttttttttttttttttgagacaggatttaattccctttgaccaggctggagtgcaatgc

SEQ ID NO: 113458 - DNA, 1052 bp, Homo sapiens
ctagtcagtaaactatcccatctgaaggaaggatttgctctggtaataaggctgatatgctcaagctgtaagaattaatttgaatatcaaaaatgaaattgagattgctaaccatgtcctgatagttacagcatgtagaatattaaatgtcctcttttttaactaaagtaaaaaaatgaagaagcatggttaattcacttgtgctgattaaaacagatgtccacgtgcaacttctgtgtgtgagcctccccatgctgccatgccaccagatgctttcccttcaccttgctaatcccactagatgttttcctcggtagaatcctagctcatgggtttccatgtgcatgtttctattgtaatgaaaattaactacaaaatctgaacgttttctgctttcagaaaattctagtgtaccatgtacagcttagatatttctttttcagttaaaaaaaatagtgcaaaaacatatctgatagtcaaggtgatagttcaagtgagttcttgtgccaaggaacacagacaagcttctcctctagctgatctgtagaaactgtatgtagtttttgggaaatattccagattttcccataagttctccactcatccagtcatcatctacagattccagctctgttattatatctccagcctgtaagacaaaaggagttagaattactggtttctgttgagaataagcatggtaaatagtggcctacctagggcagcatgaataatcttctctgtataactcatttatcttgattgttgagaattaaatgacaacaatgatctatacctaatgatgccatttgcttgtaagcctctatcccttaaatctcattcctttgccactgccacccttgctgcactttgattttccctcttatactttgtgcctctcaaattcaccactcctaatctaaaatccctcttgaacaaataataccagttatcacacacacacacacacacacacacacgattatttattgagtacccactatgtgtcagacactgttctgagcacaattaatattccctcattctacaac

SEQ ID NO: 113459 - DNA, 1026 bp, Homo sapiens
cagattttagcagagcagagtaaattaataacatctgattgcatgtttccttttcattttccataaagaaaagccttaaatcaagccatttttttttccagagggtaatgtactagggctacaaataaattcatttagcccaataaaggtagtcttaacagtagccagagtcatctgggaccattgtagcatcttaaacacagattctaagaaatgtttagaaactataaagaacaaaatagttatgtcttcatctgctgaaggaattctaatttgcacatgaataagacacacagcccctttgactaacctgatgaagataaaacagtgtcctgagtcaaggtgaagctctttaagatgggaaaaaaatgcaaatttgatattgaggccatggcaggagaatcacttgaacctgggaggcagaggttgcagtgagccgagatcgtgccactgcactccagcctgggccacagagcgagactttgtctcaaaaacaaaagatactggggccataggaggaatgtgataaaccagatggtagaggagaaatgccattatgtgcaagaataaatgtagagtgcaaaatgctctgggtgttgataaaaggcaattacagtaaaagcctttctaagtaaaaaggtccattgtaaaatctggcggccacatagcctagtggttaggaatataagcccaggaattgcactagatttgaatcctggttctaccactaactagacatgcgacactggcaagttatgtagtctatctgagttttggtttctttttcactaaaataaggaaatctataaaaatatatctcagccaggggcagtggctcacgcctgtaaccccaacactttgtgaggccaaggtgggcggatcacaaggtcaggagtttgagaccagcctggccaacatggtgaaaccctgtctctactaaaaatacaaaaaatagctggacgtggtggcaggcacctgtaaccccagctgctcgggaggctaaggcaggagaattgtttgaacccg

SEQ ID NO: 113460 - DNA, 1060 bp, Homo sapiens
cattatacttaagctgtataataatccatattgccatatttttacggtagaaggaaaactgattttaaaatgggaatttgtgtgggatagacattatttgtgggcatctctcaaagagctggttttggtattttaggtaattagcaatagcttcatataagaaatggcaaagaggctgggtatgatggctcagacctgtaattccaacactttgagaggccacggtgggcggattgcctgagaccaggagttcaaggctgcagtgagctatgattgtaccactgcactccagcctgggcaacagagccagactctgtatctaataaataaatagcaaagacttttaaacagaaatgaactatagactgttactaatgtatatagactataaatagttgtgtttacaattaactaaacaagctcagtgaagttagtacaggttaacgcaacatagacaatacatgaagagaccggagtggaatcccagagtcttcactcccacctcccacctcaaccatttgtttttaatactatgtggccttcacatctaatgttctgacttcttgtgtttgtttgtttttttaatgtaggcacaaaggtaccactgaaaaccaaaaaagaagattctggctcaaactctcaggtaggctgcttgaacagatgactatagtgacagccaggttcagactctgggaggaatattaaaatcataattttcaagagaatatagtatgaattaatttttcaattcatacaacaaatgtttgtaataaattcttagatggttaatatattttatatagagagctcatacaaaaacatgtaaaccctgatagaaaatgaaaacagagactgggcagagtggctcatgcctgtaatcccaacactttgggaagccaaggcaggtggattacctgaggttaggagttcgagaccagcctggccaacatggtgaaaccctgtctctactaaaaatacaaaaattaaccaggcatggtggcgtgcacctgtagtcccagctacttggaaggctgaagcaggaaaatagcttgaacctggc

SEQ ID NO: 113461 - DNA, 1040 bp, Homo sapiens
tgacaatgggttaaaattctgatgaaaatacatcatgaacctgctgatagaagcttacctaagcaactctccaacatcagtgcaggacataaagaaagcagcaaagacagtctatgccagtgcttcctgcagcctggtctcagcatgagcagagatagtttcatcatttactgcattttattttggccatctggtgttcacccagtttttagaaggttcaagtatttttgtcatgagaaataattaaatcctatagaaatatgaatcctacaataactgctagacattttgtatgtttttgtttttaagaggaactagaagaaagtgaaggaagagttaagttgaaggggttttcctttatctctgaggacgtttccctgaatttatatacccttttatgtgtcattgtaactcctttgtgatttaaagcactgccacaatgcaactttatattctagttaaatgagcaaattaatagaattcattacctgctgaagactgtaaacctgtctatgaataggtcagacataagcagatgctcccagaggactttagaaaacaaatgcaaaggttatcacaaataagaaaacttctgatccacaatagttgaattctatttcagattcagtttttctctatttttaagcagcatatactgtgtctcagcaggttgaattcgaagtgggcttttacagtcattgacccattgatctgacttaaatcagaattctattaaagctagaatcaaccttttctttttaggcaattgcttctccttagcctgttgctattgaaacttcctttctaaaccctcaaatctagggattagtattaaagcacaccttctagagacacaattttatctctgcttttatcttattttcagtcaaaattgcagatcatgtaaggattgttccaaatgtcagaaatgaagcccttttaaaggagattaaaaaaatcatttttaaaggcaacagggttagttccaagactgtgtgttatgatatgccaagtttctgttttctttaaacctcctagtt

SEQ ID NO: 113462 - DNA, 1625 bp, Homo sapiens
aataaactcctgatttacttacaatctctttttatccacttgataggctgatttttgttttggtatgggtaaacttatttgctaaagagttgtagtactcccttagttaatatttgaaattaaaatgatttttaagcataattgagaataataatattataccatgtctataaacttttttcattgttcagtgtgtattcagcacggctttatattggcacagtaggaaacatttgctaacacaatagtgtttttttcaaccatttcccatcaatcaaagcatggtaaatgtgtctaatttggtctttaaaaagggagctcataacaatgtccaaaaaaagaatagcattttttaagtcaatttgattagtataatctgttctcagaatcagtggaacataactgcctcagtggacacaactaaatgctactttgtgcttttatcaaatctgcaaccaggatgattcatcatacataactataattttatattacagagcaagttgatgatttgaacctcacttctggagaaattgtttatcttctggagaagatagatacagattggtacagagggaactgtagaaaccagattggcatatttcctgccaactatgtcaaagtgattgtaagtgggttgtgtttgttttaatttggtcatatactcagtgggttctatgtgacttgtaggttggaaaaaataactagaaacccagattctagttctctttcattgattcatttggcatttggaaaattcaaaaataaagatttggtcaactaggtgatggttaattattatattatggagtgttagaacttaatgcctaaatgctgtctgaaatcctaaagtgaaagaccaccacaggtcaactggtgaatcagctgttcttggagagttgttaagcacttaaggatatatggtaattctttgagacatttagtgaacatgaattcagtgatactagcttatcctgtagagatgttctctgaggttatggtaccacttcttttctttggagtacattttggtttgagtttctttcatcttttccattcttatttatctccatctttaaaaaaaaatttatttgggaatacagaagtatttatattggagatagtggttcattaatggttgtacccacaaaataatttctaatctgattaggaaaattatattaaagcaccagaatttttataccctcacggcctaacttgtgaaagcattcctatgtgtgagagctgtgtgtaagcccagatggctgtgtgaaacatggggataaaatcagactgccctcacacatttgtatcaattggaataggatgactcggtccctgatataacttactgatactgtgaaatatcaataaatttagcttaacagcattaacagcttatttggaaggaaaaagtaaataaattccattacatcagaatattagaaaacaagactaacagaaaatctgaattcttcaaatagaaatgaatttgagtctcttggattatgaagggtaggcattaaacattgtccagtgtatctatgccttgattctttggagaaattcaaccacattctgtaaattaatattaagaataatgtttgttttagcactcttcctca

SEQ ID NO: 113463 - DNA, 1039 bp, Homo sapiens
tctttggggagtgataaaagtgttctgcacttgggttatggtgatggttggataattctatgaatatgctacagccatgttcactttcagtaggtaaattttattgtatgtgggttatatctcaaagatgtttaacaaattcattgagctaatgcatataaggtatttaacacagtgactagcacatggtgaatgagcagtaaatattagctattcttaatattacaaaaccatttgcattagcagttatagtcatattagaaagacctttgcattatgttatatttacctaccagatacctaccccagtggtatggtctgaattgtatggaccacttgttggcaaccctgtctagcctgttcctcttgcccttcacctgctaggctgggttgatgagcagcattgccagtgatatccatacactgaaggcagagaagggaaaatgtgtgactgggaggcacaaattatcccctccctccaaggactggtttatgtttaggcctctggtccatttggagatttcatgtttgtgtttggtgtgtggtaggtctctgacatcattttttccaaatggataggcatctagcctaataacacttattgaatagtaattcctttttctccacagatgtaaatcagaaaaaaatgaaaatcacacatgcacatgtataacacattatataaataataattaatttgtttaactttttttggagagagtcactcagtcatccaagtcagagtatagtggcacaatcatagctcactgcagcctcgagttcctgggctcaagagatcctcacacctctgcatccctaatagctgggaccacaggggtgtatcaccatgccaggctaattttttatttttttgtagatatggcatttcttatgttgtccatgctgaataattatgaaaagccactccaggctgggcacggtggctcactcctgtaatcccagcactttgggaggccaagatgggtggatcacctgagcccaggaatttgagaccagcctgggcaacgtggcgagaccc

SEQ ID NO: 113464 - DNA, 1085 bp, Homo sapiens
gcagaccaaacgtaaggaattaatattgttacagccctcatatcacacatagcagcacatttcatggaactattaattatatctcatcttcaggtttttattagcacatttattttaaccagagtaaaaattacagtagcatttattctacttttagaataaattactactaagagacttgccactgccatactaatcacttcgatacagagtgactaccctgtgttttgttttcttcactgcactccagcctgggccatagagcgagattatgtcttggaaaaaaaaaacaaataaaaaaataaagtaaatatgaaaaataatagtgatcaagtaaaatacttggtttgccgtttatcctagttttcataatcttttcccattttttcttcttagaaggcagtttatcttttgaagtttgctaagaaactaaaaaattgtatttggagagcagaggagatatgtgttaaggtagcttctgctggcatatgaaaatccttactttagctcccacggggcaagttctccactgactcattttctctgttttggtacggcattatccatctgtcatagctgtccttcctctttcagaacacacttatggcaacagtggaagttatactgccaaaaagctttcctttgtgaaaaatagaagctaaaaaaaattagaatttttttttttttttttgagataaggtctcactctgttgcccaggctgaagtgcagtggtatgatcactacagccttgaccttcccggctcaagcaatcctcccacctcagcctcctgagtagctgggactacaggcgtgcaccaccatgcctggcaatttttaaaattttttgtagagacagggtctcactatgttgccagggctggtctgaaactcctgggctaagccatctgcctgcatgggcctcccaaagtgttcagattacaggtatgggtcaccatgcccagccaaaagttagtcttttataacagtgcaaagttctttccaccttaaataccaccttctcatcttttactatagacttgcagagagttggcctctgatgggcagctattggtgataatgaaat

SEQ ID NO: 113465 - DNA, 1026 bp, Homo sapiens
caggatggtctctatctcctgacctcgtgatccacccgcctcagcctcccaaagtgctgggattacaggcgtgagccaccgtgcccggccaagagcatacatttttaaattctcttcagggcctgcttaaattttccctcaatatctcatgaatccactgagtgcatgaccatgcagtgcagttgctcaggctgtggtccacaacaggagactggtttcttcctgtcagtgttttcacttgttattaggacatgaataatttaggcagaaataggttaatattgtttaaggctgaaaactcttttaagctactttctataattcaactgcatttctacttgtagatccagccaaaaggttgcctagaatttctcttgacaagttcttgtttcagattaaccttaactaaaaagcattctctgctacttgcaggaatccaaccacccaggtcaaacaggaggttttgtgcgagtacccccaaggttgccaccgaggtaagtaaatgtgggaaaagttagagaaaaattaatgactcagagacccaactcttttttatcaccaagattgagtgttgttggccttgaatctttttttagagataaaataatctcaccgatttcacgcaggcccctaatccactgtctgctcctaatggtaggttgtgggaatctctgctccctttttaacacagttcaactcatagagcatttatttcctcaaataaatgaacaagactcatttctgaacttaaaacagctccacttctagaatatacgtatacatgcacacaaacaccctcctggttaagaaactggtttttggcatttccgaaggagactggctttgtgagctcagaggtgactgccttctgagttccggagctattcaaataaagggctgtaatgctatcagaagacattattactatgttgaaatttatttatttattttttttttgagatggagtctccctctgtcaccaggctggagtacagtggcgcgatctcagctcactgcaacctccgc

SEQ ID NO: 113466 - DNA, 1811 bp, Homo sapiens
tgcaaatgtccttgatcttatttgaacctgtcagctcctttccccggggcctgtttcttctgaccaggttgtccttttcccagatgtctgcaaggctccctccctcaccaatccttcaggtctttgctcattgccactttttctcagagaccttccctgactacattatttaaaattggaaatctcctacctccacatcccacacatactcacaccagatactccctgtgtttctccttccagtaagctatctcctttctactttcatattactggcttatactcttaaatatttgtcacgacagtattatactctatatgattaactatttccttgtaagaataaggaaaccacagcacagaaaatatcttcaagatggtgactgagttggatgtttttattatatatgtcttaattcccagagccactgcacgcctctcactaagaatgtttgcctcgctctaaatcattgttttcctagttgctggcctgggtattttcctccctttgagaatgttgtcctgtctgcggataaaacaggaacctgacaaatcatcttcttgttataggtttttcacttgaaatggaagaagagagtgtacatttgaaaaaaaaaaaaagagagagaaagagacagagtgctcatctgctcatctccttttaatgtctaaaccaaacagtgtaaaaggtggctttagcgtccttcagtatgttacagtcattcactctcccaattgtttttgcacactcattttaattagctgtcactaatttggtcatcttggttttcttctttttaaaataagttggggctacattatcactgatgtgggtgtggtttggatgtaaaggtattgtttgtttaattgagggcaattatgttcattattcagaagctactgaattagaaaacacattgggcggatgcagtggcttacgcctgtaatcccagcactttgggaggctgaggcgggcggatcacgaggtcaggagatcgagaccatcctggctaacacggtgaaaccccgtctctactaaaaatacaaaaaaattaggcaggcgtggtggcgggtgcctgtagtcccagctactccggaagctgaggcaggagaatggcgtgaactcaggaggcggagcttacagtgagccgagattgcaccactgcactgcagcctgggtgacagagcgagactccatctcaaaaaaaaaaaaaaaaagaaataaaacacattgaattatttttggatgagggagtgttggatacaccacctattaagaagcagcatgccttatcaaaatgaacatggacttttaggttcaaaacaatggatctgacaattactagcaataagaccttgggtagtgcatttattttcttcttagcttcagtttcttcatctgtaaaacaggtaggatattatctagtgtagcactgtgcgatagaactttctacaaagatagaaatgttctttaactgtgctggtagccactagtcacagtggctagtaatttgaaatgtggctagtgcaactgaggaactgaaattttaatttaatttaattttaattaattaagatttaagactaaatcatcagatgtagctactagctagtggactggacaaatctagcacatagatcttggttggagaaatgtatgtaaatatagagcctaacttaattcctggcacataaaaggttctcaacaatgctggctgctgttgaattgtttagtattattttcactctctataaaaacatatagtaaaattaactgatgttgactaacacatcaattttctgaagtttgc

SEQ ID NO: 113467 - DNA, 1036 bp, Homo sapiens
gagtgggactctgggactgagaacagactcaaggtgacctccaaggaaggactcaccccataccctcccctgcaagaagcgggaagcatcccagtaaccaaacctgaattgccaaagaaaccaaaccctggccttatacgaagtgttaatcctgagattccgggaagagggcccctggctgagagctctgatagtgggaagaaagtgccaactcctgccccgcggcctttgctgctgaagaaatctgtttcctcagaaaaccccacctacccttcagctccactgaaacctgtcactgttcctccccgactcgcaggggcatcacaagccaaagcatacaagtcactgggagaagggcccccagccaaccccccagttccagttctgcagagcaagcccttggtggacatcgatctcatcagctttgatgatgatgttttgcccaccccatcggggaacctggctgaagaatctgttggttcagagatggttctaggtgagtgaaaaatcagcagtggaggggaatctaaactcatgatagggtattttaaatggcacttgctgttttagtttctggtacataagttattgaggtgtgtgtatacaagtatgtgcacatgcatgtgtgtgtatagaaacagaggaatgaacagacagatcaagaaacatgggagctatgtggggaatggagacagggagggaagggaaaatatgggatgggggtaatggagtcagaaatggggagacacatgcatcgattactattatatgagccagaagtaagcagactggggctaggagctaaactataataggttgtggggctggctccccttactcttggcagatagaagttcagacttcacattgaaaggatccagggaggttatggaacatgtagaaggatgcagaggaagcttctcttagatgggaagtcatgcagtggccccagaggggctcctcagatgaaatgggcctcagctgggagtgctgggagaggggccagctccaggggaggactcgaaaatgtacggaa

SEQ ID NO: 113468 - DNA, 1026 bp, Homo sapiens
catgaatctttgaacatttatagatagacaatagcttgttaccattctgcaaaacctcactgaggcttctgtccactaggcgcccagagatcaccattgtggcagctgagccactgaggccagcctcgtggtttccaggaaccccacccccaggactgggatttcctacatcatctgcagcaggctcttggaggcctaatgagctggttcctgctgaggtgaataaacattacattatctctttgcattttattttttaaatgaaattggaagataagaacagtgagactgtcaacaccttagctattgcccttagatgtctaaaatcttcattctttacttttcagctcccaccatcttatgaacaagttataaaagaaatcaaccaagttcaagttaatactacaaataataataatgctgctgctactccaaggcacactattacttctgcaactcagactgacttttcagaagaaatagacaacgatctgcctcaaagtaatgcaagtaatttgtcttccctaattctgacctagttctagggaagtaatccgtaggcttccagcctttaaaataatttgcaatttgtgcataattcattgagctctgctgcccagtcagtgtgatcactgtgtgcttgctttatttgggtgtgcagtgatgattataatagatcattcttacaaactgcagccccaatctcttgagcttaccctagtttatatcacaaaaacattatccgtataattcatggtgggtattaccattgattccctttattccctctgagaaggatcttatatttagcaacttatacttgataggatgctaagggtggttgtcctgttaggcttttttaaagtgttgcactgtggcttatgcctttaatcccaacgctttaggagactaaggcgggtggattgcttgagcacaggagtttgagaccagcctgggcaacatggtgaaatcccatctctgcaaaaaaatggaaaaattcgctgagtgtggtggtatgtgtctgta

SEQ ID NO: 113469 - DNA, 2018 bp, Homo sapiens
ttgagaccagcaacatggcgaaacctcatctctgcgaaacatacaaaaaattaccaaggcatggtgtcatgtgcctgtagtcccagctacttgggaggctgaggcaggaggatcacttgagcctgggaacttgaggctgcattgagccctgaacatcatgtcactgctctccagcctgagcaacagggtgagaccctgtctcaaaataaataataaaacaacttaaaggttataaaatgtcagataagttagacaaaagatgaaaatttgaccagtttcattctacaatagatttataaacaaacatcacaaaagcatagtcatatagattggaatcgatatttaaaattttttctgcccattgttacttcatgtcatcatcttaatactccagccatgcaatttatatttaatagctgtcttcttttctctgttcattcttcaaactattttcacaactacagaatgttctttggggagtttttgaaatctatgtattatgcaatctctaatatataaccataattaactttatgctaataaaatgattgttttgatttacttttttttaaggatattaaaattcatacattctatatgatgtcaagtataagctttttccaattgtgtactttgtaaaaatttaaacccttaccaaacatactaattttgtactataccagtttattccttcttcaacagcttctcggacttctattcagagtgaacttcatcgagatagaaggtatggttatatttataatggaggacatatattagactaataattgagtaaaagtgtgttatcaggtagcaaattaaatgtttcactttcataagcaatgtattcttgtattctgcttcatcaatatatctcctgaattaacttataagtttgaaagatgattttgcttgagagaaggagtgatacaggcttgaaaatgttcttttgagtatagttatttattgaagttgattttttaaatgtttattaaacagctgttacatgtaaagcattgtaactgcttcagagaaatgctttgtacctcatgctacttagtacatgttgcctaaccaaatggatggatgacaggatagaaaattgaatggaaggataaagaaaggaaaagaggaggtaggcacaatgaataaagcctggatggctttttggaaaaaggaagggaaaagagaagggaggaaagataatatttgggtagatagaaggaaggaccagtggacagatggacaatagaatggacagaaggatggatggacaaatggctaaatggatggatagattttttttttacattacatcatgacattcaatcagatagagaggttttcataagtcatggtccctgctgtcaaattgcttacagtatagtatagaataatgaaggacttcagagtcagaaccaaattcaaatcctgaccgccactttcctaccatgtgaccttggatgacaagctgcttaatctctctagcttctttatcccagctttaaaatggtgctaatcatacctacatcacaaggttgtcataagaattaatatacatatgatgcttaacgtttattaactaataactcttactatttagttagacaaaagctataagcaaaggttcttaggaagtacagttcaaattttatcaatgatcaggttctactgtttcacaatgtagcatgagtatgtgtgtaatgcataattttgagaatgacagtgcttttttgtttttattttccatagagtgctagagaaaggcagagcaggtattatcatccatgtatgttccatgagaaaactgagttttccaatcaaaacttgattgatttgttcagggtcacacagttgctgtttgttaggaaatcaggtttaagagaaaatttaaacatgctccaggcacagtgccttacacctttaatcccaacactttggaaggattgcttgaggctgggagttcgaaacctgcctgagcaagatagtgagcccttgtctctacaaaaaattttaaa

SEQ ID NO: 113470 - DNA, 1006 bp, Homo sapiens
catttatttgtatatactccctgacatgttatattttgtgaataaatcccaggagtgataaaagtcttaaatcattttctgatactatttaagattctgccccctttcctccaccgttgcttctgatttaactcttccagccatgggatgttcagtgaaagaagacagttcttaaggttctttggtaattaaatcacaattctcacctaatgtgttttgtgtgtgtgtgtgtgtgttttcctctcaacagtcaactgtatgtgaactttttgtgagatagtgaagcacagtagcaaagaactctggccctgcctagagtcagactgtccaagttccagtcctgacttcaccatttaccagctatgagtcctttgacatttaaattatgtaaactcttttttcatctctaaaactgggatgataacagtaccttcttgtacgggtggatgtgtggattaagtgagttaaaagatgtaaaaccattagtgtaggtcaattagattagctatttctttattattattggaatggattaaatatcaagtccagctcccttactgcagttggattaagtaattgattcttattaaatgaatttaaattggaatcttggagtgttttaagtttcatattttaaaaattttagacctagtgggtagaatagagatcatccaatccaataatgtcatgttacagataaggaaactgacatgtgattatactcatggagtgagtaaaggcagagctgaaattgggcttgtcagacccccagactcctcacacagttcacgctctgtctgacaaccatcagggggatggtcctacattctctgtgtctccaagaattcactgatagcctaaaacaaacagatgctttatgtacaaagacaggaatgccagcaaacaatcttcaagtgtagcagaagatgtgaagattgaagcagagatgatgtggtttcagagagaaaggaagaatgagagcttgcacaaaaagccgccgtgtttc

SEQ ID NO: 113471 - DNA, 1019 bp, Homo sapiens
tacaaaaaactagccaggtttcgtgccgcatgcctgtaatcccagctacctaggaggctgaggcaggagaatctcttgaactcaggaggcagaggttgcagtgagccaagattgcacctttgcactccaacctgggcaacaagagtgaaactccatctttaaaaaaaagagagagataaagatttattgcagggaaatatttatgtgattgttggagctgatttaggcaagtcagaatttcgtaaggcaggccatcaggaagggcaggctggaactctcacccatggagtgaagctgccatccacaagtggaatttcttttcattatggaagcctcagctctgctcttaaggctttttaactgattaaatcaggcccacacagatttcatagaataatctcccatactataccctgataaagtcccatcaactggtggactttaatcacactgacataatgcctttatagtgacgtgtaaattaatgtttgattaaataactggagactgtagcttagccaagttgacacatcaaattgattatcacagttgctttggacctcagttaagcaggctaaacccacttggaaatgattttcagtgttatctctgcttttcaaggtcagggctcttcaagtctctgtaacccagaagttctttctgacatatcagtttgatgtttgttagttttgtcataagaaactacaattgcattattattgtcctaaagaattctctcaactcaagccagggtgtgtggtcatggtgggattctgtgaaggagcataagccagcatctgcataaacaccttgatccaggcggtatttgctcttatacatttgtgctatcccttcgtgcttggagaagcacactattgttacatatgcctgctttgtatgaactggtaaagtctggagttgataggaactgttgagtagtcccacaggcctctgtcatagtggcaaaatattacctttggctacctgaagaaaagatacagatttggtcctctcttttc

SEQ ID NO: 113472 - DNA, 1070 bp, Homo sapiens
tgattaaacacttcagattttacctgtacttatagacctgctcccatgtctccttttactagaagcatcttgtatttctctgcaaatttttctcttttttggcacttaagagttctacaactaacacgtgaaaacatgttttaatagtacagaaacatgtggtatctgcctttatcccataggtgacttaagagtggtggttcagtgtctatcctagtctgctttctatgcatatatatagcatatatttaaataatatttagaacaaatggggatatatatatgtgtgtgtatgtgtagtatgtgtgcttatatgtatgtttgtatatctgtatacatatatatgtgtttctgtcaatttgacttttttaacttatttagaaagtattaccatgtcagtttccacttcattatttttttaactactgcataaaattttccagtgtaaccttattataatttatttaaccagtcctttaggttgtttccaattcattgcagttagaaatgatgttgcaataagcatctttatgttcatatctttgtgtatagatgtgtaggaaaacctttattgttcttccaagatagattttttttttgttttcattcacaattacttttaagtttttaaattttatgtgccgtacatgtctgtttgcttcccaaatctcagatagcttcctggtgtttggtactgttccaagttctctagagcccattacaacttccctccccataatgtggcctgaaatgtcacccagcacagggagagactgaaactcaacatgcagaatatttgtagcacatagtttagtactctcagagttaatagttggtgatgttaaaactcatagcaatcactatatcattacgaatttaaaagggtcttggttctctgcattggtatccttttgttgattttatgaagatgttgaagattttattttgacactttaccatcatcacattgtggtttaaatagattagctaaaagcaaaagatttaacttgttttagctgttctcttttctaagtatgtctatcaaaataccatgctctgctggggttagt

SEQ ID NO: 113473 - DNA, 1034 bp, Homo sapiens
aaattggaaccagaaatgtgctaacactatgtgtttggaaatcattatatctaagcaggcatgctttattgtgaatctttttacttattagtctttcagagaacagtgttttcatgagtactaactctttggctttgaaaaacatttcttttttattatgaactcattcagaaagaattgttacatacgtttaactgtgtaaatcctattccttttcttccatatttctttctagaagttttagagtatgtttcataatcctcttattctgttctaacagcaataaaattaaggaaaaactaaaagcattcctgtcttaatctttacgttgccattaaattctatcttgttagcattaattcagaagatactatagaaaactgtattttgataatattccataggattttttcttaacgtcattgcttaggatatattgtggtttgtatattgcttcatattgtttatttttgcataacactgcggccttttacttcatttatttttaattcttaagcatatagtggaggaaaaattgttactcaggttcaaaaaagacaacctgtgggttttatggttctcttgtatatgatagtctcaaggttgattaatagcatgttacagcagtctagagagtcacttttgaaaagttcaagcatctgtgctcttatttcttaccctatagcagggtttctcgacctctgcactgctgacattttggatgagataattcttttggtgaaagggaccgctctatgcattgtaggatctttagcaacattcctgctttctacccatgagagttcccttcttcccagttgtgacgatcaaaaattttatatagagagcacattatatctaattactggagaaacattgaaatccaacttctgaaatgttctgggtggtagatagttaagggtgaagctgtattggtcttagtatttgcagatgttgtagctgactgctcatttttccccctccccattctgttagaagcttctgccaaccatgattcatggaatgattttttt

SEQ ID NO: 113474 - DNA, 1594 bp, Homo sapiens
ctcccccaattaatttgaaaattagaaactaaaaaattggaaggctgagcacagtggctcatgcctgcaatcccaacactttgggaggccaaggcaggaggatcgcttgagtcccgaagtttgagaccagcctggacaaaatagggagaccctgtctctacaaaaaaaaaaaaaaaaatttaattagctaggcgtggtggcatgtgcctgtaatcctaactacttcaactacttgggaggctgagatgggaggatcacttgagctcaggagctcaaggctgcagtgagctgtgattgcaccactgcactccagcctggagtacagagcgaaaccttgtctcaaaagaaaaaaaaaaagaaaagaaaaaattcagagaatgtgctgaagagtatttgatttaaaataaaatccatacacttaaagcactatatatagccaagattaaatttccatgtttgctatagatctgttctcattcttgggctttcatccaaatgttttgttattgttggcaagaaagcagattctgaatccaccctcagtgatttgttttgttcagtcttggcttttggaacaaaataataaccacttattattttgccaaaaaatttatttctactaatatatttcttgacaattgcacaataatcttgactatcatgaaaattactttaaaatgtaagtatatgaaaaagtataagtatataagacacacagatacgcaacacacaccccattatttatatgtatttaagctaaaagatggctttatggcaaaatgtgaaatccaaatatttgtatactttgagggaaaagatcaagccaagaacatgtgtttcaatttgtttttcatggtcaagaggtgagggatgggaaatattgtgagtaatggataatttacccttaccctcaaattatcaactatgtgaattcttaggagtaacattttataagtactgcgtatctatatttacacaggaatgtaacacagataacactaatagtgaatttggggggaaaattttaaaatttcccccagcagataatcaagtcttttgttgaattttaattactggttcaatagaaaagtgctatgagaagacatttgtattttcttagagcagaaagtataaaaatgactgtagaatttcctgttttaaccaagaacgaaggagagctgtgagccatttgcttcctgagtggccacattccagctgtgcagactggtcatagcacatctgccaatcagaacaggccctggagggaagcccttggatactgagtcttgtttacatgcatcgtgactctgtttctcccttcctcttgtgtgttgtaccactaggaagattagtggggaaatttgctattacatgcctaagtaaactatgtaactaggatcacagccacaggaaatgatgttctggacagagttttagctcggctttagccacaggtaagagttgttgctttgttatatgaggatagctaatctgtattcagtttctggctttactttgagacattatacttcatttttgtagcgaagctagcaggctaaaaactggagaatgattgagagaaatgatttaaatg

SEQ ID NO: 113475 - DNA, 1594 bp, Homo sapiens
atgctgaattagcatttcaggagaagtataaaagaatgaatgatatggacctcttgaatctgtttttcttggctcttaatttttatgtcttctatctctgtgtttttgacttgtgttctttaaaattctgtcaacatattttttagattacatttatctatgtctgttccacagaagggaatcctttgtgtagcttcctatgcttcgtcgtcgtaattgcattgcttcccacccctcccaaaacagtacatttttcattacatgaatattatgtttttagtaattctgcaattctgaagtagcacttcaaaatgcattctttccaaataaaaaatttttgaagccttgtggtaagcacaatacttcttctctatgaattaatagcatccacccctaaaaaaaaacaaaaacaacacagaggctttttagctcagctgatctccagcttgcagaggtgtggagaggactcataccagtatattcgacaacagacacttatgttgtacctattttgtgtaaggtgctctgccaggcatttcaagggatataaaggctctgtcttaaagaaccttatcgtagtggaagcaataagacataaagaggattataatgtgagtcaaaatgtggtaagtgcccataggtgctaagcactgaatatatagatgtcgaggtggagggcattatttctgcctgtggaagatcaaataaggcttcaaagtaaaggtgacagatgtctccaggtgtctcttctcactcaagaattctgtgaatctttagaactgtgaaaaatcagaattgggcacttactttagaagcattctacacagtgagtaatagaatgaaacaattgaacattctctttgtttgtatttctgtatcattttgaaagtgttgtctggatggaagttaatgaagtggagaggaaggacaggggtgggcttgaatttgcaacagacgttgtgttgtacagagaatacattccctatcctcaggtagtttgtcaaggcctggctgtggctttacctcttcttgattggaagaaaaagatttttttttcactctaatgtagagtgataattctacattagagaccaagactgccccactgtggataaaaatctcagttagaagtcacagatcggaagaatcctcatccaagcagaaaatgttgccagagctgagtgttcttataccagagggaggtgcctggtctttggagcccgtgaaggagtcttttggttacagcagtttctgatatttgttcattttgcagggtcagctacacaaaggtataactttatgagttctgtggcacaaacaaaactaatggaagagaagacaataaaaagtgggccttttgccctttaaagaaaataaaatctttatttttacccttaacagctgaaaaccaatgtgtagagatgttatccgtcctttggcacctgaaatcataattttaatttttgttttctgtattcttgtctaagaattccatactatcctgaaatatgggagattccagtaatttcataaatagataaaaaaatttacatttaatctatctagttcctttctttatgccactctttcatcc

SEQ ID NO: 113476 - DNA, 1058 bp, Homo sapiens
ataaaaattagctaggcatggtggcgcgtgcctgtaatcccagctactcaggaggctggggcaggagaatcacttgaacctgggaggcggaggttgcagtgagccaggactgcgccactgcacacccgcctggtgacagagtgagactccatctcaaacaaacaaacaaaagactcagaagaccacactggaccaatgcaaagccatccaataaatttgaatttagatgacttttcagctacagtaaaccaggaatgtttatggtcttttacagggaacaggtatgaggaatatctagaaactctgggcacagttgccattaaagtctggaaagtagaaagaacccatctctatccaggcttcacgctgctaagggaggagtcccttttccttaatcaagcattgatgtgtaaatcttgccagacagtgtctcctcactttttcccctaaaaaaaaaattaacaaggaactgaatcagggaactcagtagttagttacactacttaattaagacttgaacaaattaatatattagtgatttttaaaggctttaactcagaaaggtcagtagtgataaagctcctaagcaacttaattattattattattattttattttattttatttttttgagatggagttttgctctgttgcccaggctggagtgtagtggcgtgatctcggctcactgcaaccttcgcttcctgggttcaaatgattttcctgcttcagcctcccgaatagctgggactacaggtgtgtgccaccacacccggctaattttttgtatttttagtagatacgagatttcaccgtgttagccaggatggtctcttatctcctgacctcgtgatctgcccgcctcggcctcccaaagtgctgggattacaggcgtgagccactgcacccaattatttttatgtatatttgaattctctacaacagagaaatctgtttacctgtcatttttgctatggctatgttttagagatagctacacccagtgacacttggttaacatttcaattcaatattggaaacatgttttatgtacaga

SEQ ID NO: 113477 - DNA, 2644 bp, Homo sapiens
agttggaaagaagttttatgtcaatattcaggtttttgggatctttaaactttgacctattttggaaagagggacctgtaatagtatatgtttaatacataatagtacagatttagagttaatagcatttttcatttgctcgtgctaattctatacagaatattttatttatgatctccatccaattaaaagtcacatttcttactgatcacttgataactttctaatacttctttcacagaaacatttgaaaacaagtcttaagtatgaaactagaagagccaattataaatcttttattgaactaagaaaatatttttaaatattgtgacttttacagatacaatcaatatatacctaacatgaagtgtatggacagactctgaatacgtgtatgagtatatgtgtgttttgaatacctttattgtgaatttatacttgtcagcacaataattacatacccttgagtgttttatagttgggcattcatgtaagtacacatctgtttaaatctcaaaacaatcttgcaatatgcacttaaatgtttttgaggctcactttatgtctttgagtagaagaagaaaagtaacagatggccaacaaggatattgagttgacaagagaaaaacttaacttagttactttagttcctgaatttaaaaaaaaattaatcagtataaattcactctaaggaaatcttgggagtatgtttccattgaagtgcgttgtttgcattttgttttgttttgttttgtttacaagggggtgccaggcagggaggagggaaagaaagaggtaagaggaagaatatattggacacctatctagtggttgttggacctgaaatttgaacccatgtgtatggcttcaaagtccatgcgccttccacttctccaagagtttgctttctgttgacctttatcagtggaagaatttctcaatgctgagagcaatttttccaatactcttagatctaaaaatgctactgactggattattcatgtttgaacatgtaaaaatattttcttgttaaattaagtttaatcttatacttaaagttcgctgtgttatggagagaactttgaagcaagaatcagaaatcaaataacactaatgcttcctaattagagaaatctctattcaatgcaaactaaaaatatattggctggtgttctaatcagctgtgcttaattctaagcactaaattctgaacactgtgggtaaaacactttgttcatttcagaaatagctagacttttcctaaactctcattaggaaaaatagaagaaattaagaaaataaagctgggcacggtgacttacacctgtaatcccagcttctcaggaggttgaggcaggagggttgcttaaggccaggaattcaagactagtctgggcaacatagcaagatcccatctctaaaaacaaaaacaaacaaacaaaaaaaaaaaagtaaaacattaaaaaataccttacagtttgaaaatctggtcaacatgaagtaaagaataacagcaatgtcatctgtaggcagggtggttattgtgatcatattttgatattagcttcctattgcttgctgccaatggggctgtaaggaatatgtgtttatggaagtctcagcgctgatcataggaagatgaaaacagtcatactgtttgttttttccataagtaccaggtagctttaatgagctataagaaaattatactatttgtgcagagtaccacattcaattcttaaagttaaatattttttatatagtatagtcacattatatacaatacatccaagatttatctccgctatcttatttaatccacataaaataaacatgtctgtttatatacattaaagttatagagctgaactattaaaatggaggagctggtgatggcagcagggattgactgcaagtgggcacaagcgatctttctagagtgatgggaatgttctaaaatgatctcattgtgatgattgcacaactctgtaaatttactaaaaattatccaattgtacatttcaagcaggtaaattttatggaatataaattatatgtaagaatctgtttaattttttaaaagaaatagaaaatatatgactgtatctgactccagaactcttagaaaatctgaaagaacagttattattgatgaaacaaagaagttgtcatagagctaccctcctttccctctccttcagagtttgcaaagaaattctaccaaacttttaagaaacagattattctaatgctattttaactgttctagaacatagaaaatgaaggaaggcttccagttcgttcctttttatgaaggtgaaataacattgatattgaaacacagaaaatatatttctcctaaaagaagaccagggaccaattttgcatgtgaatattgaaacaaaaatctgagagaaaaattataaaaattttatcattttatagaattcaggatcacatttgaaaaataatacacaaaagaaaaataagaaaagtaatacacaaaacagcaatatggtgtaatgctaaagagtttcagctctggagctggactgctggtttggaaccccagcaccgtcacttcctagctccatgaccttgggcaagtttaaacatggatcaatcctatgtaaatcttgtgcca

SEQ ID NO: 113478 - DNA, 1026 bp, Homo sapiens
aaacaacaaaacaaaagtgtaccatacaccttatatcatcagataataagaacaatactctttagtcaggagaaaatttttccccattgtaaaaagcacattggttaacataatatgcagttctataggggactgagaaacattcctcattttttatattgtctctcaatgaatgcgaacaccatcattttgaatcatgattaaggcatttctgtgaagagtgaaactaatttaattgaagtatttatatttattgttatgtaacttgaaacaaaagtggaacctaatagaagatgtctctttcctctttcaaatacttctgcttccagctgtgctttggcaaggcccatgttctctcaatggcctttggactttctcgacattttacataaacaggaatctgacttgtatttctgcacctgtgggaaggatagttccagagccaaaagtatcaaagatctcaagatgacaagtctcatatccccctatttagaagagaatggataaggcctcaggacagaaaacaaaaataatattggccataatgcccagaagttgatatgatattaaagtatacaatttatatatagacaattacaaactctagagggagaaagacagtttaaaatctttattataattcaaggctctccctctccctctccctctccctctccctctccccctctctttccacggtctccctctcatgctgagccaaagctggactgtactgctgccatctcagctcactgcaacctccctgcctgattctcctgacagcctgccgaatgcctgcgattgcaggctcgcaccgccacgcctgactggttttggtggagacggtgtttcgctgtgttggccaggccggtctccagcccctaaccgcaagtgatccgccagcctcggcctcccgaggtgcctggattgcagacggagtctcgttcactcagtgctcaatggtgcccaggctggagtgcagtggcgtgatctcggctggctacaacctccacctcccagccgcct

SEQ ID NO: 113479 - DNA, 1044 bp, Homo sapiens
catgctgcctctgcctgaagtgtcttacttgacttcaagagattctctggttcatcctcatttgtcagttttggaagtaaaactgacaagaatggtatgtgcattggatgtggaaggtgaggggaagtgaggtacaatatttgtcttgagtaactggttatattgttgaatgaaatggggaagacagagtgagacaaggtctcactctgttacctgggctagaagtacagtgggatgattatagcatactgcagcctagacctcctagtgggagaatggggaatatgggaggcactcttgatggattcttgctgctacagagggtcctcacccatgccctgtgcagcctttcctagtctgaagcccctgtccctacctagggcttaccccattctgggggctcacccgaaatccccagcagaaggagcagcgtgaatgcatagccagcagtgcccgtgtctctgtcctgagggccagcactccctgcccctggactcaggatcccagggagaggccagtggggaacacccagagaagggggagcagaaccatctcctcctagatggactcctctgcttcaccccctcctctcctttggtcttcaccccctgccagatcctgaagggaccagacttcagaagtgcagctccaggacccaagggaggaattggggggtctgcggcgtcccctgctgtcctgggagagcagggtgtctgggattcagcctgagggtgggtgatgggaggtaagaaaaagggaaggttggaggtgggcattggaaggagcagggctcgctcagtgcttagtgaccctggtgttgaacaagtctaagttcacacacttccctctgcctaaactgccacatctcagggacctgccctggtgtgcccatttaattctcccctgaccaaaggtgaaccaatggagggcagatccctgatttgggatctcaaatggctgtgcagactggccaccctaggtccttggcctctagaatggttctgacaggactgacaggagaaaataaaggggaaataaaccagt

SEQ ID NO: 113480 - DNA, 1035 bp, Homo sapiens
gtccaaaacaacaacaacaacaacaacaacaacaacaaaaactgtagcttccattttgggtgttctctattgctctgtcttggatcattcactctgggagaagccagctgccaaaggcattccttcagcgaggcccacatgaatggtaacaggcacatgagtgagcttggaagctgatcctttcctagttgagccttgatgactgcagctgtggctgacacagcagtagctttttgaaagatcctaaaccataactaaccagctaagtcttccagataactgtcctgcagaaactatgagataataaatgttcattgttttagctactgagtgttggggttatttgttgtactgcaatagataactaatatactgccggggctcctcctccggcctggcccgttttatctgaaatcttctaatcttccaagtccctactttttcctcagaatccagtctaatcccagggttggatggttttcatcttggattaagtaagtggcaaactaacctctggaccccagcatcttcacctatagaatgtgttgggctaagtgatgtccagattcctttaaccctcaagttctctgcttctgcacttccccaggctctgtcttcaatttcatcaaaagaatgaatataagaactaatttgttagaatcaaccaaattttattcactctggggatcttgtttactaggctgacttgtgcgggggaaaggcaacaagcaaattaggcttatgggacagcagaactgcgtctgtcttgctgactcttcaaaatctgtcttcagaatcctcaactctggaatttcctttttctctcattctcaactgtcactttacccagggcatactgacctcagccagttaaggtggcctcaggaaaatcagaggcagaagcataataggcaggagcccagagaggcccagactgagggtagcagaaaactcagcaagcgagatgggagacttctcaatccaagacttgtagaaatggatgtttgtgtatattccaggcccactggtttggat

SEQ ID NO: 113481 - DNA, 1906 bp, Homo sapiens
ataagtataagggggccaggcgctgtggctcacacctgtaatcccagtactttggaaggctgaggcgggtggatcgcttgaggtcaggagttcattaccaacctgggcaagggcaacatggagaaaccccatgtctctacaaaaaatataaaaattagctgggtgtggtggtgcacacttgtaatcctagctactccggaggctgaggcatgagaattgcttgaacctgggaggtggaggttgcagtgagctgagattgtgccactatactccagcctgggtgacacagcaagactctgtctttaaaaaaaaaaaaaaaaaaaaaaaagaaaagaaataaaataaatataaggattaattgatcattctattaaaaagcaaacttatgccttgagcttggagtagtatcggataatttgtaaagtgccttccaactgttatattttgtgattttataacctccttttatctccttctattttttggctccactatctagatccatcatcttctctcacattctatcctctttttttttttttcaactgatttagcatcccacatgtgtagtgagtttaccttttcttttgctgaagcattttccacagtgtcaagtatgccttgtttgaaattctgtggtgttgtcatctgcaaaaattctaacaagatgttactgacataaacagtatgcctttgagaataaattgtaatcattctttatcctgcttataatttgataatttttgcatttgggaatttgtttttttctgaattctttttttatatgtatggaaagctttttaatggcccacatttaattaatttattattatgtaattaccttttgtgattatttatgaaaattatcatttttaaacaatgattttattagcattcaattagaatgaggaatattcactttgcagttgttcattccactgtcttgccaaaactccttccttattttttattctttattcatcaagtaatgtagagcattgtgtctattattgtattttaatccgcatcctatgaaatccaactcagctctggtcagcatcagatcccatgtttttaaccattctttgtatatcagaaaaaaaggaaaaaaagaaaataaggcagcatatttttcatatgaaacatgttcttagactactctgattgtctacaggatgttacattttggaaatatctctagtaaacaccttcattaacaccaacacacctgagaacacaactataaaatttaatccatgactactaaacacagtcagccttagcttctcaggctctcattccagactcttcctgtactctctgtttgtgaagacagccttcaagatggcctccaatgatcttcagctcctgatattcacaccttgttgacttactactaaagaatagaatactataagaaataatgagatgttagggttttttttttgtttggtttttttttttttttttgagacagagtctcactctgttgcccaggctggagagcagtgacgggatgttggctcacccccagctcccaggttcaagcgattctccccctacctcagcctcccgggtggctgggattacaggcgcccaccaccatgcccggctaatttttgtatttttaatagagacaacgtttcaccatgttggccaggctggtcttgaactcctgacctcaggtgatctgcccacctcagcctcccaaagctgggattacagacgtgagtgagccactacacccagctgagttgtcagttttgagattaggttataaaaagactgtggctggccaggcatggttgcccatgcctgtaatctcagtactttgggagacgaaggcaggaggatcacttgagctcaggagttcaagaccaccctgggcaacatgacaagactttgt

SEQ ID NO: 113482 - DNA, 1046 bp, Homo sapiens
aagtctacagtagtgtactatcatgtcctaggcgttcacattcactcactgctcactcactgactcatccagagcaacttctattcccgcaagctccattcacagtaagtgccctatataggtgtaccagtttttatcttttataatatatttttactgtaccttttctatgtttagatacataaatacgtcccattgtgttatagttgcctacagtgttcagtacagtaacttgctgcacaggtttgtagcctatgagcaatagactatagcatgtaacctaggtgtgtagttggctgtatcactgagttttgtgtcatttcactctacgatgttcacacaatgacgaaatcacctaatgacacatttctcaggacggatctccatcattaagcaacatgtcatgtacttagcatctgttatgtcagggccaagccttggacaacctttcacagacaatcttctttctcttcctggctgtttgctttattgaccagtctacaggtttccctggactgcactcatctcctccacagggactaatctttctctgagcaccatcctacttgcttgaaacactaatgccctttaaaaccagtccccctttacaggggggactggttattttgatcaccaactaatgcacctgttcttttggtcactaacaaaatacatttccctttttatgtttattcacttctcatactaaaggaattcttccctatttttttgacagctggctttctatagtctatagttctcattttgttaattgaaaaaaacaagatttgatactttgtttgcaggatactacgtgttgttagaaggtcaaaaagatgaataggacattagttaattttctcaagtctgtttttatctattcagaaggaaaaataaaagctatgttcactcaaggaactacaaatagagataagaagtacaagaggtacaaataactagggccaaagggcaagtgttattttggtgtaatgtaaggaaaaaccttatagctttccaacaatgaacggaggtaatttggtatagtg

SEQ ID NO: 113483 - DNA, 1043 bp, Homo sapiens
acgttatctttaaatacctctgccatacacaataaatataataataattgctgcaaaataggaataataatatcccacaagattttcataagaaatgagatattatagagttaatacttagcttgggtttggcctatttagcatgtgataattaatggcagctgttatttttattattgttgttattgaactcatttctcagctttaagtatttaattctacccaaacagtttatcttggtgatggcttggattgatgttgatggtacctattgaccagggcttctcaaccttggcactattgacattttgggccagatgattctttgttgtggggtagctagcctgttcattgcaggatattaagcagcatccctaatctctacctattaaatgccagtaatacctactacacctagttgtgacaaccaaaaatatccccagacattgccaaatgtcccctgggagaaccactgctgtaaagcaaagatgctacttcaagaattcagtcttcttttgagcaccctgaggataaaacagggaaaacaatagatttgcaagttttgtagctttttatctgtattaacagaaagggcaaatggacaccattgtctgttttctaattcaacccatcaatcagtctactatattggaaaatgaatagctctccttataaaacagtctcctaaagaatatctgaggccacgcatagtggctcatgcctataatcctaggcctttggggggtcaaagtgaaaggattgcttgagcttaggaattcaagaccagcctggacaacataatgagacccccatctctacagaaaaattaaaaaattagccaggcggggtgttgcatgtttgtagtcccagttactcaggaggctgaggtgggaggattgcttgaacttgagaggttgagactgcagtgggctatgattgggacactacactccagcctgggtgacagagttgagaccctgtctcaaaaaaaagaataattgacttctctagtacgtgtatatcaggccttggcttttgccttt

SEQ ID NO: 113484 - DNA, 1022 bp, Homo sapiens
gaaccctggaggcagagcttgcagtgagccgagatcgcgccactgcactccagcctgggcgacagagcaagattccgtctcaaaaaaaaaaaaacgtatcttgaagtcctaaccgcacttccatacttcagagtatgacaatatttggagataaggtctttaaagaggtaattatattaaaaagaggtcattaggttgggttctaatctcatatgagtgatgtccttagaagaggaaatgtcatgtacgtgacatctatagagggagaagacagctatttacaagcctagggtgcctgaaacaaatccttccctcatggccctcagaaagaaccagccatgctgataccttgatcttggacttccagcctccagaactgtgaggaaataaatttctgttggttaagttcgtctagtctgtggtactttgttacagcagccctagcaaacttatgtagatgtctatggaataataagaacaggataacagggacacctggagctgccataggacaaccctgaagaccagagctggaaaggagctctggattcatgacagcttaagagctcatagcaggatcttctctctggttctctgctattaatatggctcaaccgaattccatgtcatttctttctgtcctactataaactgctcaagttgttccctattttcagttcagactcccaagacgtcttatttggcacagattatcttttctaaccaggatataggttcatggccatggattaactgtccttggggtaagtaccctcatatgggaaggtgagaagatggggatgcagaaatatggccagctcagttgcaggggctattgtggcagggcagatgccaggtttgctatatctcagtaaagtagcataaagatgtttacctctttaaatacattttaaaagattttagaagtgaacacgtgaaaaaaatctctccatttgcttttttaagcaaacactgcaacaccatgaatttttaccaaatttatgtttttaaaattcatttgt

SEQ ID NO: 113485 - DNA, 3177 bp, Homo sapiens
gaatccaaaagcagcttacaatgcctttccaatcatatttgcttatgggtggatcttttggtacacttaaatctaaaactcagtaattctaaattatttctgcttctttgaggtttttttttaattgagccattgttctaaataatgagtacttccgataaattctgattgagtaaaggtatgactattctaaaggattctaaaacttcttcctttcccatgttttttgcttctagatcagttcttgtcttgtgtctactccaacctgggaaagagttgacgtaaaacttgaaaaacagttaaaaaacactagacgctctccaaactttaaatcagtcttattaacctctgtttgagagaggtagttatgtgtttaaattgttagtatctgctcttccagctatagctagactctgcaagatgcaagagtaaataacataaaaatataaatgtcaaaaaagatattttatttaaaaacttatagataatatcattagattgatctggttttgttgaaaaatattttccatggtaaggatatgcctagaatatgaatgttctggagtacaagaggatgacatatgaaacaacccttctctctgcccattctcacctgaactttccttaacttttccccatccggtcacccaacaaaagggtggaattgccaactgctttgtgacactgggcaagcaaataggcaggatggcagaagtgaaggtgacttgagaggacagtttcaacaaggcgacgtctgccgttgtatcttggtacttgggatggatgacgattttggacacgtagtacttcacacgtttccttgagtcacctactgtaatcgatcctagccacacagtatatgaaaaagtagtccaggtcctatggggaaaagaaaggaggcctgcttatggcctgcagctgggtcagaacaggctgcctatatgtagcactaagtctctactcaagaaaggagggtagccaactgggaattaaccatggtgcttccaacttcaactagggttgatttgtctccttctttcctctctttctccccgtccttccctgaccactctttctgtggtctcttcctagaggcttgtggcttgagttttgccctgtgttttctctccggttctctcatttacctctcccattctccatggtttcagccatcacctgtatgcttaatagacattgctgtttattgtccatactaatttctgttctgagcactagaccttcatttctgaataaaattttaaagcaaaatataaccacagttacacatatacacagttaaaatgccaggtaatttgataagatgtacaaaataaataaataaataaataaataaataacaagttctctgccccaccaccctcagttcaaactatttagaggcaatgactttcaactcttttagctcttagtaattttcaagtgttttcaagaaatcctatatatagctgtttcttgatttttctttttcagttttagaatcctgagttcctagtgtggaaggtgaggattgagctttcttacacatcgctgtctaccccccacctcccacttccattccacccatcctcctagccagtgttatcataacttttcgttagatcagtatttaatgcgtttgttcttgtgactatgtaaacattgttcactactgggtcctattgggtgattacatttcttataaaacgttttgcttctcctggagttgataagtgggctcactttggttttttgtttttatctttatacccatcaccagtctcattccccaggctctccaccagaagtgtaaatctcctctcattttgttcaaacttgtcaggcattctatcaatactatcttttttttggagccctctgctctcttgttctaatctgggctgctgcacagccatcatcttggcactttctttatcctttatgactttcttagggattctcttctgtgttttattccccttttgtctggatcctgtgttttcctgtttttccccctttattttggtggagcagattctcctatggcttcttgagaaaatgtgcatgagaggtaacatttttgctgctttgtgtatgtgaaaatgttttacttctatcccacatttgattgatagtttgcatatgggtagaattctaagttggaaataaattttttttagcattttgaagttattactctattttctttgagtttttttttaaacttaattttttttttagagacagggtctcactctgtcgcccaggctggaatgtgtggtacaatcataggtcactgcagccttgaactcctaggctcaagtgatccttctacctcagcctcatgagtagctgggattacaggtgcaagctgccacacctggcttattttcattgaactttcagtgttgttattgaagagtcctggaattttaatttctgttgtgtattagttatcaattgttgcataataagttataaagcttagtggcttaaaacaacaaatatttatctcatagtttttatgggtcaggaatcaggtgtgacttagttgagtaccattgactcaaggtttctcatgtggctgcaatcaaggtgagctgcagctgcaatcaaggtgagctgcagtcatcttactggggaggatctgtgtccaaactcacgttggtaggctttgggtcttctcgctgttgactagagatgcgggttccacatgggcctctccatagggacactcaccacatgacaagttgcttctctcacagcagtggctcttagagctcagattgtgtttatgacccaaaaacacgacaaaaatctcctgactggtatttagaaggtgatttggcaaaaaataagaaaagtctttaatatagtgcctgtctccaactttcctttttctacttctatgccctgtctctagttgtttcgggtttgatagtctgacatgacctgggtttccttccgccctgcctattttaccactttcatttgtcttttggttcattcatgaagtgatgcaaatattcactgagaacctgtctgtgtgttagctgccagctagaactcacggttgtatgcagtgtgctgctgtcagtatcaacctctcactgacgagggaacctccacagataaagttgtggtcaaagtgtaggctgacctgccaaggccagcgccctg

SEQ ID NO: 113486 - DNA, 1053 bp, Homo sapiens
gtgattcccctgcctcagcctcctgagtagctgggactacaggctcatgccatcatgcctggctaaattcttgtgttttagtagagacagggtttcaccatgttggccaggatggtcttgatctcctgacctcgtgatccgcccgcctcagcctcccaaagtgctgggattataggcgtaagccactgcacccggcctaaaaaccgttttctagggttcttttaatgtgttttttagatattcactgcctccttttctaatcagtgggcagaaataagtgggttgaggtatcaaaagaaaggtattccaggtgtagaggacagaggaaataaagccttgaggtggaaatggaatgaagaaatcagaacacttgtctgaataagaagaaaacaaacaggaagtgagttagctgttttggtgatgaattccgaagtcaaaggtaagaaacttgggctgtacctttctcaagtcacttggtaaatagggccttactctaaggacagtgcagataaagaataggggacggtaagacagcacatagcctcatgtggaaactcactgatattcaggatacagcagtccttgtttcactcagctctacttcagtgccttggtgtctgattctttctctctgctttttgttctgactctgctaccatctgactgccctctttgccatcctggccccctcctggcctctgcatattcccatgagcagtggtgtgggattctctactcttctgttctttcatcattcccttgctctcacttcaccagtggcttctcatgtcactgagaatgaaattcagagtccttactgaggcctagtagcttctgcaggacctggcccctgctccctttctttctggtctcagttcatacacctttccacctttgctcacagtgtcccagccacattgaccggcctgttcttcctcacacccacctaaactcagaacctttgtactcgctgtttactcgaccgcaccttctctccttttttagtccttgcttccctcctctgtttaggcctctatcaaatgtcacctcctc

SEQ ID NO: 113487 - DNA, 1044 bp, Homo sapiens
ggttacagtgctgggctcaaacccctcattcagaccttgaatgggcagcttacttttctcatttctaggccatataccaccccaaacccctttgttacttttcaaaacatgatatccaagggatatctggccaggggaactctatattcctctttgttgttaaagtagctcagaggaagtagctttactgcaccgttctgaacaaatcagtcatgttaaaacataatgtatggctaatactctggggagtggaatcgaggagggcctggagtgtgtcactttatacttctgtattgtttcagttacttacaatgaatgtttattactttcaaaattaaagaaaaataaatttaaaatactgtgagaaataattggctgctggtccagtatatttcttgctcatattatggtatttttaaaaacctatttttccctaaaatgaattactgtaataatcatagcaaatgccatcctgttaataaaagaaatgattgataatctattcaagaaaatggtggttggaaggagtgtataattgtgtttcctctgaagatcatttttcaaaacactggctaatttatcatttgtttacctgtttggtctcatgacatttacttcttttcgtgaaagctataatcactcgaaaagcaaatcctcatttataaccaaactgttgaaagctgtttaacataatcaaaacctatctttagcattccctgctttatttattgtgtgtatttcatctccatcttgtgacccaacagaacctgttctagaggactagattcagaagacatgcattctttttttcttttttcttcttatactttaagttctggggtacatgtgcacaacatgcaggtttgttatatatgtatacatgtgccatgttggtggctgcacccattaactcgtcatttacattaggtatatctcctaatgctatccctccccccttcccccaccccacgacaggccccggtgtgtgatgttccccaccctgtgtccaagtgttctcattgttcagttcccacctatgaacat

SEQ ID NO: 113488 - DNA, 1070 bp, Homo sapiens
gttgaatggggttgccaggaaagttctttaaagggggttcactcaactgcacagaatacccttttccccttaccatcttcctcccacctcctgccaggaacaaggctgtgtagctcacagtagccaccctgggccatgaggttactttgaggttggaaccgaagcactgagaatagtggagcagaaaaatagatggccctgcagtccctgctgattagatagagtcaccacatgggttttgattgcctgcctcctcctttacttagaaggaaggaataagaaactctaccttgtttaagccactgttatcataggcctcagctggcagctgaaggcagttcctaactgatagattctaacttgatcttattgtttccttcctcttaccaccaagctgtaatacattttgttataagatacctagattcttgttgctattttgtactttactgtagtgtgaccttggacatgttagttaggttttatgaggcccccactccaccgtttttttacatctttggaataggaattattcatgccctaactactctgcaggctcattatggggaacatgcttgtaaacttcaagtgttcatgtgtgatgtgtagtttttgaagtggttgtggccatccttgggcaagtggaagggtaccaaaatggaagcctttagaatctgaatatagttttctggttttgttattttgcctagtgccaacttcattcagaataaataaatagaagctgtgaagggaggtgatgttgtccctgctctgatgcatttgagtagattaacaattgcattgctgatgagccctagaatgcatgccagggctgctgcatgggactgagagttcatttgttttcaatatggctgccttcattatactggagctttgtttccagaagatacgttaatcaaggaatcattatactggatgatagttaactgctttttctctgagagctggccaagaacaaagggctcagaagaaaatgtttgtacaagatgtggagaattagtttttctggcaataaatgtcactatttccaaatagtcctttgaaactag

SEQ ID NO: 113489 - DNA, 1053 bp, Homo sapiens
tgttgcccaggctggagtgctgtggtgtaatctcagcacactgcaacctctgcctcccagattcaagtgatttctcctgcctcagcctcccaagtagatgggactacaggtgcatgccaccatgcccagctaatttttgtatttttagtagaggcggggttttgccatgttgcccaggctggtcttgaactcctgacctcaggtgacccgcctgccttggcctcccaaagtgctggaattacaggcgtgagccactgtgcccggttctgttttttttgtttgtttgttttcattgtataaatatataccacagcattttgcctattattttttattgatttattggagttctttgtttacccaggaatctcaacttttgttggttatgtgtgttacaaatatcttcttccacctccactctggcttactttttcattttctctatggtttctttcgatgtggaaattcttcatttcagtatagatgaatttatgaatcttttcctttataatttgtgtctcttcccccctcaccccctttaagaacatgatttctatccaaggtcatgaaaatattctcctatatttcctttattgtcccctaaaagctttgtagctttccttggggagaaatgccatagctttcatcagattctcaaacagatttgagaatctctgcctgacatacaacattttaatattatttctccaaagggaggatatacaagattctggatcctcctcccaacatctggaagagtagtaggcacataatagggcttactaaatgctaactaaatttactctttctatattttgatgtgtttatggtaaaccctggaaggactgatataactgttgtctgttgtgctttgagtaaaataactttaatatcatcagtatgagggcacagaagaacattcactgtgttcacggtgtaccaggtgcttctttatgttatcacctgtgaggtaggtattattttcttcattttatcattgaaaagactgaggctcacaaacatttaagcaacttatccacagtccctcagcta

SEQ ID NO: 113490 - DNA, 1260 bp, Homo sapiens
atggagggtagaaagtaggatgaaaggaaaacttgagaagaacatcttgaagaaatagtcaatttaatgcctttggtagaatcttggaacataaaaataattctccatgctcattattacaacttttcatcaaaataaggcatttggctgtctatatgaacaccagttttgaacataattggtaattttgttcagtgtaaacccaaaccttgtgaaataatgaatagttgctggatataagtgaatatttcttgcaagagtacaatgaaaaaactttacaaagatataccgccatgcctgacctatggatttaaacagggtaggccaccttagattcctgttaccttcagcagaaagcttcattctcacaagagactgtacagtgaagacctgttttggagttcagactagatgtgatccagatgtgtgtttatcatttagttgcaatatgtgtatttattccaaagctggtggaaatgacattttgtaattagttttcaccagttccctaatttctcaaggttgacaaaggcttttctaggttctttgataatattttgctgagacatgacattgtgtactttttgcattcagtaattggtgtttgtagttttctaaccatttatatgccctttttccattaaagggtgtgaggacgatgtaatggaatgagtaagagggttaaacttgcgatttttggatttatttcttttagaagaaattatttaatagtttacatttctttacaagctgagctccactttccccttattagttaacatgtttttcagacactaacacattccttaccaagcttgggcatttgttagttatgtctgtgctagatgttgctctcctccaagtgagagggtatgaactgacgcagaagcttcatgttttttctgcatcaccttttcagtttttcacttttcctgttctcagtgctccctccttcccttatcattttacaatctaaagagtttccttttctctgatttcacctagcttgataaccataaacctggggtttatggacttaaggtagtctgtgaactcttccttctctccctgataaattttggagtggttgtgtaagtgcatttatttatttttgtaacttacatacagaagaacatatgaaatttgtaaattataaagtaaaaactcttgtaactcatgctcaagtcaagaaataggatatagtcagttccttagaaatggattcccatccctcctagacttagcctcctctctccccta

SEQ ID NO: 113491 - DNA, 1048 bp, Homo sapiens
acttggtggccagcgccgcgcccggggccgtgcgctctcgggccactcggccgcaggtgagaggcgcgggggacggggcggcggggacccagagctgcgcgctctggggccgctcgggtcctgccccacacagcggcagctccttcacgcgccgggatgggaccggcttctttaactctcagaggccagactcggggagggtggcatttccatcgccatcctcactttccggccgagcccgaggaaattcagacccgtctttaactgctagtggtcgtacagctgaaactcaaattttccgtgcacactaaatccaggagctgctggcttgggacttgtggcctggttgatgacttatctctggatgagtcagaggtcaatggccgtctcggtggacaacgacaccttccgaggggtttgcctgcgccgccgcagccaggtcagagcacgtgctcataactgaggcaagtcctgtttcggcgtcccttgcacttcggacctgtgacccccctccctccctcccccagccgccgagctcaccagttttctgtaggacttgttttcgttagttgtgagaccctcccccacgcaaagagaagtccagaatatagcattccaaaaggccattcatttgggctgagaatcattttcgggcctgtaattacttttatgatactgtgttttgggtacacaaaagcggcacggatcaaatagtttggcacattagtgaaagagtgaataagtgtagatccacaccccttccctcttccgggcggcttttcaatcaaacataatagagaggacattctttggcctttggttccaactgggtaatccgagttatctgaaaacaagagggaagaacaaacctagggggactggcaacaaaagggagatagggaagtgagagagtcggaggagaacgattcactgagagcctcattataaagtggaatatagcgaatattccatgaagtggagaagcttttctgtgtgactcccttaaccactaagagaaagttggaaaaatagagaagatattgtatct

SEQ ID NO: 113492 - DNA, 1051 bp, Homo sapiens
gtggtggttcacacctgtaatcccagcactttgggaggctgaggcggctggatcacctgaggtcaggagttcaggaccagcctggccaacatggggaaaccccatctctactaaaaatacaaaaattagccaggtgtggtggcacatgcctataatcccagctactcgggaggctgaagcaggagaatcgcttgaacccaggaggctgaggttacagtgagccgagattgtgccattgcactccagcctgggtgacagagtgaaactctgtgtcaaaaaaaaaaaaaaaaaaaattctaaatggtataaaaaatctttgtagaatcatatgaatatcaagtaagattttttggaattttgttttaaaaatagtaattcctagctgtaaatcacttttgtttgtttcagactgatgacctattttccatttttatggaatatcaaaatgatgacatcacaatgcttttgtgatttaatttgtataagaaaaaagttatttagttcagttaaatgacacattgatgtttacttatttagatcctatctgtattttattccccaaaaagaaatgcagctatcttaaatatggcagcgacgcttcagtatcttctctggaagctgcaggtatggacctgactaacatggctgagccaatccctgctcttctgcctggtgttcatgttacatttcttggttttcattagagtttctcagccccactcaaccttagcactgttcattgtaaaacaaacaaaaacgtaggggtttttattacattaaatagaatcttttatcaggaaccacaggataaatttcattctgactcagtaccaaaatagttctttctttgagcaactggtttatttttaccctgtggacactgaatcttaaaacagatcgtgtttctgtctgcatgttggctgcagcaaagcttagagtccctctaagctgaacatctacaacacttctcttctggctctcattctaccttgtggctacagttactggtacgcatatcttatcctactcgtttaaaagttgcttgaagacc

SEQ ID NO: 113493 - DNA, 1045 bp, Homo sapiens
gcccaggctggacttgaactcccactcctgggctccagcagtcctcctgcctcacctttccaagtagctggggctataagtacacaccaccatgcccagcaatatttttatttctgtaatgtgtcatttagccagtgattgttgtattataatagaatcacagaaatggagggactcctagaggtaatcaaatctggtggtttttaagccttttattccctctaaagggatagtaaaaccattaaaaatataatttatcccaatatgtaagtcagagaaagctgaacttctggtttagagaggaacacagatgaaaggccaaatgcctccatcatttctccactctccacccaacccaaccttcaaggtatctgggggctctgtggacctcactttgaagaccatagttctggagtaatgaaggactactatattaagtaaatccttctagcaccgtttagcaccagtttgcttgtatattgcttcctgagggtaaaattttaaaacaaaactgctccaagttcttcctctgcatttgtctgtagtgtgtattacctacagacactcaccagtcatcaggaagcttattgtgtatcttgaatgttcagcccaaccagcatacactgtaggtaccacaggtgagaggctgacctgagtgacagagtggtactcacttttttatttgatgatgagtatggcatctggatagcacttaagagattggagtgtactagatgagataggctctaattgtgtagatcagtgattgtcaaagtgtggtcccctgactagcagcataggcatcttccaaaacttgttagaatacaaattcttgggggttgggtgccatggctcatggctgtaatcccagcacttcgggaggctgaggtgaggatcatttgaggccaggaatttgagaccactctgggcaacatagtgagactctgcctctacaaaatgttttaaaaattagccaggcatggtggtgcacacctgtagtctcagctactagagaggatcccttgagcccagaagtccgtggctg

SEQ ID NO: 113494 - DNA, 1125 bp, Homo sapiens
taataacttaaaacagctcttttcctgtcagctggcttttaacgtgtattcagaccatgattttttttttgtactttaaaaaatttgagataaaattcacataatacaaacactatgagtatttctggtcaagagaatttaagaaaagttaattgactcaacacttggtccatttttttgactgatggctgataggctgggtgctataaagccaagtctttgccttcaagatcacagccacctgtggggataaaaacatgtaaacaaatattaatagaaacacgttacaaggtgccctgtgattgccaaggatgtttattacactttcctctttgagcctgcctctgaaaatagtggaattttttcctcttgccttgctgtttttttttttttttttgtagcaactacttcattgtcttaatgtttactctgtcagggatttcatatgaaagttagaattttgtcagccactctgttcttctgaacatctcttccttccaacattcaaaaggcagaaatataagtggtgacacctgaagttagtgtatttgttgggattataaaacatgcagcacatttaggacttggtataaaaaagctatttttgaatgctgaaatgtagactgggtttataccaagcttatttttcctgcaagtctgtggcaagaccattgcacaataaactccaaatctgcttgcttacttaagccagtcttaatattcacatatttgtttttattgtacatttcacctttctcccttccaaaaaacccaagccaggaaagggtctccttactgtcttctgtgctttgaagtttcctgaaattttatgtctctgttttttgtcgttgttgttgctattatctcttggatgtttgtaaatgtaatagcagtcagtgccttttccttttatactggtaaatgaaggcttagctggataatgttcataaagatctctagaatccttagagaaaggactaaataaaatgaaatagtattatgcaagatgaataaactactttcctgtattaagccgagttttattaaggtgaattttttctcaatgcttatcttttttttaaaatttattttaagactctagctttattaatagttaatgctcct

SEQ ID NO: 113495 - DNA, 1051 bp, Homo sapiens
ccactggtgctagatcgttattgttaaagcaagaaactgggcagacgcaagtgactgcaaggtcagccaaaggcattgtcaagacagggaagatcggagcatttgtgaagctgtgagattcaagccacaggacacgggaaaccagcatctttggttcggaggagtggaaagagtggggttctgagcaggggtggaggggttgtttgatggaagaggaggaggagagtgccctagaaagttctcaaccgtggctcagctgatgtccttgtgaaatgggaggtgagggcatgtgcagaggaggggagcagaagggggctgcctggaacaggcgcttggtgggacgccagctaggggcactgcgaaatccgtgagatgaacacagaatcctgtgcgcagcaggtaccacctggaggcccaagtcccaatgtcttccttcttcttgcatcctgttttaacagaagcagagaaggtggactttgggcctgagataagctgggggattgggacagacagcatggttcacggggggtcgggggtggttgtagaagcatcagcgttgtctgctctcatccaagcaggagatggagctgtgatcctgaatgagctctgagggactggacaaattttggagctttgaaagagcccctttcccctcctctgtcgaaccgcggcctcagagaatgggagggaagagagcagcacacagagctgaaggccgcggtgtcagtttcttcttcagcggagacgcattcactatccagaaaccagtattacctgacaacagcaaattagtagcctgtgctgctgctgccattgcgtgtcgagtctgagggtttatttatttaggcgatgagtggggtctttcggggtctgtgtgacaggtactgatctttgtcatcgtctgactcaagtttagccctggcatatgtggaattaacatgtgcagtctgccagacatccctatgggtgtgaggaagcctgtgacacaaatatgatgacctactgtgtgacaggcatcgtagggacagaaaagtgatggagaaatcccaag

SEQ ID NO: 113496 - DNA, 1385 bp, Homo sapiens
atataggaatttggggtgggacacaaatattcagcgtctgagagcagactagaagcaggaattccatttgggaacctctttcaggaatgcggatgagaaatgccccaggcctgagccaaggtggcagtggctgggttgaagtgagctaggccaagttgagagcaattatctcaattggcagaacttccagatttcttgcttgggcagaggtgaaacagagggcagactttttcaatgtaggaggagctaaaggaaaaggaataaactttataggccgggggtgagggaagatgccgtattccatttcagacgtgctgacttcgagctgcctgcaggacagacatcacccccacggggctaaccagtaggcaagatctatgagtctgcagctgataagatcttggggaggtttgcagttgagagttatctcgttggttcattattcagctcatgttcacttagcctctgctgtgtgctaaggtctgtgcccagcatgagaagcgcagttcctgggacagacaccagccctgaatcaaagcacaggcagccttgaagctggtggctacagtcagtgacaggggtgctctgagaggggaagaaggtagcagctaagctaagacctgaggagaggatgagcagggacaggccaaggctgacagggaaaagtgttccaggcatggggaaaagcacgtggagaaatctgaggtgagtctgggcatgagagtttggggaatccagggacacagcacaacgtaagtggaacatggactcagcagcatctgtacttgaagctgttggacagatgagaactttcagggagggtgcagcgtgccagggtggctggggaacgaacctgaagctctttagcctttaactgggaagcgtgcacagagaaggaaatgcaggcgcgatggcacagaagtagaaggaaaaccaggaaactggggggtggggggggggcggggcggggactggtgacacagaagccaagggagaggcaagtttcaagaaggaaagaatgggcagtaggtgtcactttggggcatcagaaagagagttctctgggggcacataggcaggtggcagggcccttgcaaggtcccggggcagggggagcccaggctgggtgggtgtgtcattgtctcagcagcatcccggggagtgaagacagacagatattgacaaataactcccaacagttgtttgcccaaataagttaactctagatggtgtcaactccatgttcagccactggatatggatgcacacatccatgtgttagtgtggcccgggtgttagttcccttcccgactcggctgctcagcttgaatgagttccccctctgaccctcagtttcctcactgtaaaatgaaaatggcaggacg

SEQ ID NO: 113497 - DNA, 1012 bp, Homo sapiens
agcagacacggagaaagcaagtgggtttgggggatgtggaatttcaccatccctctggtctgcaaagtcagggctctctaaaatgtgtttatccttttgagaaaatgctatgtaaatgcacagtgacagtagtagaatagttgtcattagctgaaagtgatcagaatgttctggtgacatctcagggtttagcaaagaaaaagtggctgtctcagaggaggcagaggggacagtttcagatttgccttcagaatgctgatctttcatttttggggaggctttatgtaattttctttttttttttttaacagaacgaagtcggcctactggagttcttccaaaatgtgataaaagaaactagggcagagccaaaaaaggtgactagttgggtcctcaacacttttctgggctatttaaagcaacagaacctcgctgtcagtgagaggtgagtgaggtctgggatttctttcttcctttgtgatgagctctgtccagaagtgctggaaatagggcaggtccatttttttgctcctgctgttctccctcaggatatcctgacatgacacaaacatcccctgtggactccacattctaaatatgttctctagcccgtgtaaaaatgtatttattccttcaaatctgtgactgtgcactgtgtcctctgcactgtgtcagaggctgggggcacaaagatgaatgagacagacatttacaaacttgtggaggatacagatctgtaaggaaacagccaccccagggtgatcctgtcatgccagaagcatgcacggggtgctgggaatgcacaaaaaggggagttgaacagaggctggggaaccaaccagggctcccctcgggaggggacgtttgagccatgccctgaagcattaggggagagtcgctctgcagtgggagggacagatcacgcagacaaagcagagtgcgaagctcagagagcagcagcacagcaggctcaggaacgccagaagctgcaggggccggaggcaggcaggtg

SEQ ID NO: 113498 - DNA, 1041 bp, Homo sapiens
aactggatttttgctttttggatggccagtcataactacattgggatgctggagtatatatatttatatgtctatttatacacttccaataacaacatcctagcatttacagtacaacgtaggcagtcagatgcatgttgaatgagtgattctctcttcatcatccataaatcagctacttggagaagcagagttggtcactgcctcctgtgggctgctgtttgatcttcttcttacctctctggcaattatatcactgtcttttaagtacttattagtgtatgttgttcagcatcttgaaggcaaggactgcttcatcctctgtgctactcagcacagatgagcacaacatcagcagtgcttaatgccacactttgactatgactgagtcagtcagcattccgtacagagcacctcttaacccaaagcctcttacaattcatgtatttttcctaggttgacgtaacaaaactacgttttagtcttatacatcttccccaccatcttgaccacttgagtttccaacctacttgaaataaacactgaattctagccctaccttttattactatttgtgaaattacataggagatgggaggaagggaccaaggctactcagcctcgaagatttaagttacctccctccactcagcaggagcccaagccaaccctttgaggtagtgtatgatgaaccaagaaatggccaaggtttccttgctcaaaatgtgatttcatagagaaattgactatatataacattaatttgtgtgtgtgtgtgtgtgtattagctgtctccataagagagtgaaagaaactttcagaatctcaagaatacagctgtttctgttcaaggcactgtatgagaatctgtgcccccttcagagggcatttccataggattgtcactctcggccgttcatgagcggtgatggggacagtgcctgccttacctcactgagcataagctccatgagggcagggacatttttgtatttgtgtttgtgtccttgtctttattcatgggtcctgcatggtgcccaa

SEQ ID NO: 113499 - DNA, 1146 bp, Homo sapiens
cctgaggtgagaaagagctaggaatgggccacgaggtaagcgaggtagcacaaggccactgtgccagaagcagaaggagcagtggcatcaggtgacactgtaaaggcaggcaaggggtagatcagagagaatggcaagaagtttagctctcaacccaggtgcagtggtaatcactgaaaggcttttaagcaagggaaagacatagtctgatgaatgttttagaaaaccgctctggctgctctgtgggaagtggatttccgatgggtaagagtagaagccaggagaccagttaagaagcttttgcaatagttcagatggaagatgatgctgttttggacagcactggtggcagtgaagatgaaggagagacaagagagacatacaagatggtttttagaaataggctggtgtggaaggtaagagacagggaggaagcacaaatgcctttagggaagttggaggagctagatggtggtgctgtttaccgaaattggaagatgagatcgagaatgtctttgtgcaggggcaaatcaggatttccttttggaaattgagatgcctgtgaaacctccaagtggaggtgtcaaatagataccagagctgtaagtgtggagctcagagaggtctgggctggagagagaaatgtaggcatcctcagcatgaggtggtatttaaaactgtatccgtccacccagagagtctagataaggaaggggatcctgggtttggatgggaaggaagccatcagcaaatgaaatggaaacaaagcatccagaggacgaaaactgggagcaaaaggcagcagaagctgagctaggaagataattcacgaaggaaggattggttggcttgtcaaatgttgctgaggcgtccagtaggtgaagacaagcgtgtcctgtgtccgctggatatggcagccaggagactgttggtgactctgacaagggcatttttagagagatggggagagaagctaggctgacgtgggttaaggaataaatgggaagtgaaacagcggagacagtgtatgcaacaaacaaacaaaacttgtttaagaggctttgctgaaaaggaaaccagagaaacgatagatgagtgactgatagagtgagaactgggttcaagggaataggttttggggttctt

SEQ ID NO: 113500 - DNA, 1022 bp, Homo sapiens
tttgtttggtctgattcagaaaaacaacagtgatgatgttgcttcacctctttctccttgaactgaagattggggcgagctgttttttagtgggtgagggcacgagtagaattaaataaaaaatacaagtaagacctgcgttctccagtggctgctgcttttcccctctggcctccagcctctcagcaagtctactgtttggtagggcggaaagaattaaaccgcctttctttatcttttaagagtgacagacagtttggttgaggtgggagatttagtaataatatgactaaaatgagatgttttggtcatctgtggctttctggtctttctggcccagatagttcaaataatccagagtttcatgggacatactcatataataaagcatttgttgttttttctgaaattcagatttaactgggtgtcctatattttatccaacaaccctacccagagcttagttttacaaattgagacttcccgtctcagcatagaaaacgggttagccttttgcaggattctcaaagtgtggtccccagggcactgacatcatcatctcctgggaactggtaagaaatataaatcttcaggccccaccctcgacctactgaatcggaaacctttgaggtcgggccaagcagtctgtcttttgacaagcacagtagtatttctgatgcagttaaagttcttaaactgggggcctgccaagtggtgaaagacacggattttggagcctgaccatctgaattcagacattgacattgatgctcactagctctgtatgtggctgtgggcaaggtcttaatccctccacgccttgttcctccttcctagggttgttgtggaattaactgagggaacacagtgagagcagcacctgggacctaggaagtgccacagatgcctttgcttttattctctgttcttctccaattctcctcattgacctgctgtctctttagtgcgtattggtgcctctgtgcgtttgcaagtaattcttcctttccacttagaagcag

SEQ ID NO: 113501 - DNA, 1043 bp, Homo sapiens
gcccttgagaaaatggctacggccctgtcgttttcagaagttcattctttttctgtcaaagtgaagccacccttcctcaggactcctctcagcaatcagtgcctcttgtgtattctgaccggccccttattctgtttgtagagggagtgagattagatttattctatgtagtaaccactccgctaagcttttctgcgactcttcctgttagctttgatgccgggcactgggggaaagggttcccgatgtggcagttccttaagtgcccggtgggacccactgctgcatacattttcttctttatatccttccctgattcccaggcaaacagactcggcttgtgaactggagctgcccacccagagaaccagagataatgcctgttgaagggccaagttgcatattcagcgaggatgtcagtgtgtgggagaagcatttgttcagcctgcggttctgagaggaactgtgtgttgtgttcccataggttctcaacaggaggtgtgtagaagcggcggtgatgacaggcctggctctgaactgccacataaacaagaagtccttgtttgacaggaagcactacttctatgcagacctccctgtaagtacactttgtgatccaccccactgcaagttctcagagctgggccagccctgctgtggggggtcggagcaagggaaaggggctgtgcctctcatgttttcagccagcactgtgtccatcccagcaggaagttcggcccagccctgatgcaggcaggtgcccctgatggttactagatcggatgcagttgtcctgattgctgacttcttgcttacctcatgcttctggtggctcgctcataattgcacagggagtagaagccagtgtttgcaggctcagcctggccgtggtatttggtgctaattgcctgttagtacaaaagctaaggctctggctgatgcaacagtaaatgcatactgtagttctgtcagcagagcgagagcgaatcgcttttaagttgaagttcccaataatagggctgtctcctttggagacatttctg

SEQ ID NO: 113502 - DNA, 1019 bp, Homo sapiens
actacagcagaggtgttgtggggggacatggtggtagatgaaattgaagatgtaggcaggagtttgatcatgtaagagcttggcctttgtcgtgggaacatcaggggccattgagggacttcaggtaacagaatgccacagatccacaattttagcaggatcaccctagtatgaaagacaaacttgaaaagggtttgcagatgctggcaggttcatgtcaccactgcggattcattgagggcagagacagagtcctatttatctatgtacccctaaagtttagtgctttatagacatttaagaattttttttttcagagtgaagacagcccaagttgaattttcccattctgtatcctatcctcagaacatgctgacctggacttccatctgtcacaagcagcttgactaagatcctaggaaattcctttttttcttggcattcttctaactgacactctctgtttactgggccctctgtgcatctgtaacgtgtgatgactgatgcttataattctgaccttgaagtacttcatggcttctaaatcatcaaaaaaagattaaagcatattctcagtatcactgtaatgtttgtgtgttttactgccttcttctctggaaagtggtggtttatgaagtgcccgtgcgcttgtgtgcacacggacacagtgagagtctgtgatggtcctcaactcttctcccacagggaggctatggtgcgtgcttgaaaataaacaaacaaaataacctgggttctcttcatgcctagcaggaggaagcagcttggtcccaggggcaaagaagcttgaaatgagagcgaaagcagtggttaggaaagcagagggaatgatgaggcagaactggtgcagaccaggagtcaggcagtttacgagccagccctggctgactgcattctgaccccaggaagagcaaagcccagggtcgggactgcagcttcatgttctgtgtgcctggacccgaatcatcaggcttggatttggcgggattctccaccagcta

SEQ ID NO: 113503 - DNA, 1027 bp, Homo sapiens
gaacaatttgcttttatgtcacagcttatagtcttttgaatgttgataaaggaaatgttaaattattcattatctcatttaatcagcttggtattatatttaggtgatggggcaaagaagaataagacaaaatgacctgattgccctcagggaactcagtctgtttggggaaacagtgtgttccccaagtgccaggggagctaaatggaagaaagacctagactgtagtagtggtgggaaagatgtcacaaaacaggtgacatccgaaagtcttgccagatactaagatcttgctcaagcagatgaggaagaagggcattcccagcagaagcagcagtttgtatgaaagcatgtgtcacgtttggctgcaggagcatggtggtcagggggactggaggaagaggaagctagagaggtggtcggggtagaccacaaagagcattgaagcctctgccaggcaattggactttatcctgttaggactgggaagcagtgaaaaggattttaagcagaggaattacatgaacagatttatccttcaaaaaggtcaccttaggagaggtgtggaagagagactagagggctgaaaatggaggcagagaaacctcctggccaggtggtgagtggcagaagtcctggtgggagtgggtggtgtttaaacaaagacctgaattaaaactgaaggcaagaggaggaggggaaaaatcaagaaatgttaagaaagtagaatgtgtagaacttggtgatttgtttgaaagtgttgggagttgttgttaaatgatggtctcagagatcatggaatatttgtctggtttagctaaataaatgttaaaactagaagcctgtttctcaaattggggtcgctgtgtccccttagaggtctcatgcaaactctgagttgtttatgctgccttatgagctagatgtatcttaggtttcaaacaattatgattgcagcactactcaggtcttacaataagccagacaagcaattctttattaaaaatcatttgctactcccaccacc

SEQ ID NO: 113504 - DNA, 1278 bp, Homo sapiens
ggaaatgaacataccagctttattacagataatagcttgattgaaaaatgcaacgtgatgtttagccatatgctttttagtacttgctgcctctgttgaactcagctttccaaaactgcaggcttttcacttgtagaggacgaacttgcttctgcagaaagcttatcatgtcgccagagtagagctgactgtcccatcattgtgggcatgttgattaggaagaactcatgcaggctttctcctgataatttatactataagcttctataggaatgctcagccatggggccaacccactcatgtggttccatttcccaaagtcacttgtcacaaaagtcactcttttggggacaagagaatacagagtagaaagcaaagtcctgtcacatggaaacctaggggcaggggaatgaccgttgcccaaattgtgccctcaaaagcatgaagccagtgtcacatcatgtctgggcatagatgtgagaagctgtttttgggtgagtcttgcggaattctttgtttatactgcaagtagatgcacttgtcatctgaggccattggcttggcctctcttggccatttttatgtgtgtttgcggcttcacatgtaacattgtggggagagttggctattttctacgctgcggcatcttggggagtttttttcctcagctcttttaaaaatcttggcaaagttaggaggtcattttgccattggcataccagagatgacaaacgtaggcttggtgattctggcatgggtaggtagtcaggctgggctcctctgaagagcattctgttcctcatggcagaggattcttgctagtgagcctttgtgttccccagcctttcaccactgggtacatcattataataaggactggagctgaggcagggagaataactgggaatcaaaaggcattagtgcttctgggagccttaaaatattctattctaaatttttatgcacgtatctccttttacaattatagaagcaagaagcgtaatcaatcaagggtctttgtcatgctttgcagctttcttaggaaatgcagacaggcaataatatgtgattgtcaatagcattttgaattttcagtgatatttgccaactcataggccatcccaatgagcaaggtcaggggctccaaccccagttgataggagaggaaactgatggtcttactgacttatccaaggacacaaagaggtcatgaacccagctaaaaatagaagtgagaattgcctggtccctattcttagtataagcaccagattacac

SEQ ID NO: 113505 - DNA, 1018 bp, Homo sapiens
ctgcggccccaggggattttcttgcttgctttgagcttggctctgggcatgtacacatctgtgtatttgtaaatttatatgtatatataaatgtatgtgtgtataaatagaatacttcatttctgcctcctgcctccatctccctgttccccagcatgtctggagcacacctgctgtcttgaccaaccccctccccgttctgattagtaacccttattctgaatgttttttaggatctttttattttcttattttccctcagttttaggattttatggaagcccatcataaatcttgaggatgaaaaggtcagccagcccatttcactgcttataggcaggattacagctacactaaggacagcattctttgtttttattagtagggattcagcttcactcattatttggacctagtaaaatctctttactgtggtgccaagtcttccttaatttattaagtaattattcacctatagatctatagacaggatcttaggttgtttgcttaaagttagttatttcctatttaacaataccattccaatttttctacttgtaatactttgtatatggttgtgaaatgggaagaaaaataagaaagaaaatatatttgtttggtaaaatgtcatgggctttacaagtctgtttcataattggccaagtaatatttccagtaatggtgagatttcagcaaagaatcaagtttgtttgaaatttatgcatgtgcaaacccatgtttacacatacacacacactcactttttgtcatcggaaatgcttgccctctcctggtgtcagttcccacgcaggggaaaggggagaggacaccgttgcctctgccgtagctggctggtaggaatgctcagtgtggcacagtagataactcctgataatcaggctgcactacaattcatttaataagaaatgagaagctctgctcttgttttgcttgtctgaaagctcttatctgtatgtaacatagaactccctagcaactgtgaatgcctcttgtctcc

SEQ ID NO: 113506 - DNA, 1041 bp, Homo sapiens
tggttactgtagccttgtagtatagtttgaagtcaggtagtgtgatgcctctagctttgttcttttggcttaggattgacttggcaatgcgggctcttttttggttccatatgaactttaaagtagttttttccagttctatgaagaaagtcattagtagcttgatggggatggcattgaatctataaattaccttgggcagtatggccattttcacaatattgattcttcctatccatgagcatggaatgttcttccatttgtttatgtcctcttttatttcattgagcagtgatttgtagttctccttgaagaggtccttcacatcccttgatttttttcattttgtagcagatattgcttcttacatctcactctgcttttgggcaccgttttcttcctgtgttggtggctcttgctttccaggtctgtgggtgatgaactctcttagtctgtatgtgcctccagctgtttctgtttccccctcactctggaatagtagtatagaattccaacttgacatttatttcccgttggcacttgaagacatttttccattgtccttaggcatctgtaattgctgatgagaagtctgcatcccttgtcagtaatctgttgtgtcactctgatagctttagccaggatgtgtccatatgtgaatttgtttttatttattctgctcagtgtgatttttaacttaagtactgtaccctggactatggaggtatctctatggaatgaattcctggtggcctctgccagggcccattgggttttattgaatgaaccggtttgtatgttaatttcttggccccctaactgccacacagcttagatagtgccagcgtcaagctgcacacatccaagccaggcacagggtcaagggctcagatttctcaagactctttttcacctatggcctgaagtagctggcctcctccacagcaacccctccagttggtggcaaaaggttttctaactggactagaattttttggctcacagctttatgcaggaagccatcccagctccctatcacat

SEQ ID NO: 113507 - DNA, 1090 bp, Homo sapiens
aatcaggtccacatacaaaggattgggagtcagacatcagacttttcaacagcagcacttatacctgtaagagaatggaaccatgccttaaacattcttaggggaaaaaaaattataattctaacctagaattcggtacccaacagtgtcaatcagatgtgacagtagaagaatggtattttcagacagactctcaaaaagtttgcctttcattaccccaggaacctgctggaataatagagaagtttcaggttgccagctctaccatgagaccgttggaagaggaggaaggtggctccagaataaagaattctaggaaaaaatgagagtagggaattaacaggtatctgatttgtgtggaaaaaagatttccatataatctagcctttagaggaatgagcaataggtacataaaaaatgaagcacatgaaaacaatgaagggcttagcaagtctaggaaaaacaaaatgttcaagaaaggaaatgtaatcatagtgttttattagcttaggagagaaacatgtaaataataatagaagcaccagctactgatttaataaaaactgtgatataacttggatattgggaaaagaactaaattcttacctaccataattggaagtcatgttctaaattggtaaagcaagaaaaaagtaacctaagtataggctgtaggaacatttttggccactgattggaggcctctttctccttttcaggccttaagccagtagatgggttttattttgttgtgtttttctttggcggtgaggtgggatgtgggattgtatttgtgttttgttttgttttttaattaggtgatgggtaaatgatttggagctcccaagaaacagactagtagtcaaaagcatttttaaaaacaagatttatttttattttatatacaagataacgttaggtaataatcaaacattacctgtactggtttctcagccttctgctggtgaagtgcttttcattttgttttgttttttgttctcaaagtccaaataatgagtcccctaccacacccctgttctcacaactcttacccttaccctgattttaggagaaatagactcatccacat

SEQ ID NO: 113508 - DNA, 1031 bp, Homo sapiens
tgaataaaaccacattgatttctgaacacagattactttttctctcaaatctaagttgtgcttaattgtaatcattccctttcactagttcacgatgggggaaataacatgaatacccaatgtcctaggatagatagcttcttcagcaatgtgggtgcaatgtgagggggtaatacaggtggttctaagtttccactttttaaatgaaataaataatttcaatagaaacattaaaattgcaagtaaagtgaaaaagagacagtttccactatcctggcaatgtatgtcgaaatctatttgtatacatctttccagttaaaattgcattaactaatgtagtctttgattaactacttttgtcctgtggaaacaaagtcaatgctttaaaagcatttagcaggctaatcaacaaaatgccccttgtagtctaacagagctggaagcagatggttatcttagtatttcttagcacagttgtgagcttgatccctgtctttcttggctgtgagtttctatgtgttctatggctatggaactcagcctgctgtcttgaaactttatgccacatggtagagacggaagatggctaggtcagtagatattctcttaaaaaaagagaaagaaaccacagcagtaacaacaaaacccacataagataatgtacatataacagaaattaatagcatcatttatgttgtaactagaagagctcctgtttttgagaaagcattctgaaaacatgaagttccttcttagaaaaactacattttaaaatccagttaggtgtcattaggggaaaaaagaaagactgggaatacatgcatgctgagcaattgggaaaacaggattcatttccttttattttaccattaaagtcttgattctgataaaatactgatgcagagggaataattgctttctctagaagattgctttgcagcaaagaaatctatgactcctttttcctttccagtgcaaggaaatagaacaccctgttcaatgtccttgagagatgaagggccatatgggga

SEQ ID NO: 113509 - DNA, 1126 bp, Homo sapiens
ttcacttagatttatattcataatgttatcagaacacattaatccaagcaagacactgcccaagaacttcagttattatttccttatgtatgtacacatgcatttatgaagctgaaggaagcgcacgcatgcaaatagatagacaaacagacacacaaacacatgatgctccatctcatacagtacaatcatttgtgacatgctaatttctagtaggtgccccgtcaattggtttcacagcttagctattcatcgtcagacagagtgtctgtgtttcccccatgcacttccagttcacggaatagtgccagactggcatcttgtcttgtgacttgataacagattccattaatagtgtatccactgggactaacatccagtccctctcagctgggagaaatctggcaattagtgccagcccgaaggactgcaagggctgggagcctcgcatgccaggtcatgcataagaggctgactgtgaattcacaccatatatatgcacaaggaattacaaaatgggagctttgaaaaacaaaaaacaaaaaacaaaaaaaaatgagggagtatactgggtaagaactttcctgatatctgccatccccactttgtgaaattggggatgagacaaaatcgtcattgtttcattagattgggaccatgcctagctctgagctccatttatttctcagcacattgctagttctcaatgattatcattatcattattaatgatggtaataattgacaacatgataaacaacttgaaaagagctagtttcctgaaggaaaaaaaataagtcactgtaataatggctcttttacacaggaacaaatagaacatttgtgtcttggtattttaaattatgtctttgtttgctgaggctggagggcacagggtgcaattttaaactccaataaatgaacagatgaattagcattaggaaaaagggtacatgttagtcaaaaccagccatttggacttggggtccttaatgatatgtagattttctgtcttgcttctttcattctaatatcacttattcctggatttgcagaactggctttacccataacaggaggaaaatgttgcttactgggtgctgaggttttaggccatggcacataa

SEQ ID NO: 113510 - DNA, 1014 bp, Homo sapiens
aattcacccctatgagagaaatccactcttagcttgctgacaaagtcaattgcctcaattacaaaaaaaaaaaaaaaaaaaagattcccgaacttgccccatagaagcaagacagccaagcttagaagcagccagcccagccctttttcaaacttagaatcagtgatccaagggtcctttcagtatttttccacaggatctctggctgaatttccacagcatgtgaaaattcaactatacacaagacagcatgatgcagcgattttctttttttcttctctctctctctcttttttttttttttgcacattttattttagtagcacaactcttattttcaaatgatcttacgaaggacctcaagctgcagatattcatgtcttcacatcaggcgtctctacttgggtgtctgacaggcacttaaaatataagatgtccaaagagcattctggatgccctgcccccgctgcacatgctcctccctaatgtgccctcatctctcaggcctaacacctaaaatcattctattctcaggtcatctcttagcctcaaactcctgcttccagctacaaaacatatgtagaatcccatcccttccaagctagggcccacatagctgaaaccttgttttcagccagtatcccctcttacctggatgactgcaacgaacttataataggtcttcccacttttattactgcttcctatacttccctggatcggaatgcagtttcccatatgcttctacctacagggaaagaacaggtatggctggcttacataattgtcagatggagcaacatttgcttcacttaaaattgtttttagaagtctagactttagaatctctacttgttaatgacaatataacaatgaccaattactaccattttaaacgtattatttctctatttagtgaaataatacgtttaaaatgtagatcagatggtgactttcaccctgttcaaagtgctccaacatctcccatcactcttaaactgcaaactccttacc

SEQ ID NO: 113511 - DNA, 1070 bp, Homo sapiens
aacatatatagtatcttccctccagttgtgtccacctcgaagaaaaaaaaattacagaatattctcaatctgttaaaaatatcttacttcactcttttcccttgcttaccctggagaaatccaaattagaaaacttcctatttaagataatcaacagaggagaacaacagatcaacttgggctaatatcagtagcagggaagaccaattaacaaattcatgaattgtgctgtttacacttctattcctaaggttaattatgcgatcaagtaatagcttttgccttgattagagggcccttaggaaataaaagtgtgtttcctctttacaagtatgtttgcatttcagtcctgcaatgatagcacaggaactgggctcagcaaacatcgcctgtgcacacagctgtagtcaaagcagaaggtcttaatttaaatagcctcaagactcaacgtgtaaacagaagcatcatccataaaagtgctaacagtcacgtatacatttttctctctctctgctttggactacttatagtgtcaattctttgcagaagtttattttcccattattccctattgtaaagaatcagtaaaattagctcctggggctataggtatagaagaaagaaacatcgcccacatttcagggagcactctccgcaaggctgttccagcttcctgttaataatggcagctcacgtttttgaggtgctatcccatggcaagggacctcacatgtataaattctgtaatcctcacagtaagcctatgaggggaatattgttatcatcctctccttttcaggcgagaaaacagaggcacagaaaggttatgtaaatcacccaagtccatagcagctagctaagccagggtttgaacccagacattctggctccagtgtggacacatttaaccaccatgtgctgttgctcctctctttagggccctgacttaaatgtgcagtgttagaaaaaagtgaattatttcacccaaatgaagaagcaacacattgtgccatttgaaattctcaagtgaagtgcaaaagtttccttgtccgtttacaatccacttctga

SEQ ID NO: 113512 - DNA, 1050 bp, Homo sapiens
cctacagactaagaaggaaaagaagaagagatgacaaaccataactgacaagagaggcgtctgctgtctcatcacataaaaggcttcacttttgactgagggcagctttgcaaaatgagactttctaaatcaaaccaggtgcaattatttctttattttcttctccagtggtcattgggcagtgttaatgctgaaacatcattacagattctgctagcctgttcttttaccactgacagctagacacctagaaaggaactgcaataatatcaaaacaagtactggttgactttctaattagagagcatctgcaacaaaaagtcatttttctggagtggaaaagcttaaaaaaattactgtgaattgtttttgtacagttatcatgaaaagcttttttttttttttttttgccaaccattgccaatgtcaatcaatcacagtattagcctctgttaatctatttactgttgcttccatatacattcttcaatgcatatgttgctcaaaggtggcaagttgtcctgggttctgtgagtcctgagatggatttaattcttgatgctggtgctagaagtaggtcttcaaatatgggattgttgtcccaaccctgtactgtactcccagtggccaaacttatttatgctgctaaatgaaagaaagaaaaaagcaaattatttttttttattttttttctgctgtgacgttttagtcccagactgaattccaaatttgctctagtttggttatggaaaaaagactttttgccactgaaacttgagccatctgtgcctctaagaggctgagaatggaagagtttcagataataaagagtgaagtttgcctgcaagtaaagaattgagagtgtgtgcaaagcttattttcttttatctgggcaaaaattaaaacacattccttggaacagagctattacttgcctgttctgtggagaaacttttctttttgagggctgtggtgaatggatgaacgtacatcgtaaaactgacaaaatattttaaaaatatataaaacacaaaattaaaataaagttgc

SEQ ID NO: 113513 - DNA, 1108 bp, Homo sapiens
tgttgactaacgaattaaggaagaaatcctcgatccagttttcaaaatggtttctgccaaactggactttttgactttctcttctcagtgcctttgctgttgcttttatctcctcctgtaaagccctcctattaaaatcctatctttctattatcgtcatcatacccctgttaaacaagtgtgatttctacctcatttgtcaaaaaaggtctctctgaaaggtccttacagtgaatccatggcagtctttacctttaattctgtctatcgcatcttctttattaagaacaattacattaagcagatttcacaccagatttgtaatatgtgaaaaggagtaccttttcaattgtcatttacctctactttgaacagtgtgctatactgttaaaatttgggggatgagtatcaagagaccttgtattccagtttccattatgttctctcaacattaggttctcaattaaagggttctctcaaccctttaattatctacttttttaaaatatggaaactgtggtatttctttatctcttcagaatgacataaggatacctgagttttcagctttgttttgtaatccaaaagtgattacagtatttgtatattgctctggttttcagaagagtatagcgctgatgttgaaccaaatgtttaagggatagccattgtttttaaagatgtacatatcttttaaaatctttatctcttaatatttttatagcctattgcatatttataaatctaatcattaaaagcataagcagcctgtgtttgaggacatgtctaaaactggttaatttttactggaatgtatagtgtaaacacaaatctgcagctgtttaaattccaaattctgacttgttttgttgtataaactttattgaattttttacctaatcacaagggaatatatgcattcataattgaaattttggaaaatggcaaagaacataaagaaaatttaaattctttaaaccactaccacctagagttctcccattaacattttatacatatgcccacattaacattttatttctaaaatcaaaatcttattgtatatatttagaggcagcttctgctgctttttaaaaaatacagtaca

SEQ ID NO: 113514 - DNA, 1618 bp, Homo sapiens
tttttcttggctcaatttttccccacttttatttactatctaagttatacctcattactttgtaatgtttttcaaaagtatggttgagggatatttatttttccttataaactgctttgttgataacctacctgtagtttagaacttaataaatcatgttaatttatacttatctcaaacccttgtgagatgagagtggacaaggcatttaaatgttaagtttgaagaaaaagcccaagcaatcagcttgactgtgtaccatatcataccttaatgattctctagtgaatatttatttttatctgtccagtagagaatattttcatgaattaagtaattgccacctaaaaaataacagaagagagtatgaaaacaaaaaaaaatccatgtcttttaaaatgtcttttaccatgttgcttcttggcaagtatcttataaatattccaagtcagatgttaaaattttttaaagcagctttatatttccatagtgtaatattagtttgggatttattacagggctttaatgtctgtctttacttgtctagaagtagcttcactggctcctaactactgccctggggcagattcagatgaaatgtggtatgtagccacacccaatactgttggcatactttcattgaatctattcccatggaagaaacccagttgcaatttcagtattatttcatcaaagaggccaggccagagctatcataactgctttcatgtcgtgtttcctttttattatatcatgttttatatcatatgtttgctttctacatactacatacacaattgcttgtgcttatataaatttataatgcttttgaataaacaaaacaataaatagtgatgggatcattttatacggatgtaatattttctgaagagccaaacaaattaaataagtaactttactccaaattttaatgagctattaaattttatttaaatcacttttcctttctacccaaaagtaatcatcttaagtgtttttccagtgtctgagaacattagtgggacatacaggtggagtatggtcatcacaaatgagagacaacatcatcattagtggatctacagatcggacactcaaagtgtggaatgcagagactggagaatgtatacacaccttatatgggcatacttccactgtgcgttgtatgcatcttcatgaaaaaaggtaagggaaaatcttgtcatggttgggacttcttcctctattattggtgaatttgggccctttctgtgtagagttactgaaatagtgacagtgtgctcttaaattagatttaattattacacttcagatgtttctattctaggaaagccatagcgttttgtcttaaaattggtgattgtctgtaaatttcctttctcatttgctagtgttgtcagcttcctgtttgaaactctctactctctaatctctaatcctttttgttgttctgtatctttgatgactcatcatattcaagcagaaatcatgttttctctctctttttttgatattcttatttccgcaagtgggacaaattcaggcttcaagcgtctgagcctttttaaattacctacccaccttacacccaccctatctctaagtctaggcaaaagct

SEQ ID NO: 113515 - DNA, 1005 bp, Homo sapiens
ataagtaatatgtatatgcccctagttatatgtcagctaagaagacaatataaaatactaacataccatttcaaatgatcctgaaacttcaaatttgaacagaaaaaagtcatttttttaagattatcattctaaatatcctaatggtgttaaagatagtcccaattagaattgcacgttggatacgaataaaatagttgtatcatatttaatgcatggaactaagcataactccagagaaaagcaaagtggagaaaatcttttcttcctaaaatgtgttttctactgagtgctttttaaaaatgactttggcccagaagaaaatttttatttttgctggctcattctaaaactgaatcctttgaatagatttggcttatgaaagtgacgtcagctctctttgcttccagaagggcattaataatgggaaacacttacataagtatttgactgaaagtgattttattcacctttgatatattctctgtagtttacttagtgatatcctccgtattttagaggttatcatttttgttaaaatgcaggctttctcatagtctcattttttctcttatttctaataatggtgaggtttttggtttgttttgctttatttgaatttccataacttcttaacagacaaaatgttgtgtaagatcagaatatgaaagtattttgaaaaatctaagaattaaaaacaaataatcaataaccagggtaaatccagtaaagattctctcagtttaagtgttcttttaaagactgcctggggaaaaataagtgaaattagttatataggagactaagggagagccttggtttagcatatcatctgtgtttccctcttgttttcaactaccagaaaaaaaaattcctattttgaaaaatgctttattgtctaagtggataaataatgatatagaaaacattatcttctcagaaacaaagtattattatttaaaacattattaccttcttgtcaggaaatggacttatttttcttat

SEQ ID NO: 113516 - DNA, 1138 bp, Homo sapiens
aagaattgatgaagtgtatggcaatttccctgaaaattactatgttttaaaggattgaaatggaaaagcataggcaatgtttttattaaatcaataccaaaatacgcagtttgaaatataacttagattacataatttctgcaaatgctgtcggctccaaaccagtttactttattgtcagtcaaccccagagtatattaatttctcttttcgggattgcctgttttgtaccatccaagctacttgaaaaatctgattagtctgtgccaggactacggtaggatgacagtgaaaatagcatgctttgcctcagttcagggggaccgtatgaaaatatatcctattttcaaaatgtttctgaaaagacttatttgtggaaatgttccttgctatttaaaactcttcaaaaatgcaggttttacaaaatacaaaaataacctcttgaaagtttgaaaggggagagggggctgtcgtgtgggggcggtctctgctgcccacatcctccctctgttcagtgcgttgtgttcttacgggttccctggagcggatcaccatataattgatgtgcagtctgcattgctgaatcctggactgcaccattctgtgttcaagggaagatgtaatctgatccctctgctgctgagggaggaatctgttcagtcaaggctttgacagggcatagtctcctccaataatcttctccgttctctctcattattccctcgagttcttctcagtcaagctgcatgtatgtatgtgtgtcccgagaagcggtttgatactgagctgcatttgcctttactgtggagttttgttgccggttctgctccctaatcttccttttctgacgtgcctgagcatgtccacattagaatctgtgacatacctacctgaaaaaggtttatattgtcagagactgccaagcagccggacacacgggggcacagaatcactgaaggggaaaaatacagaaaatatgggtttctacggcacattaaaaatgattttttacaaagtaagtaagctgttttcttcctatgctatgtgattgtgtgtgtatgcctgcctgagaaggaaaatctgtatcatcagagatggctgcagtatcctctaattttggtgggtggctggatgtctg

SEQ ID NO: 113517 - DNA, 1017 bp, Homo sapiens
taatatagtgaaatagtaattctaaaaatatagatgacaaacattttcttagctgtttggttgactaacttagctatttggtttcttagctatttggttgaccttctttcctgtgaacttactacttaatattttagtgtaaggcataaaatactttaaaaaaacttatttaacatagataatagactgatctaaagtttaaaatgtttcttgtcacagagataagatagataaatacagacacaaacccataaaaatttttaaatattatattaccaaaaacttaaatctgaataaagtttcaaactatattttagccgagtggtataaatagaaatgcaagtgattttatttgctttgttcatattaagattatgatgacagtaatataatagatcacagttttcattgatagtacgtcagagaatgttgaaaatcatttttattctgttaatttgaaattcagttagaagcttagttgactagttttgcttgacagattcttcacagttcaaattaacatcataagatattagggagaattgtttaaatacttgggaagacaaggtcttcattagtacttataaacattcgcatttctcacttaaaggataaacaataaaaatcattcccaaatgggaaccatggtagatggaggatatgtggtagtagaaagacttctcagtgtagaattttttgtatatcattttgatgtttgaagcatacaaacctggtaataaaacatggatctacaggacagtacccacatacaaacaatatttgtagggaacaggttttcctgtaactcacagccctaagtaggagccatataaccatgggagcagtcctttgaatatacaaagttaagagatattttctttaggttttgagacagtatcccctacttcattaaagttggtctcttcttaactgagtagatttaatttgaaaaggttagttcaactagaaataggacatgatttcagttgaagccaaagtatatactattatagcact

SEQ ID NO: 113518 - DNA, 1054 bp, Homo sapiens
tgagtctgggggccagacagtagaggtgtggggagaaagggctggggtagaacaagatgaaaattttcttagtgagctatacctttttgaataggacaggttctttcagtcacatgttggcaagaatcggtgaattgtgtactcacctgttgccccgagtaacttttcggattgttttttcattaactttttctgggaatatacaatttcaatgaatgttttatacaccatttccctgcgctgtgtattcaggagtacaacttgcttgtatgtatgatttctagtgtgaatgcctgttcaaacagaaagtccccttgtttgtcagtgtttgtaactaaaataaaaagtcaacagtcttcacacccacacagtaaagttctcctagtacagaaagacacataatgccctaagatggaatgatgagtcatgacaggaggtattttgaagaaatttaacaatatgttaaataacattttaactctagtattaaatgtttcagttaggagaaataattgttatcacatgggttatcccctaatgaaccttgtaagaccagtgattagaagtctaatagatgctgttaatcctgcaagttaataatagtcgtatttccatttacatctcaggtccacaggtggtaatttccttcttccctctcaacacttatcaaacttctgttttttaaacacagaagcaagaccatgtcatttatgaactcccagactattaaaataacttctccattttctgactcactccacccaatttggcaattgatatatagtccagtattgctttctatttgtttcttgtctttgtgggttttttttgttttttgagactgagttttgctctttttgcccaggctggagtgcaacggcacgatctcagctcactgcaacctctgccttccgggttcaagtgattctcttgcctcacctgtcttcgtggtttttgttgttgttttgttttgttttgttttgtttttggtagtttttgtttgtttgtttttgagacagagtcttgccttatcacccaggctggagtagagtgc

SEQ ID NO: 113519 - DNA, 1042 bp, Homo sapiens
agaaaatttatggtaatgttgaatgggattttcttaaatttcttctcctttgctagtcttgaacatgaaaattgaaacttatgagctatttaattacatttttatgtgtgggtgatttcatatagttcacttgggaacaatttcagcttaaacagcttttcaataatccatagaaatctctgcgttatcactttagattttaaaatgtcactgttgctactaatatgaacatgtaggggcagtatagtactgtttttgtaaatcttgtctgaatttgtgagttttaaaaatctgtgttactgttagaagtttgttcttctctaagataacataactatatcttgcttttttaaaggatggttggtactgcttcattaagttggaactattctttcagttcatgttcttacatgtgttatacaaaatctcttatattatgaaagctcttggccctgatttatatttgaagtcaaggaatatgtttagttaaaaggaaaaatgcatttttattgtctgacaataaaaatgagaataaatggattcataaaaaccggaaaataccaagatcagtgcagttttgcccttactctgtgtcatcctttcaaaatgaatgtttatgataatttttacagtcttaatttttcaatatgacaagtgaacaaaactgagattaccgaacagtcttatttttaagattctttaattggtacatctttttttcgtgtcaaaatggttaaggttattacaaactttattacaaaatatagtaacttttcccccgacttaatatttaaaagaagacaactgagcagttatctcttccatctatgtattcactttattcaacacctcctatgagccacggactgctttaggcatttagagtacaacagtgaacaaaacatcccagccatcaccctcgtggagttcatatcagaaaagcagagtgcctaagagcgcggattatagggtcagttggacctgggtttaagttctttgctgtaccacttactaagccttatctgtgaagagctaatagtag

SEQ ID NO: 113520 - DNA, 1064 bp, Homo sapiens
ggtgtataattttaatctattatactcctgtagtagactgttgggtttgttagaacttttcagcaaggtctgctaggcttattaaacagtcgtattgcttttgtttcagaaaataacatctctaattatttattctacaataaaattttcattaatatgaagattttatacatacccaaaacaccgaccatcataagctctgttggtaaagcaaatttgggaattattaccctcccaaatttagtaatttaatatcctccaaagtctgagttcaatggctatataatgaatttttatttccctccaatatttaatatcttttacttctctttataaaactattagacatgttaaatatgtaatgtagaaaaggcacttgtctttacagtgtcctaaattattagtaatctcacgggtcagaaataaccacaataaggattttaagcatataattttttaaacaaaactgccactttaattcatttttaatatactgctagtattttcccatggctgtaggtattcaaaagtatataatctgccatataaatatatcgtaatttctcactattgttgatttagattgtgacctgctttgaacatcgttatgcataaatttaaccacatcactgtacacagatttctacaagtagttttattgggtcaaggagtgtgaacttctttagattcttgataaatattattaaattttttcagaaaaaattgtatcagttcaaaaacagcatggggtttctaatgttacaagacattatattttaaagcacatttattcttatggcaaagctttgtggactttacttagctgatactgtatcattgtacttccatgtttattattctaggttttctgtgaactgaattttcattttgagaaaataacgatatatgtttttacttaaggcctcataaggaaaatatatcaattgattaaaaaattatttgtcgctcatagtgattttattttttattcttataggagataatatttgccatagacttgtcacctatattattttcaactgtaattttcttctattcttttc

SEQ ID NO: 113521 - DNA, 1065 bp, Homo sapiens
gcttacctagcaacatttttttctttctagtaataagagaaattatattaagatgcagcttacaactaataattgcatggttttttgttttgctttttttgggacagtgtctcactctgtctcccaggctggagtgtagtggcgccatcttggcttactgcagccttcatctcctgggtgcaagagatcctcccacctcagcctcccaagtagctgggactacaggtgcatgccaccgcatctggctaatttttgtatttttgtagagatggggtttcaccatgttgcccaggctggtcttgaactcctggactcaaatgttttatctgctcgcctcagcctccaaaagtgctgggactacaggcatgaaccaccatgcccggcataataagtgtatgttgaaagaaaatggacttttaatgcataaatttcatctcttgactcattttgtttttgtttggagcacttttaagcatttagaatattctcttaaaattattcttcagtgttactattttagtagaaatttccaaatgacatgcaattgttggtttatttgggacttaaatatatctggtttgactgctggtttatagacaaatattgtatttagagtgcctcctatattcttgagtttgtgtagcataggcatcagcaacacaggagagaatggagtagagctttggtggaaaggatggagcacagataagggacaaggatttatgcatctgagacccaggaactcaggaaatagtgaaatatacaactgacgtttccagtagttgaaaataatttcatagtgattatattctatatcaaattctattccaaatactgtacttaaaattatttttctttaaaataaaaatagaaataaaagtagaatatttgtgtgtcatttgaaaaggtgttactgtcacatcttatgtatcgtcatcttaaatcaggagtccacatgctttttctgcaaagggccagtaaatattttaggctttgtggaccgtgtagttggcctctgttgcactcagctctctctgcctttctatcatgaaagcagccacagac

SEQ ID NO: 113522 - DNA, 2752 bp, Homo sapiens
ctccataaaagcttggaagttaaaagttggaaggagagataagtggagctgactggctgttggaagaagaaaatagaatggaaagagagaatagttgattgagcactgtgaatggatagttcacaatcattatctactatctgttaggaatatggattatagtataaagattaattaacacttgcacaaatggttaatttagggaaatatttgagataatgctggaaagtttagtttggggccactttgaagagagtcttcatctccagactttatcttaggccgtggagaaccattgaaggttcttgaggagtaaacggcacactgcattccctctctgtgttttaggaagatttatctgaccatactgtgaaggagaaattaggcactagggatttgcaatggactggctagttactctcccattttactataattacttcccatcatagattactttataaataaatacactttttacatgtctttaatcagttgggtgactgttatgctttcaagtataatcaataagtttttcagaattaaagattgacaattgaaaactctggtacaaagattaatctgaagtgtgtattaatagctattagagaaccagagtatacagtatttaatgtctagtgagtatgagataaagaatggtgtgtatggaaaagggaaagagagcacacacttgaaaatagtgctcattataatatatctaaggtagaacaaacatacatatgtgtgtgtgttttttttaaaccatacgtaaacacagttcaaaaaattcaaaacaaaatttgtaacagaattcaaaacattcctaaaatattaatgctgacatttggataaggaagacttaatagatactcaagatacaatgtttgttttttttattttatttttgtaagtaaaaatttactttcactttctaggaaacactcttagattagttagttggagaaatattaaaagggaccttacagcacagccctgctttggttgtgttcacattactgactttgtatgagaggttcaccagctgtttgactggcaggagcaggagctttcacttcagtagtttataattcctggctattctaggatagtttgcacttcaccaagcctcagacaggtcaggacatttggtaggggaaggttgaaagacaaaagcagcaggccttgggttctcagccttttaaaaactattattaaatatatatttttaaaatttagtggttagagcttttagtaatgtgcctgtattacatgtagagagtattcgtcaaccaagaggagttttaaaatgtcaaaaccgggaaaacctactctaaaccatggcttggttcctgttgatcttaaaagtgcaaaagagcctctaccacatcaaactgtgatgaagatatttagcattagcatcattgcccaaggcctccctttttgtcgaagacgggtaagtctcacacatttgaaaaatatgaatgtttatttaagtgaagtaccttggcctcttttagtgaaaagatgcctcaaatttcagtttttatttaaaattaaaactatcaatgcattgtgtagccagtaaacacttatataagtgatagttttataatatgatatagagcctagaagatagggttacccagttcacctttttctctcatttatttttcatgaaattagaatcctgcagatttatctaaaattagtaaatgtaaaaaggtatgttttgaaatacgttgacaaatattagcactgtaaatttgtagtttttgcatgaaaggcaaaaagttgatggtattctccttatacatgggaaatacagcatttcattcgttaaaaagtgttccaaatccttaggcttctttggcctcttaagctgtattatttttttaaattgctattccttacattcaaacttaataggaacactactttttgctgttatataaaataaaaatagcatgctattgtgtggcagttacgatatggtttatatatagacaatcctgaactaacaaacattttgtagaacttgtatgatctattggatgtttctcaggattacgtactcctctccctggtcaacaagttttaaccctgttaacatgagcaattttttgtatttcctgagttaatttaaattgccagtttcaaattatttattagagtgatatatttttagatctaacataggtttatgagcctgaaacaaacaaacaaaccactgcttgggattaaatgagtgtatttgtgtatatcaacactgttagggttctatctttttgtgcgtttcttaaagttttattttgtttttaattgacacataattgtattgtactttttcttttagctaaaggggaaatattctattaaatagaataatccataacactggaagaatatttttcctccttaataaagagaatcttctatttgctggaacttaaccttcataaaaacatattttctagttagcttagttctttttgagtagtttccacttctacgccaaacaagtggcagccatgttggaaaacttttacatgaggttaaaatgtaatacagtttaaacatcgaaaacagaatacaaatatccccagcaccctcttgttacttttgtactttactgttttaagaaagtgtttgttttattttgtctgctttcaccttgtcattttagtagcttcttctgaatgaggtcactgctctgatttgagtattttatagaggcctctaatagctttaaagt

SEQ ID NO: 113523 - DNA, 1051 bp, Homo sapiens
tctttgagggcttttaaatgtaaaagtgaaaatttataatattgaatacattatctttattaaccagtggaataaccactgatggctaactaggtctttgattcatttttctaaatgccaaatgaacatgttaaactcgtagaatatattaccctcttctaatttttctgcattggagtatcacattgttaaaattgtatcttctatgtagttcaggaaaagaaattcaggggggttaattatccaattgatttcaaaggtatcactgagacagaatttttttgaaaataatctcagactgcagaaaactgttgtaatattaacaggtagtgttagtaactgagataaggatattccatgggacctactttagcaaaagggattgtctaatgagagaaggacaaaatatgacatatgtttcacaaacaaaacaattagtcttatgttggaaaataaagtgaacatctgaggagatgctaagactagcatgaacctagtattcattctgcaggatagtaagttgtctcatagggctgtagacatggtatcttggatatcattctcactttttttctactaccagtttataggtttccaacactctcatattatctcttctctctcctaaccttagatctctcgaggtttttttggtgatgattattccattttcaatcatttacttttttgtttaaaaacatttaaaatttatggttaaatatccataacatgaaatttaatattttaaccatgtttaagtatacaattcagtggcactaaatatatttacattgttatacaaccattaccactatccatcttcagaatattttcattttctcctactgaaactctgtgccaactaaacactaactctcatttccccctctccctgtctcagacaaccatgattctgttttctatctatgcaaatttaagtattccaagtaccttatataagtggatcatacactatccttttttgactgacttattttacttagtatagtatcttcaaggttcatgcatgttgtagcatatgtcagaattt

SEQ ID NO: 113524 - DNA, 2090 bp, Homo sapiens
atttaggaagtaacacaactaagttaggatgtaacattctgtggaattggatagatgttctgttacaaagcacaggtttaggaattagacataccagggttaaaatctcaactctactacctggcagctgtgttaccttgggcaaatttgtaagcctttctgagccttagttttgtctgtaacaagtagacaaggataatgatacctcagggtttcggcgtggtgattaagtgatacaaagcatgatctagtagaaactcttgtcagtgtttaatctcttccccttatcattgttccagtctgaaacaatgcgtacgtattttctaagccctatagctgcagacttcctttatatctcttactgatctctgatagtctccttagacttatttatctttctatcccaagatctttgtattacaggcatactaaagaatagtaggaattgaattttatttctttgtttctaatttttcttgatagccagttagtgttttacttactgtaaagaatgaaaacttaggctctcagcttaatttaaacctcagctacaaaaaataacattgatatttttcagaaaaattatttttttgagtatgtaatattgacagcgtaaaaggccagtggtatcaactgtcagcccgtccaagaattaagttctaaatatgtattttctattgcttaatcttatacttgttttctgtactttaattctatacttaaattctgtgctgaagtactttcagttaatattaataaatctcacatacttgcatagcacattactgaaaattatataaatgaagtatggtactatgtttatctttctcaaaatatattgatttttatttataattgcatcagaaactcaacagtataggaaataatgtccccctcctattttacctatttaaagcaccagcactccttcagattttttatgtttccataagtgtagctttttatttttcataagataaatttttataatttgtcaaactgtcaatttggttgagccttctgcattatagcttaattttttaaagctgtgtagcaaaaaaacacacaattacttactgtattttaaaagaatattagtattatttccttagtcctaattattagtataattagtattatgactccctggcctgcaatactcttaagaatttttataagagaaagatattattggtaagtaatgtttaatttattttaactgaaagtttaaactgttatgtttaaactgtttatggacttaagtactgacattaaagaagttattgtctttcttagacttaaattttattttgagaattatggaaaattaggttactttaaatcacttactctgtcattacatgaggctttttgcatgactgaaatacctgtaattactgtgtcatttttgtcatagttgacttaaaggtgtaactataataatcacgaactaaattcttggtgagcagctgtgtaaggccattttaacagctggggtaacccagctcagcctgtaagagttaagcttaatcatgagacaggttatgttaagtcattgaagacttcatactgggcatttctgaaatacttagaaaattcagtgggatagttggatttttgttttatcttaagtactttttaaaatgcttaatgaaaggatgaggaaaagtattttaacaactaaagttcttaggcacaaataatagaaataaaatccaaagtttactcattaaaaaaaaaaagtcaaatatactctatatgctagtgtttagaccactacagtaggtaggagaggaaaaaaatatataaacacacacacatattattatagtataatatggaatcagaaaaatcctgaggttatttttcttgaatttcatcttttaaaaatttttttaaaaatcattatgcctgtagcttctttccaataaaaatgttttcttattactatacaaaaacatttagagcacaggcatacatgccttttgtaaaagaaggcagacacaaaagaattgaaacaatgcattttatttggatatattttataaactagctatattgttcactaaactataataaaggaaagctca

SEQ ID NO: 113525 - DNA, 1060 bp, Homo sapiens
acagagctagcatttgaaaatccccccgtagtttgaccttagagatcacactgtaccactattcatgagaattaatgcatttgttatagctatactgttgaggacatgatctactgagtcactcaggaagtcctatgtgggaaattccttttatgtaatattaggaaagatgcatgggtgtgcataagtgtgtgtgtgtgacatattttctcttcccctgaggactcagtacatcgtcaattttatcacagggcagcagagacaacaaactacacaccagtgttttgcaaacttcagtttacatgaaaatcagttgagaacttattaaaaatgcacatcccgaccctggagtttagttaagtagctcttgagagtaacccagaaatctgttatttttaaaaagcactccagatgcttctgatgcagctggtccaaggtaacactttgaaaaatactggtgcagacacttaagagtggacaacctatatcctattactagctttctccaactcatcataactcaatccttacctcttctcatgaccttgccctcatattctactccagtattgtccctggttctgattttcatgtacactttgtcactttattatatgtatttttcctacatatagaccacttcaaatctcaaattccttgtggaagttggatactcatttctttaaaatgaggtcaattcatttggcagtttaataactaaaatcagtacaccaaactcataaggaaaagtccgtaggtcactggctaaagcacttaaagtgctatgcatatgccgcacttccactccaaacaacccaattcccattaatggatcagcactggaggcaaactatcgtaattttgcaatgggtgataaacatttctacagaagtgccaaagaacatcttcccttgcatttatttcagtttcagttattcagttcaagaataatagtccattcttcttccctacatgatgtctagtgaaaaataggtggtctatgggtcaaaccaacccacggaagtgcttttgcaaaatctggacaccaatatattttaaa

SEQ ID NO: 113526 - DNA, 1617 bp, Homo sapiens
gagtttagaggcgtaagaccctttcttgtctataaattctgaacaatagaggaatcaggtaataggatcattaaccaatcagggtatctggtccgccattctccaaccacctcctaggaccagagctgctgagcagctttgtaggataatgtggctaacattggaaatataacagggctctaagttacactctgttgtagagttctagagaatgatagcttcttcagaaagtccctggcctagtctacctgcaagacaagcaacttaagttcaaagtctgtttggtatatacatgtccagagagcaaaaaatgctatttaaggcagtcatcttgaataacatccactagtaaacatggcccaatgaatagccatgtcccctacctttgtgaaggaggaaaaatgaaacattgactcagcctaatttagcccaattttaaacatgtggggaggataatggaaatgggagaaatggggacaatgggtgagatgggttttcccctaacatattagagtgataagaacttttcacatctgagtttgaattctgattataccacttactgtataaccatgagtatataatctcagtgaacctattactttatctgtaaaataaagactcatgcctacctctcaaggtttttgtaaggattaagtgaaataatttatgtaaaacaagtagcatagtgcctgggacactcagatattttgcagatatcggccttgtgacctcattttttccgtctcctgtgccttaccccaaatcccacaaaataaacttcattccccgcagcggttgtcaatctctatatatatgttttacaaccttcagcattcagtcatcatatcaccctctagtgtaaaaagtagagaaataaattcttttaaaaaggtacataggaggattagaagagtactgtaataagctaggcccatcttcaataaaaatagacataaattttgaagtcgatgctacccacagatctccctagttgataaaatatgtaccctttcctttcattagaatttaagtcaatttctctagactttcttctaatctttaactaaagcttctgtatatttaaatgctttaatgaatcttccatatggatgccaaaatgaattttagctcatggttaatttctaattaatgcctgttaatatagttttaaatgtatttgttaatattattttaaacaataatagctctaaatgttggtgataaactgtatctcattcactgcaggtaatgacagttactattattaattatttaagagacggggccttgctgtgtttcccaggctgtccttgaacccctgggcataagagatcctcctgtgtagctgggactacaggcgtggaccaccgtgcccagctcaaaaagtattttaattatgaggtttcattgtagactaaagaataatcttcacaccaaatggaccattttaaaattgttttatagcattccattgattagttctttatacagatgataaacttcactgaagtatacacaaatatcacaaatagttatcttcaaaatgcttccaaagaaaattgtttcatatgtgtattataatgatctgatccatttttaatgttgtttttgttg

SEQ ID NO: 113527 - DNA, 1805 bp, Homo sapiens
aaattttttttgatacacttcttaaaattttgtggaagttttatataggatatagtctatgaactactgatgtaaaattaaaattgttttatttgcttgaaatattatgttttattggtcaaaggaattaaactataaatcttcatgctaaaaattattaaaagggattagtgttgtttactatggtttttgtgcatgtctttataaagtcttataacttttaaaattgaaatgttctatattgtttactaaagaacattttaatgccttggtggcatcaatacttttttgcaatcattaatgatatttagaaagtagacatataacatgaaagtagaacataatatagattgtacaaatcttgttttttaccctattttcccctgcagaatgtgaaaacctttgcatcttctgatagtctagccaaggtccaagaagtagcaagctggcttttggaaatgaatcaggaactgctctctgtgggcagcaaaagacgacgaactggaggctctctgagaggtaacccttcctcaagccaggtagatgaagaacagatgaatcgtgtggtagaggaggaacagcaacagcaactcagacaacaagaggaggagcacactgcaaggaatggtgaagttgttggagtagaacctagacctggaggccaaaatgattcccagcaaggacagttggaagaaaacaataatagatttatttcggtagatgaggactcctcaggaaaccaagaagaacaagaggaagatgaagaacatgctggtgaacaagatgaggaggatgaggaggaggaggagatggaccaggagagtgacgattttgatcagtctgatgatagtagcagagaagatgaacatacacatactaacagtgtcacgaactccagtagtattgtggacctgcccgttcaccaactctcctccccattctatacaaaaacaacaaaagtgagtatattcaatatattgttaacctgagaaactttacatatctattttaattgtaatgaaactttcctcacagtctttgtattactaaaaattaatcttaagatgtgtaataataaaatgaactagttttttgtcttacagaaggtaatggaaagtattacaagtagaaatactgataatgggacaatctgagtacaaatggagggaaagtaattgagcctattactatgaaaaattattaacatcaaattttcgtctaaaccttgcgtcccgggcagggattagtagcttgtgtggggtgtagaggtttcgggtgaaacatgatttgtgtaaatcaagtaatgaagaaactttttatttacaaaatgcagctgctagagtgggctattcacaagtgtcactctaaggcataaattactcagaagttgcctcaaattagttctagttatttatcatttgagaattagaaataatgaatattcatgtagagtagacttacaagttaaactatgttttggaaaggaacattttaacttgaatatacttgttttatagacattaacataatgtctgtggtagttcatcctcttactcctacttgcttatttcttacattttacagtgattttaggccataaacaatatacaaactgatttaacatcgtatcgtttaacctaacttgacttggaatgaagtatcttacacacttggattaataataattgaaatgctaaatcatgttttacatctgcttgtaaaaccttactttctaaaatgtgtttggccctaatttacctagcctatctgcaagtcagattttatttagctggcatgatctaaga

SEQ ID NO: 113528 - DNA, 1050 bp, Homo sapiens
ttagttataatgctgttgaccatgagttcgatgctaatgaatcaatgtatattaaagatatatttaggcagaaacacgcataaaaaaggttatgcattgatcagttggcaacagtgttgtgaccagaggcttgtgagaactgtatttcccctaggagcaatggctcagtatttgttaattcagtggttgcagcaattttatagaacacaattactgtgaatgggaatcaactgtatttgattaacggtggtgatttatagggactttagataccagaaatgtttcataattccctttctctgaaatcactgttttaatatgtttaaatgcatgcatgcagagttgtgatgttaaacataattttactgtgggttctggtcaaaaaagatgaaatgtcattggttaacttgaaagagacattattctaaacattatcctccagaaaattgacatgtacaggaagcatattgaatgctcagcaaataatttgttttagagtaataatctttgagtattgtagtgattcgagttttggaaaagaaggcagtatcagtgttagagaataatattctttcaggattttatgtagttactttaaggtgcatgaaaggagactcagttgggtgttaaattcttgtccctgctttacttgaaactagtaatcttgagaaatttactaaatcattttgagccttgattaccttgcctgcaaagtgaggaacattttcaatttaaaattctatttcttttattagtattcttcctgaccttgaatcatttctattcccatcatgtccagttgccaagaaaaccatgcaacttaatgttgtttgttagccatcagattttattttactgaactcaagttcagtcacatcagttaccgataaaataataagttctatattaatatttgatatatcttgacattttgtattatggtaggaagaaataaaagaccttcctcaaattttaggatatgggcttctgtttgttgatgtttgtgttttatgatacactgttgtaaatcatactaaaggttttctctga

SEQ ID NO: 113529 - DNA, 1061 bp, Homo sapiens
actgtcacctgtaccttgttttctcttgatacagcaagatactaagtatgctggaagccatgctggaagacagcttggcttagtggaaggagcagaaattttggctcagacatatctgagtttcaaacttggtagtgaatcttactaactataaatctttgggcaagcaaccttaatccaagcctgtttcctattttgtaaaccaggaataatgatttcagagttcgggattaaatgaatatgcagtcactaatatattgttggtatgtagtaggcattctgtaaatgtttgctgattaaatgaatgcagtggaatcatctttactaatgtgaatacataactggcttcatacctacaagattttctgctaatattttagttctgtatcttgagtagctaaattggtgttgtagaaaaaagaaggcatattttatggctttgttgttgttgttgttgttgttattgaatgagtactctaattttgcctgtgcaagaggaataacttcagaatgacaaggaaatccagaaaaccagaatgaaggaaaccttttcagaaacttgaagatctaagaaatatcccttcaacaaatctgaaatcagtgcttttgaagaacagtgaccatggttactatcttcctagttctctgaacggctgagtttagtggtaaaatcctgaagcagtcctcattgtaataagaaattcaagttgtggccaaccaacaatgctttctcttagttttaggttaaatgtacaacacagcattatttgtattgaaagtgagggtgttttgaagtttgagaatgtcagctactgccttgttaggtgtgtccagaaatactgttctataacctgaaaaactttttaaatttcttgtgtgaaaaattacagattacataagatattgtttactgatttatccactatgatagtatagctttatttgtacatacagaaggtctttataagaaaatcatgatatttcttaccattaaaaaaaaaaaagttctgtctgtactaaaaaaagaaagaaaaaagaacagttttaagtgggttataatg

SEQ ID NO: 113530 - DNA, 1914 bp, Homo sapiens
ttttattattcaacaggtaaaaagtttatagactctcttgacttccaagaaaaaaacccttctgtgaacactgatgaacataagcatgttaatatcatttaggattcggtcaaggatgtgtctgaatttcatatatattgaaaatgtttaatgatgggccaccagcaaattaatcatggatatgttttactggagtgccgtctatgacagcttcttttcatgatgggttcagcaaataggaaacgaggaagtaaacaccagagtgttgactactttttataaaagttagaaagataactatgattggtctgtgattagacagtattttatgtaaaataaatgggcagcgtgaagttctagcctcagtggagctgccttttctaaagagccctggatcgagcattaaaagagttggatttaatttggctctgccattaatctatttgataaccttgatcaaattatgtatgaacattttaaagtcccttaaacatgctcttaaaatgtccattaaaaagatttcaatttacccttaccagtgggaagtattagaatacttgaccttgaagctatagaagttagagttaggaagaaggatgaagtttcttaaagaatcaagttgtaggtgatgttaaaacctctcctttcactttttatgtctttttttgggggggtgggtgggtaacatgtttttgctaagaatactgttttatctctttgatatccaatatttcctaagtaggatagtaattctggaaattatcctagtggttaatagaatagacctgggattaaaatctggtgctgccaattttttctagactttctaacaaagataatgtcattagggagtttattcagtacctaggatattttttagtaaacacgttttaagaaggttggccattatgttattggtgctttcttcctgtatggcctattagataagcgctgtgcagtcatctttgttgcctaggcaaaatggtttgtaggttcattgattgaactcttactttggaccaagtgctgtactaagcactttggttttttttttttttttttttttttttttttttaaagacagagtcttgctgtgtcacccaggttggagtacagtggcgcgatcttggctcactgcaacctctgcctcctaggttcaagtgattatcctgcctcagcctcccaagtagctgggattacaggcacctgccaccacacccagctaatttttttgtatgtttaatagagatggggttctgccatgttgcccaggctgatctctaactcctggcctcaagtgatctgccccgcttggcctcccaaggtgttgggattacaggtgtgagccactgtgcctggcctgtactaagcacttctatgttaattatgtcatttatgagaaagactctaatgattatttttaaagatgagagaactgaagctcagagaggttctacaactcctaaaaatcacacaactgggaaatagcagaaccaatgtcaaaactttaggcatcagcctgctgctcaaaggaagtgctcattgaagcgcttcggattttgaaatttctgataagtataatgcaaatattttttaaaaatcccaaatctgaaacatttctggttccaagcatttcagataagagatactcagtttgtatttgtactttcaattaagctgtgagtgtagagatgaagccaaatttcatctgaagatgtaatataaatgattacctaatttttttagtcttgaataagaaatgatttgttcacctcttactcagcaataattcgtaggaaaaattattcatataaagcatatttgtactatttggagtaatgttttccaaagtgtggttcagggctgggcacggtggctcacattggtaatcctagcgctttgggaggtagaggc

SEQ ID NO: 113531 - DNA, 1305 bp, Homo sapiens
catagatttatttcaaataaaaatatgcaatgaaaatggatgcattatgactaagaccaaatgattaaaaataaaagaccaattaaagatgttcttagcagttttcttgaccttgcagtagatatccaatatcattttgtcatcatcagattgtgtagcaatggaaatgcactgcagtaattgattttgtaataggatcaggtgatttactagctgcactgacaaccacttgcttgcttgctctgagctgtggagcactctaatggatgttgtgatttcagcctggagtttatgtgagactgccggccacttaaagcagcagcacttattttaaagattagattagtttttctttcttgttttcttcgtttcaagttttgtgagtagcctcagtaactttatggttaagttgtatgccttcatgaaattttagagattatatattatttcattcatcaattcatagtctttctgctccatattcctagctaaatatcaacatattctggtattgaccatgagagcatatctctaaaatatgagagttattggtaactatgctgtgttatctaaatgaagtggaatattcctcacattcgtagatttcattagcttcagactctagctgtaattagaatgatggtaaggttcttgatctcttgagttgtactgcagttgttttgcatccttttttggtcttttactttcttagtggtttcatgggtaaggcaccatttaggaaatatgagttgtattacttctaagggatactgatgaggatatataaagctattttaaagtagtgtttaaggatatagcaaattaaaaatctaatatcaagtattataaatttcaaagtgattattttaaaataatttttgttttccttttctatgccttttaaacaaataattggttcaaatatagaagtgtaggaatattgctaactgtaaaatagaactactgtcatagaaactcagatgctgtcaaagactttgattacttaaaagttttgctgatggtgttagattagaaaagaaactctcttccactcccttcctcaccaatacctctacctcatgtaaagtgttttatacagactccaccacataaaaatactgaattctttatcattccctgtttctgttcttgccatgatagagacaccatttctctcaaccacatctaaaaacatttacaaaaattaaataagattaacaatttactgtagtagaaacggggcataaaattgtcatcacatgtggtattcaaatcaccatgttaagagaactttcctttttgatg

SEQ ID NO: 113532 - DNA, 1083 bp, Homo sapiens
cttgtttgttaccatagcctttatctaccaaaggatttttaaaaaattgaatgtgaagtgcatgcctgtttttagatattctggaaattgatttaagtataacatgaatatcaaaagggcagtgcaaggtgaaggcagaggcagtgctggatctttttagctttaaaccagggaagaaattgagcatgttacatacacaaagaagaaacctttcagtgtcacagacaatgggaagttttaaaatacgtattttaattcaaggtgtttattatttagttttagactatcttccccaaaaagggtgctcttacattagcaatcattggtctatgaatgttcatttaagttacagtaatttgaagtatgattatttgtgaagactataaagtatttgtattaatgcgaccctcccttgtcctggaaattgtaatgtggattaattacattgtataaacaaatacctttgtgcattattggcaaaggtagaatgcttaagtataaaaggtatagtatagctagcatacttaatattgttgcttatgttttcagggtggtttgtggtttttaaaataatcttttaaataaaatgcagacaagtaagtgggagaaaattcagtatcaaaacaatgaggtttttgatggctttttacttgtggtcagtacctacctatatagccatatgtccttttttctcattaaaactcttctaacatttatgatagcaggagcctccttggattatccagcttgtttattacatcattatctgcaccagtatttttgctatagatttttattgttcattacttctcaagtctacataaagtatccagagggaatttttgcttgtatattttattcagttaccctcctaccctcttccatcagtcctcaaagatttgtattagctactgtctacattttgtttatttaaaaaatacttaggcctatatttttgtattgtagattgaataataagattgaaaacaattctgtaaattaatctatagtatagaagtaaaatttgttgattattcttactgtgagtatttggcaggcttcttgaattgtagagtcataaaa

SEQ ID NO: 113533 - DNA, 1043 bp, Homo sapiens
tctcaggaactcccagggttcatattttgaaaattgctggagtcatctctcagaggctatgtgtgacaaatggtgtttttaaatgaaacaataatttttaaaatatagtgtcaattggctaagtttttatttgatactttttttttcttttttttttttgagacagggtcttgctctgtcgtccaagctggagtgcggtcacagctcactgcagcctccacctcctgggctcaagtgatcttcccactttagcttcccaagtaggaagtaggtgggactacaggcaagtgccaccatgcctcagtaatttttgtatgttttgtggagacagggtttaccatgttgcccaggctgctctcatactcctgggctcaagcagtctacttgcacccaactcagcatcccagagttctgggagccggattcttatttgatacatttttacctttaggggaactataaaaattagcttatgcttatttatgcaaataaatttgagcattgaggaaggatgtctcttgttcagggttgtgtttgtagatttcacatcttttagactaccatttaagagaagtgatcaccttgtatcttaaggaaatgaaaatcatttgatagaaatggattgttaaatatttttaaaacaagttttgacagttacttgcaattaaaggggaaagcaactttaaaatgcattagttaattgaagaaatactcaagatccttaattgttgttagtgagcaagtattaatgttctttcctctttgaaaacgtatctgtacctagacaaagttaattataaactttttcataaacaatattatgcttctttttcttctaatttttaaaccttatctttgttggtttgccttccagctccatctatctgcaacctaagaatcaacaatactatacatcaaattagctgatgtggaaggaaaatgataaataatgaaaatacgtcatattgcttatactctaagttataattaatataagatccaagggatattggtgtgggggacgaggaggaaggaacattgca

SEQ ID NO: 113534 - DNA, 1180 bp, Homo sapiens
gctgttgccaagttgaaagtcagtgtttagttttttttaaaaagggctatttagtgtggaattcctaaatattatagttccctcttctgtcctttcagagctattgcaccctgttaaattttttttgcattcagttcaaccagtgtttgaaaattaccaatagacttaaagtacttctctgaagttagaagagctcctatgtctgatgctatattgctagtatttctattcaggttggaatttggaatagtcattatcaaaagttatttgtaggcaaaagaaaacaaaaagaaaaaagttatctgtaggaaatattggagactggggtacaaggtaagtgacacagtgaagaagcacagacaatttcagaatatgagacacctaacatggtttctgcaaggtattggcgtggaaaaaaaaaaaaaagggggggggggcttagagagttactctccagtaaaagagatataagaagcagtactatagttatatacaaagggtagttctttggattctgtttagatcaaattaactagaaaatacatttttaaaataagatggggaatttgaatattgactggtattacttaatatcgtggaaatatacttattttgaatgtgtatagtgactttgtgagtatgaaaggcagtggccaaattatttagtgatacataatgatgtatatggatgagggaagtaatgacgtgatgtctggaatttactttaaaataccttggaaaaaatgaataaaagatagataaagcaatattgctaatatttcagtacctgttaaatataggtgacagtatatatatagaggttcattatactcctttctccacgttttgaaaaatttcatttaaaaattcaaaaaaattctaaaaaatattttttcttttagaaactaacacatgctgaaaaaattcaaattttgttcactgaccacgtttttgctgccaccactctttcaacatttaaaaaatgttcttaaatctttaaaaattcgatttacattttcattaagaaaatgaggcatttgctggccatttcatccttcctcttgtattttttctccttacctgctgccaccgtttactagaaaaatatttctcttgttttttctgtaccttctccttgaaatataaaagttcagtgaaggcaggagagattttagcccgt

SEQ ID NO: 113535 - DNA, 1147 bp, Homo sapiens
gacttgatgcaaaggatttgtactataagtttattataaaattattaaccgctagcttttgtaaatagtaaaattgatttgcccattatacatttctttttgttatgcataaaatattttaatttttaagtaccaacataggatggatttttaaatgcttcctcatgttaattttttaataaacatagaatgaatactgtgtgaaatattttcccactttattggctctgttttaactcagtagactctatagttagattgtctaggtgccacttaaaagatggtaactagataccagaatgtgttacattatatgttgattgtcaggaagaactgaatgcatgaatgcttccctaagacattgttagcatgccgtggtcttgatctataattttttgtctaagttgtgatagagctcattctttacatggtctagtaaattcagccaatgtctttataattcattagcatctctatatattacctataaaatttaaattataaggctatgaaaaaattgtttcatatgtataatataccaaagttttagcatatggtttggattttaaactgttttactgaaacaaattaccgtcattaaatggaattcttaggtagacattacagagtaggtgtaactctgaagttgaaaatggtttcatcttcttttttaaaaaattttattatatagggaatctcaaccaccagcaggattttaaaaaggctatctaaatatttggtaagtaaatattctccatgttaaatattttgcgtgttacttaagtttacacatatgctacatgaatgacatttacaatagtgagtgtaaattatagttataattaatattttaaattttacttggttactagaatttttgtctccttaaacctattccaatccttttctctcttgttctttatgttgtgtccagagattctttcagtgtacagccttattattaagagttcaaggaaagaaatggttttagtgagcaggaatgctaatactttatgaataaaacaggatttcccctacttgagattttgtagtatttcttttttgtgaaaacactaatacagatttgttctttagccatccattgcttgactcctccttgtatttaggtcctgtttgctgcaacatg

SEQ ID NO: 113536 - DNA, 1054 bp, Homo sapiens
tgaagttattgaaaataagagcttttgggaattcaggtagttcaggagtgacttttctaaaaaacagaactgagcaccatacactacttcttatagccttttaattactgccaattgcctagaataaagttcaaattcgagggcaacacaaacatggccctttgtgaactgacagacatttcctaataattccttacatacatgatacccttgagccttacagaattaagaatttctgaatttaccttggtgtttgatgcatctgtgtttctatacgtgctgtttatttacctaaaatagactattctctatttagcctcaaaagtctcatggaaggttttaaaaaatcctgtctaagctctgttaattatattctttatactattatatttagtagttaatattataaactaccttacagtaatttttacagatacctggcttactccctaaattgagttgcttgagggcaggaattgtgtattaatctttgctgtattttctttgccttgcttactgtagttgattggtgctaattgaataaatgaacatttatgcttttctttttgagaatattatatgggtagttcctttagttgtttaatagaagatagcacagacttctatacagattggtttttatgggaaaacacaagagaataattaattaaaacataatttcatctagaaatttctgcagttggagcgaatattttttaagttattaacttacctagagtggaagattgaatttttgaatgatagtgttttagttattaaagtaaatggcatgtaagagaacttttaagttcatgtggcaaaacagggaaaaattgcaaagttagagtctgtaaggtttctgatgtttcatagactaacaaaaggttgctttattagcagcattaatgaacgaatcgctttattggcctaggcatactggtagcattgtcgttccaaagagctgagagttcttatttcaattcatgattatgttagacaagtgaagtgaaagccgttgaccttctcttaaggagaaaatagaaagtttttacaa

SEQ ID NO: 113537 - DNA, 1024 bp, Homo sapiens
aacattttagcatccttacatagactctccaatatcctggtcttatttccctgatctcctcaaatctactgatttttctcttcctcagacaagtgatttttcacttatttggtaaaatcctaattctggattaactcggttatcagattctttcattcctataccacctgaatgctgcagtaaaaagttacctcaaaggacatttaaaaaaaattataaattcatgattgttgatcacagaccctaatactgcatgggaatccactgcattatccttgtcagctagtttcctcatctttaccatgactgtttcaatcatctgttctcctcagacctccaacatgccctttctctttctacagaaaacttttcctgttactttccagtgaaaaccggagtacttggtgcaacccttagttgcccactatcttttctatattttctttcttcttaatgttaaaatagaggtagtcttgctttctatctaaggctttctccctttctctgcagtaccttatgctgttgatgatttcccttttttttgtatgtttaacttttctttacacttgattcttctcgtcagtatttaaacacgcttaattcctgctattaaaaaaataaaaacaataagcattaatgggtaccacattactgacctttctgttctctttcctagccaaatgctagaaattattgtttccatttctcacctttgactcacctgtttagtttattcattccactgtaatagtatttgcttatgataccaacaacctctctgttagtaaattaagtgaatatttttaaacttggtcttatttgatctctcacttggtgtgctagggcttctataaaataccacagactgggtggcttaaacaacagaaattaattttctcactatgtggaggctggatgtcaaagatcaaggtgttggcaggtttgttttcttctgaggcctctctccttggcttgcagagggtgccttcttgctgtgtcctcacttggtttttcctctgtttgc

SEQ ID NO: 113538 - DNA, 1052 bp, Homo sapiens
tttatgatttttgttaccatcgtgaatggcaaatttttataaaaatactttttgttactggtagctacaaaccaattagtataagagacaaattgctaagaagcaagttgctgtttgtatcttgattttgtatctctcaatcttgctgaattcttagttgtttttgtttgtttgtttgaggtggtgtgtcttactctgacacctaggctggagtgcagtggtgtggtcactgctcaccacagccttgactgcctgggttcaagcaattctcccacctcagcttcccaagtagctgggaccacaggtgcatgtcaccacacccaaccaattttaaaattatttgtagagatgaggtcttgctatgttgcccaggctgctctcgaactcctgggattaagcgatcctcttgccttggcttcccagagtgctgagattacaggcatgagccattgcacctggcctaaactcttacttctaatgatagattctcttggatacctcatgcagataatcatataagtagtgaataaagatggtttttgttgctttctaagcctatgtctttatatttttcttctgttattgacctatgtaggaccactttactaaaattgcagcttttcctgggccttggctttatgtgtgtgttaatgtatggagtagaaaggggtatctcagaactgaagtctcccactaagggccaaaagtctcatttctagtccctacatatgagtcaaaggataaatataggttaagactagcaacccattgtagggaagaaacattgccaacttgtagcctaatatatatatttttaatatgttactgttttttccatgttactggcacacacttaaagatttctgtttcatggtggctaaaggattaatttaaaataattttttttttcctttttgagttgagtttcactctgttgcccaggctgaagtggagtggggtgatctcagctcactgcaacctctgtctcccggtttcaagcgattcttctgcctcagcctcctgagtagttgggactacaggtgtgtgccacc

SEQ ID NO: 113539 - DNA, 1026 bp, Homo sapiens
ttcttttttttttttgcagtggcacgatcatgagtcactgcaagcctcaatctcctgggctcaggtgatcctcctacctcagcctgttaagtagctgggactgcaggtgcacaccaccatgcctggctaatttttcatattgtttgtagaggcgaggtttcatcatgttgtccaggctagtctcgaactcctggactcaagccatcctgtgttggcctcccaaggtgttgggattacaagcgtgagccactgcctggccccagactttaacttttattgatgattttgtcatggtgattttctgtttccatcatttcttctgtatttacattagtggtttttggtaaggaagaactttcccttgttatgtatttatttaatgttttatgtatatcagaatggactcgcggattttttttcccctcttatatcagatggacttacagattcttctatggatttcatctattatcatcattatttattttggtgctctaattatcccaggtttggccccatgaagcctcttcaaggaggttcctggtccttttgacatgtctccatcattttgtgagggcttaactttttttttttctttttgagtcagggtcctgctgtgtcactcaggctggagtgcgcagtggtatgatcatagctcactgcaacctggatttcctgggctcaagtgatccccctgccttagcctccggagtagctaggactacaggccaggtatgtgccaccacacccagctagttttcgccttttttttttttctccaatagagacagagtcttgctgtgttgcccaagctagtcttaaactcctggcctcaagcagtcctcccaccttggtctcccaaagtgctgggattataggcatggaccaccacacctggtcagaaggcttaactttctagtagcgcaaaatgttctagtctcttcttgtgcttttctctgccccagccatgaaatcagccatttcaccaaggaatattgattccttttactggaaatcggaattctt

SEQ ID NO: 113540 - DNA, 1003 bp, Homo sapiens
ccccacccctgagaatctcagaatttcttgttgagaattcatattacagtatgagttgtaggaaacatgaaggaaagatttcccttctagtcagttcttatatttatcacttgtttcatgctccttggtgtgtatagtgttttcaggtgcaggaaatgctctgggaagaatgttgcttcttagaacgtaagagaaagggaaccccaagggaagactcaaatgaagtccttaaaaagcccacttagcttcttctgagacagcattgtccaatggaatgcaagcgagatagttaaatttaaattttctggtagctatgttaataaagcaaaaaaagaaccagccaacattaattttaataatatattttatttaacacaatatatcccaaatgttattttaacatgtaatcaatatgaaaaccatgaagactttgatatttaaaattcttattttaatactaaatctttgaaatcagtgtatattttatacttacaagacatctgaatttggacttagtcacatttcaagtaagtgctcattagttagtgactaccttagtggacagtgtagatgtagattatgaactttttaggaaaagacaatagcatgtggactccacaagaaattgtctttaacaactgtttgactctcataggttagggctttagtgtttcagaatggtttctatggttgagatgtaaagttttttatttttataaaggtaagtacatttttatacattttcattatacaagtaatgtcattgttgaagagttggaaaagtctgggtaaaagacaacaaattgtcctcacttcctcagtccagagataaccaatggtaaactttattgaatttcctctttgggaatgttgctttttaaaatcaaagagaaaatagatttcttttttgtcataattccttcctgttcacattcagacatacattattattgacaattcttttacctctttgtttaaatttatgtattctttttctcgggct

SEQ ID NO: 113541 - DNA, 1060 bp, Homo sapiens
atgcacagttcacaatagtgtttgtgctcctatgagactctaatgccacagctgatctgacaggaggcggagctcaggcgataatactccacctgcagctcacctcctgctgtgcggccgggtttctaacaggccacggaccagtaccagttgtggacccctgctctacagcaaattaacacaaatttagcagcttatcttacagtttctattggtcaggaatttgggtatggtttagctgggtctttcctcaggttctcactaggctgaaattaaggaatcagccggggctcctatctcttctgaggctctgggttctcctccaggctcaccggttgtgggaagagttcaattccttgttcttgtagatctgatgtccctgtttgcttgctggctgtcagccagggaccactttgagctccttagaggcccacccccgccaccatgttcttgccatgtggccaagttattatgttgtgtatgactaaggaagaaaaatgctggattaaaatataagacaaattcttactttatgtatgactaaggaagaaaaaatgttgaattaaaacatgatacaacacattattgcttggacagtgccttgcaaaaaaaaaaaaaaaagagagttgtggttattcttccagccacaatatctgcttcagaaatgtcaaatttattttctactgttgtgtttgtgttcttttttgtaaacaacttttttgtttcaatgctgaatcatagtattttacaggacatttaaaattaagaagtaagcgtgacttcttattgtactactaaatgtacagaatttagtaataattatggtgatataaactgccattacccaatttgcaagtgtacagggaatgacagctatgttgtgactgccatgggcaaatggtgatttgtaaagcattgttgcttttttccccccattttaagttgattttattgagatataatttatatacagtaaactacaagacatttctgtcaccctcaaaagattcctcatgccccttcacagttaaatccttccctgcaccctcgcttcaggcaa

SEQ ID NO: 113542 - DNA, 1051 bp, Homo sapiens
aataaaatagtaggctgggtgcagtggctcatggctgtaatcccagcacattgggagtccaaggcgggtggatcacttgaggccaggagttccagaccagcctggctggcatggtgaaaccctgtctctactaaaaatagaaaaattagctgggtgtggtggtgcgtgcctgtaatcccagctactctggaggctgaggcaggagaattgcttgaacccgggtggtggaggttgcattgagctgagattgcaccattgcactccagcctgggcgacacagcgagactttgtcttgaagaaaaaaagaaaaaaataagtattgagtgctgaatgatgttctataaaagattaaaaatgcctaagtggaactaaattctggtaaatagaatttaggggttggggtagaaagaatcagataagtacttcaagattttcagactttaagtctaaggctcattagtatcctctgacataatctactacaggtttcctttcttagaagtgaatgttaatatggcaccactatacaaataatatcgatatcggtatttgagtgtttattatgtgacaggcactgttctgtgtccttcatgtgtattacctcatccagtcctcacgatagctctatgaggtaagtgttgttaatatccctattttatagctgaaaatttggcatagagaagttaaacatggtcaaggtcccacctttagttaatagtggagctgggattgtttccaggcagtctggctctagagcctgggaccttaatctttattctatactgtctgtgtcatctgtaaatttatttcttatatattatttatagaacagtgcctggcacacaataagagccatagaagtactggctattttcattggcatttaattatatatgaggttggcagagcatgcattattattccatttgtttatttatactattaattagatagtagactttattcagatttctgtgtttcctttttttaaatagtcgagtttaccgaagttcttagaaactggatgattgcctccaataatgtggccatg

SEQ ID NO: 113543 - DNA, 1025 bp, Homo sapiens
ggggtttcaccttgttagccaggatggtctcgatctcctgacctcatgatccacccgcctcggcctcccaaagtgctgggattacaggcgtgagccaccgcgcccggccggtaatgattgattttttacccccagttatttttaaagaattggcaaggaaggagaggggtatgaatctagaagataagaatgtagattttgtaattcatgatcattattattaccatgtattgaatgtttactgtatgtcaggaactgtcctaaggatttttacaaccgttatttaacttagtcctcacagcagttcatatgaaatagctactgatgttttatggcaaaggaaacaaattcagagaaatttccaagaacacatcggaattttgacttgcagaactgggattcaaatctagatctgtcatactccatggtctatgcttttaatcatgcatgctgtctcttaagtttttattgaaaatggaaagttgtactgacataggaggggaaaatgatagaaaatcatcctattggaaggcagattaacagactcgtgaagaagcaattcccagttttatgtcattatacaaaataattgtgaaattgaagtccgtcatttgaattgatttgcattaaccctcattttttagtcttgctcttggaatcatcatcaggacaggtgtcccagatatgttagcagtagaataaatttatctaggcaaaatctgtctaagattatggagaaaactgattttatatgtgaaatgtgttgttgagtgagagttaaatcttttgaaggagattatttcaggatgagcctcaaatacattatttaggatttgaaaacctatggtttagcagaaaatctgagaatcaacatttgttagtctcttgggtataaattgcttaagtcagtgggtatctgattattctttctttctttctttatttatttatttatttatttttgagacagagtctcactctgtagcccaggctggagtgcagtggtgtgatcttggctcactgca

SEQ ID NO: 113544 - DNA, 2003 bp, Homo sapiens
gtcagatgataaatgctgggtcattagtggtagagctcaacagtgattaggagcaggaacttgagccatcattgtttgggttcaagtacaggctaccacacttactggttgtatgacctttggcaagttgtttaacctccctcggtttctttatctgtaaggaggggaaaatgatatctacccacctcatggttacttctttgttagtattaaacgaagtaaatgagaagctcgaaacagtgcttagtatataacaatctataacagggtccccaggggacatttggcactatttggtgatgtttctgatggtcatttgggggagtggggagagggaagggtgctactggtatctcgtgggtagaggttaggtataaacaaggtataggacagcatccacaacaaaaaaattacctggtccagaatgccagccctgccaagcaacattgggaaacccagcttagttcctttgtataaggtactttgccagttagattctgtatacatgctgattattgataaagatgagtcacagacatggataggcttcatttaacattcattttaaaagacagacatgtaagaaggttagtaggtttcatttctttttaaggttacagggaaagtactccaaaattaatctaaaagtccttacacttttttcagaaactgagaaaaggttccagatgaattttactaatttaatttttttatgacgagctattcatgtaaaagtgtattatgaatagagggcttatgagatatgagtgccgtagtgtgtattcataaagtcaaacgtacacttaaaaaacaagtatcaaggtaaatggaatgatctattgggggaaaccttggagctctctctctttccatatgttttattactcaccaagtcaagggctctttaacttaggatcttgtttttctgtgtacacttttcctgtttactgtttaaaattggacccttactaaaaatacagaaaattagctgggcatggtggcgtgcacctgtaatttcagctactggggaggctgaggtagggagaatcgcttgaaccagggagacggaggttgcagtgagctgagatcgcgccattgcactccagcctgggtgacagggcgagactcagtctcaaaaaaaaaaaaaaaaaaaaaaaaaaattggacccttaccattccttgtccatttcaggagcctcttaattgccttgcttctgttctttctctgtattcccacttgaattgactcttctttgctgggatccctttgggatcccttctagtccagatccaatctacccttcagagctccttccaccgtccccttatttctgggagagaattcagccttaataccctaaggatggaatttgaatgtactgacttttctgctatttacagggttgtgtattatctttggaagaattgggaagtcatatcattttctgtatgttgtggttcaggtgacttgtttcacttgtatccaaacactggttgtgtgtccatgtatatacagcatgtatgtactttaatgtctatttgtatgtgtgtgtacatgtatattctttcatgtatatttgtctctacaccttgctgtttcctctgcttggaatattcttttcttttcatctgggaaacatttgtctcttcagaccctacttaaatattgatctcctaggaagtgtgtcctgattaatataactagaattagttatttttttccactggttacccacagtatctctgtggcttttatagcacttaacatccttatttgtatttttcttttctactgatctctcagttctttgagggcaagagtcttgtcttagtcaacacctgctcccccaagtacctaacattcctgccacattgtagacatatagtatgttaacaaatgaatgggagagacaaaaaactggaaagcttttaaataagttctatgggggttggcaggaggggagaccacacattatcttgtcacctttgtttccaagtgctta

SEQ ID NO: 113545 - DNA, 1911 bp, Homo sapiens
ccaaggtgtagggaggggggtcccagccgcagcgacacatgcgggagccgggagcgggggcggcgccgagcggagccggccgggtccctcgccttgccgccgactcggccacccgcccggggccgtagcatcttgccccggagtgtatgaaccggggccccaaccaagctcggcaaccaccccccggccgggggggcggggaccccgatgtgaagcggcggctggggcggcggagagaacaggaccgacgccgccgtcctttcctcaccttccccctcccctcagccccctccgggggtcttctcccttggccagtcgccggccccccggctccttggctggactccgggaggagttcctagagcccccctcccccgccccagtcccgagggcggcggggccgggggggacccggggggccggccgcagcctccacccagaggaaactttacaaaaacaaaatccggagtctcccaaacctgactgtcccgggagaagtggccctggacgggcagaagccgcagcctgaaaagacccaggaagaggaaaagaggaggtaagcggggccgccgcctcccctcccctggcagcgcggaagagacccgggttgccgcctggtttagcgacacgagcaccgcttcttcctcagtaccgcgccggagccttccgcagctgccgcttcagtccgaaggaggaagggaaccaacccactttctcggcgccgcggctcttttctaaaagtgtgagtggccccgggagagggaattgagggggagaaagtgggaggatgccggcgcttcctcctggagttttgctgatgttctccagtagtgttgggagtctatcaatgagggagtctagctttattcacggaggggggaaggtgttagggaggcctgtattttgtaactttttagctctttgtacgagtaatgcaagtatgcaggtttctgtcggaggagtcttttctccaaagtgaatactcgcacctttctggccagcagttggcaaagggaaattgaggaagccagagcatatgtgcgcacagaggccatctgtatctgtaaccttttcctggtactgtgggtgtgtgcggtgtactttttgtttcgggggtactctcatataggttcccgaatgagaactacttaacctgtggacccctgaaagtaaaattccttttttaaaaaacaacaacaaacctgttttgagagaggttcatttcagtacctattggtacaggagttaaccttctcagttactgggtccaatttcatgtgtgtcaggaggacactgtaacagatgtcagttactcaggaacttgagttgttaggaatcacaacttacttggggaagagcatttatcacattaatcattttataaaagttgtgattttttccctttcacccccccctttttttttttagagtaacaaattacagcacttttttatttggtttgaggctttgcttttttgaattatctttatttctgtatcaatttaggatacatctttgatatttaagtcaggaatgattttttccttccattattttaaagctgaagtttataaaacctttgacttgtattttaggtatcttgtcagagtaccaaattaaaggtttatgaaagtaattaatatttcatatacagaccttaagggttaaacatagagcagaattttatgtaagaagacatagacagtagtatactgagaattgtggtccgtctagacaactgtgggctcgttctgtctgaagccactgctgagagatactttgtgggaatgaatgtaagcctggggttatctctcttttcgaagttctccattcaggatcttgattagattaatttaaaactttctcaaacttaacaatgtttggtccttttttttaaagtaatgagttctg

SEQ ID NO: 113546 - DNA, 1026 bp, Homo sapiens
tcgtctcaaaaaaacaaaaacaaaaacaaaaacaaaaattagctgggcatgatggtgcgtgcctgtagtcccagctgctcaggagactgagacaggagaatctcttgaactcgggaagtggaggttgcagtgagccgagatcgtgccactgcactccagcctgggcaacagaacgagactctatctcaaaaaaaaaaaagttaaattaaattaaaattaaaaattaaaaataagtaaataaataaagtaattgtccttggatactaggggagaaatgcttgagggatgttttccctctggtgggaaattgaaaagtgctcctcttccaggactcaaagttggccatcaccccacttgtgttgttatctcatcaggcctttgggggctcagctggcactgttgagggactgctaaaaatgcccgataggtcaaagcaggtcctgcggctggaagactcacactttaaaggagataagacattcattcatagggagcagtcagataatacagaaggcagcctctgatcaagcttccccaatgtgtggttgagagcggggtgctcaggtgctcaggagagagagaggtcagtgcaaacagctcagccccgctaatctcaacatttgcccttcagacctctttctcagggataataaggttttctcttattttcttctcctcctcctctttcttctagaatttatttgccatatgtttcagagaaaaactcagaatattgaggctggataagagcttaaagtgacttttctcgaagtgtggtcgtcagactccctgcttgagaattatctggagtgttcattaaaactgctgattcctgggccaaaccctgggctactgaattagactctggggcagggggtgcactgggactccgcatttttaagaagtttcatagatgctttttatgcacactttagcatgagaactgttgatgtggaagtaatttagcttattttgccaatggggaaactgaggcccagagaaatgaaactgctttcccaaagccac

SEQ ID NO: 113547 - DNA, 1033 bp, Homo sapiens
ttcaactcatggcccacagtgactctcagatatttatgccaaaattgcatacaattgttttctgaatcataacttgtctatttttctgcctatgtgtgctactttcagtttgtttctcatcaacattttgactctcagaagagcctccatttgcccctttctctctttaggtatctaagatctttgaacacctgggcctttacatttgatccaaccctatcaaataatgaacttctcagagaggcatctggggtcctggaacttcatgttgatgaagtcatattatataatatgataaaaatattctcatgcagtattttaaataatttcaaattctagaagaagcaaatttcagcgacatgtcattgagtttttatttggtaaagctataattgtgcagtgtacaaagcactttttaaaaagatagtttattctgtcagggtatatgaagttagtatacagccagaacagccaagcctcaattcttgtaccttgtgtctttttattactgtttaatcaatagatatcatatgtttatgacagtttcaagaattgtttttaaacccaaacttaattttatgtttcagactattgttaaaaaaacaaaacaaaaaccaaaaaaaccctcactaatttgccctaattggatagggcaatcagaacaaaatctgactttcgaatatttaaaagatatgtaagtttgattgcattttcgtacattttaagcaaactaggttaacaacaacatagcctagtcaaacttctcaggaaacttgttttaataaatatgtaaaaatacccattcatgactcttgacccaatggtgtgactcctccctctgggaagggctttgttacccaatgcaagaccacagcctggatccaccttgatgtaggtggctcctggataacccacatcaaacaaatgtgataaagatgagtaaaactggtcttgggaaaataatttcatagtttttttttctcctagttatgctgtataatacaggagaaccaaaagctgtaaaattatttta

SEQ ID NO: 113548 - DNA, 1795 bp, Homo sapiens
aaaaataacgagtggtgtaatagaaaagaactcatgaccataggaagatcagctgttttcccactttacccaattctttcctaccgtgcaatctgatggaaatcattctgcagacacgttggaacctcaggcgaagccatcttattccactgtctatcctgagacatgcagattctagcttttggagcactggggtgctgcagggacagaataaccaagcagtgatgaattgtgtcctttccagtgtcagaggcatgttgaagttttgcatctgtgttattagtgctttttccatttcaagagccttgacatcattaatcttttcatcactatcactccttggtgaggccatttttgtgcaagtaaccacgcagatcagagaactatggtatttaactgtatcaggtttgtggatagaaaatacgatttcagtaactaacaatgagtttgcttttattctgtcctagccgactttgaatgtttacctaccttgaaggaagagaaggaatcaaatcacaacccaaggtacttctcatttctaccacagattacatgtatatggcggggggcggggggattgggaaccagggtggaacactttttgcttacctcctccgtgcctataattcgtatgagatcatttacgcggctggatatgtgcatagtgtggagaagaggaagtgtgttacagaaaatagaaggccacaaagtaaatatcctaggactctttatctttagaaataaatgagtattgacattttcttgcccttctaaagagacactgttgcttcagcttctgttttagtcataaagctttccaattatgacaaactgtaggtttgtttaccttggataaatagatgtttggtaaggaaaacagatggaggcgacagtcttaaagtgggtaactgtaaactagagtgagaaaataaatgggaatttttaaaaaatgttccattttaccactaggtggctctggttgatagaaaaattttagtgctttggggtttgggtgtatagtttagcattccacaatctcattttaaattatattatcttttgtgaggatagaaatgaccacatttggggtgttttgattagagaactgttttgtcaggacatgggaagtgttctaaggaaaaaggttggatggttcagaaggttggggactggctctgcagagctctgctgtgaccttggaggtactgagttgttggcagcaaacactcatggacacccggagagaagaaaacttgagcctatgcctgagatatcacacttctgttggaataaatggaataaaccttcaggcaggataaatcctctccctccatgttcaccagaagtctggtgccagtcagtcacttgtcaccaggcaacccctgaagcctgagcatcgcgagggaatactgattattaggcaatggttgggggcagtcagatgtttatcttcggacccttttcctgcgtctcccccctaaacctcacttaagaattcaccatcccaaatctctcctcacatcacaccaccacagtcttactcagacaaacctcagctctgatgccaaagtctatacctattgtagatttaggtcaatatcaccaccctaggcattttcatgttaagattattgccagttcaggaaggattctatcctatttaaaagagattccaggtcatgcttggtggcgcttgcctgtagtcctagttacttgagaggctgatgtgagaggattgcttgagcccaggatttcaggattgtagtgagctatgattgtaccactgcattccagc

SEQ ID NO: 113549 - DNA, 1034 bp, Homo sapiens
gacataaacttaaaaaaaaaaaaaggaaacgggaaattatccgaagagctaccaaagagctatgtgttagagggtagccctctaacacatcaagtaaggtctttcatctacttttattgcaccttgttacttttacagattttttttttgcattgattgttactaatgaagatttgtttgaaaaagtaatatgattggaaccaatcaaaggtattggaaaaaacaatattgaatctcattattatgggctaaaagcaacaactgatttacacccttgccagttgctacaacaagcacaagcaccttcagctgcctctcttgttgacttgcctttgggcaaatacactggctgcccattgtttctgtcaatgaacaccgactgcttctagtgtagggcagtatttaccaagcaaaaggaaagttctcaagctacagttctttagatagaatgagggacatcagccccaacctaacagatgtgacaacttcctggaggtcagcagccagcacccagccaccccactccatcaatttctcttcccctgggtgttctccatgtggtcccccaggcatctgaggtagaaaacaaagtggaaggcaaatcattccagctgaaaagatgtctggttaaattgagtttagtgttcagagtgggtttggaagttgatgtgttgttttatgcccagtgttttggagctggaagggaacttgaagatgatgcagctcaaaccatattgggcacacaggtgaagaaacagaggtggaagaagggagatgtctgggtcttgctgctagtcagctcttctggcttctactccagagttctttgagctcctccaccccccaccaccactgcccccctccccccaccgccgccccggaaccaatcactgtctctgccaagagctctggaacctttcgtagtaggacatcagggaagaaaagcctagccatcctccttccacctcttctattgcacaacactgccacaggtgcctcaaacactcccttaatactaattcatcttgcctgaa

SEQ ID NO: 113550 - DNA, 1037 bp, Homo sapiens
aacgactcttgctctgtcgcccaggctggactgcaatggtgggatctcggctcactgcaacctccacctctcaggtacaagtgattcttctgcctcagccttccgagtagctgggattacaggtaccccgcatcatgcccggctaatttttgtatttttgtagagatggggttttactatattggccaggctggtcttgaactcctgacctcaggtgatccgcccaccttgtcctcccaaagtgctgggattacaggtatgagccactgcacccggccctgagccttccttttatcgactgtaaagttatctcattccttggcctgcctttgggtctgtgccaaaatgcagcgatggtggctgactctcttgctatggcaagctctgaattaatatccattgcttggtttcatttgcttgtgctcatttagtcttcatttatttccaccatgtgcatgaatgtgtgtgtgagagacagctgtgtgtgtatctgagtgcatgtgcacatctgtgtgtattgggaatggcaggatcggagtgtgaagaggaacgcggagaaggctgtctgcacccactggaagatcctatcatttatctggatttgttcccttggagtccctcttcttttatggcccatggagtggtggtggggagggggcggggggaagggagggaggataggatgagagtcacttctgtagcacagacagttgattgtaaaagtcacactcctttgtgtaaagtaataaagagtccctagacatggttcccagtgtcccttcctgcccttctgaacatgatgaagcaccatacttctttcctgctttcagacagccaatggcaggctccaaagtggcattacccctgcctgtgtgccactcactctgaggttcccctgtgccccacatctgggactgaggccctgacttcctgccaccagtgcatcgggatttaatctgaggctgggtggctatttgcctaaattaatggttgctaaaattaaaacagaggtaaatagccctttacctaccacacag

SEQ ID NO: 113551 - DNA, 1058 bp, Homo sapiens
ttgaaaaatcttctataagagttttttgtctattctcccctttcagtcgtttatttatatcagtctgactcatggatatttattttatacttaagggtaaatccagtagtactttattactttgttgctcaaattgtttcagctgtggccactgggagctcttttagttggttcctgtattcctttgacatactcctgtcattgtgagacttttgttcttgttttgtttgtttgtttgtttttgagcacttttaactttctggtattacaaaatgctctaggctcaccttgtgtattacctaccacaggcctagaatcagccttttctccaaggagcactgattccttctattggagaatagtattagaaaccaatatctgggcactatgtttgctcattgctgttggaatgtcattgcttctaggccctcccagtggacagagtaaggaaatatatgtgtgtacactaactcatgtatatacacatatctataaatatttctatatgtaactatatatatgttaagctatattttcagtttatttcctgtgagcatttttcattaaaaaaattacctgtgaatattgaaggggtttattttacatggttttgggaatttagtaacaaaaagtaactctccaattatccattgctaagggacaaaagcagttcagataataccaaataacaggtaacctgtttgatctttgaatgaaatcaattacaacaacagagatgaccacctctcttggttcttggttggcttcactgctaatgttctggaactgagccatctatgaagaatgaggccacagcatactgaataatttagagttaatttacagctagttttcttttcagagagtaatttagttttgagagtcttatcattttacttctcattggtttctctgtaacacagtctgagtggggaaatttaaaaagacttctgcagacagtcagttttgttacctaagagttggttatggtggtagagataggcatagttgaaaatctgttaggttaacttttaaattgtttcttattatgcatataa

SEQ ID NO: 113552 - DNA, 1097 bp, Homo sapiens
aaagatattttcctcttcagacctcagggctattttgggacctacaaataagtatgaccaccagctgcttcaattcttgctattcaaaaggttaatagtctttaagttaaatataatgtgatattattcaacagaaagaatatgtttttcctttttaacctcgaacaaattctgtatctgatgtttaaaaagtatttttaaaagttgtggtaatataaaaatatgtggaaattgtggctgaagcattaaaaataacttgcaaaataaatatattctaatggtaaagaaaaaactgatcttaccattctgttcctgtttatccatgaatgagaaaagatgggcatattccagtagatttcatcaaaagtgaaagaaatagagccacttaaaaaaatctttagaataataactgatctctggaatatcaagtctaaagaaactaagcaaaatcactttaaaacaagcccaagttttgctactttttgctctcagtgttttctatttacctccttttattgtccttgactcaccagtcagaagttcttgatgctgtatatcattatttatagtacttttcaaacttttttttactaaagtacctttagaaagagtaataaccctttagacatttctttgaagactcatattttatcataaaaattcagtaaatttctttgaagacttatgtgtgttgttttattcaagtgaattttgctttagattctatatttagtgaaaaataatgtaaattcatattccagtatgatgtgccatgtttatcttgtctgctatggttgtatctgccctcctgtgtcttgggcataccacttcagaccacctgttatatgagtacctgaatttgaaaagctcccattatgatttatgttcaacaacactcctgccacagatcctttatcattagacttctgaatctttaaactcagtgttgtcatggagactctgaaggggttttagggatcctggcaaatctaatacctcctgccctctctttcctgggtgctaagaagaccttaaatgcatttaagagtggtagagtataaaactctccctcactaaaatttgggaaatgatcttac

SEQ ID NO: 113553 - DNA, 1024 bp, Homo sapiens
ttagctatacccaaatatgcagcattcatggggaacattcttattaaatttaaaaaaagaacaggtacgtgagtataagctgaatttatcctccaatttaaaagcattatatgagtttacagttaacaaaagtacagtttaggaatattttatgactttaaaattccctactcattagtattctactaatttaaacctgcatgtttaaaacttatgggtcagatttgttaccagaagaacagtagcctaataggcaacattcattgagggcctattaagtgtcaggcgttgtattaggttttacatatatcatctcgtttaatgctacaataaccctgttgatgtttttctcccattttatagattaggcaactaaaacttggaaaggtcaacatagcttttaaggagcagagctatgatttgagcctcaatgaaagaaaagatgagtaaatttaggaaactgtatagaaaaaaactatttaaaagtagaagcaagaaattggggaaacaagcaaattaggtatatttttataacagtgacaacaaaaaaagcaaagaaattgcattagatatttattagtttatcctgagattgtagtcttaattcttctgtctgtccttcaatatagtaacactagaacatatacctatttctaatatttaaggaaaatatacagatatttgcactcttcttttgtgtaactcagacatctaaaaagtgaaacgagtacagatcctgcatccaaggtcgtattgtttaatagaggaaatttaaatgaaataaaatgcagaataataattcctttagcgtggtacaagtcaagcattgtggcagttcagaggagtagcagccaggaatatcagtgaaggtgccatttattctgaagtcttatagcgtgggtacaatttgaactacttgaacaaaagcacagataaagaacattgagaaatacgtatggagaagagtaagtttgatttcatagggtatctgaagaaacatgattggtagaaagaaaacaggtca

SEQ ID NO: 113554 - DNA, 1027 bp, Homo sapiens
ttactggttttctttttgaattggatcatgtaatatgtactctttggttctggtctcatttgctgaacattatgtctgtgaagttttttccatttttttttttaagacagagtttcgctgttgttgcccaggccggagtgcagtggcacgatcttggctcactgcagcctccgcctcccaggttcaagtgattctcctgcctcagcctcccaagtaaatgggattacaggcatgcgccaccacgcctggctatttttgtatttttagtggagacggagtttctccatgttggtcaggctggtcttgaactcccgacctcaggtgatcttcccaccttggcctcccaaagtgctgggattacaggtgtgagccaccacgcctggcctccattttttttttttttttttttttttttttttttttgtagcagtagtttgttgtgttctattgctgtgtggtagttcattgtatgactccaccacagtttatttgatagacatttggattgtttccaggttttggccattataggtaaagctgctatgaatattcttgtacttgccttttaatggacatgtgtatttatatttcttgggtatatttcctaggagtggaattgctgggttataggatagtcgtatgtttaactcaaatagtactgccaaatagttttccaaagtgatttttaccaacttttacttgtaccagcaatgtataagagtctagttgctctacatactggctactacttggttttgtcagtctttctagtttccgccttctaatgggtgtataatggtatctggtggttttaatctgcatgacaagttgagctgaatgactttgtagctccttcccaatgctaaggttttctgtgtgttttacaaagtggagccgggcgtggtggcttttgcctgtaatcccagcactttgggaggccgaggcatgcagatcatctgaggatgggagttcaagaccaacttgaccaatatggtgaaaccccgtggtgtttcaccacatggtggca

SEQ ID NO: 113555 - DNA, 1072 bp, Homo sapiens
tgaaggtacttatttttaatgatcttccagctgggcttttcttgcattttttggtttgtactctgtatattccttactttttgtatcaaactcatcaccttccctttaaagcatgtcttttttcccacagtttttggtctcttactcagaaactctatttctactaaaggtgtcgttttataaattttaaaacagatctctccgacttgtaaattctatctagttgccctgtttaaagtcactggatatcagaagttaattatatggttagtttcccatctaggcatgctctaatataattaagatggggttgtaagtataataagggtggaaatacttataatttcatgactttgtcactcaaaaaataaaaatcactcatcctaagtaatatgaaaatacattcttagatataatggtcagttttacatataagaaaataatctttcatcattccaacttctagtctccagaagagttctatttaaaaattgggatgaaggagaaagacattaatacttgaagtaccagatgttgtagtgtactttttgtatgttgtctatgaagtaagaataattatcccttaacattatcatgttacagtgaagaatctcagcaattcagactatttgcctggggttatgcagccattaagtgactgaagccaggattcaaactcaggtatatctgagctgacttcagagcccacattgcatccattatatcaaactgcctcatcaaatgattgctaggtattatttttttgaaataatggatgcatttgaaatcagagccagttctcagacattttcactgatgtccaaagtgctaaacaattttgtttgccttctgaaactccaccctgtatctctcagtccaaaaagcatactaaaatgcaacaaaagagtcacagagattaccttgaacctaccgtaatataaatactttacacactgaagttgataagtgttttgctttcaactactattagtaacaaatcactttacacacatctcactgccagtgtgatgaaatcccaggtttgagaactacaggataaaggagccattcc

SEQ ID NO: 113556 - DNA, 1019 bp, Homo sapiens
tgattgaagtcagagaagccctcttgaaatggaagggaaattaacatggcaagtgaatgatttgtttatactgtgcattagccaggctcattgtgattatattaggtgtcagtcagcttttacatattagacatggaaattgaatgatcttaattttgctcattaaaataatttttctgatgtatcagtaagattaaaatttttacattgaattttaatatctgcctgctgcttaattccagaatgatgaaagtgtattgtatgtgatgtacacaataccacttaatacaaatcttgctgtatttgctgctgattatacatcattatagaatgccatgatagcataagggaataccgcatagcagagagaaaaataatctaagatttgattaaaaggatacaattattctgaactgttacgtcatgtgggatttttttacaaagttttttcttttatttaaatcttgctaaggatttgaagcattcattaccatctggacttggtctctcagaaacccaaattacatctcatggctttgacaataccaaagagggtgttattgaagcaggagcatttcaaggtaagagcccatatatttgtaaagatggctgggatagaggatgggagaagttcaccaaatgctacctttattaataaagcacaagaatggagccctttcattctgtgataaaacattgattataaatgtattcctttttctcttcaatttaagtaatagaattatttgagtagtctcctttatataaacagatcaatgtacatgatatcactggttattatttaagaataggttataaaatactgaaataaaaacaaaaattatgtcagaaatgtagatgtagattattttaacttgtaaccatgaaatttataaatcaatgttgatttttataaatacatatttcttatttcaaagcaaatagaaaaatgaactttttacgttatataggaggtctccaagaccacactcattaaaagtttgtattttaattactct

SEQ ID NO: 113557 - DNA, 1310 bp, Homo sapiens
cagcttaaaaacaacaaatattgaaatcggcctagcaccaaagatgttgcagaatcagtaatagtggaaatcatgaataaatcaaagctcacaagagtgaagtgtacttggtaccagggttttgttttaatgggggtataaatctttgcacatatgtattcatctttctagatttttgttgttgagatgaaatagatttaattccccaaatttagccagttagtaagatcctgtattattgagagatcctgtattattatttattttttagttggtattggtgaatgattttggtaacagttgtttaaagggttaaagtattaaagatacagaaaagtgataattacctttgaaggtaaatcaaaaaagctgaagtcccagttacagccacactacatcatttgctattttactttgaaaatttacatatcatttgttatatatattatacacatcccatgtagtgctatggtttatttcttatgcaagattaagaaactgtaataactagaacaatagagctcctattcctggggtcaagacatggaagtacagtggtcttcttttattttacactttattttagaatcccttatgccttggacggtagagatacagtctttgtttaaaatggtgattgaactggataacctattaaaatgccttccaactcagcaagtaacttgtagattagtgatttctatattgaatttaataatggagatattatggtgttcagaacatctgagtctctaataagaaactattttaacttctctgggcttcattaatcttaccgtttaatgtgacagtttagttgatttccatcatcccttctggttttaaattttataatttaacagatttaaagagaaaaatatctctcattttgaaagttaacaacaatctatttagtttaggtctattgcatgtttgaattttaatgtgagatccagttcaagttaaggtatattttatactgttagaactcgtgacagtttctatgtcagaatttagtacatctggaatatgaccagttattactaatagtaaagaaagtagacatgtctttcttattaggaaatttaattatgtacttaatgcatgtattttttccagagaactggggaagagtgtaattgaaataaaagtacattatagacattaaaatattctcagctaaacatggaaggactttaatattttttcagttttagaaacctattactccctttttttgtttaatgctagacattagcaacaatgttgggtagtcagtgtttctttctttctttctttttttttttaat

SEQ ID NO: 113558 - DNA, 1051 bp, Homo sapiens
ttacatgcctttgaatttttacttgaagagcttttcctttatatatgagagtagcaagttatgaaatatttactgaagctttaaatcatccagctatgggactgtattcacattctgttaactgattttggaaatagtagagtccagttaaaatcctggttagatgtcatctaccagatttcattatatagttacatattctgtttagttttgatagtttgatgaaaagtttatataaaaactgagcctggtagcatacatttattattagtccttccctgaaagaaaacaaatatattaattccaacttttaatcctagtgtttgaatattttaaaggaaatatcagtaaccctatattcaaaatgtacagtatgtggaggaggaaaaggattttcacagttaaaatgtctaccttttcaggttccccagcaccgccactgccatctgttatgtctcctagcagggttgcagctagtcgactggctcagcaaggaagtgatttaattgttcctgcaggtattcactgcactgattggataaagcacttattgctactgctgaagctacactaatttactcagtttcataatcacttgctttatattcttaggtgtgtgtgattctgacttttttggtggctgccttattaacaataaaggaaataatttttctaactgtatcctatctttgtggcttttcagaataattcggctgtatctcacacctgaaacttaatccattttaaaattaaaacattataaaatttgatttgctttaaatcattctttctttgctctggaaattgtaggtttactgtttgatcctaaactctcatctttgcagctctgccttctattttcagttaaaggaaaaacaaccttcaacaattaggttggttgtttttaagaatggattaaatgaaaaaggtcttgtcttcttacttttagctttaacttacaaatagtttgcagattgcaacacaatactgttaatttaccagttatacccaatgaaaaatacttgggaaaatcagtatctttacattcaat

SEQ ID NO: 113559 - DNA, 1032 bp, Homo sapiens
tagaagtattctaagaggtaatttgttattgtgatttgctgaactcttaatgaagatggaattctgagattctcttttaagatatttcatatcactttaagaaggccctcttaaagtgatatgacttctgttaactttactttttatgaattatcatatgtatataaatctttcatatttttcttcctgtttgttaatattttattttgccttttactccttaatcaatatcaagggttactgttgtaatatgttctgttaactttttctaaaagttgtaaaaatgttgttttctgtattattctatttccagtaacatttatgtagacttcagtgaagtgtgtaacttagcttgtggaaatttggtgccaaaaatcttaagctgtcctgcttttcattttagtttttacatgcattgattggtaatctttttatgtggtcctttatctgccaatatttgcaacaaatcaaggtctataatattttgaagactgagtacagagtggagttacatggacatctcttaaatggaaaatggttttagcataataaggataattttactttcctgctattttctgaattattgaatactttgtcacctaagaaacgtaattacagctattgcaatagcattaaatttgtatcttctaatattttagttaatttaatattacattatttgtttcaactgaaattgaaaagtgttttgtaacaaactggagaattatcaaattaaatgatacatcttagaatatgtgatcggttttttatttggttaggtgcatcctgattaatctgttaattagtaaaacttgcactggaaagctttcactgctgaatatacagagctagagttagttcttgccatatctgaaggagtcatgtgtaatgtttactgcaccaagatgcagtttattcaaaaagaatgaactaaagctggtgttgagtgatccttcctcagttgtgtgcctaaatagagctgagcttgggagtcagctagtcaccaagtttacaaagaaatatgtattg

SEQ ID NO: 113560 - DNA, 1049 bp, Homo sapiens
aaaataagaacccattggttctctatggttcacattttatcagtaggccttatacctgagtattagtgccctaagtataatgtggtataagatctcagattataaaatacagtatataggttcatttggaacttttgaacaaaattataaatcaagttacatgtacttggtggctggtttcttaagggaaacccttacacagcctctgtgtgtactttaaaaaacaacaacagtaatgttgtttttgttttatgtcatcccgtaatttatccttttttattcaaattacaatgtatgatcttattcattaagcttagcttggggtttgacttttctgttgtttatgaaatagctgtggaattggctagttgttaacactaaaaccttgcctactgatggataatagtcaaaaagaatccaaggttaaaagtttttcagtagctgaatttccttctctgtcaaagccagaatttactgacttttagggcaagggtcatctatttgatcagtgcaaaaagtggtaatttaggcaaatgcccgagtggccttttaatcctccctattatgcattgtgtacaagtatttcctagccctctggtgcttcatgtatagaaaatcttgtaacagcccattcaacacttctccacagcagcaccaacaagggagtcaattgtggtcgagacttttcagatgtggacacctgttctctagaagttttacataagccataaagtaaccgtcactaactttgttgatacggactcagttcagacgggcaaccttgaagtgaagttgctttttgaaaacttagtgagcttctcttcttggtggtaatgagcactgttagagaagctattatggaaagttttactttggtaccacctacaaactctgaatgtaaaattaagaaatataaggtcagtattataactttgaatatgtttgagttaatcactgttgtttagaaatgcgctccaaggctattgaaggatatttgtccttagattaaatcaccatgtattactatttatttagttctacttttttct

SEQ ID NO: 113561 - DNA, 1101 bp, Homo sapiens
tttaaacacacatggaagaggaaaaatttgcttgtggtttgcattgcctcctttctctctttagaaatgaggcagaaattaactgtctttatataaaccatacaaccaaaaagaattgtgagttgtaggttgatttttaaactagactcatccaacccatacctgtttggaataaatcaaggtaattgtaattgttgaagagtgagtagggatgaaagcctgagtgggtgctggggagaagcacacctagctaaccaattcatatagttttttttttttaccagttatgctaagattccggcatgacaatttttgtaagggagggatattttgtatacagtattgaaaagctttccaggaaggatagctttataattatgaattactgttcttatagacttggttcttttttggcaatcataaggtacttacatattttctaaccctttttggtcagaagctatcaacttactatagagtaggattagagtttcttattctgctgtatatgttggaggtgagggaattgttcctttcactttgaatgaaaagaattcactttaaaaatttactttttaatcattattgctgtgatgtatctgttctaatggttgatatacatgtgtgctcttcagatccacatttcacttattttgccagccttgggtattatccaacttgatttgccaggtttgtgataaaggtgagtttttaagtgatcaatgtgatacttgaacagatcactaataactgcattggttgtgctgttgatgatggtactgggtgcttatggctgtgactttgctatacttttttagttcttagtagttatggttccttcagtttgcttaaaagtaaaacctttaattagcatttctgagtaaagtctcagaagacactagcagtgtttaagaatttgactttgcaatgttctttttttttttttttttttgagacgagtctcgctctgtcgcccaggctggagtgcagtggcgcaatctcggctcactgcaacctccgcctcccgggttcaagcaattctctgcctcagcctcctgagtggctgggattacaggcgcccaccacaacgcccagctaagt

SEQ ID NO: 113562 - DNA, 1023 bp, Homo sapiens
aattcatttagttgaaaaagaatgttcatattgaggattgttcattatgttttgattggatgagtcaacacactattcttacgtaaatttgtatctgatttagaagatacactaccaaagttaagcttgtactacattacagtaaccaatactaatagaaaagtgagataaattatctgttttgttataagccaaattgagaacaattcgctttttagaaaaaaaaatagcttcttatatttgaggattaaattttatacttcatttccatttggagtttttttttttcttttgtttttacattataattacaaaattgtgaatcctcaaaggtcccctctataccagggaactgatctgatgtgcatgtatactttaaaaggctttacacatcagtcttctaacaattactgggagaatgtttcttgtgtatatgggtattgtatcattttgttgtgaaaactagaattcaatcctaaaaagaaccatctttgatttcccatggattaagttgcattgtggggtggggggccagtttaaatacaacaaatacactgagcctgagcctttgttagtgggctactgagtcttcctcagctacaaaaggagctgtctctgtgtttagtcagctacttgggggtggggaaacaaactgacttatattgacatttgcagggctagttaaaaatttttggatgcccttcccactttctttctgactctctaactttctagactattaacagcagctccctgcaaggccagtacatgaattaaatcccatactctgcttttattctctcctctaattctaaaagattggaagttaaaattctttttttttaagttatttttatttttaagttcatgggtacacgtgcaggatgtgcaggtctgttacataggtaaacgtgtgccatgatggtttgctgcacctatcaacccatcacctatatatatatgtgtgtgtgtgtatatatatatatatatatttttttttttttaacggagtctcgctctgtc

SEQ ID NO: 113563 - DNA, 2307 bp, Homo sapiens
tgcaatttcttttggttcataacaaaacctgcttaagagaatttttttttttgacaggtggacgtgggaatggaaattcttaatggtttctggagtagaaatctgtacttagaaaactagtttttgggtcagttccattttgatagaagtgaatacatagacagcttttattgacttccatatgtaacaataccgtttaagccttaaatcacagatatgtgccttctcagatacagtaattcttgttcaaccaatgtacaaaatccataaagaaacccctgttggataatgtttgatgtgtctattccttccatggaatggagcactatgtatgaatgttgggtttctttgtacttgttaagccacatttgaggtttatggtaaaaatcatcttttgagtttgctctttggtttttcttcattccttttgaggattgggaaaacagaaagattctttgatttgggtaatgaagaggtaatttgggacagtgtggtggtaccaggaagaaagaggattggaaaggccagtactgttttagttgctcggcactgttggttttgttttaatgtggttgccctgtccactacatggttctatcagtagtgtaatccattttcaatgtaaagctcttttagtttttgtcatagacataaattaatattttgagaggcatccctcacctgttcatttcttctgtgttgaaatgaagtacttaaaattaccgttatacatgaactttgtggactgtaagatttgttatatatgttcaaatgccttttagctggctttttaattaatatgcctgttttgagtgcttaatacaatgtaatgtgattgtaaatcatacctattttaaatcattccttcctgtatatttgtactcagagagccttattttattcttccagcagaattactacttgtgatagttcatttacattccccagaatgtgcctctagtgtgaattttgtattcttattaaacgtgtttgctgcagtaaatcgtttctctggaccttcatagtttaagaagtaactatttggaaattctgaagacacataatttgcgttttctgaaccttaaaaaaaaaggtacttctgtcacttataattgttttagctcagtaagctattttttttcaatgtgaatctcttttgagagctgaacatgtccattcttaaccacatttcaataacagttactgtagctaaggagctaaatagtttcatggattaatttttttcagaataaatttaaaatatccatgattctgatagtgggcacatgaccaaaagaaaaaagtaaatcaatatatttagccaatggtacatttactttgttaggaatgtaatttatgttcattatagaaaagaattagaagaaaatttcaagtaatagaagataagtaccttcccaagtgaataaatactgcatggaaccactcaacacctctgaagttggatattttagttttggattttaatatacaagctctattttgaatatcctttaatatacatttacatctttgcacttttacttacttactcccttaggttatagtcctagaagtgaaaatgggccctcaaaagtatatacatacttctaaaactttgtaatatattgcctgtttgctttcaagaaagactgtgccaatttacacctctaagagcatacacatgtacctgtttagtatattttttaagccagtgctgtatatataaaatgaaataatgaaagagaaaaacaggaagataaaggctgaacaatcaccaactggagagtttggggatgctgggtgtgagagcagggaatggatgaaaatggctggcttttctgtcattaaaatagaagttgttattctagaaaaaataatgcactgaggaactggtctgtgaaattaaacttttcatcccaaagcttccaaatcttagggtccaggaactatctgggtttgcaaaagcaatttagctgaaatctaggctttaagaagcatcttttccatattcaaaacacactgataatgttactgaagcttatcctatagagtgtgaaactagaatgttccttagagattatgtaacacactttttttttaacagatgaaactatcaaggcttcaaaatatgttaaactgacttagccaacccccatctccaaatgtaatgctggatgagtatttgcaactatatacttcaattcccctttaaatcctgccatttcaaccgcataattaaatcaatgtgtcaaaagtgtcaagtttcttctaaagttaagtttaatgtgtattaaatatcttcccatt

SEQ ID NO: 113564 - DNA, 1005 bp, Homo sapiens
ataatgacatactaagaggctattgtgctgtcttcaagttttcaagcttttggagtcactatttatgcttatgactagagcaatgaaaacaagtcttttttccccaaacacaagtagcttcagtccaagccactccagacttccttgccagtgacctcaacactgaccttgatttattctaggaagaactctgcctgtttagttcttttagctcatttttatgtgaattcccattcactagtagtgaactaacttcaacaatttcatttctagtctgctgacttttcattattatggttttgtttttccttacagtagcctctttggaatcctgtacacctagcttatggaaacgtgttagcccaagccatggcagagccaggtaattgtcttatcaaggccatacttagtcttgtttaaaagcaggcatccccatctctttggcgtagccctaaaagaagtggaggatcaaagccacatgcttcaattctcagtcctctttgcctgatcactttatcaaatttctgaagaaagaactcaatccatccctcttcttcccaaactgtgtcaaagctggagttgtttttcagtccaacactgagccacgttgctctgggtggagcatcagcatgtcttctgaaaggtttcacttaattggcctgtataagtctacatttcttggttcacctaaaatcttatgatacctggctgttcccttcatgcactcttacatcttaactcactggtactatcaagtagattattttttaaatgtaagtttaaatggtcatgagtatttgctgaatggctgactggtcagcttacccacgttgactttcaccacctgattccactaacaccttgaagaggatcaggcttcaaagagcttggatctagcagatttgcttctggcccatagaagcctcttgagggcaagaactgttttgaacatgtttgtagccctcctcgtgctttgcacgtaaaggtcactcaatgttttcaata

SEQ ID NO: 113565 - DNA, 1042 bp, Homo sapiens
tcagtgtggagaatatacaattagtggttgaggatggaggcagccagccttcagctccagactggaatgtcttaattctgagcatgtgtgtttgttgggtggggaagaaggcattttaccattctaccatggcagctaggtcagtgaagatggtcctatccatgttgccaaataaatctcacataaatcttaaatatagtacaatattatttctgtgtagcctttgaatcttaatactttctttttccccaccagacattcttaacatagaatgcttgactcttttttacctagtagcactagaatatatttggacagttgaagtggcagaattcatctgaagcttctaggtcattagggtcattgttggctagaacatttagcaatttatatgactttagttttgatttagaggccagtctaactgctgccattttttagaaggaaaataagttaataacgagttagcctacctgttcaagtgtgtggattctaactacaggcacacaaggactgggttgcatgggtgtttcaaggtcacccaggggagacagagtctacaaacatggctttctggaattggaaggcaattctggtagggaagttcttttttttttttttttttttttttttggagactctctgtgttgccgaggttggagtgcagtggcgcaatcttggctcactgcagcctctgcctcctgtgttcaagcagtcctcctatctcagcacccaagtagctgggattacaaggtgcctgccaccacagctggccaattttttgtattttagtagagacagggtttcaccatatggtcaggctagtcttgaactcctgacctcaggtgatccacccccattggcctcccaaagtgctgggattacatgcgtgagccactgcacctggcctgggaagttctttattatagtatctatttttgcaatctgatgaagaagaaattgactgattgtgacagagaacacacacacacacataaaatgtgtcttccttggttatctcaagaactttggctaaaggtag

SEQ ID NO: 113566 - DNA, 1037 bp, Homo sapiens
gcccgccccgcagtccccgccccgcaggccgcggcttctctccccgccgcagagctggcgcggcgcgtgtgggcgtcgatctcagcgcgcaccggcgccccaccctcgcgccgcgacgcccttctgcccggcgctgataaggacgcagctggggctccgcgcggcccgtgggccgcccactcgcgttcagtttgctgaccccagcgcggctccccggggattcgcggcccagccggtggcggctgagccggtggcttgttggtgagtggctcgggcggggaccggggtgccgggttggggatgtaaggaggctgcggacagctgtctaacgcagagagctggtgaactactacgtatccaaacttgaaagaagtggtgtcccaggaccccccaggccgaatttcttccggacttaatggtcggttttcaaacttccgtgtggacagaaacgacctccgggattcggccgtctgtgacccccttcaactgacccacagttgtcttcctggaaggagcagccggcgctcccttccctctctctagagcatcctttggcacgcatgtgcttttttttttttttttcttggttttgggacagtgagagaaactgaaaatgaacattcaaatacaggcgtttttcctctgctctcgggtgttggtctcgggcgcctatgaatatttacattgtgctgcagattgaaggcgcttactgggaacgcgttgtcctgggttctttcactactgcctggagcacaggcagacggaactcacagaagagctggacggtccggctctggcccgactgcgtaattgtaccgactgacattctgtgtttaataatcaagaaagcttttgaaagataagtggtggtggaggagccttttcccgaattagtggagtgggagtaaaaattccatagtttagaattgtccgtactttccccatccttttcttctctcccaaatacaataaaatagggctgtgtgtttctctacctctgctctccaaactcggcttgttctaccctggtttgtcat

SEQ ID NO: 113567 - DNA, 1099 bp, Homo sapiens
ttcctcccggtttactctaaaaaaatttctaataatctttagaatttctccttaaagtaagctttcgtgactttttttgtgtgttctgagaattagatgcaaataagttttgacttgcaaattctaactcagcagctgaaggcttcaagcagaggcccttatgttcctttgcctttctctacatagactcattcagaaacataattacactcttaaaaaacataacccttcttatttcaaaagcatcagtattgtaattgcctttattatgattaacctatacaactgtctttggaattgctttaaaataacaatctactggcataattaaacacactttagcaatgcatactgtatttatatggtatcttaaagcttttcttcaatgattttacaagccttacacttcctgcaaagaaatttactagttcattaagctatttcattgtcacttaggtttttaaaaacatgtactgccagaatcctcagctatagctttaatcttgctatttataactggaacagaaattgagtcagtacttccaaaacaaacctttctgattcagaggtcagccaatcttaactcagattcaaaatttacagatgtggcaagccctcctgtgtacaggctgtaggtagctccaaaactgtccacctgagacatctcatcatatttgggaagaagctcccaaagaaaatgaccagtagcctcagccctcatccccaaaccgttcttttctataaatggaggcagcatccaatctccagggcataagccaagagtttgacacccagccagtcagtgataaaccaggtgagcttgtggagtcggtttgtgcaacatgcgttcatcttagctttccacatcaactcacaggaagaacccaaaaagaaagtcgtctagttaaagatgggaggcagtaaaaacaaaatggagctggggtcccttctcctacagttaaggagatgatctacattggtgcccacactcaaaagcatctgggcatatgtagagcatatctagggtatatcaatggcatatgtagggcatatataaggtttatctaagatatatttagggtgtatatagggtatatct

SEQ ID NO: 113568 - DNA, 1042 bp, Homo sapiens
ctatctatctatctatctatctgtctatctatctatctaatgcaatttatagatggaaaatttcctgattattttctggcatatattttgcacatagtaggcagtcattcaaatacttgtgaaatggaggctgggcggggtggctcatgcctgtaaccctagcactttgggaggccaagagaggcagataacatgagtccaggagttcaagtccagcctgggcaacatagcgagaccttgtctatataaaaaatacaaaaattagccgggtgtggtggcatgcacttgtggtcccagctactcaggaggctaaggtgggaggattgcttgagtctgggaggtggaggttgcagtgagctgagatcctgccactgcattccatcctgggtgacacaatgaaaccctttctcaaaaaaacaaaaacaaacttgtataatggataggcacccccaaaagtgtccacgtgctgcctattgcattcatttgctcatcacttaccttgcaggtgcatagactgaggcctgtggcttcaaatcatgtcactgctctgatgcctacgtctactctgaactagtggtttttaaattagagtgtcatctgcgaacttaataaaactgcaatttctttggttttaatgccaaagacactgatttggtggatggaggtggggtggatggaggtggggtggagggaagtgggggaggtgggctgatttgggaggtggcgatggagttattttaatgtgcacttcagatgttgctaatgtgctggcctgcagactgcgctctgagaacagcagctccagcgtcttggccaccttcactaaatacttgccttggtttcctcttctttaaaaaaaaaaagaaaagaaaagaaaccaggggaaaaaggaggcctggcttactgctggtgaacatgaaacctcagaaaccagggcaaggctcatcacccagcttcgtggaaaaaaataccagcctagtcgccaaaatgaaagtagattacctctgtggctaaaaacggaagcggcaagtttccactgcaa

SEQ ID NO: 113569 - DNA, 1032 bp, Homo sapiens
gctgaggcaggagaatggcgtgaacctgggaggcggagcttgcgtgggccgagatcgcgccactgcactccagcctgggcgacagagcgagactctgtctcaaaaaaaaaaaaaaaaaaaaaaaaaaaaaaaaaaaaaaagttcagataaatctaacacctacagctagaatgctcttgaaatatctagatattttcatattgtaccttacttaagaaaatctgtcatctagtttctttcctttatagtgtatattgtatgcagcatgtggctgtgttttcctgagccatacataggaatgaaaacagcagaatggaggtggaaacctcctggttaatgtcttcatttcaccatgtggaataaagccaatgtcaagaaacactcacctccaacgcttctttggcacccggccaggagaagagggctgcctcagagggatctttgcacagatgggcttattaatacaaaatgctactggctgactttttgtaccttgaagtgtattcggttttataagcatcactctggaaaaatttcttttctagtttgtaatctaaaataacacaatatgctggctaggtgtggtggttcatgcctgtaatcccagcacttttggaagctgaggcaggtgggtcactggaggccaggagttggagaccaagcctgggcaacctagcgagaccccatctctaaataaaaatcattagccagatgcagtggcttatgtctatagtcccagctactcagaaggctgaggtggtaggatcacttaagcccaggagttcaagacaagcctgggcaacatagaggaccccatttctacaaaaaataaaaataaaaattagctgggcatggtggcacacacctgtagtcacagttacccaagaggcttgaggtgagaggatctcttgagcccaggagtttgaggctgcagtgacctatgattgcaccactgcattccagcttgggcaacagagagagatcctgcctctaagaaaaaataagcctgggcacggtggttcacacttgtaa

SEQ ID NO: 113570 - DNA, 1031 bp, Homo sapiens
tacctttccttattgcaaaatatcaaatgaatctggcctttttaaaacaagatataagtgaaatcttgagccctaggccatgaattccatgagtgctgggaccatgaccctagcacatggccagcccctaatcaatacttatcggtgggggaagaaaggcaaaataggccaagaggactgggtctagaatgttccttatcgagatccttaatttgaacccccgctcctgagaaaatgactcatgcctgctatgtgatggtgagtgagaaaaatacaggtttctatgagcacattacgtagaagaatagtactcatttctgggccatgtgttcaatgtcaacacaaatatacaggccatctgccatctcagatgctgggctctcttggcatcaaggtttgtcaggcaacttgaattcctttttttattggcgtagaggctcaggtggaattccaaaagcagaaatttcatcaccaaatacacatatcctaagtactaactgtgcacagtaggtacaatgaaagctaggcccggattgcaaggataaaagacagagttggaagaatgagcacacagttacaacacagtactaacagggtcacagaggcaggcagtgggcagacaggttcacagaagaggggcgtgtcactcacagcagtgatcagagggcaccttctaggggaggtgacaggtgaaccgagagttcggaagaaaaggttcagatatgctacggttttaaatgtaaaagcctctcccttccctcctgacttaatgcgcccttacagagtcacagtctttggtccatgatggagtcagatggtgaattttatgtgtcaacttggctaggccagcccagttgtttggtcaaacaccagtctcactgttgctgtgaaggtagtgtttagatgtgattaacacttaaaccagcagactttgagtaaagcacatcactccataccataaggtggatgtaatggacataggggtgtcacccattacacattgaacatgttaaagacaggctcccctaatg

SEQ ID NO: 113571 - DNA, 1078 bp, Homo sapiens
ttcacaggcaactgggcaataattgcatttccaggaatgccaaatggagccaaatccttttaatagctcactgacatgcaggttattccactggggaccaaaaggaaggaactagagctctcaaaatatttgattcttgatttgtgctcttcactggatgattctattttcttgagagcatttttaacgaaacagcagcaatcagtgatttcttagaaatgtggcccctttaaatacacttcagtgaggctagctcttgtgtttcctggacactctgtgtgttctggacatactggaggcacagcataaatattaatgctggccattacaaaaagaaaatgaaaagaccccataaggcagcagtgaccctagaagccccagaagccgtgttggaactgtgacaaggaaggatagtgacaagatctgaaaaaagcagccctcttcccacactcaacacatgcagtaaacccagacatgcagggcaccattgtctgagctgtcactggagggctgggaggagacaggggatggggcaatggcagcctacccacccctcctcatcactgtccaggggcattcaggaaacacaggcttccaatatgaggctgcctttttttctcacaagccatgctcactaggaatccatagcggccatctgcacaccgacctggtggtgtctcaagcttccaggtgtggttttgggggcagggtccttgaggaagggggtgctgctgacagtgaggtaacctgaggtcagctctggacagggctgggtggaagaagagtgtagtgactgctgatccctgtcctttctaggaattggggttactgggtcagagaaacatctcaataccttccaggcttccaaggctggttgtaaacctgctccttgataaaagaaactacatccaacctttaggagcaaggtggggtaacatgggagcagatcttagttcatttgtttgtttgtttttgcttgcctgcttgcttttttgttttttctttttctttttttttttttttttgagacagggttgcacactgttgcccaggttggagtgcagtggtgcaatcatgg

SEQ ID NO: 113572 - DNA, 1035 bp, Homo sapiens
gagggagggagagggagaaaaggaacgaaagagtgaggaaggaaggaaagagggaggaagggaggaaggaaggaagggagagaggaaggaaggaaagaaggaaggaaagagcaaggaaggaaggaaagagcgaggaagggagggaggaaggaaggaaggaaagaaagagagagagaggaagggtccctactccaacttcttttacggagtaaaaaggcctaaagagacagtcatgacttatcatttgcaggactgattgtatcatacttgactcatttgttaacattcacttgaaggaaacgcagagattttttttcttcgctcacattcaggagctgtgcttgcttataatgaactgtcatgatggaggccggcccgtttcagctctctcagccccgtcaagctgaactcacttcccctgaaaggacagtgtttgcatttgtgtttacgggactggggaagaggatgcgttttcaggagacctgaaaaccgagccaacccccttttcctgccccgctgtgctgcgattggcccatcttggaggctggctgcaggagcctttagtcatcgcacagggaaatctttctggaaccgggcaccaacttgcgtgtttgttttcatgctctttgtgcggggattagctgtcgtgccgggcctgaaaatgctgcgagcgccgggcgacatctaatccaggatttgcctctgcctcgcggttgatggaaaacagatgtcttactgctctgggcctgagcacagaatggaaatgaccgaccagagagccatttggagccgaggacacccggtgaaagccattcagagtccagccaggaggccgactttcctcctctggtctgtttttactacttgagccgctcgctcagaaaacggccttagataaagcagtttcaccttcagatcgcctgaggctgcagaagggcggctgcgggggaggaaggaggaggcggagaggagcgggtgcgaagtcctgggtcgcctgcccgctgcctgatgtcgtgagctagggcacctcggccc

SEQ ID NO: 113573 - DNA, 1050 bp, Homo sapiens
acactgcttgagagtgaatagtagataggcttgagctttgccttaattaagaggatgagatcgggtctctttaatcgccaaaatagcctctcagactacacaaagacagaactgtctcttttgctgactacatgcaatttatttaaattagtgttgcacattcaacgatggtgtggaagctatattagaaaaccaccaaattgaatgagttttctaggtctttggttagggataaaaagggcattagccacattgaatgggatttgcatctcgttagcttgcccgtatgtcctcagctattggacacaatggagggtgcacgtctctcttttcagctgggtagtctgcttcagttgtgattctcctgggaattaaaattgtgaactagagtcatggtgggggaaggggaagggctggaacttgtctgaccacaccctcccccgctttttgtagttcaagattataatagtttgccttagcagcagcaaaatctatctcagtgtttagtactctcctcggtattggctgtgaacaatctccttgcagatattgggcagctggctctccttattgttcagcatatgtccagggttccctccaatgcactggattctgcttatggaaggcaaaataattaccatgttagtccaagaaagagattataaaagtgaacctcttatgcgaagtaaacattttggatatccccttatttagcgtgaccagtgagatgtcacccacagaaagtggataaaagggtacccaaatgggctgaaggccacaggatcagctactctctatccataaacacccttgtcaactgtgtggatgcttcatctgacaccctgtccttcctctccttccaagtatgaatcatccttgtcactccatttccttcaccacccaaatcctggccctatacttagtacttcctgagacctctagaacagaagtacccatgggtcctcagccactttaccccatgtgtgggtctgatggctaagatgagctgtcctgaatagctttaaaagtaactccagggagaaaaactaa

SEQ ID NO: 113574 - DNA, 1425 bp, Homo sapiens
tgggactataggtgtgtaccaccatacctggctaatttttaaatttttggtagagatgggggtctcactatgttgcctaggcctggtctcaaactcctaggcttaagcaatcctcctgcctgggcctcccaaagtgctcatgtaatatgcatgagccacctcgcacagccagaggattatgtcttaaacatctttgtaaacttacagtatcaaggacattacattgcttgtcttttctcataagtgtttgaggaaacaaatagaattgaaaatcagctagatttggttgtgctttctgcttgctaatttaacttttgggggttggggtgtgggaaattaaggtttaacttgtcttttgactcttaaatatatttcttctacatgcaattggagctggagttgctacatttagcaattaggcatgtaaacattagtaccatattataaccacattgttgtaggcatttttgattaattgattattaatattaattttagtactaatatacctttaatgctattgtttatggctcttagttacttaggagtgtgcatactaataaaaagagtcaagaggccaggagcagtggctcatgcctataatcccagcactttgggaggctgaggtgggcggatcacgaggtcaggagtttgagaccagcctgaccaacatagtgaaaccctgtctctactgaaaatacaaaaaattagccgagggtggtggcaggcacctgtaatcccaactactcaggaggctgaggcaggagaatcacttgaactcaggaggcggaagttgcagtgagctgagattgcgccattgcatttcagcccaggcgacagtgcgagactccgactcaaaaaaaaaagagtcaaaatatatgaaatgtgaaaatgtaaatacataaacacatttatgagtggtagttgtatacatacatactttctactttatcaaagtcaggacatctatgaatggttatacaaatggttatacaaatattatacaaatattacaacttaattgtatctttttttcaaaaaaacagaagatccattggtagtatgctctccagctccctccctctgtgacttacaccttcgctagtcatttgaaagcttctgtgggagtgtgtggtaagtgacctgccattgtggggagtggaagtggcatgacctcaggagccagttctgagtccaggtgaaccaaagctcagtttctttcatctttgaacctgaacctcttacctccaagaaaaagggcccaggaatttgggccttcttgtttatttgtccttctgcccctctccctatctaacccctgggtaagggtgagcttgaaggtgatggtgacagtggcttctgtgtgtgtcagtccaccctccaagcaatgcttagaaaccagtccataagccaattaacacatca

SEQ ID NO: 113575 - DNA, 1029 bp, Homo sapiens
atgaacaaaatgtgctaaattcacgcaatggaatatcgttcagccatacaaaggaacgaaatactgacacatgctaccacatggatgaacttggaaaacattctgccaagtgaaaagagcaagacacacaagaccacatattatatgattccattccagaatagggaaacctttagcgacagaaagtagattagtgattgcttaggactgtggggatgtgatgtgggagggaagagagagatagctaaagggtatgggttgggtgtttgtttgtttgtttgtctgagatgatgaaaatgttccaaaattggctgtggtaatagttgcccacatctatgaatatactaaaagccattaaattgtacactttaaatgggtgaattatatggtatgtgaattacaattcaatgaagctttaaaaaaatccacaaaacttctaaaatagggtgttaactgggattttgagaactgtgtatcacctaaaatggcacgccaaagttggcatgtatgtgcatttctggggtctgtcaattttgctgtattctctgtgatccccctcctcctactaccaccaaaggtaatcaccactgctctgcagagctgaggccccttcaagggctcactgtaatgcttgactgcgtggaaagaatgtgataaatattaatgtaatcaaatatgcagatgcccagttttttaaaataaacattattagcaatccctttgaaactaataactaaccaaggaataggatgcaatactgttccctgcgtttattgttgtagaaaaaggaacggttgtgaattctactctgatatgtaagattttttattctaaattattatttgtaatatggagacctaatcactatcatatggctacttgctgatcatttttacattatttataccttttacaactaagtttaatgacttggcaggaaattaagttatgttatttgtcaagtttctcaacttttaactgaaaacttcatgatcagaagaagaacaaggtctggttatccccgaatca

SEQ ID NO: 113576 - DNA, 1064 bp, Homo sapiens
cattgcagctcgctgctgcatccctatcccataatcccttgcctggtttgctgcagtcttttcaacagacgctcagtgagaaaaagatgtcctgtaagatcaagaccgattggtgtgaatactgaagggggtcttccacttgttaatgacccagaaacattcctgccgacttccagccttctctcatttcctccatttttctcttcctctgttctgtgcatgaactggcacatcactacttagagcagaagatatgctgggcttctgatgatggctgcactgcatggtagggaattttaaccagtctctttgcatggtgcttcccaacttgaagtgttagcagaaacgtgcgttgttcttttggattgccgcgtagctgcagcgacagacttgggaggatttaattctttgcctcgttggttagtctgtttgtcttcagaaatgggtaggtcctaaatgttcagactgcttagtattgtgccaggtggataactgatttctcctgctctctcggttcttttttctcccttcatctctcatggtgatgctgcatcctctgtagctgtaaaatgcagacccattctttgcttaaacaaaggcaccaaattaacaagtatggggagaaaatcatgcaagattttcttatcaagttctaatgtgatctgactagatttgtatttttaccagtctttattttagtgtgtatcttggcttgttttaaatagaagaattttgccccctgcatctctctgttgggtgcaaacatggagatgaaatatttgatttgcaggattccttcctcgctgccccagggtagaggagaacgtgcgaccctccccccactctgtcctctattagagaatcctggggttgagttccatggctggcagttaccattggaaacccattcattcataatgcatgactcgaccctccgaattctgaatgccattgagggccagcaaacaaacatgtaggagataatttgctttttttctgacaattttttttcctgtctttgaagtacagtcaaatctgggtggagctcaatgatagcattacac

SEQ ID NO: 113577 - DNA, 1047 bp, Homo sapiens
gcccaggagtttgagacctgactgggcaacatggcgaaatcccacctctaccaaaaatacaaaaatcagctgggcatgatggggctgcacctgtagtcccagctgttcagaggctgaggtaggaggatcctgtgggtccagacattgaggcttcagtgagccatgattgcgcctctgcgctccaacccaggtgacagagcaagactctatctcaaaaaaaaaaaaaaaaattaagaaaaaaaaaataaatgttacctccataagtaaagtgagaatgtcatgaaattcaggcaacagcttatagctcaaggaagcggctagaacatggagacagcggagttgagggtgggacacaggtgggcctgaaaagatagatgtggagagattgggatgagctgtgaatatcattaagaacatgtttgacgtcaatttcttaaattgcaaaagcatcaaagccttctgaacaggagataggtattttattgacattttggaggaatggggtggcagacactaaaggctgggaaaccaattatgagtttactgaattgtccaaatgagagataagagatggaactagaatggcatcaatgggcctggggaagacagcgtgaatttcagagaaaagagtactctttgactcaacaatctgcctcccacaaataaaaaggcctgtgctaaagtctgttaagctaagctattagatcgtgagaacttcagcaactaaaattaatcttatactaggtcacaaagaaaataccactatattttcccattgtgtaaagcaagttcctgccctacaatgcactaaaattacattagtaacacatgtttatggggaaaaaacaaatctcctttaaaagttaataattatttaatcaatagaaaataatagaaataatagaaaattggactatttacaaagtattggaagtggaaactttttatatccaatgtgtagggtcaaatctctacccaggaaattttataggtttaagtattttcctttatttaaaaagaattccagcctgggcaacatagtgagtc

SEQ ID NO: 113578 - DNA, 1053 bp, Homo sapiens
taagacacaagtgctgcatattcattgtaggaaattacaagctgaaaataagcaaaaagagaaatagaaaaatcatagcacccgtaatctgaaaatcttgaaggaaaaattggcaatcctccccctaacccccaccaccaacgcccctcttccctgggagggtcttcttgtgccagagctgaggctgtacggttggcagagcatgtgatgcctccctgtcactgcatcggcattgcaggagggaggggatgtgtgcattgcaagttgcaaccacctccagctgtgtgtagctggagagcagccccaaggagaggaggaggggtggaaacttggagaaagaatggggttgaggcggggttggggtggaagcaagaaggtacccgatgagccaagagagttaggaatgcaaatagcccttccctcctctgatttatggtctctctctttttaaactttctatgttctcagtagaaagcaactaaatgtaaacagcaaagggcttgatgattcttaagggagaaaagtctgcattttagttagcttcaaaaagtagctccagcagacttcttttcctccctcttccatttaacaatgcagtatctctgaaagagtgctgcactgtatattagctggcacatgtagaaaaacaattctatggttcagataaatttgggaaaccttaggctaaatgaaggaagtggacttttttaaattgcagaacttcttaaaacctttagaatctgctgatgtacattgtaggtctctgaggcaggagagggatagataacaggcagcacatccaaacttccaaccatagaactttttccctggaacgtcttgggaaatgaaggctctgtggaacgttcttgggcagagctgctcaatgttaatgcttcaggctgaatcttcgcaaagacggtgatatgatatgtaacttgtctgttcagagcatggaagccctcatacattcacggccagatgtgcgatatgggtgcaggggttgttgattctccaccagagcagagtggacgagcttgggtggatgcaggactg

SEQ ID NO: 113579 - DNA, 1048 bp, Homo sapiens
agccatctttttatttatttatgttgtcttcggtttttttcatcaatgtcttatagttttctgtgtacagatcttttacctccttggttaaattcatccctacattgttgttgttgttagtttttttctttttcttgcattcgtctttaactttacattcaaatccagtatctagtcaaaagacaacactcactatgcaataatatacctcaaaaaacatttctagggcacctagtgcctgccaggcgttattctaggtgatgggaatatagagatgaaggaaatgacatctctgtcaccctcttcagctgacagtttgggatgatagatgtatgagcaactaacagcatgagataggtgatggtaagctgtagaaatgggaaggaatttaaactgggactttaatgatgggtaggacttacccaggttggcaggcagaattggtatcccaggcaaagggaccagtgtgaagaagtacagaaaggtgaagaggagaagacatgattgttattttggagacacatcccatatagtgtgaaaaggtcaaagggattaaaagtaatgaggttggacaaatcagcagtggaggctacttgaactccctctgtgctctcacacacctttgtgcatgaattcttttcccaattttatcttccctcaaaaaccaccttctctttcaaaatacactttgattattgttacttatgcctgggtcttattacccaagatggtaaattccttaaggtcaaggatggtgtctttaatcatttataattcccaaaaaatacacagaagaatgctttgcataagtactttgcccatttgaataggataagttgtgaactacctcatgatttaacttccctctcaccaccgtcatgctcgtttggaggcccaggaacacacagatcaggtgacaatgcattcagctgcaggggtaatcattcacattcacacgcatgggactatgctaggcaatatcaaacagcactggcctaagaacttggcttttcaacatccatacctttgactacaaatcagtagagtt

SEQ ID NO: 113580 - DNA, 1052 bp, Homo sapiens
tgtgaataatgccgcaacaaacaaccccatcaaaaagtgggcgaaggacatgaacagacacttctcaaaagaagacatttatgcagccaaaaaacacatgaaaaaatgctcaccatcactggccatcagagaaatgcaaatcaaaaccacaatgagataccatctcacaccagttagaatggcgatcattaaaaagtcaggaaacaacaggtgctggagaggatgtggagaaataggaatacttttacactgttggtgggactgtaaactagttcaacccttgtggaagtcagtgtggtgattcctcagggatctagaactagaaataccattcgacccagccatcccattactgggtatatatccaaaggactataaatcgtgctgctataaagacacatgcacacgtatgtttattgcggcactattcacaacagcaaagtttttattcttaagagaccctggcttgtccataccacctttgaaaaattatttctaagctgagcattttagaattgtttctgtttctagcccatctgttttgctgtacctgttacctagctattattcagacatgggggaaagaccaaaaataatatttgttttaaaacaaatataaaataaaaatggcagtgcccgtttcatctagattctttcagaaatatataagcaacgttagacaaacagatgttcctccaaccttgtgatttaacttacatgtgggaaacagactcaagctctccttaacttcaaaccatgttggcacatatcccccttcgagggccaaccactcctttcctgctccccactaccagaaacaactcgccatttcacgagtgttcactgcttccatattcatgcatattatggggattctatgtgggtcgtgtattgaagatcctttcttctgatacatttgaattaaaatatgacagtatctggatctcaaatttttctttcacgctagtgcgagtagatgagatgcagagttagtgagtaaacttgatagggtccatgattcaatgaactgaccaccacctgggtctggtgag

SEQ ID NO: 113581 - DNA, 1047 bp, Homo sapiens
gcaaatcacctgaggtcaggagttcaagaccagcctggccaacatggtgaaatcccatctctactaaaaacacaaaaaattatctgggcatggtgatgggcgcctgtaatcccagctactcgggaggctgaggcaggaggatcacttgaacccgggaggcagaggttgcaatgagctgagattgcgccattgcactccagcctgggcaacaagagcaaaactctgtctcaaaaaaaaaatatatatatatattttttgttgtttactattctgtttaagatggggttgacacaatcagggaaatgcagggattcttacctttcacttggttgaatccagtgcagctaaactaggagtgatgaagggaagtgtaaagaaattttggttcaatgtttaagttattctttcagatctgccctagttgtcactacatgatagaatggaagtaaccctttattttctctttttattctagataattatccatttgatattatttggttgagtcatctaagcaactacaagtgttcataatgttaggtagtaatgacattcttgttttaatcatcgaagtgccttctctcccttttgatctctgctgacttaccctccatttagacatgaaacaacaaatgccatttctttacccaccattgtgttatagcctctttgatctttgggctagattggagaatcagaatcaaatttacacagcagttcctcttgccaagaaaaccactgtttctttcctaagtaattgtgttcctttgctctaaagagatgaaatctgaatcttcatcatttataaacttagaagaataaaaggagcatataaagtctaaagtccccatcatgcaaagtcccatcctgctactagaaaatttaaaaatacatatgtggttcacattatatttctatcagacagcactaatatagagagataaaataagaaggctaaagcataacctatgagaatataactttttgggttttctaagatatagacgctgatttctcacttttccttccagaagtctatgtacatac

SEQ ID NO: 113582 - DNA, 1047 bp, Homo sapiens
aaattggatcaggaaagctgatgggacccaaaggagtttctgtggaccgcaatgggcacattattgttgtggacaacaaggcgtgctgcgtgtttatcttccagccaaacgggaaaatagtcaccaggtttggtagccgaggaaatggggacaggcagtttgcaggtacactcgatggtaatatgtaaacccccttttttatgcttcttctgctcacatttgcatgatgttggagcatgttgaagacaccgcatccctagtgtgtttgctggctttgggaaagatgctggggataaaatctaagcaaaagcatgtttcgttgcttgagccttagtcaccgccacccacccggcagtaagttgagctgcagtccttgtgtggtttttatcggtggcagttcacaactcagaagtctagctttgaaatattcatattaaataaggtataaattttaaaataaaaatatttgaaaaacaaggaataactactgtttcagcctagctgtaactttgcttaaaaagccactgaatgagaattttttttcacctttctaggttattgtaagagaacaggagtctagaatatttgctaggtttaaggagggcagtctgttttacgtctctttggtgtagcactttgcaatcacaagcttatttaggtttttgcatttgcaagaagaggctgaaaatagcttattaattttctttttgaaaggatgcttttggcacttagtattaatttgcataatatttgtttatgctttgtctccagttctgccaagtttctgaatgtcacccagaattatagtgtgggttttctgttgttttgttttgttttgttttgtttttgagacagggtctcgctctgtcacccaggctggagtgcagtggcgtgatctcagctcactgcagcctcgacctcctgggttcaagtgatcctcctgcctcagccctccaagtagctgggactacaggcatgtgccaccatgtccagctaatcaatttttaaaaattacatattggagtctcttttccaatgctgagttgc

SEQ ID NO: 113583 - DNA, 1049 bp, Homo sapiens
tctagttatgttgatgtagtaaaatgataataaattctgagcatctggcataacaaaaaactcctactctctgatccaacttttaatggtcatccatcctgttagaaatataaatataatgcccattcttgaaattagcaatttctttaaaggtgggaagaataatattattgaaaattatagcacttcttactcatacttacttgtacagtattttataacaaaggtatcattcacataaggatttaataaccagatataagccaaaaaaagtgatgatttaacaaatgataaatcagatttatacagtaatttggggaaccacaatgatatgcagtctgtcttgtagatttcattttctttttttagaatgtcttaaatgataagtcttgttataaataacctgctcaaatagatatttttttaatccatcatgttggttcaagtattttgatgtaaaacaaaataatttaaaaatatttcatacaggtgtttaatcaggaaggagaattcatgttgaagtttggctcaaatggagaaggaaatgggcagtttaatgctccaacaggtgtagcagtggattcaaatggaaacatcattgtggccgactggggaaacagcaggatccaggtagatcaatgtgctaatgtatatggttagagtgtttggtatttgttaaaagtgaagaatttgctgtcccccaaactggaatgttttctcttttccattggttaggacatagaaccatagatactctcaccagaaggaccaaactcagcaagatggagtagaaaaaatgttaccagactgaaaccctctaaattggggttttaatatggaccccacagacccccacaaagggtctgaagatagaattcaagggggccattgaataaaaatactacattattatatttatgaacctctggctgaaaattatcatttcccttaatcatgaatataagcaacaatcatagtaattttagtaatgcctatgactttgtcaccaagaaaaatcacagaaattttcatatcatattgttgcaaaa

SEQ ID NO: 113584 - DNA, 1626 bp, Homo sapiens
actggcattacagatataaaccactgcacctggcttatgctaatgttttaaatataaaagcatatatactgggcatggtggctcatggctattatcttagcactttgggaggctgaatcaggagaatcgcttgagcctacgaattaaaggttacagtaagctgtcttcacaccacggcacaccagcctgggtgtcagagtgagaccctgtcaaaaagaaagaaagaaacagaaaaacattagcatcaagagttttctaacccatgttcagcatattactataacttctcctataacattctgacttcctatttgtttacaggtttttgatgggagtggatcatttttgtcctacattaacacatctgctgacccactctatggcccccaaggcctggccctaacttcagatggtcatgttgtggttgcagactctggaaatcactgtttcaaagtctatcgatacttacagtaatggtgggcaggtggatacccgcttccatggtcttgcactataaactggaatggatttctcaatgcgggaccagattatgactagagtttttatgccagaaggaatcattggtgaactttccaaggttatttctgaatgtaacaatttccttaaaaatgacttatccaatttctgtatttcacctttagggttaaaaaaaactcttctactgaatctataaaaactgcagttttacatctgtgaactatggcttaagggacaggatttatgtagctaaactaattttgcaaatcaaacagacacttaaaaaactagcatatgtaaaggtattcgttaatcctgtgaatggtagcttttgcacagaacttccaaaagcaaaacaaaaacaaaatctattgtagttatatacttcatttaacctaggtcacaagacccagggaatcttctaacctcacttttacagtaggtattactcttgtgacatttttttggttatcaacaactaaatataaattactttggaaaaagtaaggctgtcttgcaaaatgatcccagctctgattagcagccctctggagttcagaacttaagtatcagtgcaaatttctcaacctttctgggttagacaaagatccttttttgtgtgttcttttcaccacccctttggctcaccttgtatcagcaaacaaagtacttcttcagggaaacctgaaatttctaatgccttgaaaagcatattacaaaagtaatgctaccttttgggaaacaaactgccccgttaactccagatcattgcactggaatgtaatcaagaaagttagtcatgttttatgtaccatgttttcacacgtgtctcttctcttcgacttcctgaaagcgaaagctttacctcctgcaaatgtcagcacatgtagtaggacaccagtatcctaggacagagagccataagtagccctttggaggactgatggtgtcaaccaaaggcatgtgattgattaatgattcccccttagaaagcaagtgttaccaaagttgtgttatcttgaaagcattacaggtaagggcatgttatggttatttatcattgtttaatgaatagtagaggtgtcaagggactatgtatacatgattagggtaagatagaatgtatta

SEQ ID NO: 113585 - DNA, 2761 bp, Homo sapiens
tttagtcaatcgttcatctgtcattggtactgtaaaataagctgtggtctatttccactgtttaattttctactcagttctaccaaataggatgtcatgtttgacatttttgatagtgactttggggtcttcttcactgaaagcaccttagaactgtactataagaaaacatttcccctatgtataattatatgaatgtgatgtttattgcttattaatttataattcagtcattctctatataggacttcttaaaatttagaagggaaatctagctacttcaaattgtctgttaaatttattatgcccaaatcaacctctgaaaaaaggtttttccaggaagatttacatttaggtttaatatttttttagttaggtagagttttaaaaaatacttgagcctgtccgtgataaagctataaaattcaataactttttagaatgttaaatgaagacactgtttcctaacatcagtgagatacatctttgaatttaaacattcatatttactgagtacctactaggtaccaagtactcttttaggcactggaaatacagtgatggacaaaacaggtaaaaaatcgctgccccctcagagctgacattctggggtgggaatttcattttgccacgtactaacgttctgcacaaaagacaggctagactcttgtctagattgtttaaaagaaacttttcaaattggttacattaattttagtttattttcacaagtaaaaatggctttttatttagattctttctgtcccaggctgttgatcttaaaactagttgatttaaagagtttttttgcacaacatttcaattatatttgtgaacttagaaattaacttacaatctaaccagccatcatatcatatcctatcaggctagatatctcaatagtagactgaatacaaagctaattttttttacatgtcaatattggcacaaactggaatgaaagaatagtttgattcagacctgctccactatgtgttgctaaaacacatgctatgagcactccaggaaacactatattttttccaaaaaatatgtgattatatatgttaaagtatagataacatttcacacttggatacatatgtgcatttactgtatttcttggtaagcatatttttgggggaaagtgctgctgatatgatacaagtagacaaaatttaaatgaaattttgtcacattctatggaaaatggtttctggtaaactgagaaggatattaaaataagtggcttttttctgggctaccattattgtttgatttctctttgtcaagtgtatagaacctgtcatacattcatgataagtagcactgaaaaattactcattcaaatttcccctgggcacgtaaggcaaaatattgccggttgggatttcaaggtcagtgacgacgcatttcctcccagtacagaccccccagccccccttgctggacatggggaggcagagagtcacttgaccatccagaaatacatgactacaagtcctttatgactgtttgccattttttttaatggtacttagtattttgatcaaactttagtctccagaactaaacaagtccctaagtttccttattttaatttactgtgactagatttgaagcaaataaatactccagatccatgcagctagaacacacttgcttccactactaaatatacagggtatgtcctaacatggagttaactggaatagcagtacactagcaagtatctgtgaatccttagcactgacgggttaacagaaatgctttggtaatacctacttagttaattggaggaagtagtaaataaacattaggtaatctgcagattacttcaaatgggaaaaatctttttgtagactctatagtaccctctctattcactagcttctgaaaagggaggagtatttttagtttgacaatttaataatttaaaaacaagacatctccaggtaggaaaaaatgaaagctatttcatgcaaacattatctaatttagcttaaaagtgaaagtggtaatactgttggtttctgtaaatgttgcagggttttaaactttataattactttaatatttttgataactagaaatctagtattgccataaaggaaactaagtgcccatcaaagatttgtttggtataaataaagaattatttgttttgttttcaatgacagtaagctacaaatcatgatgcttaaaaactttctaaagatgaattgtgtggcagtgattggtctgtttgtggagaatgtatgaaagctattaatattctagaatagattaataaattggctatgttgttccaatgaatgtacagcacttccattaacttttgaaagcaacacagccttaaactcaatgcttttgctttatgacatgggaatgttctgtcatcaatggagtgtattcttgtaatagaattctttatatcgttctcaattctatagactttcaagcctatgtatgaatatgaaggggttttttttttttgctttgttttctttttagattttgtacattccatctttataggtctgtttcatatgttttatgtatagaacactaagtcttgcactctctgacattgatactgatatattctcgtcatttgttcttttatgaatcaaaatgttgactgcctatttaaagaaaagaatgaacgctgtgcatcaaagtgtttgtatgttcgtagctacatacgtaccacagtattttggatgctttagtctacaatgaaactttcaattaattctgt

SEQ ID NO: 113586 - DNA, 1048 bp, Homo sapiens
ctataagcctcatggttataattaacgtttctctttaacgtcttctaagatagcagacaaaccagcaactgctcattggctgtgttaactttggcggttattttctgtgtggctgctccgtgcatgtgctgtgctaagttttttgggcaataaaaaaataatagaatatgaggttcacatccagagaatttacactttaattggtaaggcaaaatgaattcctgatatagttaattaacttattggaaaaagttatttaactgtgtaatgtttaatgtatactcagtgccaaatactgtctttgctatgggtcctaattgttatacaagtttaaaggatggcaggatttttatacatttatatagctatgggagacttcttagaaatgattattttgagctgaaaattgggtaggtttagagggatggaggaaattcccaagggaaaacagaaggaatatttattgagcacttaggtacagttttaagagcttttgcatgttttgtatcctttgattcttacacttgcatgaagtacgtattgctgctaactctattttatgtaagagaaaatggaggcactaagagattgaataatttgcccaaggtgacagtattagtaaatgatgaagcaagattcaaatccaggcattcttactccataatccttgtttgtaaccacagataaacaaagctttaaagcagattacatttagtggatagttggtgaccagcttggaaaagatatgcaattttttgttatatagtaatgggaaaataaggttggaaatcaaatggaggccataatatggggtgttttatgtttggttgaattttgttgtgtacatgtacaccaagcagaggaagctggaaattttcctgtcagaatgtttttatattcttttgcttacctaattgcttaaaacaattagattatatgtaagcttagaaaatagctgttatattctgatattaagcaaaaaattttccttctctgtatatgtggttgaattttgctgaaaataatttgaggtgtagtgatttatttc

SEQ ID NO: 113587 - DNA, 1041 bp, Homo sapiens
cactgcacttcagcctgtgcaacagagcaagactccatctcaaaaaaaaaaaaaaaaaaaaaaaaaaatcaggtgttgtggcgcacacctgtagtcccagctactcaggaggctgaggtaggaggatggcttgagcccaagagattgaggctacagtgatctatgattgttccacatatttcagtctgggcaacaaagcacgaccctatccccccataccaaaaaaaattattcactgtagatgaaaagaataaagaaaattaaatggtctgtggtatcattcaaaactaattactgtggacatttttatataattttttttctcttttatatgcatgaatcaggatatttttagccacaaataacagaaaagtagatcaaagttggcttaaataataggagttgattatcttatgtaacaaatttggaggtagcttctttcaggattggttaatcccaccacacattgatatcagaggtctggactagatttctttttttttggcattttttggattttcctttttacatgcaagtagttactgcagctactgtgtcctaccatgacaacaccaaagcagaaagaaagatgaactgtcttcttggacatctctctttatccaggagaagtatcccagaatgtctcctgtcccaagtaggctttcttttatgtcttattggccagatctgaattccttgctcacactgaaaggatctaagtgaaaaaaattcatgctctgggaagggaccatcctctgagcacattaccacctcagtctgaacagaaattgtagttctcttaacgaagaagggctggctttggagaggcaactaacaggatctgccaaattatatctctgtgcacttaaaagccactttttctaaaccgaattgtcttattacttctctgttgacctggataatccagaattagatatataattgttgaaattaaacgactcaaagattgtggggggaataaggtaaataaactaagatttttttactggtaagttattttaaataatgctgaaaagtata

SEQ ID NO: 113588 - DNA, 1341 bp, Homo sapiens
tcagtgatagtgattgtctaagattgtttcaatgcatgatacctggagaactattattatattcacattggatgttcaccactctgcttctcctgtctttttttctcctcttgattttgttttgttttttggtttgttttttagagatggaatatctctgtattgcccaggctgcccttgaactcctgggctcaagtgatccccctgcctcaacctcctgagtagctggtactacaggcaggcaccaccacacttggtgacagtgttccttttgaagcatttttatttgggtattgatggcaaataatgaccatcttcttatagttattttaaaatctctcctgagctgtgctaatacgatatacactaaccatgtgtggctatttatatttaaataaaaattagctacaattaaatttagtttctcggtcccagtggccacattgcatatattgagtagccacatgtggctagtaggtcttgcagtgaagagtgcagatctagaaagttttcctcactgctgagattctgctgggccgtgctgcttctgagcgtgctgctctgtatatgagtctcttgtacaaatgctagcaaaggaactctcttcactttggaaccaaaaggaacagctaaaagcaaagtagaaaaatacaaataaaaaatacaaggtagctggcaaccttacgagtcgtgttaggcagtttgaactttacttgattttgcctcggatttatcctatgattctgtactataatctttgccaacatttggtttttgtttgggcttacttttcaggtttcagaaatacaaattgaatatgtatagcactatgacttctacctgctagtgagaaatatggctagacatttcaaatggtttttattggatcatattgtattttgaagctttattctggtttacctttaaagaataggtggtgggaggcctcaaactacaattgtattatttctttaaatgtatataaaatataaaggatatattaaaatattcttaaaaattgaaaaattgtctagaacacttttaaagataattgtataatgatcgatgtcttaaaatgttacttacacatatagacataatcttgtgaaactactcaaaaagtagtataatttttttctgtaacatacaacgacatggtcatcttagagttctaacatgaacctcccacctatttatgagcattccattctacatattaactcccatttagttattcaatatatataaaagatacttgagatttcaggaaagatgagaattgagcttattcttatactgtgaatatctgtgtgtgtatacttatatatataatgtcaaaag

SEQ ID NO: 113589 - DNA, 1016 bp, Homo sapiens
tatcctgtaagctatacacataagacttggccttttctctctgagacacctatcactttgtaattgtttagtaataaattattttttttcactcttatgtcaacttgaaggcataggtttttcacattctgtaatacctgcagtgcacctgatacttgtcttatgtagcagcagacataacatttggatgtgattagcaagaatgtactggttgggcagagactggtaaaaattatcctagaatatcttatggtgttattttaacattctctcttaggttgttaggaaaagtaaagattcattttagattgttacaaagagtaaagatcattttaatatctgttgacattccataacactttgattgaaagaagttaattttgttaacattattctatttgatgcagtagtattctccataaaattcattccagaaatgtgtttatcaatatttgatacttggaaataaacttccatagaaaaaatattttaaaaagtgatgaaactccatgtattagtttgctagagatgccgcaacaaaacatcacagatagggtggcttaaacaacagaaatttttctcaccatcctggaggatcaaatttcaagatcaagatgttggcaggtttggtttctccaggtcttccttctccctgtgtcctctcacagtttttcctgtgtctctccatgtgtccaaatttccttttttttttttttttgaaatggagtcttgatgtgtcgcccaggctggagtgcagtggtgcaatctcagctcatcgcaacctccacctccctggttcaagcaatttccctgcctcagccttccgagtagctgggattataggcgcacaccaccatgcccggctaattttttttgtatttttagtagagacggggtttcaccatgttggccagactggtctctcgaactcctgacctcaggcaatctgcctgcctcggccccacaaagtgctggcattacaggcgtgagccaccgcaaccagccaatccttttct

SEQ ID NO: 113590 - DNA, 1013 bp, Homo sapiens
gtgtgatctcggctcaccacaacctccgcctcccaggttcaaacgattctcctgcctcagcctcccgagtagctgggattacaggtgcccgccaccaaccatgcctggctaatttttgtatttttagtagagatgggtttcaccatattggccaggctggtctcaaactcctgacctcatgatcaccctgcctcggcctcccaaagtgctggaattacaggcatgagccaccgcacctggccttaagtactttttaattagttgccattactcttaaaaatacagaaaactccttattttgatatatctgaaagttaatagaaggaagtaaaagaacaatgaagataattatacttgaaatgttttatgattgtgtttttctcaaaattatttctcaattttctttatagataacatattcgcaataaaatcttgggccaaaagaaaatttgggtttgaagaaaataaaattgatagaacttttggaattccagaagactttgactacatagactaaaatattccatggtggtgaaggatgtacaagcttgtgaatatgtaaattttaaactattatctaactaagtgtactgaattgtcgtttgcctgtaactgtgtttatcattttattaatgttaaataaagtgtaaaatgcagatgttcttcaccccttttggtagaacaaaagcaggatgataaccatatccccccagtgctcatcaaagtaggacaataaaaatccatccatctcagtccaggcagatttacaaatgattttttttttaagatcaaaaccatgacgtgataatgctttagttttgtttaaatattaatattaactattaagggtatatttgggctgggcatggtggctcgcacctgtaatcccagcgctttgggaagccgaggcaggcagcttcacttgagctcaggagcagtcacttgagctcaggagttcaagaccagcctggccaacatggcaaaaccccgtctctcttaaaaatacaaaaagt

SEQ ID NO: 113591 - DNA, 1025 bp, Homo sapiens
actcttcctaggggatttatagcttcaaagaccctgcaaatactcccttttggaatcatattgcaaaattcagccagcctctcctgaaatatggttggggtcgaggatgtggttagttgcctgtttctaacattagtaggataatggaagtaatacgtggaaatacatttcctagttccaggttttgatgcctataactaacaagtccaaaatctggcatctctttaagttaacatcctgcctttaccagcgatgtcgcaaacaagggcttattcagaaatcaatttgcataacctagaagtatgggcaatcttatgattttttaaagttaacttactgcttccactgtagcttgtatgaaattcagagaatatgaacaatatagtatgaagaggggaagtgatgggacacacctgtttaccttaatcctctgtttaattgctccttgtgccttacaagccagactatagaaaaccagtgcttgcatagcagacacaatcctgagaaggacaaaatgaaatctagatcctctttcctaaagacgtaatacagtactgtgaacacagtctcacacactgtctgcatttaactccaaacaaggttaaatagtctaattgcttggccagacttaacatttaagtagattagcataaacgtaagttgttgatgtgaaaaaaaaaaagggacactttgcattttccaacttgaatacctccagtagtctctgtttcatacttttttctgtattccttgccaacatcttcctttatttagcaaggatctccagtgccatctcaatgtgccctttttttctcttcacttctccaagtttctatttgccccttggattctgaaggtcccccacgcagttaaagggacctccagtgacaggaatatttgcacagcccacttaagcagtaactgcaccttcaaagtttgcttctaaatgaaagttctctcatgggcctatttatttacagaatgtaattttaagtcctcatatgagtataatacgtataaaggaa

SEQ ID NO: 113592 - DNA, 1036 bp, Homo sapiens
cccccaccccctcctgattttgacaactaaaaatgtttccagacattgctagatgtccctggggagcaaaactgccctggttgagaagcactggtgtatatctatgtatatgtatttgcatttttgctcaattatagtttctatctcttactggctagtgttggaagccaacccagactaaaaggaaagtaaattataggtgattgagtctagtagtatatactctcatttgttagagcgttagttgaagatttagtaggtgtgctcagagatggaaatgtcaaggcctaaatgattatttgatttatgggctcaaaagttattttatacaattcttaatttctggtttatttgtataatacaatttgttttgataatagatgtcagaattcagaagctgtctgggatattcagtatagagggatttatagctaagctattttaatcaaagctataatgaaagtgaaactggttttcaaaataattttctaaatacttcatccatatctctacgtataccttttagaaactatcttgccctgcttatacctgggcccaagggtaagggagacacacacacacacacacacacacacgtgtgtatgtgtgtgtatatatatctcataagctacagagagttttgaagaaagttattttaagtgaattattttcaaagtattttgaattttttcagcaaaaattccctcatatgtgtcaaacggagtctgttgaaaagagaatatttataggtgttaatttaaatttgagggttttctgcttaattaaccagtacattgggtttctttcatgcaggaagactgaaagatggcttcagaggctaagatttgtcagtagtagatgaaataggaactttagaggatgtggcattaaataaaatactggccaggctggtggctcacgtctgtaatcccagcactttggaaggctgagaggggtggatcacctgaggtcaggagtttgagaccagtctgaccaacatggacaaactctgtctctactaaaaatgcaaaattag

SEQ ID NO: 113593 - DNA, 1035 bp, Homo sapiens
ttaggtttgccctgctgttttaatgtcatttatccttaatcttatttatgaagttattaacatttgtttacacatttttcaaattttattatgattttaattttaataactaccccacgataccagcttaatgaaggtcaggtggacttaaagttaatagaagagcaccatttatcagttccacaaaatgaatgcattgtctcttaagaacccatacagaggagtcactactaactttggacttgagaaataatttgcctgtaagacagtcttagcatgttccccaaatgtaaaggaagcgctgatgtctatcactggacagaaagaatctaaagagtgaggaggtctctgttttactggcaagactgcccaaggtggggctggaacgggaccagtgtgaattctgggcagcaggcttcctagagcagcttgcctgttacctcaaagtctgggaaagctttcagggtaattggcctcattgaagattttgtttatgttattctgccttcatcttctgtggatgctatgtaattgtatttggtcgaaagccaaaaaagcaatatttgagaaatgttcttccctctttcctcttcatccccatttttccctgggtattctcaaatatcaacagtaatatgttcctttgctgagaaagatcgtttttgggaattcagtgatgagagcaaaggggaactgacttcagctcttactagaactgaatgccctgggaagcatgtctggctctctgtatatatctctctctggtaagcctttttttgagttatatttgaatagcagaagtttaagcattgacaatgtatgagtagtatattcaggttttaaaatgcgtacaaaaatcataaatactgtctaggtacaatgtctatgaaagttttttttttggtggttttttgtttttaaaatgtacttttatctgattagtagtaacagcagcaaaatgtgttctcctgaaatagttttaacaccagtgaaaggtggatcttgggagccagaacatgaagagaatctcattgt

SEQ ID NO: 113594 - DNA, 1008 bp, Homo sapiens
aatgatacatgcatgttggattaaaactgaacttcttctgtaggaaagatgatttgcccccctgtgaagtgcccagatacccactgttgcatttgaaggtggatcccagagaatagcctcagtaaaagcatagtcatagtgtgtggcctgccaagtgaaccatgtaaaatgtatatagtaaataattcatattgatattgtgccttgtacaacattgactttgagggttgtaactaccttgtggatgttgctgccactaaattatttacagtaaaggttctgtttgaattacaatccaaacagtgttcgattggtagttatgacaggtgtatgtagtatgcatttttggtggagtaattcttctaggattgtaattaatcctgtttcttcaaatcaggtcatgttaatccacttaatccataaaaattggatttaagtaattgcccttgtgtaaaccttatggtttacaaagtgctttcacatgtatcttccttacataaccaggtggatatgtggtagtattcccattttatagatgaggagacaggttcatcaaggtaaaacaatttgttgaaggttatagagctatgaagtgacagaacatgtgcgtgatcctaggtgtcctctctctgtaagtgcatacttgtctgctttggagtggaaagccactttcccaattagatgtacagctgtctgtcgaaggagactaagtccgagattaacggatggaagcaactgaatactttcttaggccctagtattatatggttcctagcaaatccctgaaaaaaaaagagcatgactcgtgtaagatagacccagggttggtccttcagtaatattttactgtatgctagataacttctttagttttatgctaattctaagtgtggattatccacagatattcagctacatagcttttgaaatgtggaaaatttaaatctgaaatattgggattagtttgtggaacacatgccattgtaatgtgtgctgagaggttgcctt

SEQ ID NO: 113595 - DNA, 1100 bp, Homo sapiens
ctattggtccatgccaccatgcttagctaattataaaaaaaaaaaaagaaggtttttaaaagatggaggtctcactatgttgcccaggctggcctcaaactcctgcgctcaacagttctcccattttggcctcccacagtcctgggattaccggcatgagccactgcacatagcccaattttttctttttagttcactttaaattaaaaatagagtttgaagaaaattagaattttagctaaaccttatccaaattattacattttccaaattgatgaggcttcagggagattttcaaatattctgaatccttattaatatgcacaaaactttgtttaaatcataggcggaatctcaaggttgtgtgtaaaataagtctaccactttggacttgggaaaacaaatattctgatgtaataagtgattagaagaaaatataatagtaatatgaaactggcatggcatgcctgctagacagcccctgaagcatattggttaaactagtaggttataaacacagtctgtgctctgaaggaatgtatatagttttaagagaaggaacatgtgacttgggctacacttaaagtgtaaggtgtgtttatgagcagagttttaaatttaggtgttttttttaacttatatatcttttctggctttgtataatttggctcagggctgggggcagggtggaaagaatagactggaaagtggggaccaagatggaggagttgagtggataagagcagcaggctgagctcaggaggagaacttgataaggagtaggggaaaggaaggtcaggaatgagccaaggctgggagatcagatggtgagatacaggtggatgtggtaatgatgacctgaggcaggagatttttgtctaacctcaaggtagggtagtagctcagtggctaaaagatatgcttgggactgggtgcggtggctcacgcctgtaatcccagcactttgggaggccgaggcaggtgggtcacaaggtcaggagatcgagaccatcctggctaacatggtgaaaccccatctctactaaaaatacaaaaaattagccgggcgtggtggcaggcgcctgtagtcccagctactc

SEQ ID NO: 113596 - DNA, 1047 bp, Homo sapiens
cttttggtgagttgccaaacctctccatgccttagtttgcccctctctcaaataggggtattgttaatagtacctaccacagagtttgttttgaagattacataaatctgtgtaaggcatttaaaagccttgcatgtaaatgctctaatgttacctgctatgaagttgaaaaggtcattttcttagtggtggctgctgtgtaacagtgataaggtttcctgatctggctgacaccgttccctggcttccgggtgacagaatcctttttttaatgagttgtgtctgagaagctagaattgttgtgggtaaggacctgggctctgggtttgaatcctatctctgtggctttccagctatgtgatcttgagcctcagttttctcatctgtaaaagtgggccagtagtacctatctcgtaaggtaaggatcccaggggttagtctatgtgaaagaaactgttaatagtggaatttgtagttggcatcgcatatcaaggtgtgtgcgtgctttagcgaaattccattcttaagaatttcttaaggaagtaggataaatttacaagctgtatttacaattatatccatctgtttatattggggaaaaattaggagcaacttaatgtccaatagtacatccatatggataatgtagtacaatatttgacagagaaaggtgtttatgatacttctttacagaaaaattttctgtggagtctggaagaatcttctaaaatattcagtgttttcatttgctaatgagattgtatttttttattatgccataaggtacattaaaaagtaagacatcttgacttggggaaactcacaataaggggaaacagacgtttagacataactatctttaatatctgatacaacagtcttattgtcctgagcaccgtgaaccgaggaaagccccttctgccaaagttttcatcctgttgcagaccttgcctatggctgtctcacctaaacaataggaagttgtcttcttgcaaatgaggagtgattatgaggctatggaaaatggaaaagctggaaagttcttta

SEQ ID NO: 113597 - DNA, 1016 bp, Homo sapiens
atgttgcccagactggtcttgaactcctaggctcaggtgatccacctgcctcagcttcctgaggtgttgggattactggcatgagccagcacacctggccaagattttcgaagggaatgtttttgaggactttggggaaagtttgtctcccctctgaaggatgcccgtgagtgtgtgctgctgagaggatggcagaatggcaaggtgggagcattctgcaagcatcatgacatcattgagctactgaatcaaccttccctagaactggcttccaggactttgggtcatatgagtcatgtgagaaaaatattctcctctacctttttctgagttaggcctcatgctgcttgaagctgaaaacatcctgttacacctcggttttaagcaccctcccctggcctctgagataagcctctcaggaacctgtggctctctaacccagtttgaaacgttttgctctccatagaattgtgtaccaggagagttatattgattaaattaggtcttacattttatgttatatattcagagacatatatttgtagtctgcatttcaggtaaagcgttttccatgttggaggtcaaatcccacgaggttcacgtatctattgctgctgctttaccctgttctggaaaagaaagttatttgcctgccgaacgcacagacatgagattagaaagtgatgacaagcgttaatgcttggctctttttatcatagactatactcttttctactctattatttcatctgtgtttgtgtaacatgtatctcacaatgcagaaatcttttttttctttttgttatgaaaaatttccaaaaaaaaaaaaaaaaaaaaagaaaagttgagagacttgtacggtgaacacccagatacacatctcctagcttctacagacatccttaagggttctgatggcagagatccgtgtgtaagcattttgaagtttttggctaaagaaaaacgttgtgttccgttctttttttattgtgtcggatttaaggcacagctcctgt

SEQ ID NO: 113598 - DNA, 1040 bp, Homo sapiens
tcacaagatgcaaatgtttttccccttagggtttatagagagtgtgaacaatgaggagttgagatcctgtggccctttggtccccagggtcttctcattcggccctactgagcaaggctggcttcccatttgctctcatctttttctccttcagtcactctggaaactagtagttaggagctggaaattgagaagctgccatttaggagtttatgcaacaaatgcagaggagagtctgttccagactttgcagttatatcaacttagagcttttgccaacctttcttggaaaaaaacccactggaattaagtgaaacttcacaacactgcacaatgtagccaattctgcatttggggtatgtaagcctggaactgtgggaagctggaagttgccccttagtattaacgtttgtttttgttgtccttttccttgaatgtagtcttacgtagagaacttggacagcctgtcattttccaaaacctctgtggctcatcctaggcacaactcatgtctctcctttcttctgttagtgtttagggatgggccaggcctgaactaaccgtttcagggctccgaggctgcgccttgtaacttgtgagcactggttctgggcagtcgcctccctgcggttagtggtgcccagcctccagtcgctgtagctcagacatggcctcgggaggtttggaggatgcccagcgcttgtctgcccattgttgctgacctgccgcattgtgtgatatggctccatgtgcacatcttccatggatttatcagtcttgacaggagtcttccactttctgccagtgatgaaatagatctttatgatttttttttttttttttgagatgcgtctcgctctgttgccaggctggagtgcagtggcacaatctcagctcactacaacctctgcctcctgggttcaagtgattctcctgcctcagcctcccaagtagctgggactacaggcacgcgccaccatgcccggctaatttttgtatttttagtagagaggggatttcaccatgttggccaggatggt

SEQ ID NO: 113599 - DNA, 1036 bp, Homo sapiens
caattctgcctcagcctcctgagtagctgggactacaggcgcgtgccaccacacccggctaattttttgtatttttaggagagacagggtttcaccgtgttagccaggatggtctcgatcgcttgacctcatgatccgcctgcctcggcctcccaaagtgctgggattacaggtatgggccactgtgcccagctgagttttgcaagtattaatgtaaataatgtgagtaaagcctctactgtattttctggcacatggtaaggagtctcagggtatgtgtgcaggtgttgtattacttcttgccatcacttttcttaccatcatcactgtcactgctatggtggtgaagaagcatatcagttaggattaggaccagtttcatgagacagaaaacccagtaacataaatgagatagaagctttcctctatactgcttatctgagagagcagagggcaggccaggactgaggtgacagcttcataatcatcaaggccatgcctcctctgtctcctaatccaaggtgactgcccaacccgcaggatcatcttcatttcccctccaggatggaggaaggagctagagtaggatttcccctctaccttttccaggtcacttcctggaagtatcccccaaagggtttttttttttttttttttttttaaatggagacagagtcttgctgttacccaggctggagtgcagtggcatgatcacggctcactgcaaccttaacattcagggctcaagtgatccttccacctcagactcacaagtagctgggaccacaggtgcccgccaccatgcctggctaattttttgtagagatgagttttcaccgtgcttcccgggccggtctccaacacctgggctcaagcagtcctcccaccttgtcctcccaaagtgctgggattacaggtgtgaaccaccgcggctgtcccaaacttgtatatacatctcatttccagaacttagtcatatggttgcatctcagctgcaagtggtagactgggaagaggagtcttttctgcagccatg

SEQ ID NO: 113600 - DNA, 1063 bp, Homo sapiens
ttcctgaccatgtttattcctattgacccaaatacttgagatttatttttagttagaagaactcagagatgcctaaaggctaatcttaaactctataaactacattaaaacaaagatataatttcagtttctcacacttaacttggagagtgttttctcacttagaaactttctcaaaaaccttaacacttagcaaatgcacatgtgatgttttccattgctataactttctcatttaattcactttttcctttattcatttttagaatacgggggaacatttcagggatttggttattcctcctttctctgggagcataacatcacttgtaaaattgtacaaagataggacaggattaaccttttaggtaggatagagtaggataaggttcaagtgacttggcataaaagggacagctttttaaaataaggcaaaatgagtagcttctgtctatgagctactgttattttcagatttactcattatttatacaaaattctatttaaagtaactaagatattttgaaaaaacctgttaggatatactattgggtaaacagaaatactaatagttaaaaaaaattggtgcatattaaattaatgccttcatttcatggccggactcaggacaaagagtcatgatgtgggtcctacaacttactagtgatatgatttggggcaagtcacttaacttctgagttagacggggttttaccagaagcagaatgaggctaatgtctgtcttgctagcctcattgcaagaatgtaataagacacgggttataaaagtactctaaaagtgatgaagggtcatgaaaatgtaaggttatgttttacaaaactcacagctgagtctagaaacaattctttaataaggaaagacaattagaaaacctcacttctctgatttttcaacgtatattgaagcctttgcttttaaatatactgtatagtgaatgttaaatgcacttgtgtggtttttttgttttttggagatggagtcttgctctgtcgcccaggctggagtgcagtggtgctatctcggctcactgcaagctccacc

SEQ ID NO: 113601 - DNA, 1052 bp, Homo sapiens
cctgaactgaaaagttcttcctttccctactgaaaaaatacaaaacctttttccatctatatatgtatatgaacacattttctcagtgcctacatctataagaactaaacaaaataatagattttgtgctgaatcttgtctcattccagtaataagtaatagtcttctacagagactgacctgattggagaaaaagttccatctgtctcattaagatactcgtttccaataaaatgttatttatattgaataactttatagtttcttttgagcaattttgcctttaaaattgtatttaactccatttaaaataaacatttaatactgatttttatggttaaatacacaaattttatttgcagaatttttgttgcagcgtagaatagactttcaaactttaacaagatggaatactgtggaggaggtggaatggaaagttgagatcgaggagaaagggaaatgatgtactgtttccaactcttttgaaagagtttgttcatttatttttttaaaatggatatcggttgtggggatggctatggcatttaggtcagaatggatacgtttaagagatgtaatggttttatttaaaactcagtatttataacatgccagaaattatattctttgcaaccgtttaaaattacagtgtgaaaatttgaatattaaccttaaaaatgtgtgaaagagtctatagtttctccaggtctctttctggggttatgcaaacaaagatgtgaagaactgtgggcaaaggctatcatgggggcagaagtaatgaggaggacagtaagcatttatttattttttcccctacttaaaattcctggaaagatgaactgattggatatttttaagtcatagcaacattttaacagaaaagaatacttgccaaactttaatatgacatccaaaatacactctttctaagatcacttttacaggccctctcctcatccctgagcctttcttcatgccattcctgacatctagatgtcttctgctttcatcctttatcttttgagacagagtcttgctctgtcgccaggctg

SEQ ID NO: 113602 - DNA, 1034 bp, Homo sapiens
tcatagcatgaaaatatttaataataaatgtaatactaataaaattgctctccattcgaacatgtcttcctgcttaaaactggcttttgttgctcccatttcccatctggtctgtagccagtgtctttgtgttggcaattgacaaggataatgtgtttgatgcttcaaaagaggatggtttaaatgtcaaaacattaaaagatggccttgtgtaaattaatgtggttctcagatgttttagcaaaaatcacctctttatgaccctctctatgtcattatcatgctacaattttgtcaagaattacactaaaaattcttgactcttgactcattctttgtcatgctgagacttaggtcatggttgggattataacaaaattgattaaatatgaaacacttattttcataacattttttaggaaaatctcagataagtctcattttttttctctgtctcataattgtggattttaagtggattcctttgagtagctttcttttgaggtaccagtttccctcagatactgcatagcacagctttggaatcataaaccttggtttgaattctggctcaccctcttgccctgggtgaccgtagccaattaatctttgcagctttgattttctcctctgtaaaacaagactaatggtaccttttctagaggattgttgagaaggcttagtggtgcagttcacataaagatcattgtgtgaggtctacacaatgcacatgctctgtagcaggaccagaggctatcgtgaattattgcccatgtttctcttggatctcaattgcttttcacttggcatttgtctcggctgagtagagaattgctttttaaatgatgagaaatgagtcaacaatgcatggtgatgtaaataggagggcatgttttggttttcaaagtggaaatagccacttctattataaaagttacaatagctgattattgagggcttactttgtcctagattctctttaaagccctctacaaatggcatctcatttaatcattccaataaaactatgaact

SEQ ID NO: 113603 - DNA, 1479 bp, Homo sapiens
agccttttgttcaaggaagcttggttaccagtgagtgggctcctgaaaactatggtagcagtgaaagaaagactcttggaaaatggttatgattaatcttgtgtgcagtgtctgtgtatatgcagtcatgtgttcccaaaccttattaacaagatgaaatacctattttagtacacacttgattttctggataacccaatggtggtagtaggcacccaaatagcctctctcctaactctttggttcaccttgtttaaagcctttagactgagtaagaatcttttggaccctgtttttttggcttgaaaatttgcccaatttgagtggtgggtgatatatttactagttttctttattccttgaacttacgatgagtgtgtgttttataatggggtgaaaaaaaaaacagtaacctttttgttgaacagacagaaaatttccaacttgcttttagtgagagctgagacctgacaatgggagtgaacatgccgggcttgattccagccaggttcctgtttagaattgaggccgaggtcagtcagcaggtgcttgcgttctcacacagtccttggaaccaagcatgctgtgcactgtgattgtaggactgaacacttgcacattaaaaactcctcctcatttcccgagcacttcttgtgggatgctgctgcgcatttcgaaagacagtgtttttgctataatagaaagctgtgtccaccaggggtagaagggaacacacgagagcaggtccagagagaaaaaagaatcagaagaggctgaacctagtattgaggcctatgaaaataagatgcagacatcatacttgagaaactgttaatggaatagaaaagcttgaaaacatagtgaatacattcaattttttggtctcagcacaaaatcactggagagaaaaatgtacgtaacaagtgtgatgtgtttggtgctacagggaagggatatagaatagtgatactcttaagcatcatagaagcgatgggaacatcaggccaattactgagaaatttcctattgactgaaatcatgtgtgacagtttcagaaataatgataggctctcgtatatgttggtacgagtttactgtaaaaatcaatagcccgacttggtgctcaggctctgttttctccttcggtgatatcgaaactgactttcagccctttcattgcacttgtgactccgggggacacgtgctgatttcctggttctatcctaacggtgcctgcccttttctgtttactccatgtcagtgcaggcattgataagaattctagtcggtggggtggtgaagacatcaagagaccttaacctggggtttccttgctgtatcttaaacttttgaccaccattcttacatttgctgtgatcagtttgtagtctttatgtgtaatactttttctccccaccttcctggggggaaaattccacatgtaaaggatttgtcaaattggtgataagaccaaacagc

SEQ ID NO: 113604 - DNA, 1020 bp, Homo sapiens
gtttgcaggtaaatatgtcaaagggagagttatatttttatgagctttatgtgtgtcttattttgaagacagtttatacaataatgatgcatgctttttattttaagggactttgtaaagaagataagcttgtctaatagtgcatgggattgcttggtaggaggcctaggtttgtttcttagctcagctgtttaaccagatccttgactttgggcaagcacccctctgggtttccatttcgtggcctggaggaggagaaatttagaccctgtggtctattaaggttacttccaacataaaactcccatgttatgggttgaagcctgattttatcactttatgttatttagaggatttgtagctgtgtcatagattttgtgcagtgtcgccattgctgtgatttatttggtgcctttggccaggatgtaacccttcaattacagtgtagttcccatgggaaggtatgatattggcttcatgttgtgggttctaggaatgttccatggaggtaaagcaggggctatctctgtaagtagtttcattggatggctcgtgttttaggaccacactgctgtttggctagtgaagcatacgtaatgatgctgagtgtaatagcacactgtccaggtatttgacaggcatttctctctggtttatgggttgatgcgacttgatacataatgattattctccttctttccaatgtgtttgagtggtgcacacaaatcaggcatatattggaaagttttaggattttttaaaaggatttttccgtttttaaaaacttgaaatagtgattgtgatagtacctctagagccagtgcctgttctttcatcacaggtttaacagcctcataagtaaatccttttcctttcagtttctttttttttgagactggatctcactctgtcacccaggctggagtgcagtggcgctatctcggctcactgcaacctctgcctccaaggttcaggcgattttcgtgcctcagcctcccaggtagctggggttacaggtgc

SEQ ID NO: 113605 - DNA, 1035 bp, Homo sapiens
ttccaagcctaatagaaatagtcttggggagagagggatttggttgggggtgggggagccaacccctccctcggagagtgtgggccacagatagggtagactttgaaactcaagagaaacatctgcaatggtttcttatctgaccatgcacagtgtatggtgggtcacaccagtctttgaattttggcaccctttcggtagggtaagtttctgtgggtctggcctccgagagttgtggcctccggattaaagaggtgggatccagtgagctgaggaagaaccttccattgcttttatccccactgtccagagggtcccagagactgcccatcagttgcctgttctgtgatcactggtgatttctgggaggttttgtgattaattttatctcggtgcttatgagaaatgacacttaacctcatgtctttgaaccttgactttcatctgtagaaaatggaaatgttctgttccatagagagtcagttgtacttgcactggtaaaagaaatgattgattactttgaatattctatttaaggaaatggtacacagcatacttctaaaatgtagatgggatggaatcctttttacaaaagaaatgaaagtaaaatttccactaaaattggcaagcttttgtgggtgtacctgtttcatcttcagcatgacttgaagaggaactttagtcagtgtatatgtttccacttactgaaagtgagtatgtaaagtaactaaacctatagtggactctttatttagaaatagatactgctactttggaagggagtggattgaaagagttgaaaaactaaagagaagagaaaactgaatccttggggggaaaatcttaatgcaagcacaaatataacaccaaattaaatctaggaggaaaagtagtttgagcacaagggaaaataaattttaaaatttaagggtatgtgtacgttttatgtcacgctgtggtatactctctggtctgaatccttgtgataggaatgatttcatttgcttcaaacacctccctttttctcccctaccc

SEQ ID NO: 113606 - DNA, 1194 bp, Homo sapiens
atgtacactggaattgtctgagagagctattcctcaaacacagattcctaggctctatccctagaaattctgatacgggggaagtgctggaacccttgaatccatattatctctgagagatggccacattggctattactggactaaattatttcttgactctaggagccagtgcccatgagaattctttttaaaagggaggaagtgtttaggagctacacatttttaaagattccactacagaggatataccttttcttggatataaagggattaatcctgtaaatactgtcagaatgtgaactctacaggatttccctcttttgttattactggaggaaaggaatatatttcaaaaatgttactgaatccagaataaaaattgagttgtctgtaatgagagttaaaaattcatgtgactaccttattatacagtattttattatataaacgtggcattttacagtataatacgctattttattgtataaagtgctgttagtatattttcttatctctgtttatagttaaaggaaaaagacaatggaagttatttaaaatccggaaatgcctcctaagaagagaggtcaagggattatttggagaactggcgaatttaggataattttgtactgttagagtttgctgagctctggaagccaggtgttttaaggatcacatgtctggtgtaagcacttgttcttctcttattctatttccccacctctccaccacctccccaccaaaccccagtcctgatttctgcccttctcttcatcttctggcccttttaaggtgcatgctaacagatgaagaaggaaatcaccattgttctccagtctagtagagcctgcttgattgaaattgattagctctagatgattggagtccttgtagcagcaggggttatatgtcaaatggatctccactgaaggccaaagctgttcttcctctgcagctgccaggctgcttgaaattaggcagaatgattttgcacttggataatagtcaggaattaactgcagcttacaaagcactgcataattatgggaaatgtggatggtgctaatcaaatgcatctgcatatggcattttcattatgtacaggaggcgtatgtgtgcacagaaagggaatgagcttgtgtagagcttgtatgggtacatgtgtgagaagatgcatctgtagaaatggcc

SEQ ID NO: 113607 - DNA, 1079 bp, Homo sapiens
tattttcccttgtaaggttcctgccagccaccccacaggaaggaggtaatgtgtatcggtatttgaggatgttttaagcaatcttcaaagagtaggataattcttaccccttgccttccctgaaatgtaaatggcagtggttcttattgactatgctccttccaggactttgttccttccaggtggggatgtcacctgtgtgctccttctagcacctcttttctttctggtgtggccacatcagtctggaataccctcccacctttggttccctgaagcatctcatggaggtccttgtacgtccctgcaggtctagttacgaagcagaaggataggctctaaaccagtcacatgcaggcacttcccagtttacatcagtgcagggccaaagccaccctaggcccccaccagaaccaatgggttttcccagtgaaagacagcaggaaccatcctttccatacttaggattttctttgttttaccatcagatttgggttatgtttgagtgacttttattgcttcagccacttagctttctggtttattgggatgctctgcttctggccgccctgaaaggctggcactgctgaaaaacccgcctccctcagggcaagcaggggctggagtgatgaggccatgtagtattagttccgctgagcagctgctgctggcaatttctggtgttggaaaagaatgggaagctgttccagttagaattaaagcttacatcttaagagagtgttttctctctcctgagagagtctgcagatatgcagccgctggctccaggaagtctttagggaccccacgtcgccttccccagggtactgggatctcctactcgtgggacaaggtggagacgtttgttttcctggcagcagtttggaaactgccggcgcgatacttcggctttcaccccatttgctggaacttagtcccgtggccgtacccagatgcagagaagccttggaaatatgcccacttaaaaattccattatgtgaaagaagacgagaaggggggatattaggggccaaagagcaacctctgtcacagaaccttgggaaagaaacagtgagat

SEQ ID NO: 113608 - DNA, 1034 bp, Homo sapiens
gaattattttcttacctactgaagaaggaagcattgaaagttccttatttattaatacctcttcgtatggagtcctttcctatcatgtgagtaactttttccttttgtcacaactttggttggtgacttaactgtaggggtgtgtgtgtatatttttaaaaagacttttggaaatgttgtcacctggtttatgtcgttaaaatacaagactgttagtgatgttaaaatcatcagcattcacccttttctgcctgacatgccacagttggctggctttcctactgatgacggagctatagtcctactgtgggtctttggaggatactagaacaaagcaaagcaatctgtcacacagtttcccatcataaaatacagaaggctttcaaaactcatggctctcacctcacgggcgttcagaaggaggtgctctaaggacagtctctagtgattttgcctaccttccctctttggctcaggaatatttctaattaggagacattgattgtgtgcttggaggctggttccaagggagctcactattcatatcaaggtaccaggaagggagcttgaagaatcttgttgctattctcagaaataggaatctttaccttaaatggtacctgatatggcatttaacaagatctggcatcaagtaatttaagttccaagatcagtaatttttgtggttatttcttactggattccattaaagaggtcccatatcagaagagttgcctacttgtgaacagatttgctacagtgaggaacattcagcttaaatacagcattctaatctgtttcattttttattttttagtttttgaggcagggtctcactttgttgcccaggctggagtgcagtggtgtgatcaggctgactgcagccacctcccaggcacaagcgattctcctgcctcagcctcccaccactgcctggctaatttttgtatttttagcagaaacaggctttcaccatgttggccaggctggtctcaaactcctgtcctcaaatgatccacctccctgggcctccc

SEQ ID NO: 113609 - DNA, 1087 bp, Homo sapiens
gctttagcattatggcaaatgtgttttaaaactcttaacagaggagcaattctctctctttttccgcaggtatctggaattggcactcgtagaatctctacagaagggtctgcaaagcagctaccaaatgcttattttctgcttccaaaggtccagagcattcagctgtctcaaatgcaggtcattttaatagatttactttgaatgctggtggccaccaaactttgtaaccttctcagaattggttattttactattttctgctttttgaaaaaattatatagaagtaatatacatatataaaatatcagtggattccacctaacttctttttaatggctgtggagttcacagtgttgatattccagagtttgcttaatcttattgttggtcttttgaaatgtttcctgtttttcactgttattaccgttaggccatatacctattttataagtttctttaattttccttctgaatcctctgtttccttggggcatgtttcataaagaggagagattctttagttaaagactgtgaacgattttgtagagcttgttaaatcttaccagcttgcttttcagggaggcagcccccatggtcacaagtaataacaggcccctaaggatgtcctgcttttagccctgcccggatggggcttggtgggaagaactatttctgatgttatagtagatgtataatgataagtttaaattcttttaatatacatttcatgaatcattttatagggttggctactttttccctttgattatccatatttccttgtaactggataattttataattgagaaaagctcttgaaccaatatattatgaaacttacctcttctttctgattggtaaataaagaacattgcttagaatttgtagtcagtaccattagtacctggggctttcattcattcagcggttttcctgagcctctgctttgtgccaggccttggtctagagtttgtatctgcgtagagcctacattccagttggggagaagaaccaaattaatttacctctaggattatatctggaatctttatcaccaagtacataattcttagggatcttaaat

SEQ ID NO: 113610 - DNA, 1038 bp, Homo sapiens
ctgtgccagacatgcagggcctacttgtcatttgtttgaggcccagcatcatccaattgtataaaaatagttacttgcctttggacagagccaacatacgctgcctgacctatcaaggtgaaaatcccacatggctctgctgaagctgccagcccaggttgtaatagttaaaagctagttatccaggtgtaaaaaccaaggtgttgcccaacacagatgacttccacttggccaaaccaaaagtttagatagtacaggggttatcttagtctcccaattgttttttgtctgtctttcagggtttctggcacatttcagggagtgggaggtagtgtccagtaaatgacacttctttttttcttgagttctgttccaatcatgaaataaaaagaacttgaagtgttttaggggaaaaaaaatctcttagaaaccaaaggagtgtggtaaagagttatcttctaaaagctttaatgtgggaaaaatgcttcccccaagcatctaaattatttgttgtggaattttattaaataaatgcattaattgtgaatgagcaaatcaatataatctcccctttgaggcctactgtgtacccagtggtttgcatatgtatctcatttagcacccatcatattgctgtgaattcaataacttgatttcatagaagaggaagctgagtcttagagtgggtggggaatgtccccaggcttttatggctggggtttgatctcaaatctgtgttggctaagcacttggccacactgccttttctaaaatgatgtggataaggaaaaatgctatccatatgcagtagcctcttttttcctcaaagcaaactaatttcagccacttcctaggtttttgcaaatgtttgcatgagtgggtctggcagtatagttagattttgttttagtggttaatatctgaggaataaaagggtagtggtggtggtggtgggggttgaaacacaattgctatttaatatcagggaaaaatagctgtacagtacttattaataactcagctgagcctgctgttatg

SEQ ID NO: 113611 - DNA, 1062 bp, Homo sapiens
atatttagcattcaaaattgtgaaaggggagaaagatgtctgagaaatacagaatctaagattgggatttgtctaagtaattctttcatatttcataagttgtagtccttaaataaaaaggtttcatgtggttattaccaggaacatcaagcctcttgttcattctgtctggattaatatagattctcaaatatatttatttattaggctgtgctttactcttgttgataagacatcagaatgacttaatactttaagtctgttatttcctttcctgtttaattgcacacagtccccccaaatcacacccttcttgtggcccagggcaccagcaattccttagcaagtgaagggagatgattcctttctctctagtatccagttccctaaattcatacttcttcaccacaaaactgtggaaatacatgacatacaaaaggagttttaacatttctattttcttgacctttgcattttatcttggtatggttttctaatatatatccctgtgttgatggatttttaggcctttaggtacctaggagaaacagatttgatctattttaatttgttaaaaaagtactgactgcagttgaaaaacctgatttttttttctgtttttctactacctagccccaagatctttgataagtctcttaacccctccaagccacaatttcccccatcttctaaaaggggataatactttatatgaaataatatgaaatatataaactatattaatactttcaatgaagactacttaagaaaaagttgtttatagagttactttttcttttttctataaaatatctgatctgatttgttaaaggagtatgggaggtttcaaaactagagaattacgtttttatttgtttttcctgtctaatcagcccaggctcactctggatgagggcgtgtcctgttgtcacacagtgtgctcagttggggacagttggggaacttgtaaccctagtatgtggttgccccctggctaacattttggttagagtttcttttttatcaagttaatattgctattgttttgttcttttttttttt

SEQ ID NO: 113612 - DNA, 1151 bp, Homo sapiens
ttcattttccttttcttaaatatgtgttgacatcatcccaggggctgttaagatctttaaatttgacagagtcttgcattctttttatatgcttttgtctctttcatccataactcttccctgttaaaaatgatagtcagttgaattttggacatctctttttttttattttttgtttttttggtctaacttgagggtcatggtttctaggtcattgtactgatggaaggcacacttagaattttgttactttgtaaacctactttaaaataacaatagattcctgtgtttaaataacattttcaacaaacatcagaaacaccaaactccagtgttcctgtgtatatttagaacatattcacctgcttataggtgtaataaggaattttcatgttgcccgagggagaacttatgattttcattagaatgtaagctcagtgacagtcctgagaacagatttctctgtttagcttactgttgtgtatccactaaaaagaataatgcccagcatttagcagatactcagatatttattgaataaatgaaaaagtgtagtttctgaatacttgataaattgtttattattagtgtgagattgagccttttacttaaagttcttttcctccttttttcttcttttaggcagaaaccactaatactagcctcttgcaggtgcaactggaatgcagtttacataataaagtgtgtcagcaattaaaggtaaaataaaatgtgtagtgttttctctctgctttcctcctgcctctttgcttaaaaataaaacacaaggctgggcgctgtggctcatgcctgtaatcccagcactttgggaggccgaggcgagtggatcacgaggtcaggagattgagaccatcctggctaacacggtgaaactccgtctctactaaaaatacaaaaaaattagccaggcgtgctggcgggtgcccgtagtcccagctacttgggaggctgaggcaggagaatggcgtgaacctgggaggcggagcttgcagtgagccgagatcgcaccactgcactccagcctgggtgacagagtgagactccgtctcaaaataaaataaaataaaataaaacacaaaacagcatattctgttctcacacacgtcccattacgttaaatgcttctcctt

SEQ ID NO: 113613 - DNA, 1881 bp, Homo sapiens
gtgatatgatttgtgtgattctctctctcactggccttgcctccccttgccttagcattgctaacaggcagtgaaagggatattagctgagtggggaaaaggaagtgaaataattcagtttatgaaataggttcagcatcaggcatccagatgtgtgaaaagagtacatattcacatggtgtttctgagttggcttcaggttctggtttggtcctggcggcctctgtgagctgtgctggccgcagcctggttgcttcccctcgggcttccagttgctccctatgtgagccagaaggttgaaggaggcgattgccgaggttgtctctggcgctagctttcatttagtaacgttttatgatgctcctgtttttgcaattagaggctcataagagggctgactgttgtcccacactcaggcctgatagcatgcatgtcgtctgttcacaggtattttagaatggactcttctgcaacccagtttcacatagagactcatgagaacacatcaggactttggtcaatatggtaccgcaaccattttgaccgtagtgttgtattaaatgatgtgtttctttccaaggagaccaagcacatgttaaaggtacatatagtattttttccccaagttttagcttattttaagctttgtttaaggtcagatgctgtgaaattatttctataaaataataaaaaatattccaaatgctatgaagttattatttatataaaattttatgatttttaaaacatgtatttttcttttaacattttcagaattacttttaggagacttctctttctctctttttaaaaaactgtttttaaaagagctcaaagggaccaggatatagcctttcaaaattatttgctcttaccattattcaaaaatattatgtatatgtattgttctaaaaagattagtaaaaatgagcctggttcatgataaaatagtaggttttttgcaaaatatcacttactgaaatttcaagattacttttgtgaaatttaaaacagtgtcatcttaagcattatttgtaacctatcatttctataaaaatattccaacttttgatctggaaataactgagtaaaatcatactttctgaagtatagaagaatgttagcatcatactttataatgattttaatcataattagtgttaggaaaagtaatttctcttgcttcttttctttttagattctgaatttcactggccctttatttctacctccaggctgttggaatatattttctttgaaacttgctgttaaagacattgccataaatctattcaccaatgtatttttgactacaaacataggtgccatttttgcaatacctctacagatttattcagcaccaaccaaggtattttctacaatactatatgtgtgttacagttttcttaattactgttgctttttattaacctttagtgcttgagttttattaactgggttaagctcacgttctttaaggctaagaaactgaaggatattaccaggccagtcttggatgataaattgttcagacataaaaatctttatttggaaagagttttcttttttataaagtaatttgaagttcttgaatgaaataaggcatgaccaatagattaatagatgtcattttcatttatttccaaaatttgtagagcaaccagtatgtgtttgctatagaaaacacaggttggcttttagtacatacttgcaatgacttaataaattaaattgttaaatgctttatttggatctcttctaagtgactcttagttgctcgtaatccttgaatttgcttagtgggccaagtataaagcctgaaaagattcacagttaagaaaatgctttctaaaatctgggtaaattatatttaatttagac

SEQ ID NO: 113614 - DNA, 1026 bp, Homo sapiens
gctttctaggagtatgacatggtttaatttgttaatttgcagggtacgcattctgaggaatccaggtttggcatcctccacttacatctgcagcctttggaaatgaaaagggttggcgtagttttcacacctgctgactatggaaaagttacctcactcatactaatccggtaggtgtgttcctgttgtagaatctgtttctttctcaatgactcatctgtgtaaatctctttagctgatagttgacgttcacttctcagtcagaccttcaggatgaaggctgtgttgcggggtaggaagaagtggaagctgagaaagaggtcactggaggcttgacaagtaatccccaaggcctcagtctcctctcttctccaatagggagtgtgcgtgcatgtctccaggagaggtagtgctttccacacagcttctcgtctgtgctgtctcaaaaggcagaacacactcatgcagatctactcctctgtccttagcatagaaagatcgttaaaggactgctgtagatattttcagtctttagtatttgaacaaacttatatcactttcatctcttttttgctcctggaattctcagtagcccaaaggacaatagaaaaggtgtttcattgagcccattggctctttttattccttttcttcctttgaagtgagttactgctgactgatttaagcatgcttaatgtgtttattttttaattgttttcatctttaggtagtcttgagagtcttttaaaaatttacagtaaatacagatgtatcttgaagctctcctcatcagtgagaagtccaacacaaatttaatttttaataaatgacatttgagttattttttcaaaacttgtagtatcagatcacctggcaaaaaatttattattcagaattttctttaatatataagtttgttcttttgcaaatgaatgatactaaaaaaagttaaagttcttcagagtttattcattaagcattttaactaaaaatacttaatgccctgttgacttagtgtttcttttt

SEQ ID NO: 113615 - DNA, 1008 bp, Homo sapiens
tgtaggaaagaagatggggaatgtgagtggaaactattagctagaaattgaattgtttttgtttattaaagggaataaccagcaagtacctgtcaagaatgaagtagatcattgtgaaaatttgaagaaggtggacacaaagccttcttcagaaaagaagattcacaaaacatctagagaagacatgttttctgagaaacaggacatacctttcgtagaggtctgtattttttttcttgcctattaaaaacaaaatccatttttaggactgtgtattaagtgaatatgtgtatttcatatgtttcactgcatttgaatccatattaataactggtgagtttgatgtgtgtgtgttcagagaattttatttaccttctaattatatagacgttactacagtaatttttagagaaaccagatagcttttactctgaagagaatctgttcttaagcaaatgggtcattcctaggtaatgatggcagagtagaacttgactaacatattccttctatctagttattactgaacatctatattttagggcatactcttgctgagttgtattgctttttgtctgtctttgtcctcatatctattatcgtcttctgtctaaaagatgagaaaaggattcatgatataatagaagaaaattttcctgatatgagggaagaactaactttgcagatcaaaaggggacaatgtgtacaacaggaaaaattgatacatcataatgggaataggcacttagttaaattaattgaacttcaaatataaagagttgtgcatagacagaaaaatcaagaagtacaaacttaagcttgcctcagacttttcaataggaacatctaacaccaggaaacagtggagcagtatcattgagagaatggaaatgtaaacaaagaatattgcatccagccaagttaatactcaagtacaaaggcaacaggcagacatccttaaatacaaatgaaatcataagctgttcttgtaaaatcaagttaacgaaa

SEQ ID NO: 113616 - DNA, 1064 bp, Homo sapiens
gggttcacaggagacaggcccatctgagggatgtggatggcataggctgtactttgtggcccaaggttgtccccaaccaagtcaaccaaggtggattctctggtgcagatttgcgggcagtggtttgtcatttctttcctgtctctgtgactcactccttgttttgtagagctgttctttaaaatcccttgagtgtattaatactttccatttcattgttcatttggcgaaaatcattcttaataagtacattctcaagtgcagtgcccagtgtttgtttttcttgcacattcttagagcctaattttgcagcttacaaaattgtataaatctgtctgtataatacacgtggaacattcctctggatttattggcaaggaaggttgaagcccaggtttggaatccgcaaactaaattttaaccctagctttggctttttattttcttttaagcagacttttttcccttagaaaagtaattcatgattattatagaagcataaagaataaggtagaagaagatctatccagaataaaccacttttaacatttttgtattcttttctatgcagatttttaaaaactattatcttaaaatagttaagataattattattgtctgtagctttgccataagattataactaaattttctataaaaattaaatggggagctttgttttcagtggttacataacatttcatcatttaactgtgccataatttaaaccattctcctgcagttggacattaagattgtttccaactttttactttcataaataagtctgtgatgaacaattttgttcctcttacctgtgtacctggtaagtctttgttatagatgtcaaaaaatagaatgaaagggtattgatatggtttgtctgtgtccctacccaaatctcatcttgaattgtaacttctacaattcccacatgtcatgggaggaaccctatgggaggtggttgaattatgggggtgggattttcctgtgctgttctcgtgatagtaagtctcacgagatctgatggttttaaaaatgggagtttccctgcacaagctccc

SEQ ID NO: 113617 - DNA, 1092 bp, Homo sapiens
catagtttgaaagggcaaagggaatccctctcccgttgggtctgttaatagaccatgcctgacattgaaaagaggaaaaggctccaattgaggaaactatacttatttaatacttatgtatataatgtttatgcatctcatgctgatgcttttcagaaccacatttttgaaacatcaggcatattcttgcctatttacctgagaagcttacactagtttggagcattctatagagatttggctgttctcctaaagttcgtctataaacaaaaacataaagacacaacttgatcctaagttgagtttttacctaatttttcttcatagtacagtaatttatgtgagttgcacataccaaattaacaggtgaaggttggaggatttattgctgcaaagttaacagcaagctggtcataaattgctagcagatgtttttcctttttagcctcttaggaattttataggcaacaattcttttttcttctttttctgtggagcttgagggaagtagcgcaagaggggaaatgaaaacaaactagaggctgagcaacatacttctcagttttcaacagcactgggacattctgaattcagatggagttggtcttcaaacatttaaacatgtttttattcatatttagtttaaaccattaaacatttactttctcttctttagcaagaagatccttataggaagaaaaagcttcaggagaaaagagaaggaaatttacaaaatttaaattggagtaaaagtcgaacatgtagaaagaacaagaaaaggggtgttgctccagtctcaaggtgcgtaattcttactatctctaatattttgatctatttttcactttataattttgcatttggctattcacttttaaacttatttcggtgatattagataccgataatatgagagtgtaaatgtttatctcttaagattaaaatacatttgtaaaattaacattttcccattatgtttttattttgttaaaaataccttaaagtgaccattttgtatctttcctttataaaatgctaacagatttggtagtttttaggggaaaagcataagccatccctccgtgtggagac

SEQ ID NO: 113618 - DNA, 1204 bp, Homo sapiens
ggtcccagagctccctgcctgtgagcacaccctccctgctcagaagcccgatggcttctcctttcacatccgcttgacacttgtttttgtttttttccagataaagggtatttggcctgtgggttcttccccgggttgcaaataagttcatcccattagatgaggatttcacaatcctccctttgagaaaaaatggagttaaagcaacccagatttaaattgagagtagtctaataacttccaagtaacttgatagcattgtagtattcgctgatgtgtattcacctttctaaggcttttttttttcttttaacttatttttccttcctcatttatacttcagccctacctcacaagcacccgaagcttgtctccaatgtctggactttttggttccatctgggccccgcaaagcgatgtgtatgaaaattgctgccccatcaaccccaccacggaacattcgacccacatggaaaaccaagcggtcgtgtgcaaggaatactacccggggttcaacccgtttcgcgcctatatgaacctggacatatggactaccacagcgaataggaatgcaaatttcccactgtctagagactcgagttactgtgggaatgtgtgaaaataattggatttttaaacaatgtgaataaagaggcttgtgttttgattactagtgtaaactggttattgagatagattatgacattggtggatattttggcacttttatatgaaaataaattttttaatgaaatctgggtgctctgttttttttaactcttcataaatcagtggtaaaaacaaagcatccatatgtcagaactttcaaaagtcaagaagtgtgtcaggcatgccgaatgttttaaatctgaacacgggagacgtcttttttttttttttttttttttttttgagacagagtctcgctctgtcgcccaggctagagtgcagtggtgcgatcttggctcactgcaacctctgcctcctgggttcaagcaattctcctgcctcagcctcctgagtagctgggattacaggcgcacgtgtgccaccacgtccagttaatagagattttcagtagagacgaggtttcaccctgttggtcaggctggtctcgaactcctgaacaagggagacttctaagaaggtaggagttgagcaagaaatggctgctatggttttcctcctcctgagcatcacaacc

SEQ ID NO: 113619 - DNA, 1049 bp, Homo sapiens
ggagctttcaaaaaatgaagttgctcagccgttgagaactgctggaaagcccagcttaacaagttgtttgcttgggtggactctgcttgggggtgcagcggggggttctttccagtcctggtgtgttgctgggatgaagcagagagccctagaactgttctctccatcccacttacggcaagggctgttcctctgtcaggccagtccttgggggcaatgacagcagcaggaacattctggtaagtgtgtggtttccctcccagtgagcaggctaaccctgagtataggaacttaggggaggttaggtggctgatgcatgttttccagaccggtttgtatctgcttgtcattgatcttagaagttcatattatggtggaattatctatttgcatgtgtaaactttgaatatgtttttaacttttaataaaaagttatttttacattttgttttgtctttatattagaaattcagtaggcgtgatttgtgagtggaatgcagggtttgcttgctttgaatttatttctctttgctgtggttgtgtggaggcctgagacaagtgtcttgtaagcttggggggctgccctgcacggagagcctccaggcatgcactgcctctagaaagtcccaaggttgccaggttagaatcctgatctgcgtgaagcagacacttccctccccgacccccagtattgaataacattaaaaataattatgttctaggcatatagccaaaagaaagcaaggattagacatattttcacacccaggttgatggcagcgttattcacaataggcaaaaggtggaaacagcccagatatccattaacacataatgaacaaaagtgtaatgtgtccatacaaaggagtatcattctgccctaaaagagaatgaaattctgatacatgctatactatggatgaaccttgaaaacattatgtaagtgtaataagccagacacaaaaggacaaataatatgtgatcccacttctatgagggatctaaagtcaaattcagagacaaagaacagtggtgggcaggggctgggg

SEQ ID NO: 113620 - DNA, 1035 bp, Homo sapiens
ctctgactgccagaaacctaggggtcaggaatgcttatagcaaaaaataagggtgggctaggctgtggaggggcttgtgtaccacaaaatggggaaacttaaaatgaaactccatgactttcttgctggtttcaaacccagattatcgaaagggaggttctgaattgatgaatgcatgccaggagtgtcagaggatctagtactggtggatttgctgctgatctttgctcttccttaaggctggcatcactgcctagtctgctgccctcaggaggtatggcctctctgttgaggctgccctaggagggactcacagcttttcccttaatcccatatggcaagacagtgtggtccaggaaccagcagccaaggcattacctgggagcctgttaaaaatgcagtctcagttcccacgccagacccactgaattgaaatccgcattttaaccagatcccagggtgattcatttgcacatcaaagttcaagaagtgctggtttcttgactttactagagctagggataagaaagtgaaaacagagatagttactgaccagcctattatctgatagcttccctttggtttgaacctcaccctattttattttccttcatcacccttatcactacctgaagtatgtctatgtgtgtatttgattgtctaagaacctccttcagcatgaaagctccagcagaaaagccatgtggtctgccttgctcgctcctgtatttccaggacctagaacagtctcagcaaacggcagggcctcaataaatatttattgaatgaataaatgaacagtaacgtacaatcttatgatgtaagaccctaactccagcataccttactggacaaacaccatctccctattccccatcctccacctccccagctacaacccctggggtcttttgagcctgcaactggttaggtatgtttgaaactcctaaaatttggagtgtgagagcagagaccatgggtttaggagttccctcttctgcttgtctaaggcttgctttccaggctcggatttct

SEQ ID NO: 113621 - DNA, 1609 bp, Homo sapiens
cataataaattgagtttaaactttacggccacagagggatcatatttcacctaaaagtcaggcatttcttttcatgcttaagtttccaacagaggaagtcatttgttggagagagcacacaccacatgcaactttcttacaaacacaagggtgagtgaggaaaggagaagaaaagttaattgagtcccgcaaagagagagttttgaaaaaatggctgattggaaaccaagtgcctggcaaatgctttgaggctttagcagtggagccacctgctgcccctagctcccaacccccgatctgcagcctctgagggtcccattagctctaggaagcctctctttcctcatccaggccaagtcacacgagttggcagaatggggggaggtatactgtattccctcattataactggcatgactctttctgccctccctcatagcactgaaaataaaagtgaaggagataacctacatcaaccgagataccaaaatcatcctggagaccaagagcaagaccatttacaagctgaacggtgtgtccgaaagggacctgaagaaatcggtgctgtggctcaaagacagcttgcagtgcacctgtgaggagatgaacgacatcaacgcgccctatctggtcatgggacagaaacagggtggggagctggtgatcacctcggtgaagcggtggcagaaggggcagagagagttcaagcgcatctcccgcagcatccgcaagctgcagtgctagtcccggcatcctgatggctccgacaggcctgctccagagcacggctgaccatttctgctccgggatctcagctcccgttccccaagcacactcctagctgctccagtctcagcctgggcagcttccccctgccttttgcacgtttgcatccccagcatttcctgagttataaggccacaggagtggatagctgttttcacctaaaggaaaagcccacccgaatcttgtagaaatattcaaactaataaaatcatgaatatttttatgaagtttaaaaatagctcactttaaagctagttttgaataggtgcaactgtgacttgggtctggttggttgttgtttgttgttttgagtcagctgattttcacttcccactgaggttgtcataacatgcaaattgcttcaattttctctgtggcccaaacttgtgggtcacaaaccctgttgagataaagctggctgttatctcaacatcttcatcagctccagactgagactcagtgtctaagtcttacaacaattcatcattttataccttcaatgggaacttaaactgttacatgtatcacattccagctacaatacttccatttattagaagcacattaaccatttctatagcatgatttcttcaagtaaaaggcaaaagatataaattttataattgacttgagtactttaagccttgtttaaaacatttcttacttaacttttgcaaattaaacccattgtagcttacctgtaatatacatagtagtttacctttaaaagttgtaaaaatattgctttaaccaacactgtaaatatttcagataaacattatattcttgtatataaactttacatcctgttttacctattctt

SEQ ID NO: 113622 - DNA, 1095 bp, Homo sapiens
gatattttataggctttttaatagaaattttataaaatgatatttttctatcttgcccttaatgaagtgatgtagcatgggggctgagaactgtgttttggtaaggctctggtgatttggaattatctgctgctaacatgcctggctcttagccagtttgagggttgtatacatttgaaaacaggcatatgaaaccccgtcagccccatttgtggctcctcctgaggggaaaagttgctaaggactttgagctacctcccttctttctctttcctcagcagtgtgaagcctttcccaacaccgggactatggtagttctgggaccagtcagagttaaacccaggacactttctggaagagacctggagttgtcaaagagcagggattggatggttccagagttttagggacctgaccaggcctgagatttctgggatggcaaggtaaggagagtgagagctggagtgatttccctcagtctcgaggactatgttgaatatgtagaagtgttaatatgggtctattagactccattattgattgacagagcagggaacatatctgcttatgagtaagttcagccttgtgcctgaataaatacttttttaaaaggtaccaataattccaacacaccaaaaggtacctgcccttggaaaaggataaaagcaagaatgcctctgggtgaagttcctggtcattcccaactctgaatttagcattgatcctgtgtctagctgggctcctcttctgacctgagagccctgaagtcagcagatgaggtgctggtagagttccatgtagacaaagccccagctctctttccccttataatcctgtcttcaggggagtgacttgcaacttatggaacatatcacatgtgttttttattgtccccaaacaccatgtgatctatcatgtatcttgctaaagtaaatttctaagctttttttttcctttttaaaactattttcgaaactgtggcaaatgtgtctagacttagtcatacaaaatttacaaaaaccttttaaaagggattttaagatggtgttttaaggttgttaggtgttccatgttaggtgtcttctcagtaagcca

SEQ ID NO: 113623 - DNA, 1530 bp, Homo sapiens
ttttgagagtttgaaacaggcacagaagggcaagaagaacctgtaccagggagcttgcagataacaatgaaatgaatgctgcctaactcaagcacaatcttggcagaggcacaaggtgacacagaaccacttagagcaggctgttgtaattagtgagatgtgttttcaaggtggaaacagcccacatgtggaacgctagccagtcacccctcccagtccagacttggcccccctgagatacagagctctgccgagtagagccaactacactggtgtcctgtggctgagaaagacaatcttttgtctatattttctagttaccagttttcccaaattcctcaagtatctttggttctttgggtgctttctccttcaaaaggccttgggaataactttttcagactgaatttcccagaggttgggaggatgagctgaaaagctgcaccctgtctcagttaactataactacatacacttgtatactctgcccacaactcccttttgagagtcataatttattaaacacaacaacatataggcattctcattttgctcccaccacccctcccccccaaaaaaattgggaagcatgggaaaactttcttaggattgagtgttcctgcttttatagaggaggcagaagctgaggttaaataggacaattgctacttttgtctggataagtccctttgagttgtttacaaacgccacctactgttctcttttaagcaaacttactaaagactgtttttcacatttctagctccaaaggtatgtgaagcctgcaaaaataaaaatgatgatgacaacgacataatggaaacgctttgtaaaaatgattttggtaagtaatacaacaacaacaacagatttcacattcagaagttttatttaccagtaaaacttcaaggtgcaaatcattatgatgttgctagataaaggttgggtaaaacaccattatagctcatgtatcccaaaatcatctaacttgatctatcctagtttcctccttatgtaactgtctagcattgagttgtatcttgttaggtgagactcattgttctgttaagccaataatcaaataatgaaaattattcagattatcaatttccagtggcacattttaaatccctttttttttttttttttttttgccgacaggcataatcccgagttctattttcttttgattacttaacatgtgcaccagggatggaagtgtaaatattagccccagccaaacagattcaaggctttaaattggccacaaataaaaatatttttactttctttataacccataatgattttaaacctctgtgttctaccattagtgaatatatccaaggcactgattaataatttgtcaaggaggggttccttaagttgaaaaagaagagtggcttactgagaagacacctaacatggaacacctaacaaccttaaaacaccatcttaaaatcccttttaaaaggtttttgtaaattttgtatgactaagtctagacacatttgccacagtttcgaaaat

SEQ ID NO: 113624 - DNA, 1137 bp, Homo sapiens
gaggaatggggttgaggatttggtatggggaagagtcttactttttcatggttcatctttgaggttttggctttttctcatttcatgtcattttcccaattaactagctagttactttaaacattgagcatatacatattagttgtgcaatcttacattagttgtagagaactgtatacaattatttcattttatcatcttgttttaggatctctcgttcatagtctttttactacatattgggtttatacatttatgtctttagctatggatagtataaattttaaatctattagataatgttttcccctctatcccagtgtttaatgctttctggttatatgtattaaagttgctaaatctccctaagcaacattttggattggaacagttgtcaatttgtatatacaaaatccagagtcagacattctggaaggaatttaaattctatcacttaatagctgtaagaccttgtatgggaaatttaaccatttccaactcttctgtctctctgtctgtccatgtgcatagagtcaacattcacaactatttttcagaccctcagttttctctcagagaacataaataatgacgccatctttcttacctaccttacatgtttgtgatgagcaacaaaagagaatatacatgaaagctttcgtatgttgtaaaacaatatgcaaacataaagtgtgattgttcgtagtcctttgcttgactgtaaagtgttaagtaaagactactgagttgagatgtccaattttcccatattttgaaataagaaaagacattgaaggagtcagataatatttatgaagccaaaaatctaaggcaaaaattggatgtatcatttgtaacttgagacaaagagcaaccaaagatactctatgttaaggggataaaaattctggataataaaagatatttgttgtactgaagagaagggaaggaaggcatctcatcttgttgggagtggggcgggtgaggtgggtgtgttcccgccaggtggtttctgtccctttccttcctctgaattttaaaagcatgacctccctcttgtgcttttgataagtttaacatcaagtgcagggccttgaatgtcagctcctgacctcagggacaactttctgggaagcc

SEQ ID NO: 113625 - DNA, 1033 bp, Homo sapiens
aggcacaagaaagtgtgcggtgtgttctgggacaaagaatgttctgctactgtcgaataatgggactaaagctggcttgttctggggaaagctcatataagtatggattttattcctcaactagtaggataccaatactggtattgaaacttggggaaaataactggagataccagtgcagctatttaaagctgtagcaagggctgcaatcttgcggagattttaaagagaagttttaaagtttctaatactgatgcctctttttggtaaatacaagttttataaatcctgccctgggatcctgattccccattaatcaagatttgtcagacttcaccttctataattagaaaacacagttataagaacagtcaattttttaaattttccaaattaaaaaattgcaccatgattttgaacaagcacttccaattacattacccatcttgtatgccataggtgggagtataattgtcacagcctttaggaatgtagttttctgggatttattgaaactttgaaccttttggcctactaagttcattcctaggaaactgcctaatgggaatgatctgacaagtgtacacaagcaaagtcattgcacctttgttctttaatacttaaaactagcccaaatgccctgtcagtaagggactggtttaatagatggtacctttatgcaatttgtttctaagtattcgttaagagagtgaggaatgtctggattattagggcaagatttctaaacttgggtaaaaaaaaaagttgtgcaagcatttttgtggacaacttgatgctctaaaatataagtaacaccacattactaacagtggctttgttaggaagcagaattatggaagaactttcatgggtggctttacatatttctataatgttttaattttctataagcatgtatttcgtaaacttaaataaagaaaaaagaacactacacttgcattcctgagagattctgatatgccttctaacaagaaaaatcagaggtggatgctgttccatctctaaaggccaa

SEQ ID NO: 113626 - DNA, 1155 bp, Homo sapiens
tgtttagtctgttattttttcttttaatgatgaataaacatttgtaatgcttctaagctgtcacacttaagtattatagcagcacttgcctggttagggcatatttgcatgttattatgtgtgttcatgcatattcatattacatgtagtatatttcatagcttagtcctctttgagttcccatctaatgaatctcagggatttatgctgggaattgcttaaaattttgtttattattctggaattggatgtcagattttcaggtgctttttaagatctataagttctgaacccagcccaaatgaaagtagacaaaccaatattaagagaaggtggagtgcctgtgtcttatgtatttttataaccgtagtattcccatgcttgggctaatgatgcttcataaatgtttgtcaagctgtactgctgaggggataccaggtgtaactagatttttccctttaagctgacaatggcaccatgcatctttgggactggagaactggctacaattttcagagagttcacgcagctgtgcaacctgggtctttggacagtgaatcaggaatatttgcttgtgcttttgatcagtctgaaagtcgattactaacagctgaagctgataaaaccattaaagtatacagagaggatgacacagccgtaagttctgtgtttcacattcgttaagtaaaacagctataccaatttggcagcatattctcatttaattatcagaaggaaaaataatctttatagtatttaagatatctgtcttcttgaatagtgtccatttatatatttctatattgtttcactgatgccagtgaatccatggatggctttaattttatcccaacttcctttgttatagttgctgggaaatgttgcaccaagaataacagcaaataaatagattgctatgtaaattaattcgagaatcataagctttggtgttagtagaatatccaagtagaaatgttattttagatggaaaactacaaactaaacataatgaatccatccatctgttattagacttggataatgccagaagtttatcaactcttcctaaaactgtcaaagaactaagtgtataaagccaatgaataatgttagataccttatttttgttagaaaggaagcctattagacatgaag

SEQ ID NO: 113627 - DNA, 1105 bp, Homo sapiens
gcagtgtatggtttggatttgcacccgacaatcgatgtgttggtaacctgtagtcgagattcaactgcacgggtaaatgggatagagttgtgtatttatctgtaaatatattgcatcttgtagggtgcactttcggtttcagtgtcttcaattgattgatagagaattaaagatagctgtcttgagtcatcaatatcctagtccctaagtttcttaacttgcatttttttccaccttagtcttcagttgtatggcctcaccatgttagtgttattagtgccctgcccctgaaatgtgatattctcacgttccattctgtaacaactattgtccattagttctttcattcagtagtcttaaaaagtagtcccatcatactcattcttagattttcagtaccctgatcttttagctttttagaattcttgcaagttgtctcctatttatattcgtcctccagtttgtaaatcattatctttcacttaagcattttctttattatattcaggcactagttatgtagtaaattttcagccttgaattgatccagttatcttcttgagataatgaatacctattctctttcctaatatgtctattgtgtttttatagatttgggatgtgagaactaaagccagtgtacacacattatctggacatacaaatgcagttgctacagtgagatgtcaggctgcagaaccacaaattattacaggtatgatcgatacttttcaagtttacagaatattcatgtcagaatccatgttattatacatatacttttaatattcatgatgactcttgctctgtattgtgtttacagtgtttctgtgtcatattttaatcatggacaattgaaatgtattcaaatgaaatttcattccactgtttttacctcatgctttttacatatcatagagtatgccatacatagtatcctgtaatgtctgactagaatactgtgttatgaacaattattattttatagtgtcaaaattatttttctaagaaattgaagttagaagacaaaacatcttgagactagtaatctttagaactgatttgaatcttactttgctctaaataaagttagtaacaatggatc

SEQ ID NO: 113628 - DNA, 1074 bp, Homo sapiens
ttttagacctgaataaggagtaaaatttatcatttatactaataagtgttctaaataaatatctgtttgaaaagtgctatttaaaccactttttctttacctactgaatacctaccactaattcctttatacttacattgttctctccaactggttacaaaattaagagcatgctcattcatagaaaatgtggaaaatatagagaattaggaaagtacatagacctgtatataatcctaccattgttagatatttggataagtttcgttttagtatttatttctgtaagtatcaataccttcacttctaagctcttttcctgtgtgtgtatcttttaaaaaatcattcttagtatgtaattttgtatcttgcttttttcacttaacgttgtatcaaaggcatattcctgtgaaaaatttaccatcttttaaagtggttgcataatattatatcatttagatagtctgtaatctgttttcctattactggacagtagagtttttagtctgattttcaccattacaagtaatgctgttaagttttgtatataagactttttctgtattttaaattattttgttatggtagagttccataaatggaataaatgggtcaaatatttttgaagctgatacccaaagtacaaattactttccaaatgggtgaatcgatacttgcagtgtatgagaggatccttttcagcacattggttgtacattcctttacaaatatctaatatggtaagcaaaaatggatacttaatctttttaaaaaactttgtatgaaatttctaatgagtgtgaactttttcatatctgtatttgctgcttttaggatttctttaagttgttgccagcctcagttaatttaataccatacttttcttactgttattatcaaagatatcatttatataacaagaaggttaaccttttgtcatctaattgcaaatatttttccagtttgagcatgccagtttttttcttgcttttatttggaggggagtcattttgcaaaattttttatttttacgtatttgttatctttttccttttgtctttgaaagctcagttt

SEQ ID NO: 113629 - DNA, 1064 bp, Homo sapiens
tttatggatacgttcttatgtttataatttctaaatagtcacaaacgaaaaatggcaatcaagcttcgtaatgagtatggtcctgtgttgcatatgcctacttcaaaagaaaatcttaaagagaagggtcctcagaatgcaacggattcatatgttcataaacagtaccctgccaatcaaggtgagtatggtattatcagaaatgtcagacttatatgtgaattttaaaaacagaaaaataaaatatgttatttttgcccctcctggcaggacttattgtggtcgtacagtatttaatggccgtacctgtattataatggaagttttgatcctcatgggaatactgttgatgacttttttcttataggaaataaaaatggtagtataatgatggcagagattcttagagtgtggagaaggtcacagtagagattaaaggaaaaaattggagaatattcttaacctgtgaggacaccatctatcttgtctgtaattcagaaagatgaaattaaatactgaaatcttaataagtaaagagaattcaagattccacaggaaaccatttgcttggaagaaataccagagtggattgtcacttgataggagggcttctttgtataccattgctatatagcaaatggtcaaggacatggtttacagagatcaaagcaaaagtgatcaacttcccttatttctgaggcttgactttagttgagaaaatttgatagatccagttgaaaacttaatattacttgatacatttaaagagatgataacttttgtataaggtaaattcactactgttgattttttttgtgtttttttaggacaagaagttgaatactttgtggcaggtacacatccatacccaccaggacctggttagtgagctgttatatattgaaaatgtcttaaaaatgtcacatatattttcactaacgagccaataatgagattcttgttgcctataaaatgcaagataagctcagtagccaagcatccatgcatagctttgtaggtaataatgaatactcatatgccttcattcagcaaacattcttaag

SEQ ID NO: 113630 - DNA, 1383 bp, Homo sapiens
tcagtgaccaatgcagattccaaaacgtagtgtgctacgatatgtaatgtggggtttattaatttgttttcaggcccttattatgtgtgataatgttgtgtggggcttaatgggcagtaagacatcattgcaacctgcattcagggagcataaattgaattctatagataaaagcaaacacagtatggagccttatctgcaaataaactatataatagtgtttttagggaatgatctgaatcctaaagcaggtgaatatggaacttgaaggaagagactggcttttttttttgccaaggattttgctccaagtcatattcctaagccaactcatatttgacttaaaagatcacaggtaaaatctaaaattgattttttttccttgaactttttgcttttttatctattttttttttttttggatgttgactgtgttggtatttagagagcctcttcctttgggaagttacattactgtactggaatatgttttgcttcagcaataaatatgacaatatagccttttggtcttatgctttatcaacatagcttatataacaggaaaaaaatatatttcctccttgaaataaaaaaaattggtagtgcaccctaaaatatatctgtactttagtagcattttgcacactaagttatactttgttggcaattagattgttgaaaatgtgtgaaaagtttcagctgatcaaagtttcagcctttggttcatcatacaaatgtgcttcttagtttaataatctgaagcacatgcatattaagtagagaaaactaattgcagtaaatcctggaaacaatctggatgtttcaataatgtcacattgttttttctgaatttacttgtaacactgttacataagggttttgtttttacattgttttaagtcttgttggcctctgtttctctgatgattattaataactatatgatttaattagattttatatttatatgtcatgtcaaggctcttgagtgcattttatacatttttctacttgaacaatgtctatagatataatgaaatatacatatgctgtatagttattctttctagaaatttgtattgtgataggaaataactaatttatatacttcagcgataatggaggatcactctttgcttttaaacattggatatatccattccagtaagtggaatataactatttttaatgtgaccaaagtcattttaatgtgtatgtgttccagcatttttgtttctttttcattttacagtaagtggttcttaaacataaatggaaatctttcatattccatgaagttgatccacaacctttgatgagtgccaatcgtatatagatagttgttggtttggtgcaaataaaattaaaagcctagcattataa

SEQ ID NO: 113631 - DNA, 1058 bp, Homo sapiens
ggccaatgtcatcatcagacaagttagcaaggcataccgagactttcttaatgaacataagaaaaccagataagcagaagctgaggtctagctctgagataatactatcagtctccatgagttattttgataagaggctatctttaacttagaccttttctctgcatgggctggtaaaactcttccatcgacagctctgttactatgtcagtatttctaggactgtgtttgttgaggcaggtcagaagctgcattttcaaactcccaaaacctgacccatgtttgtgttgggtgctagtgctctgagctgagaccttagcagggaatttcccaaaggctaagttctccaattcccttttagcctccttcatggtacttttactctggtcctgcccccaccatccaacatcctgggctcagggccaggcttagcatcaggtttcagatgtacgttgcctataaaaatgtctctgaattggcaataattagtctgtgcaactgtatttagctctaaaatactatgtgtgctgagggattgctcttactggaaataggcctgtggagatagattgggaatgacataaatattctcaatgaatggaaaagcatatctagaaatatttcttttactctttccttatcaaagcttttaaaatgactgaactctgatcttgggttccgaagtgtctctggggaaggtcatttgaatctgctgtattgtcaggctgtctaacatctgcaaggtgattctcaacctggactcttggaaattagcatcagtgttttttggttatcacaatgacaagggagtaatacaagcatttagtggtgatatggtttggatctttatcacctctaaaactcatgttgaaatgtaatccccagtgttggaggtaggacctggtgggagatattttggtcatgagggtggatcctccatgaatatgttggtactgtcttcctgataatgactgaattcttgttctgagtttatatgagatcctggttgttaaaaaatgtagcgcctctcccactttgctcttgcccttgctacctga

SEQ ID NO: 113632 - DNA, 1054 bp, Homo sapiens
gtctggattatctttctggaacaattataccgaaacaagctatttgagtttcgacttggcaaggcaagatatgtcagtggattctctttgtgaatggaaaaaaaaagcatccttattttgtatagaggccgcctctttttgtaactaattttttattggtaaaaattaattcaaatgtgcttaaaattatgttgagagaaagaagatagacataaaaatacttaatgcatattatatgaagtctaagaacaggcaaaactgatctattgaaatagaaatcagaaggtggctgcctccaagtgaaggtctgttggctggaaaagggtacaggaaatttctggattggggatatgttttatatcttgttttgagtatcaattacatagatttatacaattatcaaaactcattgaaataaacataggatgtatgcattttattttatataaattgtatatcagtgttccaagtgttaaggcagttgaataacacttagtgtaaaacttatattctgaaattggctctgtatcattccttaagaagggatctgaagtacagatcccagtctgaggaagaaacagtgggattgaagagctaaggatgttaattgggaagaaaaactaggggtgggcaaataagtatatgctaggaatgttaactaatttattaatatattttctgaaaattagaatttctactttttatttcctatgatacgaaaattatatgttacaatagatctgaggaaaacatgattgtacttttaggttcatcccactaagcattttcagcttacatttcattcattgaagtttggtttgtattgtattttccaaccagctagatgtcttcctgaatatatttagattcttagtgattttagtaaaaaattttatttttgaaatgcttgtaaaatcttacaaacttctgaaaccttttgtttcctaatctttgttatttgtgaaggatttttttcctttggatttatgctacatgaataaagtcatcaacttttaattttgtatttaatttagtctccttgaaaatatgcagt

SEQ ID NO: 113633 - DNA, 2467 bp, Homo sapiens
acaaaacaaaacaaaacaaaaaaacagaaagatgccttgtattagggccttcctaaaaagaaagctaagtaagtattaatttcttaggattgcttctgaggtaggatgaggtgtttgcatagacccaacaagtcattcacttcaaattttttttgtcttactatgataaataacatattatttcctgtttacagcaacctgcactgaaattaactagttgaataaaatcacctcttctagcacaaataaagctgagttcggggaggtgggtgaaaatacagtactgttgtttacttcctaagatccaagggagagaatcaagcttggtaatattctcttgaatatacatttacctatttaaaaggtatgattttcccatatttccttaggaagtatgtcatgtcaatatagatatttactcattaggtttacattaatttgtattataagggaatgtttaattcaaattaaggacattaaaagtatatagactttcatataaaagttccggttttataaattgcgttgatcacttaaagaatgcagagatctcaaagtaaagaaaacaaattttatgaatattttaaaacattacttaaaacaagtttccttagaaagcacatttgtggataaatttaaatattaatactaaataataaagtagtatacagaatttaaatttcataataatgaagaaagtggtaatgctatttaacttaaaagatgcaatatggcattttagatcaagaggttaaagttttcttaatgaaagaaagtaacgatttatgggataaaaatattccagtggtttgtatttgcttcatacttcaaaagtgttagtccatttattgtttaaagttatattgaaactgatattttcactgctgccaaagcagtacctgacagtagataggtatccacagtcttatgttccttagagttatagaactatgcctctgaaaggggttttaatactttaataaacctggcctaaactgttttatttctaagttgaagaaactgattgtcaagtactttgacttgtccaatctcatacaactaactatggtacatctagagttagatctcagtatcaggggtcccagttgtattctgctcaccattccacaatttcgatattgataaaactttcacactaacttttgaactgtggttattattaatttagttgattcatgtcctcttatttatctccttactcctccactgctgccttcataactgtccaccagatcaaagctatttgggtacctacactttaaagtgaggggaaataatgaagtttcttaaatcctgtgtcatggactaagatacaataaagaaaaggaatttcacaaagtaggggaaattacgtgttagttataatcattcccaagaataaactagtaaaagaaacttagatttccctaatttaatcttgactccgattttgatagtgctatataaaaaggtatttaaacccatatgcttccttttacataaaagaaagatatcaactttcctagtttgcatttacactggctaataggataataaaatgctgtgtaaatgttaaactggaagtttctctgagttatttttactttaaaatttcatgtgattatgccattttgaatatgtatattacatgtaattgtataatgttaactcgggtaggcaaaattcttggtattaaatttaggatgttttaaaaattattaagaagatattaatgtctgctttttgatagcatatattttcatgtaatgtttagtgtattaaaatcaaccattcaagatttattttattgggtgacactattgactgtgttccaaaatgcccatagtgttaggaaatgtggtgtgagttttatttgtgggctaaggataaaataatcatatgctaatataccttttattataaatgactaaaaatttggatataaaactgatgttttactacacaaattacagagagagataatataattatataattattaaataattagaaaatgcaaataagcaaaagtcacccatgttcccagttctcatctcctgaagatagttataactaacatattattttgtactcttcctgttaattagtttctagtgtactttctcctgtagctgaaattaagctgagaaaaaaggaagagatagttcctccctcctctttctctctcccactctgtctctctcctgtgctatctgtgtgtatatacaaatatgtatgcatatatatataatgatgtacataatatatataaaatacaaatactaatgtgcatattttcaaacatacacatattttttattatttgaaataagaatgagtcagactacatatttggtagccagatttttttcactcagtgatatatcatgaacatatttccatgctaatataattttctaataattttagatgctgtaactacaatttcattgttaatgggcaattt

SEQ ID NO: 113634 - DNA, 1039 bp, Homo sapiens
tcccactctcagagccctcaccactactgtttgcaagcaaagctcttccccgatatttatcacgagtggcttctcttatccatcatgtcacacttcaaagggactttccctgagtccattttttgttgaaagtaaatactcttttttattccttctcatagttttaaaacatgtttcagagaaattcacacaatttggaattatctgttgtttattttctttgtttctgtccattttgaaagttccctgggggacagggaccatatctgtgtgttgggattttaaaaaattatttttatttgcaaatgacacataaaaagtgcacatatttatggaatacagtgtgatgtttccatctacattgtatacattgtgtaacaatcagaaatgactcacaaaggtaggcaaaatgtttgatgcaaagatatcattaatatttattataggaaagtacacaaattactaaaaattaaaggcaaataccatacatttaaatgggccaaataattgagcagaaaatttacaaaaggctaaagaaatgtttgaaaatgtgctcaagttcaataataaagaaacatgaggcagaatttttaactatttgtaaaaaatttgaagtatctcatactgtcatgacatattgaaactttgcacccagtaaacttacttctgagaatttgttctcacgaagtcaccaccaacttataacagttactatatttgagttataattataggtctttttttctattttatacaattcttttttaatgttttcacttttaaagtttaaaaaattaagtgatattagtacttgcaaattgacaatgtttactaatttttttcttgtttccattttttgtttgtttgtttttttgagacagggtctcactctgttgcccaggctggagtgcagtggtgcaatctcggctcactgcaacctccacctcccaggctcaagcaatcctcccatctcagcctcctaagtaggtgggactataggcatgcaccgccacacctggctaatttttgtgttgttttg

SEQ ID NO: 113635 - DNA, 1010 bp, Homo sapiens
ctttatgttttgatactattcaaaattaagatttaaaccaaaaatctgcatcttactgcatggcttggccaatttgccttactctaacttactttataagcccataactttactgatttttttttcaaatattttattatgaaaattttactataccacttagcctattacagtttattttgatataatttgtttagtacactttcaaaaataatagttgacatctttctcattaataggtcaatatgtgataaatgtttttagaaaaggacgttttaaaaccaatgaataattcagataacattctttgtaaattatctaagccattctaaataaattacctactttgaaagttaatttctaagtataatgaatatcagaggactaaagataaatgtatatgtgtatatttatatctagccatatttgtgtctatgtatatatacatatatatgtatatcactctattattttttccactgtagaaaaaagctgctaaaagagaagaagcattagcatcatttgaggcctggaaggctatgaaagaaaaggaagcaaagaaaatagctgccaaaaagaggcttgaagaaaaaaacaagaagaaaactgaagaagaaaatgctgcaagaaaaggagaagcactacaagtattcagaactttgcacatcttaattattttaaaacatttgaaatccaaattaatgattaaccatatttttatttattttcaaatattcacagtaagaaaattattctgaactttttcaggcttttgaaaaatggaaagagaaaaagatggaatatcttaaagagaaaaatagaaaggagagagaatatgaaagagcaaagaaacagaaagaggaggaaactgttgccgagaaaaagaaagataatttaactgctgttgagaaatggtaatccaaaatcataaatattttgatatattttaaattatagtaacacttcaggattttataaaatttatttacttgaaatttagtaatgcattt

SEQ ID NO: 113636 - DNA, 1099 bp, Homo sapiens
tgattatatgttgtatatatatatgattatatatacatatatatacacatatataatcatatatacatatatatgtatacatatatactacattacatatgtagtatatatataatcagtgtacatatatactatgtacatatgtacagtatacatatatactatgtatacatcatatatgtataatcagtatacatatatactacattatatatgtagtatataaaaacattttataccttagtagatttttgccttttgctcacattgattaggctacagaatattttagagcaaaggcgaagaactttttctcctggaagctgccaagggtggtgttcaattttgaacacggcacaaccagaaaacaaattgaatttttgtttttcttctgttaactaaaactctttattgactaccagaaatgattattcattgcaatttaacaagtatttgtgttcctcttgtgtgccacaaaatttgcctaggtactgtgagtgtaaagatgaaacagataagattactattcttgttgaggctcagtctagtcattgttttttaaacagaatagaacatatcagagtgggacaccgtaagggaaagaatgatttgatgaagttatttcacatactgtgtgtgtatatacatgtacaaaatgtttcttattgtaggtcttgttcaaaaaagtttgatagccattactctagtgcggtggttttcaattgaggtgattttgtccttcagaggatatttgacaatgtctagagatatttttgattgtcacagcttggagggtgctactggcatctagtggggtggagagtgggatgctgctgaccattctactatgcacaggacagcccccacagcaaagaatgattctgctcaaactgtcaattttgagaaactgctgctgttaagaaactgattctagtggaagagacaggcacgtaaacacatgaaagagaatagggacgggaattagagggaaggtggaaggtgagcttggtaaggagagggaaagcgggggaaccacagttactgactcaccagctctactgggcactgtcctgagtggggaaataattttatcatatgt

SEQ ID NO: 113637 - DNA, 1359 bp, Homo sapiens
agaaatactttacacagagaactatagccaagtcccccaaaaccagatgagctacccaagaatagctgaaagagcacactcacctacatggcaaaatagtgggaagattcatgagtagcggtgacaagcctaccaagcctggtgatagctggttgtccaagatagaatcttagttcaactttaaacttacccacagaattacttaatttcccagtaagtttaactgtcagtctaaagagggacagctctttagaccctaggaaacaaccttcctacagagagtaaaaaatattaccaccatagttggcccaaaagcaaccaccaattaagaaagcatttaagctcaacatctaactatcttaaattctaatcactctactgaactcctaacatcacattggactaatctattatttaatagaagcaataatgtcaatataagtaacatgaagacattctccattgcataagcttacatcaggccagaataacccactgacagttaacagcctaatattaataaacgatataataagcaccctattatttacactgttaactcaacaaaggcatgctctaaggaaagtttacaaaaagtaaaaggaactcagcaaatcttaccctgcctgtttaccaaaaacatcacctctagcattaccagtattagaggcactgcctacccagtgacatatgttcaactgccacggtatcctgaccgtgcaaaggtagcataatcacttgttccctaaatagggacttgtacgaattgctacacgagggttcagctgtctcttacttttaatcagtgaaattgacctatctgtgaagaggtggatataaaaaaataagacgagaagaccctatggagctttaattcattaatacaaataaaaactcaaacaagccaacaggccctagcctactatccctgcattaaaaatgttgtttggggtgaccccggagcatacttcaacctccaaacaacgtaaactaagacctcactagtctaagcgagttaacatacattgattcaattaatttgatgaacggaataagttatcctagggataacagcacaatcctattctagagtccatatcaacaataaggtttacgacctcgatgttggatcaggacatcctaatggtgtagctgctattaagggttcgtttgttcaatgattaaagtcctacctgatctgaggtcagactggagtaatccagtttggtttctatctatttaacatttctcctagtacaaaaggacaaaatagggcccacttcataaagcaccctcgcctcataaatgatgctatctcaatctaacaaaccatcacacaccctacccaggaacagggtt

SEQ ID NO: 113638 - DNA, 1054 bp, Homo sapiens
cctaataagtgtaagttggtgattttcatttttaagattgctttctggagaaattatatgaattttacaatctcacaagctttgttttttctgtgtttaaatttacgttgacaattaacctgccatttcttcagccgtcctttgtcttggttccatatatccattcatctctctacttacagccacattcattctactcttaataaactgtctgcagaagggtgagatctgatgagttagaatttgacaagtggttatgctgttaagccttgcagaatgttttgaattatcattgtgtactcctaaattacacccctccctccatgcaccccctccaccccccacactttgctaacagggtgcaatccatcaatcttatctgtgtaacagattaatgaaagcctaaagcaagaaagtgtgcctcctggacagcagacttaaaagttcttgaggcctttgctcaggggcaagggtccctccaagcccctggatcatctctgatgcttttatttttctctttttgctctggatgaacttcatgtcagcacactctgttccccagaggcaacggtctcattgattagaaacctacctctgcaaaattccactttagattccactggccacaatgatttctttgtaatagtaaaaataatattaactactagtttatagtagacaattaactttctgcattgaggtttgtcaggagtgcctagcacaatgccattcacattgtagctgctcattaagatttcatagaaattcagccatttcatcttagagttgtccaaaacccacagggagctatactaccttcctatttattatatgtcacctttgttcctctcacacaacagagataattcataaaccggaacgcagtagactcacaggaatgacaccagatattctgctgtcctaatatattacgctatattaccaaagacacattcttgcattagctaaataattgccctggttttctttttaggggaggcagtgaggagtgggaattagtgggacatccactgaagttaaagaattgagtgca

SEQ ID NO: 113639 - DNA, 1022 bp, Homo sapiens
acaagcttatgtgtctttccaatccttcaaatttttttaacttccaaaatctgaaattgaagattctgaaccacctagattaggatttgaggtcaccaaaagactcaattttactatctccatctactggcaggtaggaactatatccaagcatctggactggcatagaaaagaggagaaagaacatttaaaaggtaagcaaaacgtatatttttatttactctgagtttttaagcttttcttatcagaaactgttgtactttcatgtaattaagcttgatacaatgaaccatattagagcaagagaatttgtttaggtagtacaatactcttatctgattcttcaacatgagcaagtgtgaatgtgaatgccttcctttcataatgggagtactttctgtctttgcacttagtaagtttccatgtagtcattccaatgccctcttactgttttcactcatactcctaataatctttaaaccgcaaaaatgtctacattcccacttctgtatattctctgacatgttagagatagttttacctggcaaattatttttattaccatcatttagaaagagtagaagtatgtttctcaaagttgaatttattattctgttgtttcttatattttttcattgtctgtttataattattttaattgggcagaaagaactaaataagtttcctgttaattgaccagtaataattacatcagttctttttaaaattgatactttgcttttccctcaaaaatcttgaaatttccttggtttacttttcactatgatcaaaagttgcagtatgataactgctataaaaaatgctttgagggtttatgtggttgtgcagtaatagatctttaagtttaaatcatatattttaaatagtttcatattttaagtcttacattatgcattatgcatatctttctttaaaaagccatatctacacttgagaaaagaagtaaaagacatttgtcaagataattagtattattactattgctgcaattaaataagtat

SEQ ID NO: 113640 - DNA, 1087 bp, Homo sapiens
gaggttttcttttgttgttgttgtttgctctttagtttattaatttgttttccttaaaatttgccattgctttattgggaatcaataaaaccatagatttattaggaaaactatttgagaaatagcctttagcgttatctagtaagcagtagtacagaagtataagcatgctgtcaatacatcttcaggttcacttttatctttctgtgtgcaaaacatgactgggattctaatgtttgtttacaagaatacttaaatatgatacactgtcctgtaacacttataagtcatccatagactcaatttaatctggaataatgtttttaaaatagtttttaattaagctcaacaataaagtacttatatagtatattctaagcaatatagtcttcttaataaattatattcccaggtgtgtctcgactaatttgcatttgaaataaaatattttaggcacattttctatttagtttatgtataaaaatatgtacatattgagcaaaaattgttgaaggctttaaaataagccgagattgataatagataaggtcttttacacatgacccatttatgcctggcgtatttcttcacccattttaactttttgattgtatgtgcatcatttcttatcttcagtcaaatttggaaatcaaaatctcagaataatgctttaattttttggttagactcactgggtccttataattgctagttttctcgatctgcagtctttgccagggggggaaaaataaatctaatcccttttaggcctgtttatctataaattctctagttttgttccagttcctgccattcatttctgttttagtgctaatattttcaaggagtttcttgcgcacttcccattataagctgattaaaacccctgtcttggcatctactaatagaagttgcagctgctcctataaactgagcagttaataggaaggaatacgaaggattatagccttttccttttcacattgtttttcctgcaccagactctatataaaaagctcctgcttgtgaagaatcattttgtttgcccataggattttctctctgcattaacttttagtgttttgaa

SEQ ID NO: 113641 - DNA, 1044 bp, Homo sapiens
taatggtttagataaactcctatccaggttttctttaaggtacactgagagaaagagaaagagaaagaaatctcagatcatcaaagatatccttaataaagttaagaaaacacactaagactgctgtagttcaatgatgtatagtagtaaatggtcactggcggtattctagttaatttgttttcttctgcatattgttaagtgggcagtgtaattaatcaaagcaatcaatcaatactaacttaatttgtattttttaggtatttccaaaataatctaacataaaccttgcctcaaatgtattattcttggggtaaagtaagtatgaaagagaatgcaatgtagcaggctgtgatgagttgtacactaagagtctaaaaatcacctgggttcatttttagtttcagtacccaaaacccaatgactttaatccaatgactttaatacaatctttccattgagtataatcaaatatgtttcatatgtaaacagagttggacctagtgatttctaaaaaattcttaactgtgcaatattatgaaataatagaaaaatataacactatagaaaagcactcagtttagactaatataaagacagaatcagaaaagtgcttagaaatggtactacagctagggcagggttgacttcaagtgagagttactcagtggcattttcttttttttttttttttggagacagaatcttgctctgtcgctcaggctggattgcagtggcgtgattttggctcactgcaagctccgcctcccaggttcacaccattctcctgcctcagcctcccaagtagctgggactacaggtgtctgccaccatgtccggctaattttttgtatttttagtagagacggggtttcaccttgttagccaggatggtctcgatctcctgaccttatgatctgcctgccttggcctcccaaagtgctgggattacaggcgtgagccaccatgcccagcctgagtgacattttctaagttaaatttttgaatctgaaagatgcaggtgtcaaataatacagtcacaac

SEQ ID NO: 113642 - DNA, 1028 bp, Homo sapiens
gattccattcatggaggaaaccagttggctgctgttggagattgggcaaccgacaagattagaaaaaaaaccaaaaccaaaacaatgcctgttagcttcagatctccttttagttttggagtttgctgtattaaactgttccattacactttgtagaattgtgtggagtggagttctgttgatctaagagcttaatacccatgacaaaaaggttcaagttttgtatgtgaactcctacttacagtattgtcatcatagacatgaagaatgttaagaaacgcagtatggcaattaagagcactaaccttgaaggtgacccaaattggaatcccagttttaattcttggccaaatattttaactgtactaattcaaagttttcctgcatgtgtcatggcaataatttctgttctttttcattaaccttgggaaattattaatatgaagattacgtgacatcttatttttgtatgtatcctagaaagtataaaatgtgatatgaattaagttggtattaatagaaaggtataatgttcagggaaaatatcagacctgtatgtgagattttgtaatcaccactgggtatttgagtagaagaaaacatgagaaaaaaataataatgtgcatagtgttaagaaatcatggctgagaagaaggtaggcctctgtctgggcaagaaaactaggtttttgaagataatagctttgagtgaaaaatgagagatttgtaatcatccagaataatggtgtctgaattcttcagcacgtggtagtagacacacgacgtgtttgttgtctcagaattctgagggcaattcacaaagaaattgttacaaaccatgaatcattacacaacattagaatacctcaaaagagtgagtaactcaaagctcttaacagatcttgagaaacttgaaataataggcatgtttttcttgggtgagcaatctctctaattatgtgagagttgtgtgtgccctttcctgctccaccatattatgaatgtttagtgtagagaattactgaaggt

SEQ ID NO: 113643 - DNA, 1032 bp, Homo sapiens
tgggttcctgtgcctgaatggctgaataacttcctaccctctatcccctttagttgccatagtaacttgctgttcaaataacacagtggtatctgcacagtttcctctctattttcacctcttaatgcacttttaatgtgttatgtatgacttttctaaatatgtaactgaaattttgattgtccatcttaaatattgtgtcaactctttaagtaaaatttgcccagtttaaattgggattaaaggtgttctgggtatgttgaaagtcatagctatgatacagggctggaggaatccttgtcaggtggcatttctcttttcagtctaacctttaaagctgtgtcttgaccaggagcatgtaaaactcctatattcctaggtttttcagctgtaaagtcaagataccacacacctgtcagggttgttttgaagaataaatgggaatggacttatgaaagcatctagcactcttccagtcataggccagttactcataaacattggtggagagttgttaatcctcaaaaacttcctcaaaacaacagtgatttttatatctaaccttaggcattataattattaatttattttgaattaacctaataaggattaaattatactctatatgtttctgaattatgtatttggtaaagaggtacattatgtttgatgtgttgatcactttaattaatatttaattaaccagaattctttaatcctgatatcatttttattattcattttctttgtagtctgtaattaaaatgatataatcatttccagtcttacttaatttttttggagatttaactaaattaccttcttttgattcagtcaaatgaaagtggcttaagtattttttagcaccattaatgttaaatatgttaatcatgtttgcttttccagtaaatcaacactcagctactctcactgtaactttcctgttttggcatttcattcttaactgttcacttactctctctttttcctgtgtgacccgtgtctcatatttttgtttaaaaccacttatgt

SEQ ID NO: 113644 - DNA, 1038 bp, Homo sapiens
gggtacaccgaacttctgaaatattcttgtttttaaaatattcttacttgttttgaaaatttctgataacttcagaagtgctagtatgtaaaatgtgtgttatatgtcatctataacatatatacataaacatgcatatgtatagattataaatgtatatctctgtgtatacttacacaagtatctgatgaagcatcttttaatactgggtttcatctgttgcttttggtcactgacactttacataacaggcttgtaagcagagctaggatgtatttttgaggtgatgtatctacagtatattaaatgtgatatagtacatggcaattatgttgctttattgtttcagatctagaatgtaggtcttgcgtgtagatgtaagcccttgggtaacacagcataatctttctaatgtaattaaaataaagctgagcccttcaaactctagatagacttactttggtatctgggcaaatagtgtttctttgagaatgaagcagtgattagatgcagatattctgaatggttgacaggagagagaactagagacatattttctactccaggttgaactgcttgatagtttggaaaatgttgatcagaaatgtattttagacagaatgtgaagctttgaaatcacaggcttgggtatgcatcctggctctaacacttcaaactctgtgttatttgggttaactttattaatctccttgagtcatgatttcagtttacgcattgcacattatgggcaactatctcatctttgagaaaaaaataaacataaatgattataaattggcacatataatacaaaagtgatattatggtcactatgaggctttttttgagaattgagtaaagtcatgaatataaaacatcaaaaacagtgtctgtcatataagggacattcaaaatatggtgtcattattcagtaggtgctctcagattgccaaacttttatttgctaaggaattatgattaattcattcaatagagcttgaaggttatatttgaaattagtatttatttctcaatcta

SEQ ID NO: 113645 - DNA, 1071 bp, Homo sapiens
aagcagggtatttttcttactttagtatgtccaataactaaaagagtgccttctatattacaggtgttcaagaaatgattgatgaataagtgggtaaatgattttacacagaataaaaggacctgatttcaagaatacaaattgtaggttgaaactattcggctgcccacgaataaacacttgactgtgtgctattgaaattttaacttttatatggagcgctttgcagagagcaaaaattgttagctattcgtttggccaacatattgagtggcttctctgtggattttaggctaggctgcttggctggtgtggcatattaagcagggctttaaatgaataaagaataatattttaactgatgtagcttgttagaagaggggccatttcttctcaggaatagacatcagcaattcccagtggcagtcttttttactatttccttccccaccacacacagctgtcttcccactggtggctctgttcccccaaaccccaatatccctgtttactgcttttctgtcttctttttcagcactatgagctgcataagtgcaagaatggattttttttttccatctctttgtccccagttcgttacatgtattagtaaatgatgaatagatattttctcactgatatgatcttttgtctcttggtgtgtgagtttacctgttgcatcatcatccagttttgggaattttataggttatttttatgagcaactagtagcaaatgttggtcactctaatgatactgaatagaatttagaaaaagaatatttgctttcatatttcattttaaaagatggcttgatgaaaatggcttagagttttctttgaaactgcttctttctttacaaattaatcgccttctacaacatttcctttagttttagtaattagaattgttttgaagtaattagtaaccacatccagtcctagttttctatatctattcattgaatacaattgaatagtggggctattttctctttattgtttttgagctagttctcttaagctatttctcttaaggctcaaaggctggagatgtgaacgatgagaaaga

SEQ ID NO: 113646 - DNA, 1115 bp, Homo sapiens
tttttcagcacacaccttgcttttttcactcagactcatctgtccatatgcgtgcagtgctgtctacgtggatgttcccttagtgcttcaagtttgacatgttcaaaactgatcttatttctcagctcttaaatttggttctggtcatgaattccattgcatagagcataatatttttcatcaaattgttcacatcagaaacctgagtccctcttcttcgttcctattttcaaatgttttccaagatctgtttttgctgcttcgttgacataccttaggcattcctttcagtcccctctgctgcttagttcaaggcaatacgatagtattcctgattactgcagtaatctctaatttgtcattcttcttccattcgtctactccatcccatccatcaacaatggtgtccgacatgtcagtcttttaaaatttcttcacagctctgctttgcgtttggataaattcaagttcctttgcaagacttttcaaatatttcctctttttccaattgccttttcctgattcttctctagtgtttcttctatcctacactcttcatctacctcatgatctaaatacatggagaagaacagaaagctgagtgctgggattggtaggttccagagaaagggtaaaaaactgttgttgttgtattttttaagacaaagtaatcatttattaaaccaactaattgtattagttcttccctctcctttggttaggaatgagttgagaggtggaggccaagggggagagagacctgaaatgtggtagaaattctcctctgagagtttccatttctcccaattttgatccattcttgagatgcagtcaaggtttgaagtttgaatactctctaggggaacaaggtcctcctcatagtacctgaagaaagatactttttgaaactcattctattacgacgttgggtggatactgatttcactaaaagacagatccaactgtgatgggaagtcacagagctagcaagtagcaaggtgtttttagtattttctgacaccaaccaaagagagtgcttatttatattttaatattaatctccaatgaccataacaggaagaggaaagatactgatttgtaattacaacttcaca

SEQ ID NO: 113647 - DNA, 2613 bp, Homo sapiens
cagttcgaaataagtcaccgagggctgactgagaaggtgactttgagcacagatcttgcagagatggcagagaaggccttcacagacagggccaaggggagaggcaaatgccctgggtcagaatgtgcctagcaagattgaggatcagcaagggggattgtgttctggagggggtcatgtagatgagtgatgaattttatatagagatgattatttctgccgagtgagaatacactgtaggggagcaagggagcaaatgccgtgatagtgacttaggccagagcaaagtaggtaagtggtcaggttttggatttattctgaaatgagagctgttggtatttgctggcggactggaaattgggagttgagatggattgtcaggcgccagcctgaaggtgccacctgtgggacttggcaggcatttttgtcttcacatgcagtttttgtcttgaaaatcttcaagctacttgttaattgccctagcgtgctaacagtggacacatgaattgattgtgatggtgaaagtatgtaagagacacacattggtgatggattttatttttcatttttaatcatgataagaagtcagtgcatgtgagtagatcaatagaagagaaagaagcaaacattgcattgatttggaagcatataaataatgcctagtggaagacaggccctttttttatttacagaggaagatgtgccagaataaagaattccatttagtgataaatatagctaagacatactcagtgtttaccatctactagacatgcatgtaagctcttaacacatattgatacctttaatgatcacagaagacatttgagtgaaattactagcattaatcccaatctaagaagaatttaagccacaagccaaggtcatgtggttttcagcaagggcagtctggctccatggcacatgcctttaatcgttacagtgcctctaatagccactttaatttgttagaactaaagctctaatttggctaggtgctaagcagacttgctcaatttacagtttcatttcttaaatgtagacaagtcaacgagagttcttaaataccttggagtttattcttactaacacaacatatttgttttaagggaaagcctggacgtttgggatgaggaaaatccacagtggaagaaaaggcagagtgtgaaaatatggcttagtgaaattaggtttaaattctggtttattcactttttagttacatgatcttgacttcaccacttaacccttctgagcacttaattctctaatttgtaaaatgttaacattaagaactagttcacagggacttctggcaacatgcttggtctgcttaatagattttagtttctctgcccatcttcttggctagatagactgaaaatgaatgtaggggtttctgaaaacaaattgggtcgagtgaaaaaaaaaggtttgatgcagggaggccaataaaacactccaatgtagctccacaggagaacatttaaagcaagaggttttgtgcacttatagtggtgcttgtcagagttgaaagtgcatttgaatcctcccggatcttgttaaaatgcagattctacatcagtaggcttgcgggtggggcctgagattctgcatttctaataatttgatgtgatgctgatcctgctggcctgtgcaccacacttttactagcaaggacatatgaaaatagatttatgaagaagtaccatgggaatttagagcgaataatatcaaggttgataccagtaaaacagtttaacagagcttctcagagatgaaatgagctacatcataggtattaattccctgcctaaggctgtatttgcgtcatttctgatctgtgctgttgatatattgatacaccggggggttgagccagacttgaattttctgttactcattggtaggggttacccttaaatagaagtgagtagagcatttaagcattattagttacataggttcctgggctatagggcaccaagcacagattttttcgagggaattcactcactgaaaagataatcagattaaatgactactaatgctcattttaaccttgggataggacgttaagtcacacatactctagccgagagggataatctgagatctgtatggtatctgtctaacacatattactaagcagaaatctcagaattccttaaaggttttaagaggaaattattcattgtattcataatcattcatatccatttgattgctctctaatcacaatattgcaattatacataattatatattgtaattatacatgttgttacaatataattataattatacatatataattacaatataataatattataattatataatatacatgtatattatatacatctattcctttagtgtattggtagcagtattttttttgtctgttttaggtcttggtgatttgtgctcttactgtttctcagaatttttcaaaatttagcctgtaagttactaagaaatgtaaatggatagggcatggttattgacacaaatacattcttcttttcccctcaattttcatacagctgtagtgttactagaaaaaagtatctatttatgggaagtgtttttctcttctcctgtggaatc

SEQ ID NO: 113648 - DNA, 1047 bp, Homo sapiens
cagattacttagggtgtttaaatcctgtacagattagtaaacaataccaaggaaatttacttggtgttactagaaggttgaggaaggttactggcttttgcagtccattagtagatcaatttgttaaatgtttagtgctaggaatctcatttatcaggaaatatcttaggcattggggagaattggcctgtggtatttacattttagtctagttgccaaaattgattttcacgttttgtgtgtgacttagctctttgtactgcagtagataccaggttaaagcatagttcatatcttaaaacattaatagattttgtttcagtgctgccaataatttcagtgagtaacaaaaaaactccacactttcattaaaatgttcttaatgatttctgtttgattttctacgtagtgataaatgttgccatttaccccagcggtttaataacaacaaataagtattacattttgaagaaacttggcagtatcattgaatgccagtgtgtaatagctaatctataatttaggttaattccatcattagtttgtgacttgaaattctttgtttctgactgtttcatgacttctttaagcacaaagaggatattggtagaatcaggtatgtagcaaaaggtctagaaatacagttttgattatttgaaacactagtattttaaaatccagcagatgcattcctttgcctaaatatattgtgtcttatgctataaagaggacacattttgttttgttttagtgtacatattaaaacagtttatatcccaaataagctaatatgactaatggttgtcactgccctaattttggggaagaaagtttgaatcagaaaagtgttcttggaagaagaatactcttttttcctatctatttaggcattcactggaactttctttacttctaaaatttatgcttgaaatggctcagagtttgtgtatgtggagcatattggaggctgattgtatctgtgagtttaggaaagacttaacttgatcccttgtgcaatgaagtctttcaaagaaaacgagggttttt

SEQ ID NO: 113649 - DNA, 1054 bp, Homo sapiens
attatagagaagagcatgaccatcgcaagttcattttcagtaactttgacgtattttttgttttgaattatttccccttttgctctttctagttaacataagatataactcatgtgctttcttatttttagtttgtttttctcttttgctttgaggttttgagattgacaactgtgatttatcccagagaaggcaaaaatcttgaaaaagtcagtcttttaaaaagtcactcaaagaatatagttttttttcccttggaaataaagttgattttctcagctctgatcctatgagattatgggcagaactaaatagtccttagttctggcatgtggacaaaacagaagcagaccctggagagagagttcaaaattcatgacagtaagcacatgttcggtatgccaatatttatggtgtcacaaccaaattgaaaccataaccctctgctatttacgtaagtatggtgcccagactgcacaaggttatgcctatgtttcccagtaaatttaaggcaatagaaatgttcagtacccctagagaccagactatttattttcatgttcattttgtttctctatatgaggcagagtgaattgtcttaatttatattcatatttgaagtcagccagaatgagaaggaatggcatttagtgaggatagagaatggttttgtgctttcatatgtaatgtatccaggccattgtgtcctggtattcttagtttctgagctggggtgagttgggggtattgattattgatagtgaacatagactgcttcttagatgggtaaagctcaatgttcgtatcttacgtcttatgctcttagagaacctgggtttcaccactttggtcaaaaacagacacacatactgttggtaagaagtcatgttttatgtctttttatagaaactttgaaagtattatcattctaaagtatttatcgtccggtaaaattttaagaacaatgaagtttcagaaccactattgagagtacatctttttttctctactttttcaagacaaagatatctagtaacttaaattatagtaacat

SEQ ID NO: 113650 - DNA, 1207 bp, Homo sapiens
gtagcaaaaactcagaggtgcaaatcttctggaagaagtgtaaatgccacaagtttacttggaaaaatggaaaaataggacttatttaatgtatctgccgaacatttaaaactgcataaagcactggaaatacttttggtatgtaggaatgtgtggtgtttcaaaactacaaacattgttctgaaaatttccccggtagtggtgaattatatgagaccacgtccatctaaggaaggcttgtttaactagcctgtggttctggggctcattcaaacactcttaaacaaaataaagggaatggatgtaataacttctttatggaaaggccataaaaagctacagggccatgtaaacaaattgggtcatttactagatgtttaagtgatagatttgcagtccaaatttaggggtgtgtattatgttttataggatggtgaccatgttctaccttgagaatgaggttgcaagcttattttttgtttatttgtttgttttcgtttagtgcgtggaaatccattattgctattttgtattgcacttggaaagcatacctaaaattctgggcaattgcatttataaagcttttcaactttgaaaaatggctagaaactcaggtatgaagattgaattgatctgatttctggtatcattaggttcttttcaaggaaaataagatgattgaaatagaaattttccttctgggctcagacatgtctaaactaattgtaaaataattgttctggcttacaagagtagactcataactacaactatgtaaagtaaaaaatctaacaacagttaggatttatagttactgtcactctgccagtcttgtaataaaactgctattataaccaccctagtgtgagattcatttgtcttacttgagaagtgggcaataagtcctatccaagttatcttgcttttagcagagccactttattgcattaggatattaatttaccttctctgaaattgggtatgatgattgtgccaaaatggttcagtaaaggggagttgggtgggtggatgtataaaaatatgttgtgctgcgcattaatggtgatgactagtggcaatgggagctagaaataaacttggaaattgaagtaagcacaggaaacgaaataatttttatgttgataccataacatttattcattctgtaacttctgtcaaacatggttggctcatttggccttaaagg

SEQ ID NO: 113651 - DNA, 2005 bp, Homo sapiens
cactgaaaggtgtttagaaagtacagaggtttgtaggaagcctcagggactaatatatcgtttgttaaatagttgtaaatagaggatgggattggacattaaacttccctcagtgctgccatctcttctacgacctctagttctgtctcaggcacggaagccttagctttgtctacttgtatttcacccttcctgaaacttatttcttaaatatcttctgtatattagcttccacttcatgtttttttcaagctttagactgataaggttctaagttttatctataaacttttgcaccctttgtggaaacaaaattctaatgataaagtgatatgttgaataagtaataacaaattaagacattcataaatttcatagtaaaaaaaaaaagtttccaagactgatgatattttccccgtaggtttctgtttgtatcaaccaaaatggtagaagtcataaagtcccttcatttacttactctgattttcatgtttctaatttggaagcattatacgtaatcagaatatataactctgtgtaactctatgtaatctctatataactcatttattaagcaatctctgttgcttcttgatcttttgggtaagatcagttgtaaacaatctgtatgttgtattatttttcaccaccactgcctccaactatgattttatttttcaaatctcccattttttaaatctcctaaggagacatctaatatttgataatcatttagtatgcaccagtgttagttccatactgattaccaaaatgttgaaatgttgaaatatttccaatgagttgggaagagactagtgcaactcctctaagacaaatggaccaacacgtgatgaagcagaaattccaatgcctggtactgcttaaggcctctgagatacttctgcaaccctgctggcctctgtcctgatcgatcagtgttcctgccgtactgattgttaagcattttgacacttttagctgtggacaattttagttcatattggggttaaaatttctatcttttttcctctctgcttggcagctcaggcctgacccatgacttgaaggacctggagtaagaaggggtatggcttctttcaagctcccttcctgcagctcttttggctttagctcctcaagggttatggctgggggagtgatgagatggtggacatggcacactcagcatacaattgcaacttccagtcatttgcccctgcctctctggctaacactaaccagctgctcttgcatggataacaccttcccttcatctagattaaatgattcacttcctcagagaggtcttttttctgaccactaagtctaaattaaccacccctcactgtcttgtcaaggttaattaattaattatgtagtacttaatactccttgatattcttgtttattaattaattaatttattatctaccaacatccctcacccccaccataaaatctaagttgttgagagcgtggaccttgtttgaatcgcttcctgtaggaactccagcacctgagacaggtatggcagagtgtgcccgatgagtatctgttgaaaggttctggaggtagttagtatcttattaaagaaagactatgctgttaactctaacaacaggccatcttttaagatatctttttggtcttggagcttgcacactacttgacttcttaaataggaagatagcttgttcatgtattggtagtgatggttgtgccaatcagagtaccacgttttactcttgataaagattatgttaccaagtgagcaggtaccaggcaaatggataggtttcctagaactggttactcttttaagtgtcattgctgtgcatagccttacattttctgaagatggggactgtcatgtgatgcagaccaaggactcttgaaaatgttgcatagatgacaagcctccaaaatctgtgtactttctatattttacctgtggctcaaggataacttgcacaggctagaactcagcaacatgtgtggtatgagg

SEQ ID NO: 113652 - DNA, 1965 bp, Homo sapiens
ttcacacctccaggagagatgagttcattaagccaggccacacacattctgttgccatctgaggctgggccatttccattcctaagatgcatgatgctaaaaattgctgcttgtttcctaatctgtgggtagaggattaggctatgtttgggggttggtctatgttaaggatggcagcaggaagtaactagaagtagaggaactacttgtagtttttagcccaaggagaagtggcactggccagcactagggggcaatatagagctattttcttgcacatgctcaggttgatttttatacgtaaatgtttcaagatttgagggtaacaggtgggtgctgaagaagattcccctggaatgtaaccagatttgttagagctactaccattaccgttactactactacttctacttcttcttctttttgtctttcaaattttccattatgtgggtaatcttttgcccacatactgaattatgattgaattttgattgccctgttgctgtctcaattttgacagttgtacagtcctgtaaatacgaaccctccttgaggataccacgtagaagatcccattggcccagtttgtgcattgcatcgttttgtgacaggtcttctctaactctgaaatgtccaaattgatatattatgactgtagcagctcattcttgtctccaaggacccctcctcatgatactctcttttcttgagtattctaaagtccctaatggtgattactcaatcaggtacctcgggctgctcagttttaatattaacttggtatttcaagaggaggtagaattggaaattgattgctgtagccaatgctgcatacatggatttagactggatcatgtggacatggttcagaattagctttgaagggttagtgtcatttacactattgttaggtatctggtttttgacctaccattggattgcaattcttgccacttttactgtacaaagttttatcctctaatattataagttgacttcatatactatacttaatttttaaccttacttctgaccctgtctcacttatgaaaacaagagtcttcagatttaacttgaggaaagagattaaaagataacattgacttgcttggagggtgtctggcctgtatacttgttgtatgaccatggtgaaaaatactcatattttgtgcacactggttttagatgagaatgcctattgtggaatgattaagttctgggacggtgcttctgagttgtagcagaaagaatcatacacccaggaacaaaacaaaacctactttgtctgttgcatacagcacaaagagatgtcaatgacaaagttgttggtggaggaatgcctcttctacctgtgttgttggtgagtgatttttagtttactcatagattaagagcatgcgtatcatttttttctcattttctttagccattctgaattttgatttggaatatgccgctcttcgctacggttggtcttattaacatcagttattgtatgtgttctttttctcaagggcttttgtggcatgtggggcaatttactttggtctgctggtcgtgcccttttgccggtatcttgtgtttatggattttccatctctttttatcagtgccagctttctcttcctactgtcaatgctcctgtatctaacaaaatttaaattaaaaatggaaaattaaaaaaggtgcccagtcccctcgccatcatttttaggtggcagcttcaaatctctgttttatcaaaaacagataaccacaatatttagaacagtgtccaagagtaaataggctctaactgcagactaaagggactttcctgtaagtttccctgtaagttttattgcgtgacctttttgacatttatttttgttgtttaaaggcttttttacaaaaaaaaaaaaaaagaaaaaacttcctcctggttctctgctgtttgaaatagttgaggaagttgaacaagtacag

SEQ ID NO: 113653 - DNA, 1038 bp, Homo sapiens
ggctatggctattgctgtgagtaataaactttcttttctctgaccaagaaggactgtgtcttctgcacatccatgaaactatggcaacctaacatagcttgcaagcaggataaaatctcaaatctttcacaatttttgactctactacatattgcttaaggacctagatactgtcagctacatagcaatgaagcacttttatgcgcctgaaataactgataacaaataattgtggtaaacaggtatgtgggaaggaattcctgactgcataaagagttatgagaaatcatcttcccattggtttgggataggccaaaattcatggaatccttagaatgtttctagcagcaactcaaagaaaaaccacttcgtagtggctgagaacacagtcctgatatgaaaacttcctatgctgtaatctagtgtgaaaaggtaagctgggccaatcacggtctttctctcaagattttgaatgcgaaccagaatcaggtagcagcagctgaaaggattaagagagagatgccatgaaaatctcgtcagaaccatgaagatcttaggcaagtcaaacttttgaggaagaagaatgtgagtaaataggcagaaaataaagcttctctataattttataaagtctaaaagttggcaagaggagaaaagtgcaaatggacagaaagcaagagagaggtgatgaagccatgtgcttgagagaaacaggtagagagacaggagatggccatcttggagctgcttgaactgactgattttcaacttcaatttatgctcttgtctgtgtgtattaccacagtgaaacccgtttctcgttgtatggtcccagtgagtttcagtaacaacaaagctctaaagagatcatatcttttgccagtcatgctaaggtactactctttgttcccagcttaattctaaatcctaaacagaaaaaaaaaatggccatggccatgaagtatcatacatatataccgttaaaagaaaaactgcagcccagttaaatgtaaaggagtgtaattgagcaatgaatga

SEQ ID NO: 113654 - DNA, 1070 bp, Homo sapiens
actcattctgttgatggtttagaaatgattattgcatctagctacttctcctcatctctgcttttatggtctctgtcaggccatagtcatgtcaccttgaatctgttattgcagtactttcctagattcctgaacctgatcctgtcctctctactttgctcatcctctacaacagtggatctcaaattgttggtctaaggtcccctctacaacctagagcatgtttagggacacaaagagctttagtttatgtggcttatactattgaaattaccttattacaaattgaaacagaaatttaaaagattaaatcacttaaaataactgtacggatattaacatgaataacttatttttatgaaaactacattttcaaaaagaaaaaaattaatgaaaagtggggcattgtttaacggtagcaaatcagtttaatggctggtttaatggaagacagcaggattctcttatctgcttctgcattcagtttgttgtgatatattgttttggttgaagtacgtgaagacattatgacttcatgcagacataaaattgaaaaagggaagagtattttaatggccttgtaactgtgaagattcttctttaatgtcatgccaaaatttaaccagtgctagtttcttacaagagaggtgcaatgtgaaatctgaaatcagatcattgaacattttgtcctctgttgcagtaaaatcaactagtctgtcttgcactttgagtggttcttttgtccaattgtgattgattttataacatcatttggaaaatactgattctctgggttttgcattttttccaaatgttgacatattttattatacaacatcaaaaaaatcatatctatctaatatcacttatgatctcattggaatgtctgtgagtgttggaaagctgtcaaactcatggtggctaatattaattttaagattccaatttttgtttggaagttcatattttatcactggcaacaaatagagtagtgtttctcaaagttacaggttctcttcattcacttttgaaaaatattttcctaaatattcaaatctgaattaccacag

SEQ ID NO: 113655 - DNA, 1654 bp, Homo sapiens
aaagtatttctgccaatctaatagaatcctttccaattccatgcctttgtttgagtgtacggaatgaccttaagtaagaagtctgtcatgttctgaatggtgtagaatattcagttcactggaaacactttcttctagtatattattattaagagaagtgtcatcttggcagtaacaaaaatgttttggttctcaaagataccatttgttagtgtgatttatgacagattaatgaaaggcaggacagttgggtaaggagtactattcccaagcaattactaagattgaaatatcattttatcttttcaggtttccagcttctgcagtttctgttttgaagagccagcacttacggcagaaacttcttcagtctctgtttcttgataaagtgtattgggaaagtcaaggaggtagacaaggaattgaaaagcttatcgatgtaatagaacacagagccaaaattcttatcacctatatcaatgcacacggggtcaaagtattacctatgaatgaatgacaaaagaatcttctggctagggtgttagatatatttatgcatttttggttttgtttttaaatcaagcacatcaacctcaagcccgtttagcaatgaggcagtgtagatgaatacgtaaaataaatgactttaaccaagtagctataatgggacttagcactgtatgcatacttaaaaaggttttgaaaaacaaactacttgagaaatatttgtttatatttttctctaacatcatgctatgtgtcagtctgaacatctgacaacagaaatttcagttattattctagctaagttttgaaaacatttgtcatgctgtttaatagaaaactgcaaaccagagacactgactccattaataaaccatattttgtgccgttttgactgttctgaccaaatactaatgggaacaattcttgacgtttttctgttgctgattgttaacatagagcagtctctacactaccctgaggcaactctacattggaacactgaggcttacagcctgcaagagcatcagagctgaccatacatttaaacagaaatgctggtttatttgcaaaatcaccagtatattttctattgtgtctataaaaaatcagtcatttaagtacaagaatcatattttccattcctttttagaaatttattttgttgtccctatggaaatcattcacatctgacaatttatatgttaaagagttttactctctctattttggtccaatttgtatctagtggctgagaaattaaataattctaaagtatgaagttacctatctgaaaatgtacttacagagtatcattttaaaatggatgtctctttaaaaattttgttacttttaccaacaatgtaatataatttatgtatattttattaataatagtgaattccttaaaatttgttctatgtacttatatttaatttgatttaatggttactgcccagatattgagaattggttcaaatattgagtgtgtttcaatatattatctggcttatttcaacatgagtaatatgagcaaaataagttaaaacctgcgtctgatcaattttcctcatgactagaactaaaacagtaaatttggacaatattaagcctcaaataatcatctccaaactccttctaacacttttta

SEQ ID NO: 113656 - DNA, 1516 bp, Homo sapiens
aggaaatatatctaaaaatatcccaccaccaccaccaaaaaatttggctggaacacctgggtttttctgagtataattttagttaggtaaacattgaaaaaatgtattttcctaagaaaggaaagactcattttatggaaaatggtgattggcagtattttaagatgcagaagattagttttggaaaagacattcctgttttaaagaataagatgtgaatttgaacaagcagcaataatgaggactaacactcattattgcttagctgacaaaatgtatccccaaatagccttcttgtaggatagttacctacgcagacacgtagatgtacactacagtgcttaatcatgcagtagttaagtgaatgttttaagtgtgcactaaacaagtatattaaaaccatattatggattcatagctatgtaggatatgctttattaggctttaaaaattagataagctgtcttaaaagtaagcataaatatgctcaatagaaaactaaattaactgcctaacaaaatggcactgaatttaagggtgtagattatgtttttgtggtcaagttatttttggtatattgaatatgaattcaaaaggaaacctataaacaaaattctgagaagagctagagaacatgaattaagaggtacgtaagcccttgctagacaagggcaataatacaaagacgtaatttactatagttggagcataaggaaaacaaagtaaaacctagattatttgagaccttacagctgattttacatctgcaggtgtacacacagtgttcgtgcacgcgcacacacacacacacacacacatatgcccatcaagtacatatatagatctgaaaaaaattagtggcaacattttctataagagaagttgggctgaatgcacacacctgttttcagtaataatgtctcttagatctgaatggcacaacagtctgtcagggaggtggtgaaatcatcacagacagttgagtgattcaaaattagatcagacgaagtactttaaaagtacactgtagcaaacaatctaatgttggtaaggcaataaaaagatgacctaaatcaatcttttcaacctttaacttttaatgcttttgtgtagtttaaaaatagaaaaatataatgtttacagaagtactgaaagggccttatctctaaagagcttattatttaacataaatatatgatattcatggttttgttatagaaacagtacaaatgtagttatgtatcttagtcctttccccactactatgaagtccacaatgatggaagaactaagggtttgaagaagcatttaagaaatgtttggtagcattttctttacgggttatattcaaaacacatatgtccaatataatagactttgatatttagtcaaaattaaataagatttaagtttttttatttttaatgttaatgtaactagataaaacaatgatgataaaatggtacacagattctctgagaatcattagttaatgtgtatttaaaaaaaggggtga

SEQ ID NO: 113657 - DNA, 1044 bp, Homo sapiens
tgccactttataccagttcatgatgagataatgcaaagttacaagtaagcatttagaaactttgataataatttgatagaataattttgcctgctgaatctaacaagatgtttatctggtattttccatttcaaaaactttatttctctgatgattaatcatttttttaaacaaaacaatagtctacatagagaagcactggccaaatacacttattgtatctctaaagatgcctttggatttcttacctccatgcctttgcctggtttttagctaacactgcctggctcttaaaatttaactgtaatgtcatctccttcatgagcttttctctgaaatcctacggaagttctttgtatttctgacgaaacctttataactaatattttaaattcagtatcatttaacgttctacacaaatgcgcctcctttttgcagtatcgttttggagactacccccgagagatacaatcaggatggataagagcatggactttaaagctgtagatacctggactggaatcctgagttgtgtcatttaagagttgagaggccttggggaggtcaactagcccttttctgcctcagtttcctcatttatcaaatgagactattggtatcacctatgtcttaaggttactatgaggattaaatgaaataatacatgtgaagcattaagtatacagttcctggcacatactaaacactcaatataaaactgctattaatatttttattattaatattagcagcattttatatatataaataaaataaaaatatagtactttttttttttttttttttttttgagacggagtctcaccctgtcgcccacgctggagtgcaatggggcgatctcggctcactgcaacctccacttcccgggttcaagtgattctcctgcctcagcctcctgagtagctgggattacaggtgtgtgccaccacgcccggtatctttagtagagatggggtttcaccatgttggccaggctggtctcaaactcctgaccttgtgacccacccacctcagccttccaaa

SEQ ID NO: 113658 - DNA, 1028 bp, Homo sapiens
ttttaatctttctctgcttagtgtttcatattcaagtagcagcgaactttgatgctcctcaaaatcattcctgtcactttttccttttcatttctattaatgttacctcagtcagactttttccaatgtagatcgggatgctgtaagagactcttaactaatctcctggtctttggtcttccccaactgccaattaatgtgcaaatcattgcttaatttatctttcctatttcccttttaatcatattgccacttgcaaaataaaatctctaaagacttccatttgattggaaaataaagtttaaatttttagaacattaaaaaattattatggaaaattaaacatatgcaaaagaagacgggatattataataaacccctatgtgcctgtcactcaacttcaacaattatcagctcataatccatcttgttaaatctctatctctgtctactttccacatccacattaatttcaagaaaataattggcattatattatttcatctgtaaatatttcagtatgtatcactagaagataaaacacataagcacattgctattatcacgcacaaaataaaattgagcagtgatttagtcaaatacccaatcagtggccacatttttgtttcataagtgtcatttatatatttcagtttgtttatttgaatcaagatttaaataatgcccacactttgtgattggttggtgtgtcttctaatcaatggacttcatctctatatcttctctcttccctttcaacagcttgttgaagaaaccagatcatttgttttgtagagttcacactctcaattttgctggttacacttttgtggtgcctttcttttgcgcttcctttgtctatgttccctatagattggtgctgaattgatgatcaaatttagatttgatttattttgtcaagtcttctttgtagatagtggtgtgttcttttatcagaagacatcatatctggttagtcctttttctgataatagcagctattgatgttcacattgatccactagttc

SEQ ID NO: 113659 - DNA, 1046 bp, Homo sapiens
cttggatttttgtggcttgttttcactactttcaagtgactatcaaatctatacatctatctcgtttgcatgcttttaaattttatttttaaaaacatttagtggtgatatttatgaaaggaaatgattactttttttcttgactcttgtagaggaacttaaatggtttgaaattgtgactcagttaactctgtatccattcattcccagaaacaagccgcatttctccttggggagactgataatttaaaaggtttgttgtgtcagaaacattcccagcttcatcaccaaccctttccttccacctctgcccactggagaccacttatatcccgaagcggacgcggcagctgaagtcaggaaaccatgcatcacattagcaggagccaactgcagactttaaactccgttcaacatgtggatgcggcagagaaatgacctgtccagacaagccggggcagctcataaactggttcatctgctccctgtgcgtcccgcgggtgcgtaagctctggagcagccggcgtccaaggacccggagaaaccttctgctgggcactgcgtgtgccatctacttgggcttcctggtgagccaggtggggagggcctctctccagcatggacaggcggctgagaaggggccacatcgcagccgcgacaccgccgagccatccttccctgagatacccctggatggtaccctggcccctccagagtcccagggcaatgggtccactctgcagcccaatgtggtgtacattaccctacgctccaagcgcagcaagccggccaatatccgtggcaccgtgaagcccaagcgcaggaaaaagcatgcagtggcatcggctgccccagggcaggaggctttggtcggaccatcccttcagccgcaggaagcggcaagggaagctgatgctgtagcacctgggtacgctcagggagcaaacctggttaagattggagagcgaccctggaggttggtgcggggtccgggagtgcgagccgggggcccagacttcctgcagcccagctccagggagagcaac

SEQ ID NO: 113660 - DNA, 1364 bp, Homo sapiens
acgactccttttgagccacctgacaattcagtccagcacagcaactgaaggaaggcgttccccaacctgctgtcctatgaaggcctctaggtcaccggtgctaaagccctcctttctccaccctccttaagtggaggtaaacgtcccagcaggaagtcaaggctggattggcgctcttcgcgagcaccctgggaacgggagtctgggtcacgggtgctagagccctcccctctcctcccggccggtgtatgggaaattgtccccgcagaaagtaaaggctggccaggccgcccccagcacgtagagggaatgagtcaggctccggctccacactggcacgtagtgggcggatcgcgccggcgctgagtaggaaggagcttcagccgccagcccggaacgcagtgagtacagccactcaaaggaaagccaagtcgctttgcaggggagcgtctcatgatttttcagaaacgtgctcatggttaaaaagaaaaatcaaggctcggaataaatacattcaagcactgttaattttagcccaaagacaggcggtacttgcctggagatttgggaaaatcaacatgaaactaaaaatgaaattttagttggagtggagcaagcagtattgatcagaacataccaaatacgaattttttcaaagtctgcgtagaagtttaaattactaggaaaaatgtaaaggagaagtatttactaataaatgaaacaaaagtaataaaataaaaatgaattaatatagtttgacaaaatatcagcgaacgctgaaaagaaaacattaaaataatgtttgagactttttaggttttgtgcaggaagaattgggaaaaatgtgctggatggagtgatactgcttttcttttccacaaaaatttcattattttagagagcggtagagcctttttaaagacagtaagttattgccaattcacaatgaaataagatcacatgctctgaaatgtacaagagctgcatgcaataaacttcatttatctataggtaataactgattgatgtttattcagtagtcgaaatgcacctcatgcactctaattagcacgtcaaattagtctctccgtttcagaggtgtagggcctttgtggagccttctcaataaaataatttgccactcttgaaggttagacattctcttctatcaatgtacacataaaggttttgttttgctttgcttgttgtgaattaaaatggggagaaaatgatgtgttagctatcacccagtcatgtgtctttttagtcataggttagcttttcaagacacttcctgcatctctgacctgttgcacctctgttatcttggcacctctgttatcttagcagcaagcacctgcctc

SEQ ID NO: 113661 - DNA, 1029 bp, Homo sapiens
cattgtggaaagacgctgtacctcctgtgataaaattactttggtggtgcttttttctcatgtatctcgggaaactaaaaatctgaattgtattcagtggccttttccaaatggtaactttatgaaaaaatgtctaattcttggttatttgtggttttagtcctttcttcatagagaagctaaagctgttaaataagcttagcagcgttatccgctaaaactttctgcagtgatggaacctacacaggagaattttttttgtaatgtactaaaaatttgtcttcagggcttgttctttttaaattgtaggctagtgatcaaaaatatttggtgatagaataaattaacatgaagtacaaacattatatatagttgtgtaatatcctatctgcaaaaaggagtcttagcgtgcttttgaaaaattcaataaatataatatgttaatcacaatttggtcacagattcacgtctcaattgtttcattttttcttttatttcagaagctcctgaaaagtacatcaagtctaaagtgaaccagctaactcattaagactggaatcatgagcaacaatggagcagacctaacctttggttacatctcctgttttgtagctatccttttgtttggctcaaattttgtgccacttaaaaaatttgatactggtgatggtaattatttttccttgattgttaacgttatattatttttaaaaatgaagttccttttttggtcttttaaaagtatagctacaaaaataaatcatgttgatcttgatacctagtgaatagagcttaaaattagtcatttgacagtgctcataccagtttgtctgaaagtcagaataggagaaccattaaggttgtttcatggtaaagttagggagggtacagtcaggaaatctcttgggccattatatgaatggaagaaatttatagtcagttctactataacacctgttttgaaaacatgaatcttcaacatgattgatatattagagaacaatgtaagcataacagatttttggcttg

SEQ ID NO: 113662 - DNA, 1132 bp, Homo sapiens
ccccagcacctaaaacagggtcacacaacattcactaaatgtttgttgaataaaagagttaacaaacataattgaaagctttttttcttcctatatttagcatgaagactgtcattgtttctctaggaaatgtatgaatctgaacttttttgacttgaagaaaaacattctttttttacagagatttggactttgatgataggttttaaaaatatatgataaatattttttgtacttgtttgattttttttttaaagactttacttcagaaagggaaagactgtttagaaagaatgcatattttttccctatttatttctgtggttactgcttttgcagtttaacagtgtttgtatttgatatttgtatatgtttgattgctatctttaaagtgccttatcagatttatggctctgtgctattactttttgagctttgcaagttgtgtacataataattctaaagaagttactttgtttgcaatgcatcaaatttaaatgatgtgattttttttgtattatttgatcttagtgacagtgttctattttgcatcctgtatcttatgttgcttttggtgttttgtgttgtgtgtcaacgattaagccaactaattctctaccatatataacttctggacatttttgatacaacatcttaattctttgtagatatggagataggtacagaactatattctaatgccccacaatggggctatgagaggggacagatggatgggcaaagaatagttttgtttaacatattaggtcatagttcttgattagtttttttagttaaagataaacacatagggtgtgatttctataccaaagatatgcttatttcagtattagaaaaatattcttcttacatctcctgaaaattgcaatttttaaaatgtgtaaaaataaattattattaaaagcacattttatttccatttgtttggattcattaccttaaaactttattgacatatttcaaagatataggaaaggtaaatgatttcaagaaaatccgtgtatttctaccatgcagatgtaataaatgttagcatttggctatattttcttcagacacacatatgcatgtaattgcaaatgttagatacatttgaagtttgctttgttac

SEQ ID NO: 113663 - DNA, 1054 bp, Homo sapiens
tctcctcgtgggtctcagccccggaccacaaagacgtttcatttttcgggacagccaatcatatgagtcaattcaccttaggcaactcacggctcctgcgcgagcctccaatcgatctcgaagggcactcgtagagaaaactacacctcccaggaagccgtgtgcgtcgccccgccttctactgcctttcactgcgcgtgcgtcgtgctgtgggattcgcggacccctctggccgcgctgtggctgtttcaccgctccccggctgggacttggagtcccttatctttccctggtttggtacatgacccggaagcctcggctggccgttgcgtcatccatggcgccggcgcagagcgagaaggaggtgggaacgccgtgaagcaagagcggtcggcagagcggggaggcgaactgcagcagagttcttgctttccggcaggtgatggcgccccccgcggcctagaggtccagcgcccgccgcgagcagcggacagtcctcctgttgtgtccgaccgagagtcctggtgactttgaacatgctggtgccgctagccaagctgtcctgcctgggtgagaggaaacgggcggtggggataagtggaggagttagggcaaaagggacaaggccggtcctgggggctgtaggcacctctcgccccttctctcatcagctttctcaggctatctagggcaaaggtcacgcgctgtcagcctgttgggggaccctggcttcctccctctggggttgccccagttggtagaattaatatctaggctaaaggtcaagggcggggaaaacttgtcaacacgccctcggcatcaccaccacctgtcaacacacacacacctcggtggactcctgaactgaggcttcccaaatcctggttctaatcttcaaacctctgttggaaatggaaaaaaaaaaatcgtatttgcccagtttttctccctggtcctgacctgactttcgtcttcggagccattctagttcagtctaaagaaattgaagtctgatctgtcacatcatggttaacattcatatgttgaccaagtc

SEQ ID NO: 113664 - DNA, 1046 bp, Homo sapiens
ctcaaagccaagaattagtttatggaaactgaaataaagtatgtactggaacagaacctaagaatataatcatactaatacagtaatatgcttaatataattattgtgcaaaacacagggagaatttccataaataatactctaaagcacagtggatattttttaactgtcatgtgatttatcatgtgattattgggttatattaatcccagaatttttatttctcccaggagtgaacatggaaaggtttgcagaagaagcagatgttgtaatagttggtgcaggccctgcagggctctctgcagctgttcgtctaaaacagttggctgtggcacatgaaaaggacatccgtgtgtgtctagtggagaaagctgcccagataggagctcatactctctcaggggcttgccttgatccaggtgcttttaaagaactcttcccagactggaaagagaagggggtatgaaaaattgttttttatacaaagtctaatcttttgtaattgtatttcagtaattgttcccaaattactggaatataggaaacccttttcatgtaactctatcttttttttttttctttttttgagatggagtttcactcttgttgcccaggctggagtgcaatggcgcgatcttggctcactgcaacctccacctcccaggttcaagtgattctcctgcctcagtctccctagtagctgggtttacaagcacctgccaacactcccagctaattttttgtatttttagtagagacagggtttcactgtattggccagactggtctcgaactcctgacctcaggcgatccacccaccttggcctcccaaagcactgggattacaggcatgagccaccacgcccagcccatgtaactctaagggaataattatatactttttaaattaaaaaaaaatttatatcagaattgtaatttatgatattaacaaatatttttgtgtaatgctttctacatgtatttatgtaatgggtatatgagaagataacttgagaagacctttgaatatttcttgggaggcattt

SEQ ID NO: 113665 - DNA, 1607 bp, Homo sapiens
agctgtgatcaggccactgcactccagcctgggccacagagtgagaccttgtcttaaaaaaacaaaaaacaaaaacttaagagtttataacttaagagttattaagttattaatgttcctaaaaaacttataattcaagtaaaaagtgtatacaaatgtttcttcaaaatgattttatcttaaaagtgttagttcaggcccattcgggagattgaaaccacagtggggagcatattggaaactagagaaatgtctttctcctccatgtccattcagtgccctctgctgacaaaacttagtgcccactggcagaggagagctatttgcatgtttcagctccattttcacagagcagtgaaggatgggtttggagttgataggcaatgaattgaaatctggcatataagcttaatactttgatataaatactagctttatacttttttgtaggctcttgaactagacccatcaaataccaaagcattgtaccgcagagctcaaggatggcaaggattaaaagaatatgatcaagcattggtaaattttgttccaaatgtttaattttttaaaatagacaactacctttataaatcatacacctaacttaaatgtttttttccaattaaaggctgatcttaagaaagctcaggggatagcaccagaagataaaggtaagttggcagcttttgtagtgaaagttaattttgttatttaaatacttatcctcaggaaccattgttcactttgccagattttagatgtttgttcaacagacactacagaatgcctgctgttgggccaggcattatcatatagcaatgaacaagacagtcaaagtccctgccctcaaagagcttacattctactcccattcaagaatatagtagtttttcacgttatttattcttcaagttatcatctctgtagttttttatatgtctaaatactgtttgtcttatggtatcctttgagactgtgttcctattctggttagtctagtcgagagctcagcattgtaagacacagtattcatggtaaatttaacatttgggaccattcaagttgaatgtggctataaccttagtattgatgtactggttatatgttttaggaaactatgacaaaaataagcttgtttttcaaataaaccaactatgaatagtgacactagatctgggtattacaaaatgtctttggtctcttattactaaaatgaaacaagggaagcaattactgttctctaatgtagaggcagaaggcaaatcttgatgtacttgagttctctcagttgacatcctctaaaattacgtttcatttctgtgtttgtgtgattgctcagattttctgttactagggcttagttactttgtagagaagttttttcaaggggtagttaacattaaaatagtttgttagtcaccataattttttggatattttgagaaataactcacattgcatatttattttacagctatccaggcagaattgctgaaagtcaaacaaaagataaaggcacagaaagataaagagaaggcagtatatgcaaaaatgtttgcttagaaaggattcagttttgcttattgtgtgttgattgtataaatgca

SEQ ID NO: 113666 - DNA, 1392 bp, Homo sapiens
caactttcatttggtgatctttgctagtttacgttaagtcttcctatacctgcaaaactgttcagttggtatgtatagtagtacatagtggaatgaggataataagcccaaaatcttgtctggattgtagcattaactagaggcttggccttgactttgttacttaacttttccacacgtgttttctcctgtctaaattacttatgggtttagactagattatctctgaagacccttgtgtacttaatgtctgtgaatcaaaatgaccttaatattggctgggcatggtagctcatgcttgtaatcccagcactttgggaggctgaggtgggaggatcacttgagaccaggagttggaaaccagctttggcaacatagtgagatgctgtctctattaaaaaaaaaagaaaaaaagaaaaacccctaaacgaccataatactacccagcctaagtgacagggttgtgagtgggagttggaagctcagttacttgtaggaggtaggctgtcactcagtgtatgacaagaatagtagtaaaccggaagctcatgccccacctaatgccacttacatagacaatgataaaattgccaacttattctgtgtttattgagctcctgaatagcaataaaatgcttatgtaaatactaacattgtcgtattagttggaatgtataaaaacagcattatagtacataaatgagccttctcacataaatctgtgaattggacagtgctgcacatgacttcagctgtatagcttttatctctcattattacgatagtgcacttctacaatttagggttatttttacagttgtgcgttattgcagaatgtggagaattgaaggaaggagatgacgggggaatattcccaaaagatggctctggcgacagtcatccagatttccctgaggatgcggatatagatttaaaagatgtgagtactttcagattagtcaaactttaattaatttagtaagtgaaaatatttagtactaaaagtttgagcttttgtttcagtctctcatatgatagaatctagcattaaaccacattacttactaaaatccaacatatttgtatttttttatacaggtagataaaattttattaataacagaagacttaaaaaacattggaaatacttttttcaaatcccagaactgggagatggctattaaaaaatatgcagaagttttaaggtaatattatttctaacaaattatttttaagaaattataaattgaattataaactaaaattaagaattgctcattatatttttgcaaattacttgtggaataaccaggtgtgttgaaatagttgcatttccttttttttcccctcagcttgttttgagaaatttcaaaagacagaagttgaacgagt

SEQ ID NO: 113667 - DNA, 1131 bp, Homo sapiens
tttatgaatttggaagaccgttcaggtcttcccagaaaaaaagagcattcatcataaagagggcaaaatatattacaagagtttcataatgctgcatcttcattttaaaggtgaagtgtaagtattttctcatggccaatttagaaataaccctccccccgactattgtttctgttacctatttactttgataaggttttttaaagtttaaagtgattaagtgccccatgttttgtgaattaaaggttgcagtttataaaaaaataaaaagtaattaaaaaattttataagtgaaaagtaaaaaaaagtagtttgatctaaatggtagtatagtgcaccccagttttatgttcagtaaaagaacagttcagactaacacacaattcagaaaagaacacatctaaccttggttttcttttaatttttatttctacagcatgatcgggagggtttactgagcatggcaaatgcaggccgcaacacaaacggttctcagttttttatcacaacagttccaactcctcatttggatgggaaacatgtggtgtttggccaagtaattaaaggaataggagtggcaaggatattggaaaatgtggaagtgaaaggtgaaaaacctgctaaagtaagtaaaaagttacagtgaaatacacttattatcttagttgctatctttttgagacggagtctcgatctgttccaggctggagtgcagtggtgcggtctcggctcactgcagcctctgtctcccaggttcaagctattctcctgcctcagccttctgagtagcagggattacaggcgcgcgctacaacacccggctaattttttctgtatttttaatagagacggggtttcaccatgttggccaggctggtctcaaactcctgaccttgtgatccgcccacctcggcctcccaaagtgctgggattacaggcatgagccaccgcacccagcctgttagttgctatcttaaagaaatataagtaaaaggatcaggtgattattagctggaaaaatgttataataattttgggtataggagccaggatctgccactttttttttttttttttaacttttctacaatgggaaagacaattagggtagttttaaaggagatttttatt

SEQ ID NO: 113668 - DNA, 1060 bp, Homo sapiens
gatgtcaggggatttgcacactagcagatatagttaaatgtccaagctcctaaaggacttcagtggtgcctgtgccttcttgtcttcgttgtcccaagatgtaattggggtatattgcatcattcaagttataagaatggacatgtaagtacaaaagtaaagtgatatttttggaaataaggaatatgagcaagggtattaggataatttgaaaaaatgtcgtcagtcttccagtcagtgtttattgagccactatcactggcaccaaagggtttataaaaatgaaaggccttgatgacaaggaatttataatcctacctcagagacaagattaagatacatgggactactggagaataatagtatataaataaatgctaaattgattgaatatccttgcttgtataacattgctaatactgtctatatactgcaggagaaagatgtgatttatgcagtctgaattattatggaagtcattgaggaggaatggctacttgggctgtgcagactgggtcttgcaaggcggcaacatgtctgagatttggttaggcaggaactgtagtattgatgcagaatttaaaaagggacgtcggtgaggaaagacaaaggcaagagacgttgaggaaataaagttctagttactgttgtaccaaaggaagctaccagaaggatgaaaactaaaggtgatgtgatgatcacattgacatagagaaaaggggcctatagacaagacacatgattcttgctttctataaacgtggtggccttaaaatctgaatttgatttagactgaggggagtaaaaggcattttggtggggtggggggtgtcatgaaacattatataacatgagagttacggtgcatgcaccaacaaggaatacatttagaaagcctaggagataaagtgaaaaggttaagaaattgggtttcatagatcctttgacaggattatgccaaggtagaattttgatttcaagatgtatgcagcagtttcttttgagcactctccgaagaggtgattcatctgggatgaaaacctaatccaaatcctgtatg

SEQ ID NO: 113669 - DNA, 1172 bp, Homo sapiens
agtcaagatgtcgcacccgtccccccaagccaagccctccaaccccagtaaccctcgagtcttctttgacgtggacatcggaggggagcgaggtgagcggagtctgacgctcgcggaaaagccccgaggaggcgggggttcccgggatttgggggattccaagggcggaatgcggctccggccggtgactgctcagtttcgcggaggggatggctgcctaggctggtccgccggagcaggcccggagatctagggctagatcgatccagcgcccttgtatcaatgccatcggtggtgcggaagtttctggaaatttctagttcgggaattgtggcgtcctttaggtttgcctcctgatttggtggcacttccacgccacctttgcactaccaagttagcatgaaatattttatgtttgcaatgggacagttcggaaagcatatcctgggatatgcgtctgctgggccccaggaaactatatttgccacatgagataatatatcagcacgtgctgtgttatttatacgttaaagggacttgtttgctcattgcttttgccttattactgattcttaatttagaggtccgttcagatgagcaaacattttctcttaatttgccattgggaaaatgcgctcaacgtagtgatggtgttgcctaggttacatagccgctcagaagttcctaaggcctggtgaattagggagcgtgttgctttgtaactggattggccttgttctggaacacgttggaattgctggccaggcaatgtgtttgaatgcatgtacaggacacacacacgtttacacgtacattcagtttgttgcaactagctagggctaggtttaatctcacctgtcttagctgctatctagaggaggaatttttacagcttttgcttcagaggttgcatgaggcagtttgctcagagcacaaaggctgcaggtatacgtaacacgtggcaagtccgcccacccaaagactgtttaattttctcccgttggttgcttggtgattggaaattctcagtacctcttgaagaaattactcaggatttaaaactatttgtatttaatgatatctcttacatggtgctaatcttttggctactataattggttatgatccttagtgtaatgtttcaaatctgtttatatacatacatgacagta

SEQ ID NO: 113670 - DNA, 1183 bp, Homo sapiens
ttacaggtgaggaaacttaaagtcacagataacttaggcggcttgcccaaaatccagctgtcagtggtagagcctgtgttttgacccaagcagtttgaccacagattccagtctttaaaatccctatgctattctgatttcaagggctaacttttaaaagacgccttaaaatgtcctatattgcctttgagcacaggtatgttgagaagtttatttaacaatttttcaacacattttaaaattgagcaccaactcccaattctgacactatgctaggtgctttttggccaaaatgtcttgcaaaaacagttcactgttaaacagatctagacccagtataataaacctttaaaagtttcaagtgaaactttgaaataaattctggattaagttttatgttctagattttgcttttcttgaattccatcatttaaaacagtctctcactgtggtcatgtgaaaattaaacgtgtgtgtgtgtgtgcacgcgcgctcatggaaggcatattgtgaggaccttaaactccccaagttaaattctcatgttttctttaggctaacaagccttataatttgagtgggaattctatgccttttgttaggctgagtattagtgatgccatgtaccttctcagaatggtagaattacttcggacctaaggtgtgtaatttcgtcccttccctccctgtaacccagactccatcaggggtacaaagcctggagcggaaggagcatgttacaggtgtctgtactttgacagctcttgccaaggacatttaaagccatttgaatgcaggaggagatagtggcggttacttgtcattgttttctgtgctccttgcctaattgcctaccaccatttccgctatccacaagtttaactgagtgtatttgaacaaaaaaaatatggctatatttagggttttgggccatattagggaaattgattcccacttcatgggaacattttcagtagtgttctgacttctcatttgtgtataatgaagaacagaaaatcgtgccaagtacggtcttttttttgacctcattgggattttctacaagaatttgagatcgatgtttttggagaatttggggatcccagttgaacatcctacttgatgagggcccccttcaatagtgtccctgatagaggtcaccatggaaaagaaagtaaagtag

SEQ ID NO: 113671 - DNA, 1023 bp, Homo sapiens
gatttgggaactggtaatgtgctttatttctccagccactgtttttcttggtgtgggtgaaaaggaacaaatgttttgtactgattgtacaagccccttgcttagtgtgaattgttaggcctggactatgagatcatatacttggctgtaaaagtaagtctttcctttggatgtaagagtgctgaaatatttggtgagttcctacttaccaagcattctttatctcagatttatgaaaaatgattattatgtaaaaaaaggaaaaacaggatggacttttccagctaactgggcatgtaacagtgatttccctcaaccccaccccatctgtaaatggaacatccatgactcactactcatggccacacagacacttttgtaaccagtgcttgaatgggagggtgggatggggatggaaggagatgggctggcaccccacttgtgttcagccagaatctgtccagctgcctttataatggacttctgaaaaggacaatgtgccttctcatgcatcatgctacatatttttttttccttattgcactttctgtttgtgccagaataatacaatatattaagtgcaataaaatgtagccattaatactataatgttgtggataaatgttgtatagcagagtactctttctgttatataagattttagtattagcatgagtttggatccccgattatcatatttctgtctcctgaactgtgtgccttcatttctaggaattatttttctagttatttgtccctgtaaacttgtttaatttgtagattatactttagaatttgtgtccatcatagtgctataagagatttatatattggtttatgaagatgattttattaccacacctaagactttttaatcataaataagagatttctgtatttgatatatatctttaaataaatgattggtgtttggttatgtgctgatgtctaattgaaaatgacaaccaattcatgcagggtgtctaagtgagaatgaacactgaggcagtaggaattcatccc

SEQ ID NO: 113672 - DNA, 1052 bp, Homo sapiens
ggacatttgaactgcattgctctaggctctaggtggcctaaagtcctcacagctggaattctccatctggttccatccagttccagagcctggaccagttcagcttcctagactgaggtttgcatcaaaacttacaagtaatgaagggtttattatgtctaccattgctttctctttcttggggacctaaccggtatggatggaggaatgtacatgagtcacatttcagaggaaagctggacaggatgtggaagtgatggggagatacttgtaaacaaaaagaatagacaaaatcatgatatataaagtaacttccaagttttgagcccgaataatgtgggtagcataattagtggaaatagggaagttacaaggagaagttggttttgtacatgttgaatttaaggtgtagttgaacactctaagttgtgatattcatgaagctgtagttgtcagaagatattaagccaatatttgccaaagagcccagaaaattcatctcttgctctttaagacttttctttttctattccgtcctccaaaattacttctgtagaaattctgttccttcttccaaactcggtttagatgccacctctgattatctttgctgattgccccaaatgggcatgctgctccctttaaaccagtggtccccaacctttttggcatgaggcaacagtttcatggcagacaatttttccacagacagtggagtgggggatggttttgggatgattcaagcacattacatttattgtgtactttatttctattattataacattgtaataaataatgaaataactatacaactcaccaaatgcataatcagtgggagccctgagcctgtttttctgcaactggaaggtcccatctggggttgatgggagatagtgacagatcatcagacattagattctcataaggagtgtgcagcctagctccctcgcgtgcgcagttcataatagggttcgcactactatgagaatccaatgccaccactgatctgacaaggtggagctcaggcagtaatgctcactcgcccacca

SEQ ID NO: 113673 - DNA, 1060 bp, Homo sapiens
acacagaatacagtgtactttttcagttacaggacccacagcattttaccatggaaagatgtagagaaagaatcaagatttgtttactgattaggtttagggagaggaggggaggacaggagtgaatagtcaagagttgttccagtttgactaattgctataagatgctttttgttctacagagtttaatggatgttttacttccagagttgtctttgttatatcataattcttcagttttcagttcccttatcatgtgatttttgttattatgacatttaagattggcgaatgagcatacttatggtttggtaaatagaggtaatgattcctctcagttctgtttgcatgggggttgtggagctaggtcagcttcctcctgactgtctttgaagtttcactgacaattctggacactcagattccagctttccaagctttcctattggccactgggttaggtttcatactccttctattggttgctgtgatggggtttgtaaatggaacggaggcaaatcatacttgtaccctactattgtcatttatgtgaagagttgtctagaactacgctgcccagttcagtaaacaccagccacatgtctagtcggcccttgaaatgtggctagcctgaattgagacattctctaagtataaaattcacattggattttgaagacctagaatgaaataaagaatgtgaaatattctgtgagaaagttaataattttaatattgataacatgttgaattaagattttgtatatgttggattaaacaaaatactaaaattcatttcacttgttttttgtttgtttgtgggtcctgctctgtggcccgctggagtgcagtggtgtgatcatggctcactgcagccttgacctcctaggctcaagcaatcctccggcctcagcctcccaagcagctgggactacaagtgtgccaccatgccaggctaattaaaaaaaaattttttttgtagacacagggtctccctatgttgcccaggctggtcttgaactcctgaactcaagtgatcctcccaagtgagcctcggcct

SEQ ID NO: 113674 - DNA, 1016 bp, Homo sapiens
cagacatgcttctcatgaattaaataattttagtcctgatgtggagattgggagcactgaaaagtggtactaccatagagcagttttctgtgatgaagtaggtagagtaagcaaatgtgttacataagaatttctgcagcaactcttccagacaccttctaccttacttgataacagagtgtcctgatcacatgatttgcagagaatgagagatctgtgaatgattgctgagatgatggccccaacccagtagctcagcttccaacttcttaagcagctctagactactgataccttcctttcctaggtccaaatgctagggacaacctggctcaaaatcaaagttaaactttaaaagttatgtaatattttgttgctgatgtgtttctaacttttggcagtcttcaaaaaataatcccatagctgctattaatttcaggggaattaatgattatatgattataatttaatcatggggatgggttgtaaaaatcattcataaggaaaataggttgtagattgagttctgatattggacctttaaacaaaaaagtcatgaaagtctttatccaaattgctggttatctccctgattctagaaaggttgaatcattttaccgagacaaatagatacgcagtgccttttcttgtgggtggagagttacactgccggcctgacctggccacctctttttggtgttaaagtttagatatgaagtagttacaaacacagctttattgtagctcttctgggccgctgtttcgtttatcaggttggggatttcctggagccttaactttcttttccttatctctgtgttgtctggatgctggtacctggtcagatagcctttcggtagcactttttcaaaaaaacgtataatatgtgtactttaaaaattcctctcattgttatgtatattgcattgctgcttgatactacacaaagtttccaaataaagggaaattgtggagctttgtttagatactttaagagggtaatggctacggctata

SEQ ID NO: 113675 - DNA, 1037 bp, Homo sapiens
tttttaataaactttgattgaattataatatacaaaacactgtacatattcgggttgctgtgtgttcacagtaccagcactgggatcaagaaacagcatcccataacctttttgtgtctttctggggaccgtgcttcgaagtctctggtagaaagatttgtgatcatttgttcttgtgcaaggagaaggcattatggaagatagggaattacccggataaagaggaggatcatttgtgatgctgtggatcttaaacctcccccactccctcctgtcctgtatttatttctcctttttttctcattaatgtaatgtgaatatcagagaaagagggattctttttttttttcctttcaagattggacatactgagaggagaaagattcattattgcaagattcattaaatgagaataatcagaatggactttttagggagctgtattaagtcttagatttttctcctccaagctacgtttctcaattgttgcttctgagttaatttttcattacatatcatgatcattgcttttcatcatttgaagaatgtgaagtcaaggaattacagaaatgcatgaatacttacctagaaactttcatgactttaattctcccaactctaaattaggcatgggaatgggctttttctcaggtgtcaaatcttggattggaggtgggtcctggcagcactgcatccgaaggttttggagaggagtctgggcatcacaggagacaatgtgattgtttagagattttggccacggggaaaagaggttggacttgtgtcttgagtaccagatatttgtctttggtgatctaaatgatactgtgctatttattgattcttaaacttggcactcttctgtaggaccacttaatacctggtacatgagattggaaacagtacaaatagcagctttaaaaaattgaagtagtagtctgccttccttacatataccacatggattcatcatgctttcatacttctgtggtcctcccttccagtgtcttagaaagttcatcagttttgtgaaagta

SEQ ID NO: 113676 - DNA, 2062 bp, Homo sapiens
tctcgccttggcctctcaaagcactgcgattataggcttgatctacagtagttttcatagtgcttgtataagtaatcttttggttctctgttaaaaagagaaagtgactttaaaggcagtttatgggaagaaagaactcatgatcagtggccatgtcagttctaagctcaaaatgtgttcttcttggagaaaggaattcattttctcctaatctggttttatcttgatactatcaatttagcatgtgccacagagaattcaagttgtcatatgtgtgttgcaatttttatttctcaggagagggtgaatttcagctattttttgagtttattttgaaggaattttagggattatatatataagattgtcttaaggtaattgaaggccctgccatgacattagtttttctcacactcatggagtgaaatgtgtggataccgtacattaaaagtaatggcaaaaaccgcaattacttttgcaccaacctagtacaaaggtgcatttaaaaattgctgaagccaaaggaccagacaagagttcatcaggttttaggaatccattaatgttttcttcaccaaattccaggactaagaaaaggaaaagaattggggcaatcccttgtagttttgtatgtaaagatttgacctgtattccagggatcttgatttttatttctaataaaagaaaaatgttttcttcgtgaacccacagaatcatattgattctgtagcattgttctcctttttcagatgaagaatattagtgtcagaagtcaaaattgagctgcttttgtcctcaggttgggctttctcatttgaatatgcctaggaattcagtgcaagagttctgagggtttatggctgctcgttatcattttttttgcttgtattaaagcaaggatatatccctaatctgtgtcccacctccccttgtcatctatacattaagtcctacatttggctgttgtgggtaaccatccctcacttgctgtgggtagaattttgcaagattgcagagtaagacctgtcagctgacactggctcacatgagagccattaagagggtggtgtggccaatgtcagaacaaccttgcagctgaaggcaagtcactgcattgcccagagccatatgaacaggtcttgtgaccaattaattgactactacataatctccagctagggtgcacagatggagtgagtcagtccaagctgctcaacctgttaaatgtcttttctttgctaactggagtataagcttaagaacaaaagtaggacttgtctatgtttgtaatgggattgcagacagcgtgttttgtaatgtgatagatggatctgacttcctaaattattggcaggcttaatttacgtaacaaatgaatgttccacctttttttttttttaaacctttgaaaggggaaattagtacactgctgtcaagtagcttttctcacatactgtatagggagtgaaatgattgtttagaactgctggtcattacagaatgttcctcacataacaaaggaacttcaggatttgtctccaagtccatgtttatggtcaggataaaccagaagaacattaaaccgttcaggagatgtgcggcggcacagcgaacaccacaaaccagccagagagctggcaagactctgccagatgtgtgagtgatgctgttcctggtgctgggaggatttacagggcgcttttatgcacaaagattaaaaaacacaccggagtagacaggagcactgaccacacggaactcgacaacaggtttgaaactttagttgtttcaaagtctcagataattttttatttaatttactgtgtagtaaggagatggaattgtattgatctgaaagttgttgtttctcataagtgcttctaagtaggagaaatggggttattggtggatgtgcagagtcaagtcccttctcttacagaagagatgtaagcatgggtattttttagtgactattgtgacttcactacccatctgttttcttcttttcattacctctactggagccaacttataagaagtgtgtacatctttgtcccatgaa

SEQ ID NO: 113677 - DNA, 1129 bp, Homo sapiens
tctgggacttgccacacatatttgtgaatcattgttgctctggtggcaagagaaaacttgccatgtctttaaagtataccccttacacactgaaaaggaactgaaacagagcacttcagagtcaattgtgctttacagtttcatatcttgaaatttgaattcagaagaaattctctgtactgctttagaatcaccaggatgattctaaatgagtatatccattttatgtacatttttagatgagataattctattaaaaaagggaagtccttagattgtctgtggtagttacttaacaagaaagtaagtacagaaacttgagtgcattgttccctggtgagctgcttcacatagataagctgaccatgattttatgaccagtctttatttatagcagttgggattactgactaggaaatataaaaatagtcacagatttagagagagatatgctaaggcaacagaccaaagaattctgaagagtataataaaaggtcattaaaagtaagcgtaatgcaggtttgtaggaatggaaagaatgtttctcactgctgctcctggaaacagtgtgaaaaccactctaccctgatgctacttaatagaaaatgtagcagttggacaggttgaatgaagtgggtagagagaaaaaacaaaccctagtcagctgatggtcttgtgctttgtgacaagcttcacagagaggtcgtaaatggttgggtgtgactctgatgggttgggtattgtggtcacacgttcttctgcgcttcctgcattccttccctttttactgatttttacgtaccatgagaatttttctttgactagttagaagagtttatttctgctggctgagggtagagattttgagatataattccagactgataagagtgaatgaatcaaggaatgcagtgttgtgtctgatttagggttcaagaacatttgtcttttccctctgaggatacatcacttactaggaataaatcagcaatcttaatataggagattttcatagacgctaacaactgacatcagcttttgtctcggtcatatttggataagcattgatgacataacagggtaaagcacttgttattaatcaccatagctaactgtgtccagaatgaca

SEQ ID NO: 113678 - DNA, 1047 bp, Homo sapiens
cgtgcagtgctccgctattttgtctatgctgtggtggccccagggcagtggcatgtgggtagtggtgctgtaagtgccacacacaaacttcatctgttttagagtttcacttgatgtgatcctgaactcagaaaggaaggaagaaattctgtcttttcctctctgtactttgtagttccttgttcatagcacccaaaccttaggctgtattgtgacacatacgataatgttttgtcactgccgtgtgaacacattatttaaagacttatgtggttttaacttgtgacctttgctaccatttacatattgttttagtggcaaggagggggaaaacaagttcagagctacaactaacctacttacacataaacttttggctgttatttttgttagagatcagttatattcaggaaaatatggggaacctgaaagttatttcagtcttttgtccttttctcagacatggtaatcactaaagtgatcaacaatgctttatcctataattccaaaatcctaaaatttctggaaaatcttttggaattaatctgaactgatgtgaggctgtttatagtctctatctaatccacttagcataagtattcataacttgggctggtgaaatattaatttgtttgttttgggggtttgattacatctcagcccctggaggaagtattatgtaatatgtagtgtagcatctttctgatttctaaaaaaaattctgaattctgaaacatctagccccaaggctctcagttaaggaattgtgtatctgagtagatctttgaattatgctctacagctttaaaagtgctttcataacttaatctctgtttttcccaacagccttgtgaggtagataaggcagatgcattttgggaaagctcagcgctagggttggagcattctaaaatcatctgggttgaaggcagcagagctagagttagaagccctgtttaccctggtgaatcctaatccgtgtcccaagcatcatgtcttctgtgactcacatccatcactcacccaactgtgtggacttgacctctt

SEQ ID NO: 113679 - DNA, 1697 bp, Homo sapiens
gaatgaactcagaagtatggttccatgcttttgctgctgatcaaacatatttattctttcattccacattttcctttacaaaaggaataaaggatttacatatcacctactttcttaaagatggaagaattgtaaccaacatgcagtatagctctgtgttggtaatataacagtggactacatttaattggaattgtttgtaaattaatattaatatctttatgttatcaatatatattaaagcttctgataagaactttaagcacttttcactatactcctgaccacaggatagcaactcagtggtgattttttatgcagttccactgaaattgctccaggcaattcacacagctgaggctgtataagtgcaaaataggggaagaaaggagagccaacacagtcttcctgagagtactaacatagcaaaagataaatgaattccaaatctgttactgccatctatttacgtaagttttttcttgaaataaacagcttttactgggtgggaaataatgtgtattttgtgctgacagggtgaactctcattgctatgtcaagcttaattttcccttttcttccacccccagtcttcatttattttcagggtgtaactctttgggtctccccactcttcttgagcaaaccttttgagagatttctgtttgtacttagaaggtgttttttgagagaataaggaaacggtggaggttggcagagaaaaaagaatatagaatagggttaaagagtggttggaaaatgtaactgcgtttcataggagcagggttatggtttgctcattgctttatctcagaatgcttgccaagtagtaggcatacaggaattgctggttaaatggatagtatttttgccagtttttgttgtcatcattattgtttgtttttgttttgtttcattttgccttttcttggaccattgaaagtttcctatcattcctgactgtttaaatatttaccttcttggatcacaagactgttctttaaactctttatgtaaacttatttttgactgtgtggggaggcttccttgtgtgagaccaggaggaaaaacagagatcatgctttttccacatggggatacccatgaccacttctactctgattcctgtaaaagttcaagagaagaaacaacacccacactagaactggtctcaaaggatatagcaaatcaccctgcaacatgttatacaactactgctcttttgcttattggccattactccttgaaacccaggatttacaagtcactactacctctgcatttgccctgaaaatggtcttctcaaatcactttagttctcttcctaaaacacaggtcagatcgtgtcattctctttcttgaaatcttggaattggcacaccacagcttgtagagcaacagatgcattccttggcataaaatttaaagtccttcacaagtagtcctcaggtgcctttctagcctcatttgctgtgtggttcttctgtaggagacacatcccaagcacccagtgataactgtctttttgtgtttgtgctgtgccctcagtctgcagtgacttccctgttcattattccttctgtgtctttgtccaaaattttctccttcttaggaggacaccagtcattggattagggtgcctactaattcagtatggcctcatcttaacttgattatatctgcagagaccctgtttc

SEQ ID NO: 113680 - DNA, 1049 bp, Homo sapiens
agaacatgttcagtattaactgcctgaaaaaggaaaagaccaaaaatgcacaatttgtgattgagtaccagacactgtattaattttctttaaaaatcataacattaccaatcctctgaggcaattattgccattttggagcacttactgtgtgtcacactttgtgtgaggcactttacgctttgtaggacagctttgtgagggcagccttaatattctcattgtactgatgaagaactaggaggccagaggcatttgggtttgaatccagatgtgtcttatttcatttatatcatctcctagttttacagtttgcttttgttagtctgtctgtgtgtccatctatcctcctctgtcctgtcagagctccccctcagcttctctaagcaaggccccctttcacctcgggcacctctccagtccattgggaaaccggctcaactctgtcctctgagcatgccaccagtgtctgtcccctttcccccacctctgctgctggagctctagccttcattatgaagggccagaactcttattatgaattctgtttggccttcctgcttccagtcttcatctcttccacccccattttccttaacagccagattgaactttcaaaaagtgcagacctgatcttatcaagcgtctgttttccttggcttctcatggagggagaacatgatcctggcccctgcctgccgtcctttccacctcacggcactcactctctggccttttttcttcttccttctccagtgcagcagtcttacaccttaccacctccttctctgttcctatggtgcgcatcatttgttttgcttcttcaggtctgtgtttacatgtcacttcaagtccttagggacttctctgtccctttcccctaccccttcaatctggaaatctgaagctgtttactgctcctttttgtacttttcacagtttgtagtgatacattcgtctgtgattatttgcctaacattccccactgaatcatgaactccataagggtggggaccaggtctgtctggttaattaattgctgagtctct

SEQ ID NO: 113681 - DNA, 3487 bp, Homo sapiens
gtagaaatgaataacagtatctcgggtgtcagtcactgaagcaaaatttagagtttggtgtctcattatattatatgaaattgttagaagtacagttgtttagttacacgggttgagctacctccaaaatagcttttgttttcttccaacaaattcacctgaagttgcaagtttaattccctttggtagatgtgagactttgtttataaagaaaagtattgagtgactgatcagtcgttgtctatatttggaagtctattagaaaacagctttagtagcttcttgacgtttttgtcctctttctccttttcccccccatctccggatatagcttgcaagacagctttgagtacatcaaccaagatcctaatttgggaaaactgaacacaaatcaaaatagtttgggtccttgtcgtactggaagtaacctaggtaaaatcagagatacaaacaaattctttctttctgaatacactattgtgggtgtgtgttttgctttatttgagtttgtcgtgggtttttttttttgcgttatctttaatctgtgtttattttttttgtatgtgtactttgtttgccctcttctatgtgtttccatctctaggtctgctgcaagcatgcagcagcaaactgctgcagggggtagctgaaggaggacctctccggctcacccggagtgcttctttctttgcaggtttgtgtggaatgctgagtacagtgtgacccacacatattaataaatcctgtgcaggttcttaggaaaaatcctacttgtgcctctctagaaatccaaggggctcttgtgatcacagatattggtttcaaatgcggccaaatccatggtgtttcgaaaattctgccaatgaacctctcttgtaaatgtcttcgctaatactctagtgtaagctgattttgatctgaaatgagcccttagtatttccaagaggattgtttttttctgatttttctgggcctcttctgctactatgaactgtttccctttgccttggtgtcttttatccatttattcaactgcatccttacctgcacggagtttcattaaaagtcactctaataagagcatggaagacttctctctctctctctctctctctctctctctctctctctctccctctctaagtagtgtaaatacaatttctaggttatttacaggtatagtcatcttggtgtctctgagatttaacttgtcttagcatgattaaacatgtgaggaacctccattactaacatttaaagttgtgagtatagcaaatggtattttcctttctgttctttgtagcctgaaatatgctaagcaccatagttaactgacaccctgataaaattgacacgctcctacctacttagagtgaggaaaatgcatttaaatactctctttaaaattgtgaaaataaacatgcttcaaaaaaatagctgtcaagtataataatcaggcagagcactgggctgcttgtccatttaaaacttcactacagcagcagcatatctaccttctagcacaataagtatacagcttaggtcaatctgaagcattcctagaagtctgtaatacttcagagtgttttccacagttcatgccagaacatgagtttttctaagtaactctacaataatactgtgtatgggtgtatatggaaagaaatggaggaagaaatatttgaaaatgagtataaatgttttctatctgccaagagagtgggttataaacagagaaacattttttgaatttatgaaatggttttcaagtatttctcttccctaagtcgcctacagttactaccaaaactgattataaagcattttgaaatacattgctatttaaatactactactaatgaggaaaatggctaaaaaaaattacctgagaatgtttattcattgcatcaactgcacgaatcatttattattcagagttttttttttaagagttgaacatcactcagaaaagtttgtatgcttacaattgaatacaggcagatttttatgagatggttacttggttctcttttcttctcatcatctttttatatatttaattttgccttctagttaatctctattaaaagcttatgccaatcatcagtagcagtagcctactttgaaatttaaaaattactgcagtcattttaaaaactttatctctgaagagcccaataacatggttttcttgttcctttatcttagcacacagcacaccagttgatatgccaagcagaggacagaatgaagacagggacagtggcattgctcgatcaggtacttgtactctgtttattggtttaactaacagagtgaactatctacagtggtgtggaaggtgggaaagtagaagacaggtagataaccctcatcctgttctttgttttttccttcctaagatagtctgacatatctaaagatctgaaactttaatgtacagtatccatgagtgattgtgcaacataaactagttttttctaacactcaaatttatatgagactaatgtttgttaagaaatttctttccagaatgaagcttccttgagcccattgtactagtaatgtgcttgcttgactgttgagtatagactcagaggaagagaagggtttgtggaagtaaatctgtcctgtgacagtgggaggaccagccagctgacctggtcaccgtttcttctgttctagagacatgctgatctagattttatcaggtacccttctctccttgcctcaaggcctaaacctttctgttactgcttttaggatctgttggtttcaccttttgtatgtgacctcttttgagttttgacttgtggttcagatctgagattttgtattataagagaagggtggtgaatgagtgaactgaaattcaaggactggaggtggtgtgtggtgctctgcttgatgaatacatatggtacaggcagcccctaccttccagtgagactaggagcaccctgctggtttctcctgtgatacatgacaccttcaacaaatgggccagccaggcgttgctcagactggatgcaggcctcacatgatgttcttcttggcctttcactcatttctctgtccacactactccaaggtccttgtgctcctgtgtagcctcagagccttttaacccactctgtgcaactctgctcttgtgttaataaatgaaatgtgatttgttactgagtctccagtttggtttacatatgtcacataatgtaaagtaatagcattttatttatggttaaaatcgatgtgttttggtgttcataatcttttctgtaaagttgagctgggaacctttggtcagaaactctcattgatcaggccgagcacagtggctcacccctgtaatcccagcactttgggaagccaaagcgagcagatcacttgaggtcagtttgagaccagcctgaccaacatggcgaaactccatctctactaaaaatacaaaaaaaaaaaaaagaaagaaattagccaggcgtggtgg

SEQ ID NO: 113682 - DNA, 2636 bp, Homo sapiens
ttttttttatttccttagtttttcatctaatagccttttctggttctgggacattacacttagttgtcatgttcttcaggcttctcttagctgtggtggtttctcagattttctttgtttttcgtaatcttgaggagtactggttaggtattttgtagattgccccattattagaatttaatgtttttctcatgattacactgaggttgtgggtttggggaaggaagatcatagaagtaaagtgccattttcgtcacatcctataagggtatatatcaccaacattatttatgactgttaatattggccttgattacctggctgaggaagtgtttgtcagtttctccactgtaaagttactctttatttcctcctgtccaggctgtgtactttggagagaagtcaggatgcttaccccatacctaaggggtggggaattatgctgcccctccttgaggacagagtacctacataaattatttggacttctcctgtgtggagatatatctcttctcccatttatttgtttagtcattattctactatggactcaaagatatttatttttcacttttggctaaaacccaatactacttcatttctattatttatttatttattttttggagacggtcttgcttgtccctaagctggagtgctcttgtgtgatcatagctcactgcatcactgcagcctcgaactcctgggcacaagggatcctccctcctcagcgccctgagtagctgggactacagtcatgcaccaccacacccagaatttttttttttcttttatgtagaaacaaggccccactatgttgccccggctggtctcaaactcctgggctcaagcaattttcccacctcacactcccaaaatagtggggttacaggcatgagccacagcaccccacaacttcatttatttgttgctcaaattgtttcggttttgaccattgggagctctctcagtaggctcccatgctcctttaacatacctctatctgtgaggggttggggtgagtattttgagcacttccttactttctggcaagacaagatgctccagagtcatcttatgtatttcctatccctgtcctagaatcagccatttctccacttatagaatgtctttggaaaaagcagcacaagctggggcaggtatggagggaaatgcatcctcattgtattctcttttggatattttgaatatgtcttctttacatatacagatccaaaagatagctttttaaggggttattctagtggttcccattagaaattttcaagtagggtcttgggagagaagagggttgggtgtcagccatactaggaggttgcatcagcaaagttcagtgattaatgggacacaggttatggaggaggaaggaggaaccaaggatgcatctccagtttctaacctgagaaagcgagtggaaggtgagcattatccagtacagggaaagcaggaggccaggtcagggagacagatactgagataattttctagctacagagattgggatacatttttacctagaaatgtctacatgttctccagttgtgcatagtcagctgtaatttagaaataggaaactggctctagtgagatgggttggagtagaagctaaaatttgtttttttgttgttgttttttttttgagacaaggtttcgctttgtcacccaggctggagtgcagtggcgcaatctcagctcactgcaacctccgtctcccaggttcaagctattctcctgcctcagcctcccaagtagctgaaatcacaggcgcacaccaccacacccagctaatttttgtattttcagtagaaacggagttttgccatgttggccaggctggtctcaaactcctgacctcaggtgattcacccacctcagcctcccaaagtgctgggattacaggtgtgagccaccgtgcccagccagaagctaaagtttggaagtcttgagtacatgagtagagtaaggttcagagggctgggattgagaccagtgtcatcaagccttgtctattgacctgaattcagctttaaactcttcctcgtcaaggtgttcacatcattgataagaaaaatactttttccattctgtctgcaactgcatttcctctgttcttaaaagtggtaaaataaagaaagtcagtataaggagaacttacaatatatacttttaaacatttttatttaaatgctttgaaatgaactttcagggtaagaatctacattatcatagtgttcaaataagacatgtgttttggtcactctgcagatacaggatgtataaccatccaaaatttggtgtagatgtcaagattgatgactctacatgcacacaccaagaggatatgaaaaggtttattactcacataatgaggctgttctggggagacaacagggtgggggcttctcaagctggttggagaatgtcttcagagaatgggacaggggattacactggggattttatgatggttgcgagataaggctggggtgagggttcctgcatatggtttgaaattctcactggtaccaaaggagtgagcacctgggctttcctcatcagtttgcccaggtgtggagcagaaagggaagagggagaggagggtaaagcttaaaagc

SEQ ID NO: 113683 - DNA, 1460 bp, Homo sapiens
agaaacctgtagctctaatccagctatggttaggaggaagaaaattgccataagcatcatcttttccctatgtgagaaagaagaagcacaaaggaatttccaggacttcttcttttctcattttcccctgtttgaatctcacatgaacaggctgaagagtgcaattgaaaaggtaataaggatgtaatccaaagtcaaatagagaagtgattgtggggctttgaagatggcagaatttctttgccgatgtatcagatgtctttcctaaggaagttaaatcacctgtagcagtgataaattttaggcatgttgatgttagttaccagatactgggttaccttagggaaggaaatgactgctttttcgtgactgaaggcattattaccttgagtgttgttaattgattacataattttttttattaatacagcccagtagataagttataaaatttcttctcagtaatttgacttgctttctcttcaataaaggctatgatctcctgtaggaaaatagcagaatcaagtctccgagtccagttttatgtcagccgtttgatggaagctctgggagaattcaggtaaagtggcaaagtttggcaaatccaacaggagatgtttatgagcagccatggataaagataaactgtgacttggaagaattgggggcctggcagttattcctcacttttgtggttccgcccttcaagatggaaacagaacaaatgaagcaaaaaatttaaataatttaccgctgagtaatcctcactattgctcaaccgacagtccctgataggattgtttttaacaggatgaatggggaaaactaatgttcaggtatctctcaccagtctattcattatcttatgtcagcctcacaaaagccctaagcactactaaccccattttacagatgtggaaacttgagttcagggatgcttattcaaagcacagatggagaggttatgcatgtcgggaagacatacattccagtttgccaggacagtcctagtttacaccaagtgtcctctggaaactggtgtctagagtccttgctcctagtatctgtgtggaaaggtaaattgtgttgggtagcaggtgggatcctctctgatcatgctgagttgggattgttgcaccatttagagccactttcttgatagggaatggaatcccactccaaagcagtcatgagcgaatgagtcaaactgttattccatagaggaaggataaaaaaaaaatttataatcctttgaatgttagaacacttttatgatgcttaaagtatatgctgatgaactcagtaatgctacctggagcaaaatcgcaagccttttttttactgtggattatgtgttaaagtactcaagtaacatgttacttattatctggtgattgctaagacttaagtcatatatttgagaatgacataaagttgtgctctttgatggcagtctgatg

SEQ ID NO: 113684 - DNA, 2186 bp, Homo sapiens
ttctcctgcctcagcctcccgagtagctgggtttacaggcgcgcgccaccatgcccagctaatttttgtatttttagtagagacggggtttcaccatattggccagaatgttctctatctcttgaccttgtaatccaccaccttggcctcccaaagtgctgggattacaggtatgagccaccacgcccggctgagaatctgggtcctactttaatgaggtgtctatttttcaaaggtcaagaagctgaaagtgaggctttctagttctgtactttcagtttctgtagagtctctgtagtagcaactgaacttagccgttgtcccacagaagcagccatagacaataaataagtaaataaatgagcacggctgtgacccagtaaaactttttatttacaaaaaaaggtggcagtcagatttggcccgtgggccatagtgtgcaacccctgttatgtgtggagcttgaatcttttaaggactacatagattcaagttgttttctcctttattcttttacaccaagattatccaaaatagtatttctgacacttttgtgtttccctctctttctgttctatagaggaactatctggaacttatattctgttccaaggatagctgaacctgtatggcttactatgatgtccggcactttggaaaaaaaccagctctgccagcgctttctcaaggagtttacacttctgatagaacagataaataaaaaccagtaagcttcaactctctggagacttgtatgcaaatctcatggccaatgtgtgtactgcataggatgtgcctctttctgtattgactaagttggttgtatctttttccatttctccaaggttttttgctgccttactgactgcggtgttaacctaccacctggcctgggtcccaactgtcatgcctgtggatcaccctcccatcaaagccttctcagagaaacgtacctcccagtcagtgaacatgctggccaaaacacatccgtataatcctctttgggcacagctgggttagtacctaatttgactattcagagaatatatgggatggaataggaaaaaaatgctagaatttgtagtttataccggctctctcacccagtaattcataggttgtctttgggcagatgaggaataggaagttggtccctggattctaattgtagacccacgaccttcctctcttttttcccctactggcagctttgtgctacactcttaaagcagtataagccaactgtgttctcccattccacagtggctgttcaccctagagcaggatttcttaacctcagcactgttgaccaggtaattctttgttggttgagttgttgtggggtgtgggaagagctctcttacgcattaatggatattgagtggcatccttggcctccatttactagatgccagtagaactgcccctcccacctcccgccccaagttgtaacaatcaaaaatatccacagaaaagcacctcatcctggaaagcagcatgctataataacaataatgaaagctgacactgtgagccaagccctggttttacacatagtcattagattctcatccctacccttattactctcagcctcattttgtaacaatacagatgttgtcttgtccttgtgctcttggtcgtgagatgtataaatgaatacaagctccctcatggttagggggtaaaaggcgtgttctaaatcaattaaagaatttgtggatatttaaatggaattaaggaaggggagatatggagagaggctagttaacaaatataaaattacaactggataggaggaataaagtctagtgttctttagcactggattacgatagttaagaatagcttattttcagagaaagctagaagagaggtttcaaatgttcccaacacaaagaaatgataaaagtttggggtgatggatatgctaattgccctgatttgatcattactcagaacatgcctaactcattcttggtcatacgggaagtttttcctggggaagacagaacatggttgttttgttatggaataataatagtcttgaaaaaaacttagtctcattaagtggagaaggaaagggggctggatattaaggaaacattgtattccatgctgctggatcacccattttaaaacaatgctaattaagtagtgtgcatttagttagataaatgtattca

SEQ ID NO: 113685 - DNA, 1928 bp, Homo sapiens
gggactccagattgggaatataagttatctgttttgctcttgtaaagacggatatatctgtgacatgctaaccccagagaccactgcctttgtgtccacctttgctctctaggtgatctttacggagccataggctctccagtgagactgactcgcaccgtagtggtagggaagcagaaggacttagtccagcgaatactttatgtcctgacctactttctccgttgctctgagctacaagagaaccagctgacctggagtggcaatcatggtgaaggtgaccaagttttaaatgggagcaagatcataacagccttggagaaaggagaggtggaggagtctgagtatgtggtcattacggtgaggaacgagcccgctcttgtaccccccatcctaccaccaacagcagcagagagacacaacccctggccgacagggtttcctgagtgcccagagggcactgacagtagagacctgggtcttaaacctgacaaagaagctaacaggaggccagagcagggttctgaggcttgcagcgcagggtgcctggggccagcatcagacgcttcctggaaacctcagaatgcattttgtggggatgagaaaaataaagaggcaccgcaagatggctcttcaagacttcccagctgtgaagttttgggggcaggaatgaagatggaccagcaagctgtctgtgagctgttgaaagtggagatgcctacaagactgccagaccggtcagtggcctggccttgccctgacagacatctccgggagaaaccttccttagaaaaggtcactttccagattggaagctttgcatctccagagtctgactttgaaagccgcatgaaaaaaatggaggaacgggtgaaggcctgtggcccctccttggaggccagtgaggctgctgatgtggctcaggacccgcaggtttctaggagcccttttaaacctggctttcaggagaatgtttgctgtcctcagaatcggctttcagagggggatgaaggcgagtctgacaagggttttgcagaggacagaggcagcagaaacgacatggcagcagatattgctgggcagctcagccacgctgctgacttgggcacagcctcccacggtgcaggaggaacgggagggaggaggctggaggccactagaggtttgtatgtgaaggctgcggaaggacctgtgctggagcctgttgcccccaggtgtgtccagcggggccctggcctcgtggctggtgcgaatatcccctgtggggatgacaacaagaaggccaacttcaggactgaaggagacattccccgaaatgaaagctcagatagcgccctgggagacagtgacgacgaagcctgcgcttcagccatgctagatctgggtcacggtggtgacaggactggagggtccttggaagtggagctgcctctgccaaggtaactccagcaggctgggaagtagagggaactgggttcaaatcccactttcctggcctgacacctgtgatgttgttagccactactattgtctgctttacacacagtatctttttttccacaaagtactagaagtattattaattctatacaaacggtttcccacctgtccttcttccaaggatggtcactggcttagcaccactgagctcactgggacaggtggccagtggttgtctttgcagctatcgtgatcctttggggaagcctaagggatgtggtggagatgggggagggaatagggagtttaattttctgtcaactgcagagaaggtccgtggctggcagcagatgccttgcttcagaggtggtggattacactcgccgtgtggcctctctcctgccgatcagagcagcgtgaggtggttgggaaacaacacctctttcttaacactccatcaggttgattatttggtctgtaatgactga

SEQ ID NO: 113686 - DNA, 1385 bp, Homo sapiens
agggggtgacttcctgccatccctcctcccattctctggtctctttctggtgcctctcattggctgagcccggctgaaagccagagagcaggggcacagctgatgcagacacacagccttgtggtgcatagaggtcagcctcctggggcccagaacagaacacagaagggcaaggagctgctctgggggtggtgggttagcagataggctgggcaaatggaataaacagcacagatggtgacaattatatgccgtcacggtgaggaccgaagaggtgtcacatgtggtttgttttttatctgatgcttaaacaagttcctaaaagtaatttattttaactgatttgtcattaagttcactttgatggctgcatgaggatgactgtataaagattaataagtctcactgaaaaaattgcctcgtggctgctattaagtgcttttctgctatctgcagggcaacaggaactaagcagttaaggaaactgtcaatctgatgggcctgtttttaactgagctgttattgggcagatgtgcaaaaatagacattttgtattagaaacattttgtatcttgtgcaatagggaaagtcctcatcgcattaagaaaatcagaatttggcctgttacctacctccttggccaacaagtatttttttttttgaggtggaacaaaaggcattgcatgttatctttggccttgagcatctcctctgtgaagaccaaacatcaggcacaggctaaacaggctaagtatatttatgtgaagtgggaaaaaaactcagtagtgaagcagatgtcaacataacctccctcaatggggagggctaagagatgaggatagggccatcagaagctggggaaagccagcccagtgtacacgtgtgtggccaaacgttcctaaccccacccctgctttgtggtcacatgccacccctcaccaggatactcctgggatgaaactatgaagttgcttttgtccctataatatcataattatttaatatcataatttctctttatagttatgaacaccatatagtcatttatcatttcatgagtccatgcatcaatgacccctgtaagaaaaatgccctcattgtataatgctaagttgtccaaaacgatgtctgatgctttggcaatttcacaggctgtatttatgtgtgtttagtaactgcctataacattaaggcaccttttctgtccgctcctattgtttatattcacacatgccaaactgtgagttgtttttttttttctgctctgctatcattttgatttctaacaatattggtgttggttattggaccttccttccatgaagcccagtgagctgcttctgacagaggtaccaagagactacaggggaactaatgggattgtc

SEQ ID NO: 113687 - DNA, 2145 bp, Homo sapiens
tctgtttaaactggcgctctggtctatggtagtgtttttttttttttttttaaaaaacaggcttactttcaacatccatttacaaacatttgttgaaaaatattttaggagtatttgtttaaacattattccgaatttactgctccataaagcctagtgaatatttaaattcttgaatatgttgccagaaaaagaagcagagatccaaaaacaagtatatgaccagagttagagctgaaataatagcttgttgaagaagagaaaattgtaataaattgctttatcaaacttgctttcaaaacctgttttttaagttgggcacagtggctcacgcctgtaatcccagcactttgagaggccaaggtgggtagatcacgtgagctcaggagttcaagaccagcttgggcaacatagcaagacttcatctcaaaaataaaatagcgttaaaaaaaaaaaaagaaaaaacaaacctattttttgaacattaatttcagtgctcatgctagatttcagcaggctttggtactcataattctttttagagaaggatttttaactgtttaaaagcaattgattccagttattgatctcttttctagacctgtgcacaatttggatttaataatctgtcttatgtaaattaaatgtggtggttttttttgttttgttttgtttttgtttttgtttttgttttttttgaggtgggatcttcctgtattgcccaggctggacttgaactgggctcatgtgatcctgcctcattctcccaagtagacaggattataggcacaggccactgtacctggctctaaatgtacacttttataactgctagtttggagtttttctctcattgagagattgctttgtaatgcttccaatgttaagaatttttttgtacttttcttatcctagtctcttatgaaagaaagatatagtaactacttcatcaattttcatttttattactgactttcacatatcaagattcagaagttctttaaatatttaaacacgtattcttgtttagtccatatactacctcttttctgtcatttgaactctctctgcctcctaatatataggttatacagctgccttaaattagtgtaaagtaatacggtttcagtttttttcttgccacatcttgtgcattctttcctctgttttccttttgactttaaatggaaagagagcaggcgtatgcgccagcagcattctatgcctgtgactcctgagtagccttttccctctcctttttcctcttgtgtctggcctgtgaatacagctgactgtatacagggttactgttggggttattgtggggcagtgtaaggtgatgaagatctcactgacttagtgttgatggcttgagtttgagtcctggtattaccactcgtttgttgataatcttaggtaaataaactggcattgctaagccccagaaaaatgtatttagtggaacagatgaaatatgattcagtggttaggaagttaacttctgaagacagacaaacctaagtttgaatcatggttcaccccttagtggctttgtggccttgggcaagtttctttaattttcttatctatactgtgaacagtacttacatcataggtttggtctgaagattctgtgagataatgcatatcaagtggttagcactttgccaggcacattgttaagtgcccaataaatgtgggccaaatgtgatagctcacccctgtaatgccagagctttgggaggatcctttgagatcaccctgggcaatatagcaaaatcccatctctagcaaaaaaaaaaaaatagctaggcatggtggcacatgcctgtagtcccagctactcaggagactgaggcagaaggcttgcttaagccaaatgttcaatgcttcagtgagctgtgatcattgccactgcactccagcctgggtaacagagcaagacctcatctcagtaaataataataataatatatgtaaaagtgctttgtaaatgatacagcaatatatcatgtttttaatatgggagagcagaatgacaaccattattttcgtaaaaatgaaaattactgtcagagataagaaagctatatatgggccaggcacggtggctcatgcctgtgatcccagcactttgggaggccg

SEQ ID NO: 113688 - DNA, 1070 bp, Homo sapiens
cctctctcattttattttggagttccatatctcatcatgtaacttgattctgataccctttctgaccttgagcacctcttctcaacttccgactgaattttactcagcaagtggccagcctgaaagtgcagccattccagaagttatgtacggtatcttcaaggccacggattgaatttgggccctaatcaggtgagcacaggcacagatacacagaagatcagacattttcccggaacccctccagaccatcttgccacactttgaaccctttcttctttccctctacccctaagtcttcatactgtcttcatgtatacctacaaggatcccttagcaatgtcccaaggtccaaaatgattaattttcctcttcctcttgtttaccttagtacaactcttaagcctttagtgactgacattaaacctgtttccaagagaaaaatttctgataagcaaatgcttttagagttatgataaggccatatgtgattgttaccccttctggtattttcatgtgttaaaaatatgtttgatgcactagaaatctccagtggtggcacttcaggtggtcgagataactcgtgtcacctgatggggcagagatgcttttgggttagagtggggagagtcacacctgagagatttatcagttgaaaaatacttatcaggtatcttttatgtgcttggtactgtgtttatagcagtagtcaaaatctgaagtagaattagcaggggcgtgatggctgtgtgcccagggtcccagctactcaggaggctgaggtgggagaatgatttgagctctggaggtcgaagctgcagtaagctatgatggagccactgcactccagcctgggtgaaagagtgagaccccgtctcctcccccaccccccctcacccaccgaccagccaaaaaaaagatctgaggtaggaggattccagcaacatgtactaaactggtgtggatggcatgcctcccctctaaaactatatagtgatggataaaatatcaccatcctcactgctgccccattgttataattcctgtcatgaaaaaaaatggaaatcctt

SEQ ID NO: 113689 - DNA, 1405 bp, Homo sapiens
aagcttcacctccctgctgattttgtaagtactggttcttatatcaccaaagaaatctagttttaaaatgcttttaacgacattttgattataaaatcacaaattcaaaagtactgttttaatataattggagattagcataactaaaactagaacatgcagcataaaactcgcaacaggatagatttcagtagtaatagctcttccgtgaaacaaataacaaggagcggcactggaattttttggaatgaggtatatggtgcagtaaataaggaatgggtggagagatcaagcataaaaggaaactgtaaatcatccactggagaactcatgagttctccttttattagattgatattttaataagtaggccagtttctgaagggattgtagttccttttattaagcaaacattttcacaaaggtgttaaggataaaatagaatatcatttgtgtaaacatttccaacatttccagctttaaagtactatacacatgtaagattatatcaattgttgctttttttttttttttttttttgacagagtctcactctggagtgagtagtgcagtggcatgatctctgctcactgcaacctccgcctcctgggctcaagtgatcctcccacctcagcctcttgagtagttggactagaggcatgtgccaccatgccagctaatttttgtattttttgtagagatgggttttgccatgttgctcagtctggtctcgagttcctgggctcaagcaatccgcttctttccaaatgggattttaaaatcactttcgtaacaatactttaaatacaaacaacagacagagcctatacactcttagaaaagtatcagtagctccccccagccactggaattaacatgcatgacaaaatcttctcagtatctgcgtatgtgcagagaaattgaaagaaagagaaaatacatttagagagggagggggaaaggtttcaaaagaagaaaagcttttccagtggtgatgaacacttaaaaagagagagagaagcttaagggcatatggcatatagctgggtagagcttggatgggctgacctcagagacaggtgtgtgaggaaagagtctgctttctctgctgttccctcctgtctgcacagcgctgttctctgcagcacagccccaaaccaaaacatctgttatctgcttcctggcctccaaaaatgatgcaaacctgtttacccaacaaagcaggaagtttttaaatattaattacctacgctaattgctaatgtaatggtcattgtcctgggtttttatgaccaaatctatacttgtacccattcctcaaaaagagtctagacttttatgactttgaagaaggtgctctgaaataccgtctggttgttatcaaagtcgggacagtgtggcaagg

SEQ ID NO: 113690 - DNA, 1177 bp, Homo sapiens
tggaatgatttcaactatgaaaaaaatacttgtttaaaaagactagaataatacatatgtaaatcttaatagttagcaaaagtaaactttgttttacaagaacctattcttatacctggtagtggtagggtttgagatggcttgtgattttttaagtgtatttgaaactgatgagataaaagctgtgtagttagaaatgaattaagaaaattctgactcttaaaatattggcagagatttgacttctagccctcattgtgaatgttcttggctttgcagtgcatcatgcatcttgaagatagactacaggagatgtaccttaaaagtaaaatgctatctgaatatctccggggacacacacgagtccatgtgaaagaattaggtgtcgtactggggtgagttctgtgaagtgccgtcacttgtccctttgataggtatccctagcattgtacccactaacgtgtttagcctgtgtcaccctaaacctcaggccctggtaacccatcaaagtatgtggagtccatcagatacgtgcctctgcaactccccaatgaacagcatgttccgttatctgatactgggtttcacacctacaatcaatcgcaggactttaggctggtcgtgctttgttgctcttctctgtggattatcttatgcttgaaaagaaaatttaatcccacactgcccgtttctagtaactgaataagatgctgaagtcacaagctgtgggacatgcagcagcagcttgtgtttacatttcacttcctggaggaggagtaggttggcacattccacctggtggcaggaaaggcccttctaggcttgaggagcctgcctgcgtgtctgtggggggacagtgctttccttcctttattataagcccaccaaagaggagacttgtatgttactaaaaatgcctatcatcctccagagggtatttgctataacttctctaggggaagtaattcttacttctgttttactgtcagcttgatttttcaaaagagaacaaaaagacattgtacatttggggaactgcccccgcttatccatgatgatgattcccctcacttgggagaagaaaatatttataatgtcgacgtttaaattatctaagcctcctaagagactggggcctttgtgttttgcttagatttctcatctttcacacccagaa

SEQ ID NO: 113691 - DNA, 3955 bp, Homo sapiens
ctagaaataatactttctcataaaaagaaataatactttctcataaaaccatgctcttttaaagtaatattcttttcttttctcaatattcaggattgaatccaacgacctgcctctgttgactgctattgccagtactcattctccttatgtggctcaaatactcttataagctaaagctcaggacagttcttccttggaagaaaaaaatcaaattctcaactgaaggagaaaggaataagctctctgtgatgtcaaaagcatgagaagagcaaacagaaacagtcattccacctttttgttttgtgtttttgctgtcaagctgatgcttcattgaagacttaggtttacttgacataatagcatttgtgattgtcgtgaacactttaggccatttgttacccatgaatcaacaaagaaactgacctttttggtaggaggaaacataagcactaaacactaagctgttgcaacagattgccttgtgctgtttgggcagaataaagacaagtgacttgagcggggtggtcagcagtgtacataatattccagtaggaaactgcttccaagtttaagcatgagctccccaaactggagaaaacatattttgctattctgagacaacaatcagaatacagactttggattccaggtcacagtttgctttttagacaaggtaaagcaaagaaagccacattgtgccatcttcagctccagtggctttagcagtgactgtttgacataaaacatgtaagaattgcttgttgggaagagtgctttagggacccactgttttcatttcttcttggagtttaccttgtttcagatgcagccatgggtaggtcagagatggattgttggtgcaataaacccaagaatcaatgtagcctcttaatcccatcaagatgtagtttgtagcagcaaagtgtacagtctgaaaccgtatgttttatccttatattttagagctttcagcagcctttttaagagaggccacttaccaaagttatttctataagctcaagagtgtttcggttggtaagttcttccagctgaagccactttttccttatagttaatacaaatgactatttttactttaaaaggcacagctgtcctggtgggaaatgaaacctgcagcagttcaggatgactaatgaaagcaattagcttgaacatttagaaaaaattcatatatgatctaaatttttatattatcatttctgtgccttctaattcctgcatccttttcaaaacatctttccagacattaacttacacattgtataaaaccgaccaaaatgatttcctaaagttcatgcaaaaaaaaaaaaaaaacaacctaattttctgttaatataaaagaaacttcagtttactgaccgtgaaacagactatgtactgacatccagggtaaagtaaaagacttttaaatattggtcattaaaggacaggagctaagctagcaaagcaaaacatctttagcactttgcagatctcaagcagttaaccaggctctgattcccttccactgttttatgaattaattccagttcttttcatgtatctttgaacctaagattatgaagtaatttccctattagggactagaatgacttcagttttttcatttgataaaaatcagaactgctacctttcccttttttaatgatgcaaaatgtagatgagtgcattaagttttgtaagatctttatcattttatgtcattcattgaaaattgaaatgttcattctttttaatgttttcctatttccttttgcctagcatttgactttggtgttttaagttctgtagttccatgacatcattgtttgctgttgtgttacagagagagaaggaacctcacctgtggctcagctcaccccacatccgtttctcattacgtgtaaataaactgtcagagctgatgttacagcttttacagtttaaagcattcccctcgtctctagttccttttttcttgtttacatgttttgggcactttccctcattcaccaccttccagggtttcatagaaaataacttgttacaaaatcagttcaattctaatgtggacatagtggcatgttcataattagacccatataggggacactgagctttaaatcgttgattctaaactctatacattaaaaaaattcagcccaggcccctcaaagcctgagaaaatttaatttgctcttaatttaatgttccaaaactcactcttggaaaaatgcctgttggaaaactacaggtgggtcacatgtgggggctgtctccgtgacactcaggattccagtcagaacctaatcctcatatctattgcctacaaaaatagaccaagaatgttgctgctcttttataatcctttaaatatttaacattcaagttttctttgtcttaaattcagcctcttcctaaaagcaaaaaagaaaaaaaaaacctcacagaattgtgttgagatccaccgctcacacgccgtacaccacccagtggcttcattctggcttagccgcagaggcaagaaagggaccccacttgctcccatgcccacctcaagaaaaaacataaaacaattttttttaaaaaagaaaagaaatctacctcagttgacaggattccacctttagggtttcttcaacttttaagtcttacctgttgagtgtaacttttgtagcatcttgcttttccaagcaagctagtgaggcatgacagagcagaagtctgtaaatgtccctgtgatggacctctttctagcatgttgcagttttatttttaataaattggtaagtgaaatgaatgtaaaggtaattgtgtacgttttagacatgacaatgaaaatttaaaatgtagcttccatacttgtgcataattccaaagtattttattttttatcaatcagtgttaaatagctttttgtacaggcttcaatccatttttcgaagtgtgctgttttttaatgaaagtaactataatcttttcacatcccatggaactgccgtttacacattgcaactttttaaacttaaccatatttttcaaaattaacgtttttggagggagaaaaatccccgcttgctaaatgatactaaaccgttgtttgggctcttataattaggtcctgagattttataaaaatttagtctgtagctttttaggttcttcactagagttggttgtacataaaaataataaagaatataaagtatcccaaaattcttttaaagtctggatttttccgctaatatgtactttagagaatattttgttcatgcatacttccacgttaaattgaaaatgtcttcagcttctcttggtaaatgtgaaccatttgttttttattgtgcttgggggagagggtattttaatataatttttgcctaaatcaagaagtcccctctgaatgttaatttttaaatgtcaaaatatgatgaacgatatatcttgaaagtgagattgcaatatgcttaaacttaagtggtatttcaaaaacgagaaaattctggaatttgtcatttgaagctccataagagaaattgataggacttcgtttttgatcagtctgaatagataccaatgtcattgtgtgggaattttttttaacttgtttatgtattattttgatccatttttctgtggcatttggtgcaataaaacttttgaatttatcttgaacattttcctggtgctgcatgcgatttgttatatttaataaaatgtagaggtctcatttctaataattcgtgctgaaaacaagctgattatttatctcagtggtttttaaccggggtgttttggaaatgcagggacatttttggttagcataatgccaggttagggttactggcacagagaggctgggggctcagatgataggcgagaggtcctgcaccatgtgagacagccccatgggatgaggacttgtcccacccacctcctgcgtaacccttaa

SEQ ID NO: 113692 - DNA, 1096 bp, Homo sapiens
aactgattttaaataacaaaacatatttaaattttccttaaacattgttggttatttgagaaatgaccaagattctcctagcggcctgaacgtctgggaaatggggtaagaagataaaataggcttcagccttcagtgaggaaaggactggctgtgccttacttatataatgtctaaaaccaataggacaaactccactttaattttgacactttagccagagaaaacactccagagggctgaagaagggacccgccggggctgctgctgagctgggtctttggtcttccacctttttgtgacttgagctgggcccacagtagcatccatgtcagccattttgattcacgaccaaacaattcaatgaactctcagtattttggcaaaataaggagcttgaataaacatgttgacttaaatggatcaaaacagatggttattctggataactgaccacccagcttcagtcttgcccagaaacaaaccttatattcttctctttggcattctgacccacaccttctggagattctctggttgactaaaaataattctaataagtggcaaaattaatgtctttttggattccaaaattaaagaaagaaaatcactgtttgtttgagttccagggagtcagtctagttgcctaatataaaccgcagaaacagtcattcacttgagtttcacatagagaaataatgtggaaacttccctttaggacttcaacattttccttgcagcatcagaacgtgatgtaactctgtgtattcatgtatttcaaacttgtgaagaggaccggtgccatatctgtgccgtgacttaaaagcacgacctgtttcctcaacaagctggtttccttcaatgtttgctttctcacagtggtaccgatttctgctctttccatttccaaaagtactaaaaagccattgatggcacatggaaatttttgagaaacacatttagaaaccatttggcaggatctgtgctttctgggagaacaagccttctttccctgttattttccctttggaagattcacaggaaaacaagacctctgctctttaaagatcttttttgtgtgtgatggtgtagtcca

SEQ ID NO: 113693 - DNA, 1001 bp, Homo sapiens
tcctgacacagttcgccccgagcaccccacttcttgcatcaggacccccaacttccaaaggcatcccacctccgagtcttttactccgcctatcctggttttatttttccctctccttgacattctgctccttaactcttccctccccatgactgacctttcccactatgttgcccagccgagagagagagagagagagagagagagagagagagagggagagacagagagagagagagagagagtgtgtgtgtgtgtgtgtatgtgtgtgaatgtgtgaattctctagctttccctctccccagccgccctccgtggcctctgaatctcaggggatggagtctcatctcccctcgggcagcgactcttgctccctctgactccagatccgttcctccccttgcaagtgacccttggagttcagtggtgtttgaaaggtataggaggaaacctgtacggttgtgctaaagacaaatccatgctgaccttcagtaaaacattgaggtgtttgtatgtttactgttttgcttttattttttaaaggatactgctttcaattgaagggaaaaaaagttgaatagctaagttagtgcttttagtttaaattgcagacatagctgcagagcaggcatgttccagtacaccctcgggaagggcaccctgcggattcttttggtgttgcacaaccttgtcaaaattagataagtttgttaacctttatacatttgtttacctgcaggcttactcttctcttacttatagcggctgatagggttggatttggttgtctcaagttttactggagagggggaaattttataaaaatgtggtagcttaattttctccgcctttagttgctgactggataatgacgcatattcctaagcgttgggatggtgactataggagatcctgcctgccaaccctcttaagacaaataagccctcctgatccttgggaccatcagacatttaggatctaatgcttgaaagtgttgcttc

SEQ ID NO: 113694 - DNA, 1087 bp, Homo sapiens
aaatgaactgttaaactttcctgttcccctgccagttgtgtagaatagagtaaaaactgacccaacacagaacttggcctgggccagctactactaacccacgacatgaaagctttattgacagtcggaaggcagcccatttgccctaccaaaccttcatagaaaaagtaaacataaggaaacctaccaaacatttcaaacattcctaagtgtcagccctattaactttgatgttcgtttggttattactacaaatccccacgtttatttcttttcaagagaaagttgttcgaaatgtgaacgttttccatctttacctgactggccaggagtaatcttataaaaatttgaaatttactcaaaaattataaaaaaaaaagtttttgtagaaggtactttttatgttaagaatgctttgttaatggaacgctggaagattttccatacagccttgtcttataaatgtttgtgagttcgaattttataatattagaaaagcaaccatgttaaataagcttgatatcatgaacagaaggacaggaattaggaaagttttgctgttttgcttccttctgtttctgaggatagactcgataaaggagtttgcatgattctcgttataggcaaaaggaaaagaattggggaacatatgtaattttttttcctgctgttcatttctgtttgttttttaaaggcttgctggcctcattcatttcccaagctccgtgaaaacatagttttgtatttaggtcaatcaattgcctagaagtaatcctgatgtcattggtgtaacctaagaagttggctagaagagaatctaggggtgggaagagtaccaggaactttcataaattgggagcttttcatgtccacctgcacaatggaaacgcatttcagttatatctttagagagggggaatagtaaggagaaataccaaaaaaattatcatctaagttttagccaggttatacatactcagtttcaagagactatcactatttcacctgatattgtgagaggaggaggaaaactctaatccaatgtgtgtcccatattgtgtgtctggaaacctggctgagttctagt

SEQ ID NO: 113695 - DNA, 1025 bp, Homo sapiens
gtattttattttttaatgaccagtcttcagtggaatcattatctttcttaaactttttagcttaagataaatgtagattcacatacaattgtaggaaataatggggagagatcctgtgtgtaccctttaaccggtttctcccattagtaatagcttataaaactgtagtgtaatatcacaatcaggatattgacatcagtgcaatcaagaaacaaagcaattccagcaccacaaatggttcttgttggacttttatagccacagtcactcccccaccccacctctggggatcactaatctgttccatttctataactttgtcatttcaaaaatgttattaattggaatcgtacagtatatggcctttggagattgactcccctccccctgcgcagcatcattaaggcttattaccttttggttaaaatgaatttctgttgttagtgaatagtttggccttgtgcttctaaaataccaataatgtctgaggattggggggttggtggtaaaaggtgagatgggtttaatagtgacaatgaagagaaagttctgtgataatgcgtataaatatagagcaaagagcataaggtcttggatgagcaagagttgtgatagcataccacatttgggagattttgatatatgtatttccttttcatattttttttttgtcataatggaagtagtaaggttagccttagccttcatattctccaactgaaatttaaaaaataaaatcagaaggaagtctaatgactgtatatacaaaagggagtcccaatggccaaatttgggacagtttgagaagcaaatcatgacagtaacggactataacccctagggaagaaagtatccatgagcccatactgatataagtaagtagttgaataaataaataaaagcaggagaagagacacctctttgttatagaattctaattagaaaatgaaggaatgatggaaatagaaaatcaccagcaggtaaacaccatagtagcaattgttacaggcaggaatcatcaatgg

SEQ ID NO: 113696 - DNA, 1026 bp, Homo sapiens
aagggtgtgtttaaaaagtctagtcagaggcactgttacagctatggataatagtgttatctaagctgagtgtattgaatactttcatctagatgtcttaaaaggactttagtaggatataaaaagaaaataaaaaggaattttaaaaatcaaattaaggcaaacaatctctacacattttcccccttgtatctatgcctttacatttaggttataaagtcagcccccctccccagtcccacggattagccaactatctttccgtttttgattttttggtagtgagtactggagaatgaatgctgtttttaatattatgtatttttttcataactgaaattggcgttagaagattggattaaaaaacatgagacctaacattttagataattgtaaatatagtgtaagcaggaagatatttactattttcaataataaagacataaatcacttgttttctgtattttaagaaacttttgctggtatttgatattttaaataataagttgcatttgagggcacaaatgaaaaagaaaagagcaggccaggttttgaagtaactaattgtataaaataaaatgaaaaatgtgtaaacatacaggtgtggactaaacctatttgacattcttccatgtattcatatagaaactatttgaattctgcaaagcaataagtttctgattttttttttttcctctaagctacttcatgcattcttacaaactccatttccttttaaacacagtcaaatttattagggaatatttggtcaaattgttaaaagtatttctctgctacctgagttcaaactatactacaaggctacagtaaccaaaacagcatggtactggtacaaaaacagacacatagaccaatggaacagaatagtgatctcagaaataagaccacacacctacaaccatctgatctttgacaaacctgacacaaaaacaagcaatggggagaggattctctatttaataaatggtgctgggaaaactggctagccatatgcagaaaattgaa

SEQ ID NO: 113697 - DNA, 1068 bp, Homo sapiens
tattgaaatctgtcatcattctgtatttaaatttgaatgctgctatgtgatcttagacatggaggcagaaacttgcatagaaatgtaataagaataagaatcttgaatagaaatcttatcgctttctttttgaagaatttgaaaagcaattagaattgctttcatattataaatgctcaccattgaaaggtgcaatattaatgaatctttatattatgcctctagttatctcttaagagttactttgataatatagaccttttgaaagtgccacactgatggtttcaggttgcctgtcagtgtaataatacataatgcttacagttatggtgtcagttctttattttatgtttagggagcacatatctcagaacagttcaggaaagacatagaaaagcagttgtcatttataaagtgtgtgttatgtgccagaaagtcacctagatgttttcttatggtttattcagttctaacatcaaccttataaagcatgaggtactattatcaatttaccaatgaagaaactgagatgcagggattaagtaatttgcttaagaacaaataactgatttcaaagtccctattctatccactctactccccctataataagagcaggtgtaaatgtctatgttgttgttaataaagacttttacaaaatgaagttctaatttagttaggatgtttttctctttttcgagacagtgttactggaaaggggtcccaatccggaccctgaaaagagggttcttggatcttgggcaagaaagaatttggggtgagttcatagaataaagtgaaagcaagtttattaagaaagtatgggaataaaagaacggctactccatagagcagccctgaggactggtggctggctgtttttatggttatttcttgattatatactaaacaaggggtgaattatttatgagttttcctggaaaggggtggggattttccccagaactgaggtgttcctccctattttagaccatacagggaaacttccagacattgccatggcatttgtaaactgtcatggcgctagtgggagtgtcttttagcaat

SEQ ID NO: 113698 - DNA, 1001 bp, Homo sapiens
aagggtgaaagaaacttggtatgcacgagtcaaatgacagactccattaagtgtttccattaaaaggattgttgcttccccagtagcctcttctatacagtttcttcaatctcatttcagatcatatttctgtaataattaaggctttgagaaggacatcctatataatgtaagacacacatttaaagcatagaatgaaaaaatgaaaaccttaggcattttgagcaatatttcctttacctgtcatatatacagcatgttctgaaatacatggagtgtgatactggtgaaattaaaaaaaaaaatgtagcactttaaatttttttccttaaaggttgttttggtaattttaaatcctgaaatataattattacggggatattaagctcaaaattattctaaagttatcttttgttaaatgtggtttgttaagagatttcccattgttcagtgttagtaagtggacagtgaacaaagaggacagatttttgtcaagcataaacaacttttgcatcctgtttattaaatggaaaatacctcaatgaatgtctgtgctaaaagtagattccttcaggtttttagttttgtcctattaggggtggagtcatggaacaggaagaaagacatccagtaaacaggaattgtgtgctaagagatacattttgaaagggaaatggaggctcatgcttagaatttgagttataccatttcaccattatgagtaccttttcaagaatgttagatttaatggagtgctaaatggtctttttcattactgctatgagtgataaattgtcttgaccaagatagcatgttgcagaataaagttttgaaagttgacagaggtattttctcagattcattcattatcatgtttagcttgatgttctcaacgttttatactattaggagataattttccattttgggtagaaatagttttagtgtagttaaatatggttagtatagattcagtaatttagtatagccatttgttttta

SEQ ID NO: 113699 - DNA, 1125 bp, Homo sapiens
tctattcacctattcctgtacatcatttttttttctcttccacaatgaaattttttgagtacgatgtaggaaatcatcttaaagtggagtgtacttacccacatcagggtttaaaaggtaaaatttcttctatagctttgtctatattacatttttacccttccatttgaaactaattagaaatattagtgatcaagtatccgaacctaattagaaattaaagttttttttaatcataggttttgaattcatagcttaaaaaaatgcttctgattgaagataagatgggaatttacatgggataaaagaaaaaagtaccttaaatgaggacattcccatgtatgattaaaaaaacattctggatgtaaacattaaaaacggatttctgtgtgtcatcctaaagattttgagattcatgtattaatttgttttcagaaattaaagggattacaattgttagtaaaattgaacttcgtaataatattttctctggtattagtttcagaaagccagtgattagaagagatgttaactgtgtttggaggtagtttctttatgaatagttaaaattgtattttcaaaaatttgtatcataaacaatatgtagtttccctgtaggttttctttttgcgaagtgttacttaattgaagaaataatttaggctgggcaccgtggtttatgcctgtaatcccagcactttgggaggccaaggcaggtggattgccgagcccaggagtttgagactagcctgagcaacatggtgaaaccctgtttctaccaaaaatacaaaaattagccaggtgtggtgacacttgcctgtagtcccagctactcagggggctgaggcaggaggatcgattgagcctgtgagcccaagaggtcaaggctgcaatgagccatgatcacgccactgcactccagcctgggtgacagagcaaggtcctgtctcaaaaataaaaataaaaaaaatttagattgtgatggcagttatgatagttaatcacagccaaacataattgcttatcttcatacatattaaatttgattccttgtgtgatcaggtttgatgcataaaccaaggatggtgatacctttcaagaatctaactggtgcttaatagagga

SEQ ID NO: 113700 - DNA, 1065 bp, Homo sapiens
tatttccaggtattcttgaagcacacatacctatgcgtgcatttgatagccagaacattacagtgaatgaccagtgaacagtcaggaaacaaatccatccttggcctcccctttttatttttattttccctccccagttcattgcaaaggaggcagactagatgccgggcagccaggccccacacatggttcagcacagctggtggttctgccaagttgggtttcatccccaagagcatgcagatttattagtacattttggcagaagacatcactttatattaaattattattgaactgtcataaatttaaatagtaaaagggtatactttgaaaacgacacctcttttctaatgataaaaggacctgatgatacatgtaggatacggtcacgtttcattatgcgtaggaggtactcagtaacagttttccaatggaaagaatgagaagttatgggtatttattatttttcatataattgctttgtaggtagcttgaggatcaaaggctagaagagaagaatatatgtgataggatatagaagttttgatatcagctggcagcagtggtagagtggaagaaagcatttgtgaatttgggagtaagaaaacttgtcttctgacaaccgttattcataattgaatttctatcttgcattgtggccatttgtgagaatcttttatctattctagcaaactgagtttctttgaggaccagagtatattgtaccaacctttgtatccccaaggcaacatcccagcacagtgctttgcacagagcaagtattcaatactttgaattgaccagtgaactgcaaatgaagggaaaggataacatctgaacagattttggaacccccctcaactcccaatctatgtggaaatttgagactaaataaaagttgtcatttgtattaggaaaaaaaatgtgtgtttaattaaatactcaattacacgtcaaattctgctgttctcttgtttttaaaagtttatttttaaaattgatacataaaaattataggtatttatggtgtacaacgtgatttgaaatatgcatacattgtgg

SEQ ID NO: 113701 - DNA, 1089 bp, Homo sapiens
tactattggtggttgactccttggtaaaacattcaagatgggaaaaacagatgtcaaattatttttgtcttttgtcctagaaaaatggctacaatgaaattttctatatttaaaaccttccattcaaagagtacttcttttttgctaagaggcaataaagaactggtgtcctcagtgacctattccgctttgcttttattaagactatctaaactctaccgtggtaggactattgagatttgtacagtgaatgttcaaaatgagtgctgttgatagtgcctctggaattaggttggtattagaaacttgaggtttcctgagggtgatttgtgcagactctatggccctttgttgcggagataggagttcagtggaatgatgtatagcagcccctgtctgtccacccccagctcaacaaggtttctaggaggtttaactggagccagactgtatttgggaaatgaattgaacaccaagctgaaggttttaactctactgatagaggagaatttgtggggaaggtgtttggttgatgttattttttaattgaaattgaagatagttcaggaatcattttattagagagagagtgtatgtctgtgcctctgttctctgtgtgtatacgcagctgatttctgtttttggttgttttacttaaatgttaaatgtaatcattcacagcctgctaacttttgatggaaaaaaccagtgcaaatatagtatgttaatctacacatgtaaattaaaatttgactacaaatattgcagtctgagagtctattaaaataagatacttttaaaatgaagatatcttttgttaaatgtatttttgctgcctaagagatggcaattctgggaagctgtaggcttggtggtgtaatacattgttctgaaggggaaatatttatactgactcttgaaaacaggaattgcgaactgattttggacactttctcttttcttatttgttaacaaaatgagtttttggtgaaaactaaattgttgcttcttctaatgaaaaatcgtaacttaacaagtgaaacttgcttacgggatcatttttcccagggacgtgacaattaacatggt

SEQ ID NO: 113702 - DNA, 2355 bp, Homo sapiens
aatgtagtaactgcctatcattttctggaaacaggggtgtgaaaaaattgatgtattggagtattatgtttttaatcattttgtaaattaggattgcccaccagtatatctgcttgactcctgtgtattcccttgctgggtgtaggctgacttgaataagtttacattccgatactgagaattgcattccactgggtagttctgacgtacaagaagaatgtggaggcccatacaaagggcaagattagggacactgatagaagaggcttctatgctctgtgactgcctttcgtggaaagctcacactggcagaaagtgctcttgacccaacttgggagaggagaatgtggtcacagaaacttcggacaatttggccttacaacacctgcagcaccctgtctggtgtttcattgcctatgggtatttacgaaaactaggtaagacttcacattcccaaactttcatgcggtgtgggagtcttgaaggaaagttttgttttctctatattatatggaagactacttagtaattgtttgtcttcatatttttggtattacagagtcataccatttgcacctgtagaaatatttaacttagtttcaattttgctaacaattttaattcttaatttttaaattgttttgtataaaaacttcagcaaaaaatttaatgagaatgaaagtctgaattgttatactgtttttagagcagttgttccttagtcatactgagggagtactagcatttaggagtaatctgtttcatatgctgcaagtggtcttttcaataatcatttactggtgggcttaattttttttcttttttgatatggcagagaactcaaagattgaccagaagtgaacctgcatcacttctagttgtcatcttgtggttgtttaatatcagattttaaggacatgctgaaattacgttgagattgaattgttgaaaggcaaggtgtacagcgtatttatacagaacaatttagaagggtttaaattagaccatagtgatcacattttcattctgtgtagaaggagaagactatcagcattcttaaaacacatataccatacttctcccttccaccaccaccttttcctactttatggcctctaactagacacctcttatcaaacgctggtgtctgtttagaaagaactaacaggtttttaaaatattcaggctaactctcattgataactgttaacctacatctttcttgtttctgaaagacagctattcatatgtgtgtgttaatatgtatatgttaatagcatgtcttatatacaaatacacatatacacacaaagactgaaactactagaagaccagaagtaacttttgaaagatatataattcaaagtagaaaaggtaagctatatatctttaaaaattaaggagtctgaattttaaaatacttgtttatcttggtaagtggtattatgagtgccatttcaaagaagcagatgtcctactagttgaagttctggcagtagctccctgaagagatttggtctttataggtttgacattcagatctttgcgggggtaaccctaaagctctttatggtcatttgtaattttgctgaatttgaattgccttctgaattagaaatgctgatttgtgtttttcactcaactagctagtgagtgagcctggtcattgagaattcacctctcaatgaaactcacttctcaacttgtcattgggttatagctgtttgtgtacttgtcatccatggaatataaactacttaagaagagggactatatttagtgagtttttctgtaaacgctgtattgattactgagtttatattggtaatattgattctgttatgtgttcagtgaacatttggaagaggaataaatagcacaataatatatatgtcagaaataatattatgtagtcatgcactgtgtaataatgttttaatcagtaatggaccacatatacagtggtcatcccagaagattataatgtggtatttttactgtaacttttctatgtttagatgtttagatacacatataccattgtgttataattgcctacaatattcagtacggtaacattctttatgggtttgtagcctaggagcaataggctgtatcatctagcctaggtttatagtaggctataccatcttggtttgtgtaagtatattctgtgatggtcacacaacagtaaaatcgccaaacaacatatttcccagaacatatctccattcttaagcaatgcatgactgtatgttaatatatattattactcacacatattattttgttatgtgttatatgttatgtatataatatattctcacaaatacattatatgtcaaatttaaacaa

SEQ ID NO: 113703 - DNA, 1094 bp, Homo sapiens
agtggcgcgatctcagctcactgcaacctccacctcctgggttcaagcaattctcctgcctcagcctcccgggtagctgggattacaggcacgtgccaccacacccagctacttttttgtatctttagcagagatggggtttcaccatgttggccaggctggtcttgaactcctgacctcgtgatccacccgcctcggcctcccaaagtgctgggattacaggcgtgagcaactgtgcctggcctaaaatttttttaaatgaggaattacttttaaacaacactatttataaaaaaagaaaccgaagtcatggaatgaaagtagaaggagaaacccttgcgtaacctaccaaagccattctgttagcactgtttttgagtcattcaggatttggaagtttttacagatttccatcagggtttttttttttttttttttcttttttctacgttgcttaagacagtgtggcagttgctttcataatgtgtggtaatgtatcctgtgagatctttcactaataaatcagtacaaagactgctgaaaatatccttccctttgaaactacaggaaattcaagagttacccatattgtcctaagtggaactgaaaatgcctcctcataaaagaaatgttactcaaaaccagttagttccagagaagttcagagacacttgaagtttgtctagatagttttctacagatgtctttgcaagatgattgaatatgggttatctgtaagtttctttctgtatctaatattaataggaaatgttgtgtttggagaaatgaaattttggggggttttatttcaggtggactatatggatgaaaatgaagaatattttcagcggcaagcttcccatagacagtctcgaaggagatttagaaaaatcaaccagaaaggtgaaagacaaacaattattgacactgtggatccttatcccatgggcaaacctcctttgcctagaggctatcacacggtaagttatacaagtataatatttttatttatttctagttttttgttggggttttgtgaaaagatgtttaagttttccatttttgacaaatcttttcaattatatatatataca

SEQ ID NO: 113704 - DNA, 1055 bp, Homo sapiens
aactttaaagttcaggaatctcaatgggagaacattttgggaggccactggtaaaatttcagtcagatttttttttaaaaggttggtcaaaaaggaaacaaagtttaaaatctcttgtattttcttatttgcactttatttttaacaaggtttcttgcttttatttcattctacattttaattgaggtctgtaataatctccttgctcacttctttgatgccagtacatgactaagtactatactaagtactaaagtacattactaaagtactgtactaagtactaaaatctatgattttcattatgagttctttgaagatctagattacatttggggttatccgggaattttgagtcaaggaagaaaaactgatttatccttgaaaactaattggttaagtaactagtagcattttatgcttgtgttttattgttgtacagggaaaagatcatgaataatttattcacattggggaaatctatcattgatatatctttggctattagagtaactttgcctaaaagtatgaattttatgtataatttttcgaattaaaatgagacagttcctttatgttctatacaagagagtacgtattagaatgccacaggtgtcatgattgctatattggtttttggaagcactactaatttttaaatgatgtggtaaatctaaaacatttttatgtaattttaaaattttaagttcactaaaataattttaaaattgtacagagttttatgtacctcagtgttttgagcttttctctgaaaagagtacacttaaaatatatataacatgatattttaaaagataaatcaatatgtaattgatcttcgtctttttttagcataaattaccagtctaattccaacttagaacttggaattgaatttaaaatgcgcactgagttatgatgtatactttaatgtacactttttaaaattagatgcattgcagtagtttaaagtggattataatgattttctttagaaacatgaatactcatagtccatgtactgtgttttcaggacatttttcaaggcaagtgta

SEQ ID NO: 113705 - DNA, 1559 bp, Homo sapiens
aaagtctgcccgtttttcaagtaagtgcatttttaaaagccccacatgggaatttctcatggacttacaggcttctttgtttttctgcatgtctccatctcatgtcatcttttaatctttcccttctaacatgctccatgtgaatgtttcttatagatagttgccacataattttcgtatatttcttatagatagttgccacataatttttcaattacaaatcagatgccacataaacagtttgccgtcagaaactttttttttttaacatttccttggaacgtatctgtggagtaaatcatggtgatctttttgaactcccagttaggtttttctgatactgaacatgaactcaacagattctttgtgtttctaaagactgtatttagattcacttagatgtttagttagcatttcctatgtgtcagccattgcattggtttctttcacattttatttcataattaaattattcttaataatgaaccagaagtgccatttcactttatgaaagtagaaaaatgaaattttagcccagatttcctctgtgactgctttgggtggggtgtgtcaaggacttgtgtgaggtatacccaaagatgaaatagatgacgtgaaaatgtaagattgagttaaaatataaagtttatcagataatcaacttttcttttaaaagaaaatgcactattaatgggggatgtattggctttaggaaaagagaagtaaaacttctgaccatatctaccatcttttattttgcattggcttagtgcttaattagtttgatgtactcatatagaaaatagcattttaaaatgacatttttggggggaacagtgaaacactaaaaatccagtttgtaaaatttgttgttttctcgtatcaaagaatgacttctttctgctatacccacaagttttccccagcctctatggtttttcctctgtggtagtggggagagggaatatttaactattaagtgaagtaagtggtattaagaaacttagaattctattttgcattcttctatactactaactctataatcttatacactttatttttctattaaagataagtacattattctcttgattcccttgcgttttgatgaagtttaattaaatgtttgtaaagcacattgagatctatggttaaacactgtatatgttctaagtgtgattaatcattactgagaacagaccatttttctcaatttcatagtaattagaaagtgaatactttaggtggaaaaaaaaagaatataatgatattaaatatagcctggaaagcctttgcattaagtagtttcctgaactatataatctccatttttttggagtgttgttactgataatttggaagtcattggatgttattgacagggtagaaagttcttacatggttctttttcttaacaagatctagttaatgctacttggtaatggttaaggaatggggtaaatataacccaaattagagtgaacttcaaggtaagtgtgattttttcttatttgtataaaatctataatatgggtttctcctaaatcctttgttta

SEQ ID NO: 113706 - DNA, 1035 bp, Homo sapiens
tccatacaggccacgattcatttgttagccataagtatcattttcatcatacataagccccttaaccaagaaggatataatgtaacttaaccatattttctaaattgctattggtcacttaaggccctctataatctacattctttcccttataaacatacaagattgtgctcttttattttaggacaagctggcttgattataaacacttcaggctcattttcttttctcatttctcagcttgctgtgttcttggcttgactttgacttggtccttatctcttcatatttatctctatcttaatgaatcaggatcacttaatatgcagtgcttaattttattaattcttctaattggtgcttataaatttgtttggtctttgcagttagatgacagattacatctggaatgaattccatgtgttcaaagggtatggttggaatttaaaactgtttatcagctgttaagagtacagtatagagaaggattttctaggctggaagaataacatgtgagggcccaaggcaggaaactatagaagaatatgagggtttgaggaaaaacaatgaaatcatcactgttagagtagactgtgttagagagaagtaggtcagtacaggtgatggagtggaggatgttagaataccagataaattaatgactattttgaagatgcagcaaaggagtgtaacctctttcttcacctctccttcctatctttcaactggaacagatttaagaaaactcaattaacaaaaaatgtgttatattaccatgacagtttgaccttgtctgtaaacattgggtagagtgtctctttagtatattttgattgatggattttccttagcaatgtagaaaaaaagcaccaggactaattgtagaggctaggttatgcctcttttgggtaagactccacctcttcattatctgatctttattttgtctgttataacagatatatttcctgagatgaaataaacttatctcttggcatgattttccactgtgcttgctagcagaggggactgaga

SEQ ID NO: 113707 - DNA, 1069 bp, Homo sapiens
gatgatggattcttctttcttggcactgctagtggcactatattcggtctctactctctgaaaagagtgtatgtctgatcatgatggctgtggtgttagagtaggtaggacaagagcacttccctgaaggagttcgtgtcaagtgctggctttattagtcacaggtatatacattactcctttctctgtattgttccctcctttaagtgtcatccaaagctgctatggaaaaagatattgtcgtcaagtttgtttataataaagttaatgagtgactttgaattgtgaaccctgagcctgagaacaaactggatctatattgaagtgtcatacatagtgtagcaaaacttattaacaatactcattgtatattatcttcaagcattttaataagcatatttaaaacaaaatcttgatttttttcaactgtggacctctacacagcaataggaaagaactattccaactaggttttttgtgtagtaaaacaataaagtactttatttaccaaggaccttgatttgagttcttgttctgatgttagctagctgtacaatgcgtagacaagtaatttaactacttctttttttttttttttcctgagacggagtctcggtctgtctccaggctagagtgcggtggctccatctcagctcactgcaacctctacttccgcctcccgggttcaagcgattctcctgcctcagtctcccgagtagctgggactacaggcacgcactaccacgtgcagctaatttttgtatttttagtagagatggggtttcaccatgttggccaagatggtctcgctcttttgacctcatgatctgcccgccttggcctcccaaaatgctgggattacaggtgtgagccaccgcacctggccatcatttaacttcttaaagttattgatttctcccttcaaaatggagatcatgattgtaatactggtcttacctcacaatattgttttgaaaattattggctgggcatggtggctcatgcctgtaatcccagcactttgggaggctgaggcaggtggatcacctgaagatcaggagttcaagac

SEQ ID NO: 113708 - DNA, 1031 bp, Homo sapiens
attcagagatttatttttctttatttgattttaacttcatagaacatgattttctgttggacatcttagcttaattacgatttaagatcctttattaactactctttacacattgatgctggtttgcaaaatagctcataaaagatcataattgatatgaaaaatttctattattttttccctaagtacttcaattttttcccacttattaagtgattttgtgcaagtcgagctgcttagtaagacctgtctttgtagtcatttcgtgtgtgtgtgtttgcaaggaggtatttttagatagtttagctgaacagcaatctgacgtctttagaggagacatcagttcattatgtggatacaaattctatgctttcggcttttatacaccaagtcttaatttaaatctgtttttcttgccttttctaacgaaagagactacatcatggtatgtattctatttcttcctaaggcttgcctttctggttaacctttgcttaagaaatgatcaaggtagaaatgtctttatttgctcacaacttaatatagattatagaagcatgggatttggggctgtatttaaatatgccattatacattatgctatacagtgtttttctattgcaatgtgattcaaggatttaaaatagtcattatggggctcataaatgctgcgttcttttaagaagaagaatgtaaaggccaggatgtgggagttctatacttcctataactgcacatactgctgtatctgttaaaaaaaatgcctttttctttgtgaaagataatttaatgttgagtatgtaagaggagcatggttatttgctttcttactgctctaaatacagtgtttataggaagttataatatcttcttttatctggttctcctcacccttttcaaaatactgggaaaacaagctcttaaggcttaagcaaattcatgttagttgtttgtgaccctgatctcaaaagagataatacctttggttaatgatatacatagtacctttggttaatgataaacgtcgaatt

SEQ ID NO: 113709 - DNA, 2099 bp, Homo sapiens
ataatagtttacattgtagaaaatttggaaactactcaaattaatatttttctgtgatataaaagcaaaatctaaattctactttaagcagtggcatagctaattcacctctcttgatatcggttcctacagctgtgaaatgtgaagattatactaaatgaatcctcaagctcttccaggtctatgattgtgctttatacaaaaacttgtatttgcataatgctttatattaccagaattctttcacatctgttttccatttgttctcacaactgtcttgttaggtaggcagtacagaccttgttatgtctgttccacacttgtgagtaaactgaactactaagaatttaaaattattttcttgagttaaacagccatcttggaactagccatgtattctctctataatttcatatcataatctttgacctcctgatgctaattcctggtgatgttaagtacttagtcaaagtaagtatccatatttcataagttaccactgcagtaacttgagaattttaaaaatctgaccttggaaatttggttatccactcacataatctgtaggaagccagtactaaagtattgtagcgatttgtgatatatacctaatcacctttatggtgcttccagcatatcaaatttttacttttttaaaaagttgaatagctgaatacagaggcttctctaaagtaccttcaggttaggttttgaaaggcgatttttaagtttgttgtccagatggcatacctcactccattctaacttgtcttcctacttccattctaaccccttacaagccattttccccaccccctgccagaatgatcttataaaacaaaactgggtcttgttaacttcctgtttaaaaaacccagtgacttctcattgcacttacagagcctactttttggtaggcttaatccctactgcctgaccccatttgtaccactcagcctttctcacgccttaccttccagtgcatgaactcctcagaaccgtcagattctgagtgcatgttttctccctcaacattctcactctttaccttccagtcaccttgaaattgtttctcgaccattcctaggtttatcccacctgaaggtctttactctggatattccttctgtctgtaaagctttccttccacatctttggctggatcctttgtatttattcacctctcacttcagatgtaattttctcagagcagccttctcagatcacccagtcttaaatagtatcctctccattcccagccatcaccatctattacatgctcttcttgtggtattgtctctacagtacttactgatagctgaaatctttttttaaaattttttattgttacatattcctcctttccccttctcccctcaagcccctcctctctttaagggtgtaagtttcagggagcagggattttgctaatcctagtcattgccatatcactagttcctataacagtgaccggcttgttacaggatgtcagtaaatacttgttggataattaagtagatgaatgaatcttatggttctgagtaactttatatatcttcatctgacaggcttcttgttgagatctatgataggaagttaaaaatatgttgagttcagaagttttgtcattaatttttttgatgctggcttccaggaaggctaaactaaatttattgcataactacagttgctgttcattgtgttttagttttattctggtgatcttacctataattgctgatggaagggggtgactatagagctggtaaggaaaagaacattgggatcaaacagtccctgttcaatttctctcagcctcaatatcttctactttaaactaggtagggttaccagttcaatgatctgctcattaaatacttactataccttaggtactatatgagaagctaggaaaagagtgatgaaaaagacacacctagagagggcattggattattaaatcagcagctactgtaaaggtatttaagttctgtgacaggcagcattctgggtatcacaggaacatcttacaagaatttctaacttcaggaggagggttcagagaattagccaggccaggggtgagagtgttcttcccg

SEQ ID NO: 113710 - DNA, 1047 bp, Homo sapiens
gaaagagagaaaagtcagtcttaattctagaacaaaaaatttaaatgtatgtgtcttttaagccagaaaaatatttctagtaaagttgcgtgtgtgaggtgattatgcagtttaatgtttgtgggcttctagaactgcttatccagaagtctagtcctttctttctgagcttgtgatctttctgtctctctttctacacccatgcttcaatctccatggctctcacttacaggaagaagaaatggcggagtttggggtaagtggtggagaccttgcatacccacacacagttcttattctgctcattgcattgttttcttacctgctgtattttctgatgctttgcatttttgcatttttttccttaaccctcgtgctgtagcagaatttcagatggcaaattgacttcaagtttaatctgttggggcttttgcttttgaagtcatgatccatgagagctgtgaaatgattgatgattgttctggggaactacaggccagtttttctgagctcttagaaaaattttattttcatataattggtgtgtctcgaaatgcagaaagctcaaagtagggggaggggaggaaggatattagaagggaaaagttgtgcaattaaaatatttcacagatatgtgagaaataaatatatttaatataaaataggtgcccccaggtgttaaacccaaattttttacagctcaactaactactattttcattctgtataaaccaatcctttttaaaaataattcttaacaattcatgtgctcaatggtttccatacatatatgtttacatttgcatgattgttttattaacagattgaccgtattactttaaaaactcaccacattcaactcaaggcataagaagacaattttgaacattgtagctaattttatttaaatttatgtataatatcctctttaggagaagtaattttaatgttgcaaatcttaatgattatagctgtgtattcttgcatgagcttttacatgtaattattgttttctggcacctgtgagagaactgccttaaatgctct

SEQ ID NO: 113711 - DNA, 1030 bp, Homo sapiens
tctaattgtatttatttaacaataattactgagccgctgcttggtacttggaactgctctatcacagtaaaaaatttatactctattaatgcttatatattattccagaagacagtacacaaaatcagttaagtaaatcatagaagatattagaaaatgataatttctataaagggaaagtaaagcagagaagaatgacagagagtctgtggaatggggtggtaagttccaagttcacatcactcttgtgcctttaggatggaaagcttgtctgtcttcttcaacataggatctccagtcccaacacagtgactgactcataggagcttcttcctaaaatcctggtgcttaataagaacttgttataagaataaaatgcccatgatcactacaagttgttgattctccctgaaaaaaaaatttaatagtatagaatattccacttttataagcaggtaatattttaaatggcaagaggataaacttttaaaacaccatagtgatattttgtttgctcattagtttttttctgaatgcttcgagttttaaccacatttgacctatttttaagaaaaaaatcaaatcaggtcaatgacatttatactagaaatctaaaatatgtattttattcatatatgaaaaatagaaatgcgtttcttcaaaattaaataactgattctattatgagagtcttaaattttttttatttttaagccatgtttatgttctattacttgaagggaatattttgtgttcaaatggggaaagagtaaagtaaaaatttataatcacatattatattatactttaatttgtctttacttatgagattaacatatcaatctttaataagaaaaattaatttcttggctgtcatgaactgtatgtcctcaagtgttaaatctctgggagctcaaagttgtgtctgtataatgataaatgcagtcaattaggttgtcaattcttatcaatgaatcactacatttaaaaaataaacaagttgttaataaaatgtaatgaatctctcatc

SEQ ID NO: 113712 - DNA, 1016 bp, Homo sapiens
aaccgtgacttgaaaaacaatttctctgcatgaggacacaaactaggaaaaactgtgaaatgggaactcttagcatggattttagtcaataaaattacaacaacaataaataaaaatccaccaaactatatagtatcatttaccactggagacataccatgaaatgagaacagagacaaaggcagcctaaaaacagatgcccaaaaccacacaaaccagttgtcaattcaggaagaatgggtggatcgctgataatgaacaggagggaattgagtgaacaatccgaaaactgaaaaacaaaatacggggcaagaacagattaatactctgacacactgcaaccttttataccagtttcttaataaagcagcttgcacttgaaaagtacacctagaaaggtactcagtaaaattgctgctctcctgatttgttaacagggatgcactcttgagtcttaatcaatgtaggttacattgatgttgattagagggctgttaatttgcagctcgtgatcaaaacctgtatgtgtgcatgagtttgtatgtgtgtgtgtgtgtgcctgtgtgtgtgtttccagagcttcaagaaatcctaatgtgaagatcctatttttgcctctatcagtcctcatccaggagcatggtgggcagagctgtttgtccccctactgccctgttcactgctgaaggattcctcacaggcttcagtctccctttctgccagagtacaaaacaggaaaaggaggcacagcccttgtatattcagaggccagaatttcctctgttttcacgaatccaaaaaaaatctgctttccactttatccttaaagactcagtggcttgaaagtctccttcaaacctgaggttctatcattttatgtagtaaacacttccatccgctttttagcaagagattaactatatataatctgaaatctttaaaatagcatttaaaatgatctaaaaatgccaacttttaaggctctctcagaaggaatttcccaaaatctgtcctca

SEQ ID NO: 113713 - DNA, 1030 bp, Homo sapiens
tttttttttaatgacttgaaagtatttcacaaggtatcataaacctattttagcacagatttccaggtcagttgttcatcaaaaatggctctgaaagataaatggaacatgaattctctttttcttggaactggttttgagaggaccctatcacctctaatttggaaatcatagcattttagaaaaattattattttttccctaggataataaaatttgcttaaaaaaattcaacttcagatgacaccaaaatttggctaccaaatgattaaggctaatcaatctgcaaggtttttgggttgatctttatatgatcattcagtaagagtgtatccatgctgttctatccataaacataccagagtgctgacctttacagatagcaacgaataatggatgatgtattcatgcgtgtgtgtgtgtgtgtgtgtgtgtgtgtgtgtgtgtgtattgcttccagggagtttaaaaataataagagaagacttagtatcctaggagacatttgctttccctttctggttttctctactttgtaaaatagttcaggatgagaaagccatctgaggccatgtacttagatttacttgaaagtatgaaaaaaaaaaatagaagcacaaacctgtaaatctcttggagcaacaagtggagaagtacatataagttgctgttaatatttccgttaatgaaccaacctagtgaaattagagagccattgaaatttaatatattcatttattcaatgaacatttgttttgtgcttattattggtcagtcatttgatgctgggaatgcaatcctaagtgcaatattagaaaatggatgaataaagacactaggtgctataatacaagtatatgtttgtacaaggtatggtgggaacatagaggtgagaaaagtctattccaccttgggtacagatgggaagaggaggaaggtagggaataattcacagagaacatgatcttagggctgaatcttaaaaaataaaagataaacctgagaaaagccgtagaactgtaaaacagct

SEQ ID NO: 113714 - DNA, 1049 bp, Homo sapiens
tacgcatattttagttgagtaccctttcatttctactcatataaaggtgaaatgggaataaattttacattgcatatcttacagttagttccattactccatctttcaaacagaacaaactgaccttgtttatgtggtaaaagctttttatttatattgaggatagatgggccaaacattgtttctaacaagagatatgacccaaatagtaaaatagagcagatgcaaagggataaaatattagtatagaattcctattaaaacgtaatagatagatatggtggtgtgtagtgtttggatgatagagatgaacttctaaaatgttctcagtgtcagtagccactacagtgtgcaaaacctattattgcagctctttaaaccttttattattgcagcttttcaagtgttttattgtgtgctcccatgacatacaggagtgctgggaaacatttgcactctcccccaacccacagctcttgcaaatgtctgtttgattatgtatcatgcagcatttcatctcagacatgatttggcactgttaggctcaattatataagctttcttaatagttgatttattcaaagcaaatgattaattttctttaacatcagtttggtttttgtttttgattaggtataattgttcgtatatttgttggcaacaacgtaagttcagatgaattctgtttagcaagattatgggcagaaaaatatttaccggcagaagaaagtagctgtgggcattaattttattcattcaaatcctattaaactatatcaaattgctgttgtgtaggcgatctaatatatgactgtggaatatattactttccatatttatttttattagtccgatctaatatacggactgtggagtatattactttccgtatttttcttcatagaatatcaccctgtaccattattccacagaacacactgggaagtgctgtcatagaagatagctggaagacattcatggcagtgcacatttcttggagatgtgtttagtcttgctaagaagacaattagaagatcatgggagccaga

SEQ ID NO: 113715 - DNA, 1693 bp, Homo sapiens
ggaccttactattaggtgactatgcatttccagagaaatgtggacttttcatattatgtggtaaggatttttttttttcaagagtgattatggagctagatttttaaaaacactgtaaaatactaaatgattccttctgttgtaagttgatatatatttgtaacctttgtgaaattgtattcatatgaaaatgtcagctcaaattcttgggagaacattaaattatgtaatatttaattaaaattttgaattcatgccttctccctcccaaccccacccagttaaactatatatatatatatatagtaatggatatgggacaagtttcatcatgggtaaaatatatggagcacattgattttcttgctataatctgaatataagatgaagtccttttgagagtctttaaactatttttataaatttatactttggaaatcaattttaattataaatgtaatttgtgagtaagtttaaatgaccataatttttctttttaaagcagttgagggatatagaggagaaaattcttatatattggtagaagctctgattatagctaaagtaaaaaatatttattatgcataggcaagcttccattatctgtgcaaaataattcctttatttgggcactgttcagaaggctttactatttaacctcctaaaagggatgcaaagattattcacaataagatctatttagggattttgtcttccatatttgttttccagatcctcacatgcagactaggttccataaataacaaatagttattgaatatctgaattaagagtttttaattaaatgagtaatgactactgctttatattatgaagtgtcaatgtaagggaaattatgagttttagaactagaagagaccattgaaatactccagttttcatttagtaaatgaggagcctaagtgttccaaagaggttaaaataatttaactaagatcactcagctagtgagttgacaaggagttgaacctagttcttctggttttcttattagcagtttccactaagtagatgtttcccaatcttacattcctttacacacttaggaaacagtatttgtatggcacattggagtaatctggagaccacttagcacaagcccatgcgctctggttgcactaaggccccacttttcttccccatgagctgaggggactctttgcagcattcctagtacacaagttgagaggctctgccttggtataccttaactttatcatatgagtactttcttcattatttttaaaaatatttttgcaacttctctttagaagttaccttcacaggttatagcacagtctttttatgattgttagaatattgtaagagttcatgagattatatctaaaagcactaaaagaaaaacccaaatccttttccacaagaatgggaacagtaacatgttattattagtcatcaagctgttctgatcatcatggcatttaaaaacctgtccatttcggccgggtgcagtggctcatgcctgtaatcccagcgctttgggaggctgaggtgggtggatcacctgaggtcaggagttcgagaccagcctggccaacataacgaaaccctgcctctagtaaaaatacaaaaattagccgagcgtggtggcacgtgcctgtaatcccagctactcgggaggctgaggcaggagaattatttgaacctggga

SEQ ID NO: 113716 - DNA, 1033 bp, Homo sapiens
atttgtatacccttattttgccttatttatttataactcttgctctgtacctaaaattatatttaaaaaataagatggtaaacctgtaaagaatgaacctgtgaaatgtttagaacagtgcttgggtgtgtattttgaatgaatgaattatggaacattgtcttctgttttttattggctctgataatatatataatttgcttagtccttgatactcttacctttggcacccttttgcatctgatactatgatgaattttaagtctaaactggaagtcagactcatatctgaaggctgattactggcctgtgttaattaaagtcattaagcatttatcaaaaaatgctttatttttataccatgtctaattcagatatagaaaatattaagtatcaaaaagacaactttttttagagtcattgatgcataataggcttattttcttcacctccaagtatgtactattgaattggcaaattcatgtaacataaacctattatatacttttctctgcaaggccttagattttagtgatgatgaaaaagagaaggaagccaaacagaggaaaaaatctcagattcaaggccggaaaaaactcaaatctgaatttaatgagcctggtgagtgaatacaatatatatactcgttctttatcttcatttacatctatataagtttatcaataataaaactgaaggaaacatctgggttctctctgtttacctcctagcatcctgctaacatttagagccattacatagcaggaggtgtggtagttttatgagcttaagcagtaaaaatggcttcctggggtaacagagagactaaaccttgttactcgtgcttgtcagcacttttttcttaagatacctatttgcttccatttttaggattttatgatcaagtacttgatgaacccctaaatcacagtgtcttatttttaaacatgcattccctttaccttttttgaaaattaaactttctgagataaccatagattcacatacagttgtaaaaataataggagaggtg

SEQ ID NO: 113717 - DNA, 4009 bp, Homo sapiens
ctcaaaagttaccaattataatccttttctgtgtactttacaagttaaatgagcaataatttaaaaaaatcataatttgcatcgagttggtaccatcaaaatgatttgaatttggtgaggaacaaacttgttactattgtttcacattcatagaagggaaatctggaatgagcgagtgcattttaatcaatatatgaagactgaatatgtaaaaatgacataaatataactaaaaaattattttattgccctaacactgacaaaattaccttgttctggcaattatcagtgggatttttaaaagaaaacactgctgacttttcaaatagttattttacatgttaaaagaggcctttatgtttctattacagatattcgagatatttggacctgttgcacatccattttatgtgttacggtttaattcttcagatcacattgagagtaaaggtattaaaataaaggagactatgtattttgctccatcaatgaaagatttcactcaatatatattcacagaaaaactaaaacagtaagtactttaccggcatgttgttcttcacttacctaacgtttatattttaagaataattctcagtgatgtaatttcttacagttatattgtgtgtgtcttgcaaagagttcatttatcttcctaataatatctttgaagcctacaatttattttcagattttgtacgtagaattcatatcttttgtaaaaaatgagatgatcagccattaagagcacatttgagccatgtacactttctgattctagttcagtgttttttccattatgtacattctttaatgtacttactattttagtattagtactaatattattatcatttcttaataacttttttttcagttaagtaaaattctctttggattctatttaggggccttgctcttcaataaaactttaaaatagttttcaagagaaaaaaaatgagtgttatctctttattttgcttataaattttaagtttgtagaagagacaactaacacgtgtccctgaaaaattgtgtagaaagttacggtgtatggagttgacctaaccaacaaaccagtgctctccattttgtctatcaataatgctaagtgatttctgtggcatgtgaccgcaatatttttttatatttgtgctcccattggttgaatatttttcaaatgttagctgttgccagctgttagttgtagagctgtttgtatcagctaaacttgttataattatgttatttaattttttatatcagcaaatagcatatgaatttaagatttttttttaataaaaataacttgaatgctttcgaatgatgtaatgaatatgagccactaaaaatattttcaaattgggagtggaagaaaagactgccaaagactgggggaaggttaaatccagaaagactttgcactcagtttgacacagaagttccttttagttctagctcttcttttattggagacttaaaacctaggcgatacatttttatagatgttgtttttgcaggaaaacaaaggaactttggtcactgagtaactttggtattatgtcaaaggtaccaaccccagttgcatggcataagaagattacttataccacttacatgttaaatcaagtctcaagtcaccaaatttcatttatttcagagatgaaaattttgatcctgataattgatttaactcatgtttaagaatctacataaagatctggaggaatattttgcctaagttattcttcacattgcataaggttattttcttaaataacactgacaagaaagatgaattaaatacacataaagtcttcaagatattaatatgttctaaaatgctttaaatatttagcatttcatcctgctttgaatataaagatactgctgtggatatgccatatatttagctttttaacaaatagagtattttagcttaaaacagataaatttgaagaggttttctgaagatggtttttaaatagattttagataatagactcagtctttggttttgatttgcagttcttctattaagaagcagtagtaaatcagtgaattgggaaattagacctatattgcagaaacctccctctcccaggaaaactgttgtattctagacctcattttggcatctgtcatgggaacttggtggagtactttgtctttgaggtagagaagttcagctcctttccagcttactgttctctaatgaggctattttgatcttagtttctcatgtacttactgtcttgttaaaagtgccttttgaaatgttgcttgatctttcctttagtagattttgattttttgtaatagacgcactagttggggaatttttcccatttatgtctgtgattccaggctaacagcagtccagatcatgagatgtcatatgtgcagaaaggaataccagagatatatttaaggcccatgtgtgaaatgacaattgaggaaatgcttttttcttttaagtgatggaaaagccattgataatggctcatatataatgtcaaagttccgaatcaaaaatttaaagcaaacttaataactttcatgttgtgccagcaaactgacatctgtacattgattttaatggccttaattcctgggaatctcatttatttttgagatctagtttaaaacaataaggacatctagtcctaatactttgtaatattttactttgtgatattttaacataatggaataacaaaatagtagctgaaactatgaaattaacaaaattaaaaagattaaaaatgagctttcacaaattatactgctcataatagatatctgtacttttgttggatgtaaagtgtaaaactctccaccaaaagttgttgattttcagctgcaattacacatttcacacatgccagtcattatattgtccttcagaatctttaaagcagcttctcttcctcttcctccaactattcatagttagcctttgtttgaccctcactgctttgagaatcagtgttggaataagccttggttactcatagaggattgctgacattcctcaggtaaactgaggagaaaataattcatattgatatctctgccattaaacctgtaaaatctgtgaaaagggaatgcctcatagtcatttttatgtccttcgcacatggaacaacttctgatctacagttggcgtgaaataagcattttttttaaactgagttttgtgaaaactgcaaatattatgaaaacaaaaatcaaaagagctgtccatctgctttccactgcacaccatagccttggcttctcattccagttccctaatcctaatatttctacttgctcaacttttgtgtttttcttaggagcttcccacatcttttgaaataaggtaaaagacacataactgtattgcaaaattaaaggttgaactcatgtcctttactttattattttctgtacttttaagttatgagcacttaatagaattgtgatgaatacttttttgactcccatccccaccccactcagggataagggatcagatgcatcatggaagaatgatcaggaaccaccaccagaggtaagtataagtctttttatgcaacattttataaagtagggcaggacttaatcttataaattttatcattcttgctgttagggaagtcattaatactggctagcagccatactgccttatcctgtcctagcgcatgtattctctcaccgtcctagatgactatttcatacctttcagtgaaaggttttgattgatcatttaggaaaaaaacttttttcagttacatttagttgtattttaataattatcaccttatcatttacattgtagtttactatttttgtcaactttgttgatgtctgataaaggcaggctgtcattattttttaaaaatttaattgagtttagtaaatacaccatatgggacatgaagacatggtgcttttaatagctgtccttcttttggaagtacagaatcattggaagcacaagatcattggaagctacctacct

SEQ ID NO: 113718 - DNA, 1055 bp, Homo sapiens
taagcccagcctacgctgggatggaatttggggaactgcatgcactctatatcttctctgcttgtcagttatttttcccagcagatcctacattatagctgtaccacgttgttgttacagtgtgtgttaacctctgtgtgtgataggaatccttggagatcttgtagcaaaaatataatgactttgagtaaaaaatggtgagtattatcacctagagccaagtgaaaggatacctagaaaaccacttctcaatgacagggcaagtataaagcatcagttggattaaatttttatatgaacacctacagaatatatactagttttaaagatataaagaaagctgcttgcccacctcatagtaaaggtctcaggtgctacttttccaaattcagtttcttatactctccttacaatctattacttcctttgcttttatcttgaatcaggtagtatggaagttccagaatcccctaagttgggtggaatgaccaagaagggatatgggtgcctcctatggagctgtatgaggagaagtgggccggcctgagccttgctgtgtcttaagttgctctttacagtttagctctcaggtgttagtcaatctaaactctacactcagaggctaatggttatttaaaatattgttaaattcctcttttctactctggattagccaaattgcttatgtgaacttggtcaagttttcctgtaacatacctattagtattggctcatgccacatactgtctattgtatggcttcctgttatctactgcctgtgatgttgttttacttaaaactttataatgatttcattatagttgtggctcataaacacttcagaacctaggaacagtcaactaaaatactatgctttgcttttgtccaagaattttgaatgtcacttatattttagttcaaaccatactgcacagacctgaagttggcaaggaatttttccactgaaattgtttttcacacttaggaaatggattcatgctatctaggaaacaaatccctgggaaacagtctgtgtaccaggttgcaaacgatga

SEQ ID NO: 113719 - DNA, 1037 bp, Homo sapiens
atttcttctaaaacagttttacaactaaacgtgattacactatttttggtaaaaattacttgagaatatgtacatagcttgaatttgttgaatctttaatggatgattcagattttctgtgggatttgcattttaatttttttcccttagaattatagctttttgtattaaaaataggtataaaaacatttcccagtgctatttggtaataagtagactttgtttactgaagagaaaatggttaatgaggtaataatcccaccttcaatttttttttaaattatgttggaattaaagcttagattttcattaaaattctacattctcttataagtaaatcttgaagtaatctattttatttttcagtaataattgaatctatgactaacctacctccagttaatgaggagactgtaatttttaaaagtgatcgacaagcagcaggaaaggtttgtaaaacatttcaaatcttacaaattattctatttatttattgtttttttctgactttccccatcagttctcagaagagtttatttattttaattgatggacaatctagagctctctaatttcagtacgttcttgatttcctttagtacttcatatctgtctgtaaattggtttaatactgattattactctttgccacatgagttattaaatacacatatatagaattctttcctagtgtttgtcagataacttgctaggcagtgagtctacgtaatgcataacacatcgtttcctaccgtccagatactcagctgagtgaagaagacttcccatagtatagtagctcttaagcatttttgttttgtgagctcctttgaatagtggctctcagacttttcagactttgacttcctcaggtggaagctcggtgtggaatcttttccaagtggaaaaatatttcactgacagcaatgaattgtcactgtaggcacatcctggggaattacaaatatgtgcattcaagtaattactataagatttggtcccttttaacatctttctaatggaacaaccctgcatgt

SEQ ID NO: 113720 - DNA, 1624 bp, Homo sapiens
ttcaggacttcaatgtttcactgataggtgtcatttcctttttcctgaagaggccattcaactcttcttgacacagtcgcagaaaagattgctgcttctgtgttctgtttaatcacagtcaaactaattaactaaccaatttaacaagacagctaaaagaacttatgtggagaaattatagttactagtagaattatttcttttcaaatggaatgtctctgcctgataatagccttttttacaggaagtaggtagtctcttgttcaagtgtgactgaaagaatgtagaatagtacttatgtctgtgttcttagtctaactgaatttggggtgtatacttgagacctgttgagtcacttaggtggagaaatgttggagggagagaagtgctatcacaagtctgcaaccactaaaatgataacattaaagagatgctctaagcacttaaagcattttcagagatgtgtagcacttaaaatggaaaatttattttttttaagttgttgaagctggaggaagtttaatgttttgttttgttttaaattataggaactgccttctgttgaagaactcactattattctgcctgaagatattgagttaaagcctcttgggatggtttcaagtattattgaacaactaggtatgttaagaattctattaataaaaattgtttccaaacacacactaataattgaatcaatgacttttatgactagtaaattttctttgacatacgtaattaacactttattttatagtcattaagtttgaagggataaaattcagttttcatatactaaaattatatataaatacagtttatttatagaaatttaaatgtctgcttttactgacatacttcctccggaatttcctttgatttggtttattagttttctaatgttgctataccaaattactgcaaacttagtgacttacagcagcacaattttatcatacagttctcatgtgggtctcagtgggcttaaaatcaaaggtgttaacagggctgagttattttctgtaggtactaggggagaatcttacttccttgctctttttgggttctagagcctgcccacattccttgacttttggctctctttcttcatcctgaaggccagtaatgtaacgtctgtctctgagccttcttccattatctcacctcactctaaccacatgtggaaaggttctctgcttttaaagactttttagattgagtttacctgcataatccaggataatctcccctatctcgtggtccttaactttaatcacatctgcaaaggctcttaaaaatgtaatgtatttacagattcaggtatttagagtgtggatatctcttggggagccattctgctcaccacctttgattttgtcttaaaaacatgtgagaaagttttgtaatttaatactgttattaatggcatgaaatatgaagttgctgagttataagagaacttaatattttagacttctttagccccaacatgtgagtttgttctgtgagattcttgttaatataggtactattaactcgtagtaggatatgctggagaatagaactcagcactgacaaagtaataggattttggaactgtgaagaggacctagattgccca

SEQ ID NO: 113721 - DNA, 1079 bp, Homo sapiens
attgaaaagaaggacaacttactctttgaaaatatggttgtataataaatatacaagaaaattactaaaagtaaatttcagcatgatgctttcttatgttcaagcaataccctataaagggtctatttgtaatagcaataaaatatattagataggaatttataatagcaagtaatatataaaatagcttggaataagcctaagcatttgtataggaccctttatgaagacaactgtaattaaatgtgatctcaatcaatactgataacactaatatgacaaaatagttctgaagtgtagtgagataaatatgtgagaacagttaaaaaaaattccaaggggaaaaatatttatggattgggtaaaggaactagcccgtcatctcaaatattgaaatgttttatgaaaaccacagttgttaaaatagtttagtactgacactgaactagatcagtgaaattgaatggagattcagtaaaaaacccaaatatataagtgtacttagtatatgttaaagtttgtttttcaaatcagtgagagaaaagatggattattctacagcatgtcaggataactggctagtagtttggataaagataaagccaatcactgctgcacttttatacaagaataaaattgtgaatggaccaaatacacaaatattaaaaaaaaaaaactagagaaataaagaaaacaatagtgaattttcagtgattttgggatagggaggacctttctaaatgtgacacaagtttcaaaagccaaatatgtatatatacttgactacataaaaattaaaatgctaaaggttaactaaatgactgaaattgtttagtttctttagctaaaaaacatgctgtggggtaagggagtggatatttgctacatatttgataaaagacaaatgtccttgaaaatccaaaggttttttttttataaattaataaaagataagcccttaaaaaatatgtaaagttatacaagaaacaattcataacacacataaaaatggccaggatacatgcaaggatgttcactcttctttatgaatgaagaaattcaaattaaagcaagatact

SEQ ID NO: 113722 - DNA, 1984 bp, Homo sapiens
gctgattgctttagaagataaagacaaatatctgttaaagagcaatggaactagagaatgagcatatacactttagctgaaagcaaagtagcaccagagagttaatggttgaatgtcagatgaatggtgtactgcacataagaagtgataggattgagtggaaggggaggtaataaggatttctgaaaaatttaggctaatactctgtggcattttacaattatttggcagtctttttatcttagtgatataaaatcagtgtcttaaagttgatgaaatatgcactcaattaacatgaaagataggcttaaagttatattcattgttggaggtttcttattgagatggactatagttttatatttaagcaaattaaattttgaaagtattatgaactttgtttctcttaacagtaattttagagaaaaacaggataataatgtattcatttaaaaaagaaaaatatcaagacacttcaaagaaatgttgaccctcattttttaattgacttgtctgagtcttaagtttagtgtcatacacaatagggtaattaatgaggggactaatgcttactggtgataaatagctgagtttcatggaaacttgtaaaattacttcccctgaagaagttaatgaattagaatacatgttaagtatggtcatagttgacacaaagtgtacagacctaatccattctttttccaatatgttttaccagctatagagaaaaaaaaaattcagtcatggctctcagtactccagggattggatcctactttccaaccatatctgaaaagtgaaggctcacctaatagcatcaggtaattggctgccacgtgcatgtcctgtgttgggtaatatgagaaaagtggttagataatttcatcccaccttcctcacttttctcaattctccccaaactgacaccaaaaaggtttagttttcatttggaatgtttgattccttctcccaccaacctctgttgtcctttttccatatttgtgagtgaaaatcctactgaaagttctttatataattttactttagaaagtcatcaatttactgatactcttttttgctcaataagccttcacaaatgcttgaaaagtcaacagtgttgtaaattataaatgttaccttttcagagggccacttttgacatattagcttcttccatttttgcattgaaagttttaggcacccattttttgactggtatgtctataacctcatttttaataggatggatttttaatgttatgtggtactcttttgaatattttgcttaactgaataaccttgtagaccatacagatgttagaaaattaaaatataataatcttacaaaacagacaataattgctctttcatggatattccagaagtgtggttaggatcttgcatttctttaatgccatcgttacgagtatctgttatcacagaagcacagtaatttttttattgggatctagtatataatttctgtattaatgtgttgtctttttgattacatgcagttggacatttaaattgtcgttagccatttgtgtaactgtttagaacttgtgctcagtttccttactattcgtaggtaagaaaaatgaaaccagaaagaaagagacttgtctgaagtcatattagtggggaggagcagatctgaactggtaatagatacattccaaactgctgtgtttttagtatttgtggagacctgcatagcaacgttggaatctggtcgtttggactttctcattatttggtttctgaataatcatgtagcatattttctcaaagtgaaggatgaatgtatcatctaatgtaagctttttaaaattgtatttgcttggattatattgcctctcaataaagcttttgacttggaactgtgtagtgtgtgggaaataaatggtggagcttctttagtatgttgaattttagtagttcatttgcgaaatgctgtggtgtttggggatgtttatttcca

SEQ ID NO: 113723 - DNA, 1054 bp, Homo sapiens
ttagcccagtttaacccaattttatgtccaaccactttctaaagagttttctagcagtttcctattgtcactcaggcatgcttagcttaatttttacctccatttagtctgtgcttcaagcaggaatgtcgcctctctggatctatccctttaaatctttccattgtgggttgttcgatctctgcgatctaactatgtacaatgcagatctttaggtagatgagaactacagtgaaataactttatgattgttcttaaaccttagaaagatataatttttaaaattaggttataaccaaatcttgccatcccaagatgtggttataacccagttttttgtttttgtttttgtttttgttttttaatgtgagggtacgttaagggggaagagaataaaagaggaattagcgagctatagtggcaatgaaaaaggagagtcttaagtggctctcttcataatgtcacaattaataagtttaactagataaaattattcttttaaacataaattcttttttaatgctcagaaggtttatatataacctacacagtcactgtaagcagcatacatattacagctttggaactacgttgagccacataggatgtatttagtgttttgatgaattggaaaattgagattctttttaaacaattttatcagcagttgatgctctgaactcttcattcaaatgtatcaagtgtaattaaaaatgtagggtcataaaaatatttgggattataatttttaaagtcttaatcagaaatgagttttataaattagtgcccattgttttctgaaaacctgaaaggcttcacataacatttaaaaattattagcacaatgtttatggagataagaaatggataatacttcagtagggataataatgtgtctttaggcatataatgtagcatgaccaagaaaaaaattaatgcttattggcaattttgggggaaatttagctgtcatactttggtgactgcttattttataaaataagtacgtttggtagttaggttgagtacactctattctcctgattgtggcagt

SEQ ID NO: 113724 - DNA, 1921 bp, Homo sapiens
gatatgtgagagtattgtaataagaggatctgggttatggcaaaggtttgaaaatgttattggtaaactaaatactactttcccaataccatatcagttttgaagtgctagttttgaattagaacagcagtagtaaacatgtagtaaagttgatatttcttaattgcataatcttattttaatattagaataagcaatagtaaacttgtattaaagttgatatttcttaattgaataatcttattttaatattagtataataatactggactatttttttaactgttttcttccctacagtgaaacagattcagatagttcaagttcatcgtcttcctcttcatcttcctcatcgtcgtcttcttcctcttgtatatcacttcctccagtgctgtcagatggagatgatgatttacaaattgagaaggaaaataagaattttcctcttaaaacaaaagatgaattacttcttaatgtaagtacttagatttattaagcttagtttgcatgttttaaaacgtattctggtaccagtattgatctaattttgcctatatctgctccataaatttgaaatttattctcagcctaataggcatgcttttggtatgccttggctttcttatgtaaaagagagtagtgatctggataatttcttaggttgcttctaactctgctgacctttgataattgttccgattatggcatcaacttcagctttgaactttacattttttacattccctagaagaagatatttcttatgtagatttgcttttttttttggtctgcacgtcagaaaattttgctcaatagcaattgaaatttcaatagcaattgaaatcaatttttttggtctgcacgtcagaaaattttgctcaatagcaattgactttttaattgactgcatttagagaagtagaagatgaaattcagagggttgaacttgttaggattcctattgaagtttttggagtgtttttattattacagttggagaaaacttgttaattgtagaatggtatttattggcactcgataggtttggtttgcaaagttaactcttgcaaggttatttcctcttatgctgtaaacatccttaggaggatgatgttagtctgattgaaacctatgacccaagaggaaagccttctcagaatttcagaatgtaggccatattatcacattgttttttttctacccctgcatgtagttttaattattaatgctttaaaaatatttaatggtcactaatcataattcttatataacacttaaattgatgagatagtttaatgcaagatttgaaaaaataaattaaagcctacaggcactcaggagcctttttcatgaatggattctgccagtctgaattatttctctttttctctactcataacaagaaattctcgtctcgcttatgctttataacttgaagacctttggatttgtatgcagcttcatcagtggctcatattttcatgctacagatatgttaatatttcttagtggtctttgtacacaaaggctcccagcataactattttctgaaagtaggagacttgtttggtctttcttgcttgtctcttgatcatttttctacataatttccttattagaatataataacgaacaaagaaaagaccacagtacttctgtaaatgcatacatatcattgtcttactagatttgcaattcttaccttgggaatttcttccaatttaatgcaaagtcttagcatatttgtttaggtatttttctgaacagaatgtccctgttttcatcagaagatcaaaaaggatttgtggccacaaggagtccaagaacaagttctttgaggactgagttcatatgtgatccttgtaattcccatagtccccagtggagtgctttatagataatgggttctcaggccaaagta

SEQ ID NO: 113725 - DNA, 1395 bp, Homo sapiens
ctcggactcggattcggactcggacaggtcgggtgcctaagggacccggagctgtggggagaggtcttgtatgacgggcgggggtggctggggcctaggagcctagaggttgcttgtgtgggccctggagggtgggcaggtcgttggtgctccgggctcacgtgttgaagtattggctccgactgccccttattcgctgcctctcaaagcaggtcgcgttgtgaatctgagcttagtactgacttatttcctaaatttggtggcctgaagggttctatgtatagatcgtatcattttttgttagactttagaaaacccgaggatcttaggttatttccgtaactactcagtttaggctgtacttttgtggttatagttgagttttgtgtcagatctgatttttttttatcatcacatctaggctttgttttttgaaccacatacattggggatcaggaaaagtattattttttgtgtttcaaagctggctcttgatgattacgttaatttatagaatccttgcagggaacacgtgtttatgaaagtagccaaacagtgttatttagtagtatcttatgcttcttacgttttgtgagagcctttcccccttgcccccacacctgtcttttaaatatgaaatctctgggctggagaggactccagcatgtgggatgttactaaaccacactgaacattgtctacaaatagttgagtgtgttgagtggggtactgaacaggttaacaagatagacacgtgttgaggaggtgagaagtttagttttcagggaagtcatcagcggagagtggaagtgaagaaggctgaaggatttgagtagaaggagagggtatgaaatgtactgggagggggaagtaacaactgtaaacaaggttggatttcttggcagtactaagattgcagtataatcatcttgtgggatttcagagctcattttactagcaaagaaaagtaaatggtagatgatttggggatacgttttgaaagcagaagggatatggcgtcataataggccaacttagtgtcaggatactacttctgactctgtgggtgatggcagaggataccaaatatttgaagaagtcaaaaggggtacaactttttgccagttaacagcagtgaaatcaaatggaaactgaagaagcaggtttagttagtataatgcactttttcttgttttaacttgctatgagtgtgggtgtataggccattcgtacaaaggtggccagtatgccgtcagagattggacatggagtttagagatgtcatagctgaagatttaggcgttaattcacatggatgatgactgaaatcattaatgtgtatgggattatccatgaaagtagtagcgaaagaagagaaagtgaggatggaaccct

SEQ ID NO: 113726 - DNA, 1001 bp, Homo sapiens
aacactgtgtttgattggaatcatcagatcattgctacctgcaaccacaatctgttattcctgctctgccacctcacagcaatgatatccacttgtgtcaaccccatattttatgggttcctgaacaaaaacttccagagagacttgcagttcttcttcaacttttgtgatttccggtctcgggatgatgattatgaaacaatagccatgtccacgatgcacacagatgtttccaaaacttctttgaagcaagcaagcccagtcgcatttaaaaaaatcaacaacaatgatgataatgaaaaaatctgaaactacttatagcctatggtcccggatgacatctgtttaaaaacaagcacaacctgcaacatactttgattacctgttctcccaaggaatggggttgaaatcatttgaaaatgactaagattttcttgtcttgctttttactgcttttgttgtagttgtcataattacatttggaacaaaaggtgtgggctttggggtcttctggaaatagttttgaccagacatctttgaagtgctttttgtgaatttatgcatataatataaagacttttatactgtacttattggaatgaaatttctttaaagtattactattaactgacttcagaagtacctgccatccaatacggtcattagattgggtcatcttgattagattagattagattagattgtcaacagattgggccatccttactttatgataggcatcattttagtgtgttacaatagtaacagtatgcaaaagcagcattcaggagccgaaagatagtctgaagtcattcagaagtggtttgaggtttctgttttttggtggtttttgtttgttttttttttttttcaccttaagggaggatttaatttgctcccaactgattgtcacttaaatgaaaatttaaaaatgaataaaaagacatacttctcagctgcaaatattatggagaattggggcacccacaggaatgaagaga

SEQ ID NO: 113727 - DNA, 1054 bp, Homo sapiens
atgggagatggcgaatcctcagaaggctctgtgtgggaggcttttgcttttgcctcccactacaacttggacaatctcgtggcggtcttcgacgtgaaccgcttgggacaaagtggccctgcaccccttgagcatggcgcagacatctaccagaattgctgtgaagcctttggatggaatacttacttagtggatggccatgatgtggaggccttgtgccaagcattttggcaagcaagtcaagtgaagaacaagcctactgctatagttgccaagaccttcaaaggtcggggtattccaaatattgaggatgcagaaaattggcatggaaagccagtgccaaaagaaagagcagatgcaattgtcaaattaattgagagtcagatacagaccaatgagaatctcataccaaaatcgcctgtggaagactcacctcaaataagcatcacagatataaaaatgacctccccacctgcttacaaagttggtgacaagatagctactcagaaaacatatggtttggctctggctaaactgggccgtgcaaatgaaagagttattgttctgagtggtgacacgatgaactccaccttttctgagatattcaggaaagaacaccctgagcgtttcatagagtgtattattgctgaacaaaacatggtaagtgtggcactaggctgtgctacacgtggtcgaaccattgcttttgctggtgcttttgctgccttttttactagagcattcgatcagctccgaatgggagccatttctcaagccaatatcaaccttattggttcccactgtggggtatccactggagaagatggagtctcccagatggccctggaggatctagccatgttccgaagcattcccaattgtactgttttctatccaagtgatgccatctcgacagagcatgctatttatctagccgccaataccaagggaatgtgcttcattcgaaccagccaaccagaaactgcagttatttataccccacaagaaaattttgagattggccaggccaaggtggtccgccacggtgtcaatg

SEQ ID NO: 113728 - DNA, 1050 bp, Homo sapiens
gggcagggcagggcaaaaaaagactcagtgcaggaaaggacttgcccaaggtaatctagtacgtggaaaagcggagggcaggagcctgtgccgtgcaagagctccggggagccaacaccgagcggcccttttgagagggtcccagcccctgagatgcgggagcccgcaagagggaacctcttgtctgaagaggttgctgcgctctggagtcgtgctctgggacagatgggcaagctccgctcttggggccggaagcgtgtagcgtctccacccgggctccaatccccagcctcgcactcagcaccaggcagagttcagcctcccgccgcaagctcccttccgccgctcccggcgagcacgcaggtctggctgtccgttgggctagagcttaaaagcccaacacgggcgaaaaagacgcggtctcagttaacggggacgctttagagaaacgcactcgcctctcctgttccggttgggtcggcgcgggcttctcaggcgccacgtgggattcggcccgggtgctcttgtgagctgctgctcctgcggttggtgagattacctgggtctagagtgcggagctgctccgtggccacgaggacgtcaccatggtgggccccctcctgctcccccgaaccgctcggttggttccccggaaggctcttgttgagcaggcagagagggagggtgcggtttcgggaacctaggagaggggaggatgcaaagtgtttattttcagggagtgtgcggggtgcggggcgaagcctctgggaggcgagtcccaggcccaacgcctggaccttagagttccgcgtccgagtgctgaagtgctcacacgtcgccttgctcctctttgccttgtgcctaacttctcgctagtcactacttcctgggggaaacccggcacctttccattgtaacgcatcgaggagtttggcaaaacttctgagatcgctggccctacacacctctgcctctctggcctgggtagactcagtatgtgggcttagtcgcctcttcctcggcgtccgttcacctctcgttagtgccctg

SEQ ID NO: 113729 - DNA, 2289 bp, Homo sapiens
agggcaagtaaagtattttgcaggcagaggtaataacaagtgcagtctcaagaagttatgaaatagcttggtatgttctggaatggtgagaagttcagtaagaatggcgtgaagaatcttttatagaggagcatgggaaataatggtggagaagcaggttggggctagattgtttctgtgctaaagacttgggacctaactgtgagctagtagagcactttaagcaggggagagggactttactatattagtgttttatgaagacaagctctgtagctttgccgaagaaaggactagtggggagaatctaaagactatcctgattatgaaagattctgaggattgaattaagcaattgacaataattttgaagaagagtgtaaagccacttggcctttttctggaataggtatgttggagactgccagctgtcccctaatgtattctttctgtttttctatatgaatggatctttttctcacagaataaggattatatttactactctcccttatgtaacactgtgaataaattttggtcagtgggatgtgagcaaaaggatctgcaacttcccaggtcatgctcttaaaaaaaggggatgtaccttcagatttttcttttcctacttcatactggcttgagtgtagacctggtattaggctgtcttgaactagataggaggtatagcctgaggctagtagacaaaaaaatggaaggatcctggatccctaagggctttgtggaacagaaccttcagctcctacttttaacaataaagaaccaaacttaagctgggttatgccattatttggggtttttattacagagagccaaatatgattcctagatcattataggtgaggtaagatacaggattatgtaggaataaaagaaacctgagatgtctagtttggaggacctaatgaattgtgggctgattaactggcataaggcttcagtgggaaaatgatacatttttccttttggatatactaattttgagatggcttctattattttctctattcctaatttgtacaggcaatgagcccagctttgattttgcatgattcattgcccgctttgttccatgtgaaacatctacaatcaagcccctactaataatccaagtcccttctgaccccttaattttcttaactgtaacaaatttctggctgtgagtctcctcactatctgtagtccctgtatcttctttgaagatagaacatgttgttgaagagctgagtttattgactccttctgtgcctttcttctgtcattggagagcacctctgaatatatcgtttctgtcattaccatggcaacagattattagaattatttaatgatcctggcttatctcctgatttttcttgtaatagttttagcttactgtatttctgtcatattactgtttttaaaatttatttgtaaagaatatttttgggactgaaggcacttacatatctgactatatgtgtcatgtgttttcatacattttagcccaaagcaccaaagggaaaaagtgcaggacgggaaaaaaaagtcatccatccatatagtagaaaagcagctcaaattacgagagaggcccacaaacaagaaaaaaaggaaaagtaagtatcttttcatcatttgtattactcgttggtaaaaagcccctttatacttttatctttcaaacatatatcctttcacagtattgtctccctttcataaatatttattaagtgtgttctgtatgcagagggtgaaactgaacaaggactctactcttttagagcttacctaaaacagataagtaatttatgtagcagtaggtgatgagtgccatgaaaaatttaaaaagttatgggatggacagtgagggagaagttgttttacgtgggatagtcatggaagccttctctgaagaagttacatttgaacagagagttgaaaaatgtgaggtctgtatataaggcatgtaggttaaagtgcccatgagacatgtaagaggagatatggaatggatagttagatatgttgagtctagtgttcagagaataggttaggggtattgacacaaatttgggagcgatcagcatccatgtgggatttcaagccgtgagactggataggatcagttcacctaaggagtaactgttgacaggaaagagaagagagccaattactgagttcagtggccctctaccatttagaggttaggaaaagaaggagcattccacaagtgagactgagaaggaggagaaagaaggctgtttcaaagattccttaaaatgaagtgaa

SEQ ID NO: 113730 - DNA, 1048 bp, Homo sapiens
gcagtcaaggaagccatcagattcctcgtctggacaactgtttcctgagatagggaacccaggagatggagggggtttggtggggggtaggtggggacagggtgatgacaagttcagttttgatgtgctaacggtgaagccactaggggacatccagattgagatggtggttgaatgtgagggtctgcagtttgatagaaggctgcgatttggtcactgaagttaaagaaatggtcgagttatccagggaatgggtaaaagaggtttgaggacctgaggaactcagagaaacataaacatttaaaggccacatgaaggctggatactaagttttccattaagtaatgtaagcccaatacatatactttgtatgtaacacaaatcattttcgtatttttcaggtacttaaatcgattcagcagtgagctggagcagattgagttacataacagtatcagggacaggcaggggaggcggcactgttcccgggagaccgtcatcaagcagacgatggagcgggagcgacagcagtttgagggatatggccttggtgtgctcactgattttttattttccttttatatgacatagcagtatcaatttgtgattgatttcaaaggttttattttagatcttgtttatttcatttgattttcttcctttgatgtctttttctttgtgagggtttagaaaaattttggattctttttttttcccctacattcccaacaaaactatcaagtttgtgacagtgatgtgacatcatgtcttttttaccgtgatagtaatactgattactttcacattgatcttgtcaaccctaacttgtctccagaactccaaatttgcagtatcacatatggatttctcaaactctctacttgcatgtcttttgggcatctcagacttgacatgtcatgaaacaaaggccagcttttctcctaaaacttgctcctcctgcaggtttcttattccagtcagtggcattaccacctgcccagttgctcagatcagaaactctacagtcactttcatagtccacatccaa

SEQ ID NO: 113731 - DNA, 1025 bp, Homo sapiens
ttactttcttttccagagattccagacattctaaatgcaagtaatctgaaaacatttaggtgagtctgtcttgtattgttcccctgaagctgtgtgtaaagtacctgacaggtgaactttcttcccctttgagtctagccggtagaactaaaagaaaatcgggtttcttttaaccttttcttttttatctgaccaagtaagaattttctgaagttgggcgtacaaacagttgatctgcaccaacaggatggtaacctggtgtgctttttgtttttcaaaatggtttaagatacattgttatagtacctcaaagtatgtgatctcactattcctccccagttttatttttttaaaaaagaagtaacagcaacagacgtgatggctcagagtcatatccccaggctgttctgtagcagcctcttttgcagagaagatggttataggaatgactccagggaacaggttaagtcatcaagacccgctttgtccagtggtttctagttgtactcttttgtaaactgggaaactaccgagtaggatttcgattttttaggttttttttttttcttttttcaactttgattttaaattcagaggtacatgagtaggtttattacaaaggtgtactgtgtaatgttgaggattggagtaagaatgaatctacccaggtagtgagcatagcacccagtacgtggtgtttttagctcttacccctttccttcccccaacttgtattacccagtgtctattgttcccttgtttatgaccttgtgtacccaatgtttagctcctacttataagtgagaacatgtagtatttggttttgtgtttctgtgttagttcacttaggataatctgtaaaaatcctagaagaaaacctagtaaatacccttcttgatagcagccttgacaaaaaatttatggctaagtcctcaagcaattgcagtaaaaacgaagattgacaaatgggacctaatttctgcacagcaggataaactgtcaagggaataaatagacaacctata

SEQ ID NO: 113732 - DNA, 1051 bp, Homo sapiens
aaggtgcagttcacttttgagcttatgtatagcatgtatttataatttaagtatgtggagttaagattctttttataccttaattttattttgcctgtaatcttaaatatataaatatgctctttatttctaaaacaatatatcttctacctcctccaaagccagaaacaagaaaagagatgagtatagccttctggttaagagttcagttcccaaaataatattcacattacgtctaaagtaattaatacaatactgaggttgaaaaactgaaaattttccattataagaataacagttgattactgaaacttaactgggatgtacttctgtgtgtgaaaaggaaaacctcttctgactgtattttggagatttgtcaggtatgatacagttcctacttttgattgcaattcttgatctgggtagcatgagagaaggagatactcaggttagagaggatgaaagaatagaacagctttctagtaatttgtgcctaatattttcctttaacgcttttgaagttttgaatatgtaggatcctcagagtttcgaaaatttactatctcctgtttttccacattaactcttaccaacactctgcactcttttttttttttccttttgtctagggaatgggactttgatctgaagaaattaccaaacattaaaatgagaaaaatttgcgctaatgatgcaattcccaagacgtgcaagaggaaaactattataactgtagaccaagatttgggggaattggaactaaacgatgaatcaagtgattcagatgaggaaatgactgcagtggcctaattgtcttcacttgaattgaaaataaataatttgagagcttcaaattatattcattgattatggtacctaattgtcatgatacaaaaatttgatactgacattctcttatatgatgagagtttcatttgcgtttcaaaaatggtgttatgatacttattttaaaatgaagattgcttttcatttccattaagttgctaaaatagatagatgtgatctgcagaagttgtttagtcttcatctg

SEQ ID NO: 113733 - DNA, 1024 bp, Homo sapiens
cgtggcctacatgagtgcggttgggggctgcaggtccacctgcagggtcatcttaaacatcgagcagaagacagacacctccgacaagaagttgcagctgattaaggactaccaggagaaagtggagtctgagctgagatcgatcggcaccatggtcctggaattgttggataaatatttaacagccaatgcaactaatccagagagtggggtcttctatctgaaaatgaagggtgattacttccagtactttgctgaagctgcatgtggtaatgatcaaaaacaaatgatagataattcccaaggagcttaccaaaaggcatttgatataagcaagaaagagatacaatccacacatccaatctgcctggggcttgcggttaacttttctgtattttactatgagattcttaataacccagagcttgcctgcacgctggctaaaacggcttttgatgaggccattgcagaacttgatacactgaatgaagattcatccaaaagacagcaccctcattatggagtttcttagagacaacctaacactatggacctcagacagtgcaggagaagaatgtgatgcagcagaaggggctgaaactaaatccagacagggtgtcatccttcttcccttcaagaaacctttttacatatctccattccttattccacttggatttcctatagcaaagaaacccatttatgtatacggaatcatctgtttacagtcttttcacactgcagcattgggaaaacttcattccttgatttgtcttggccttcctagtgtgtagttactgctgtagaaaagtattaataccttcatttcatataaacataagcaacttccaaacacttaggtagaggactaaaaatgtatctggtatttaagtaatctgaaccagttctgcaagtgactgtgttttgtattactgtgaagatatgaaaatgtagttaattacaatttaaagagtgttccacacaacttctccatttctacattccctcccatactcgtcagggt

SEQ ID NO: 113734 - DNA, 1035 bp, Homo sapiens
tgttatttttatttatttatttttgagacagagcctcactctgtcacccaggtggaatgcagtggcgcaatcactgcttactgaaacctctgcctcaagtggttctcgtccctcagcctcctgactagcaccatgcctggctaatttttgtatttttagcatagatggggtttcaccatctatgctaaaactcctggactcaagcaatctgcctgcctcagcctcccaaagtgctgagattacaggcataagccactgtgcccggccaacatttgttattcttttgacttctcacttccatcaaacctgtcagtcatattgttgctatgagggtaaatgtgtctttgtctctgggtgattttatgatttttcatttgccattattttctttagttttctatatattgctaggtataagttttttggatttatcctccaagtttgcagagcttcttgaatttgtggattgttatctttcatcaggtgaaattcattggtgaattcttgactattatcttctcatagatagctctacttcattgtgtctgttttcctgagatctgagttacatgtttaatagatggtttcactgtacccaacatgctccctgtacttgttttactattttctactttttttttctctctgtgcttgtttgagtattcttttgaccttctcttcagtttactaaccttctacaccatgcctgttatactgctcatccacaggttattactgtaattattgtatttttttaaatttccaagtgtacatttgattttttctatagattccaatttatctgttttctccatcttttcttctatgacttggagcatattaatcaaacttattctaaggttttagtctgctaatgtcagctgtattgccgtgagcctcttttcagcatatctttactcttaattttagttattgtatataaaaattataaagactcagccaggtgcagtggctcatgcctgtaatcccagcactttgggaggcctaggcaggtggatcacctgaggtcaggag

SEQ ID NO: 113735 - DNA, 1045 bp, Homo sapiens
gtaaatatctttgtaatctttattaattgactgttaaaatcacactcagagttctatgccttgcatttgcaaaggtcagaaatgttttgtgcataaatggcatggggggattctataaataatatttctgatttcaaaaggtcacatggaaaggaaaaaattatctttgtactgcatgtgtttcgtggcacattgtgtacttttgtaaatgaatctttgccaacataccatataatatgctcttcttaacactgacattcccctctctttaatctggattttactgtaactgggtaagaaggaaagcgtacacttcataggctcagcaatcaatgcatatctgattagaggaatcatgagaaccaagagacttttaaagttgagagaaatgttaaagattagctcaaaagccttctttcactaaagaatacaggaagaccagacatgtcacatgactagttccagtaagagaactagttatgtcagagtggacctaggacccaggtacctttattcccaattctgtgctctttggtaatgtaatctcaacgaactactggacacacttctttcagggaaaggtcttcacaaagctaattctcaaaaacagagtcctaactagaattgcttatttttattcacattttatttaaaataataaaacctttaataataaaacctaaatacattttattcattaaaataagtttaacatttatttactatagaaataaaccttacttctttttctgtagtaaataaatgtagaaataaataatacatgtatagcttatatatatgaattatcacaaagtaagcatattcatgcaaccaatacacaaataaagaaatagaatattacctgtagcccagaaacctctctctgggtccttttctagtcactacccttaccttctccccaaaggcaaccatgatcttgatttctgtcaccacatactggtttttgcctgtttttgaatttcatatataaatatattgttttgcatctgacaaaatttgttaaatttatcaatgttgtttcaca

SEQ ID NO: 113736 - DNA, 1052 bp, Homo sapiens
ttatatttaagagaaaataagtttatgcctttacattttaaaaaacagttctatataaaacaaaaaatgacaagggttttattgaattccatttggtaacatgttacaaattattacatagtacaaattcacagaccacatttatgataatatcagtgtacaagcaaatgttaaggggatcataaaatcatctgtttaacagtggtgtcatggatgattaataatacaggtcttaaattccagtaagtaggcaatgaaagaccaaactatgcaaatatgcgttactagagaccattgacttaaccaaatagtctcacaaaactaagttgaaataataactaacggttattaagaaaccattatgttccacccactactctaagtgcctgatatgtacttgctttgattctatgagagataaccctgcaaggaaactgggaaataaaaatgttgagcaagttggccaggggcacaggagaaggtcgtctgactctggagccaatactctagcctctgttgctaacatccagagatgataaagagttcataagtggaaataacagcagctaggcatcatgatcatatgaaaactacgcagatgatttgccaataaaccaataacataaaatggtcggaattctccctatttttatgtgggcgtgcatgacggagcttggtatactagttcacctttagtagaacactgaattagagctctctgcaaactgtagtaatgcattcactttaatttataaacactaaattttagtaaacttaacaattcaggaagtccttgtactttacttgtgtataaaaattaaagaagtcttttggagaaaggccttacgcttttggaccagtcagtgtgttacaggtaggtagacaggcatgagcgagataggagaaggtgcttttccccgactcagtaggaatgccaggtgatggtttgacaattaccacattgccagtagctggagctagggagagacaagctcctgatgatccacagctgttaacattaaagtgttaattgaatgcaggcaccaaggagg

SEQ ID NO: 113737 - DNA, 1030 bp, Homo sapiens
tatggcatgtgaacactagctttacttttatttttatccagagggagtctcatctcatttcttcaaaatcagaatttaaaaaaagtattttgaatgcaatcgtgtttcataccaacatgaaagtaccattatagttagtggaacagaagtgaagtgttcattaagacaaatcaatcaagaagacatcccaatagcatccactagagatttattcaaaacacagagcattgacatctgtggaaaagtgccacaaaagataagtcagcctgacggagggaggaaagagcattttaggcacaaagaagtgtaggcggaaaggtgaaagagcctagagaatgccaggaacttaataaagatgatcaatgggaccaagattgggagtgaaggcgggcacagtctgagatgcgggcaggagccctcacagacaccagattttgcacagctgtctggagaaattaaggagttttaacttcatcataactacagtggaaagactggagagttttagggtgtgtctgttgtgggatagggaaggttgggaggtagatgggatgactgggagtcctgtgagtaatgagcgaatttttgaacagtacactagctccatggtggagaacacgtggaggagagccagtgagactgggaggctgcttcccacatgttagtgagtgattattgtcgccggggctcaggcggtggtggtacagggaagaaacacagatgcttcaggtctccaaggttctttgtatacagtttcatgaaaagacaaaggatggccaggcgcagtggctcacgtctgtaatctcagcactttgggaggccaaggcaggtggatcacctgaggtcaggagttcgagaccagcttgaccaatatggtgaaaccctgtctccactaaaaatacaaaaattagccaggtgtggtggtgtgtgcctgtaatcccagctactaaggagtctgacacgggagaatcgcttgaacccgggaggtggatgttgcagtgagctgagattgtgccactgcactccagcc

SEQ ID NO: 113738 - DNA, 1055 bp, Homo sapiens
actttgcagtaagtttggtaaagataaagcatttcagcacatgttctgccacaaagcatttgggactcttatgttagagcttcagaattccttctgaaaaagacaaaagagagacttcctgtcatttccactggtttctgcatgtgggaccaatatgggcaaagtttaaacagatgcaaatggtaaggggaggaggcagtgtcacgtcttgttttacgtatttcttcatatccagattgaatttaagtcattctcttcttggagcttttggagtacacttccactaaagttatagcatgcttgaatggtttatttcaccaatatttgcttatggaaataaaggggagtggccgaggagaaaggagaagaggagtggaggaggggtttgaggctgagggaggctctgaccacagcacagagcaccggcaactttgtctaatgtgatcattaaccttcctgcaaaacacagctggcagttctctgaggtttgtcactagaatgtgaagacagccacacagatattgcacagactatttacagatcgtttggtttacattgagagtcattgctctacttttgtgcggtaggaaaatgagatttcagcaattcctttttgcattttttatttttattatgagtcttctccttatcagcggacagagaccaggtaggcctttgatacatttgtacaagtaacttgttttgcctgtttgcatccctgggtctctgagcatgattgtgtttatctgaaaaccacttaggtgtgcttgcagttagtagtattggggataaatgtgtaggattttgaaagtatgctatctatcctgttgggtctattatttcaatattttaaaaacatctggactttgaaatgataagtattttaccactatttttcctaaatgccaagaaaatagatctctaagctattgcagattatgttgtctttacaagtaaaatgaaacagaagtgttcgtctattcattataaaggtaaataaatgtatagatttttaggtaaaatgcaaactccaaagcagtttatttaaaaagtat

SEQ ID NO: 113739 - DNA, 1086 bp, Homo sapiens
tcccaaaagaaactacctagggaaacattgacaccagtggcgcacacctgtaatcctagctattcaggaggctggggcatgagaatcacttgaactcagaggcagaggttgcagtgagctgagaccgtgccactgcactccagcctgggcaacagagtgagactgtctcaaaaagtaaataaaataaaagtttaaattcagccttttaaagacacataggtgctgcatttctattggaaggtaagaatatataaagttgctttcagcactgataaacactgataaacttccataactcattattaaaaaaaaaattaggcatgtgtttattggtgtgctggatagtatttctttgatgtatttgtttctcccttgcctctcaaatatagatctctctagctaactttactggatctatcagaagaagaagaggagtgaaggaaagacacccagccacacaaaagaacttcatgatgccaacagcgtgattgcttagaagttcctacacaaaaaaaggatcatttgaaagcacctggaatggtttattagcttcacaggattttattcttcttggcttctatttggagggaaaataacataaattcaaaaggattccaatctgaagcccaaatcgtttgcctacataacaaaaatatctcatcttttcctgcacattattattcttttatgggttaaaaagaaaaataccttttagtgttttagaactctctcatggtaaaaagtgcaagaatttaaaatgttgctttcatattcctataattctccaaaagtattaaattcgtatatgtttgagtgattttctaaaaactgctcaacctgaaatcaattgcattgaccatttggcttcgcacaatagggagaaaataattggttcattgattatatagagagaaagactaagaaaagctattaattgctaccaattttatgataagctttaaggtttatgaaagtatgtttttttatttaatgagtaatgtccatttgaagttgaaagaaaacatgaaatcctaattgtagttcattttatgttcaaatgaaaccattgtttttgtttttgttttg

SEQ ID NO: 113740 - DNA, 1038 bp, Homo sapiens
gggagttagcctagatcatgccactgcactttagcctgggtgatagagccagatctcatcttaaaaaaaagaaaaaaaaagatataaacttgtaaatttcttatctggaattaacataaagtaagaaaaattttgtggcactaagctaacaatccttcaataaatacaaattaagaacatcttagcatctggggaacacctagttatcaacacaattcaaatttagacaggatagtttcttttttgagtaatcatatccctaaattccttctgattttttatttccatgtctcagcatctcaggatgaacaccaccaagacaaagcctaataggatgatgagcactcatcttttagatacagatatcaccctgagtgggacttcattggcataactgtattttagatgtcaactttaagtaagacttttaaagaaattatccatacaaaataataaaggacataacaaaacttcaaaggaaatcaaacgttgggttcctataattacatgatgagaaaggttaaaaaatgaatggttccagcctgagttcaagaccagcctgggcaacagggtaaaacctcatctctacaaaaaatacaagaattagctgggtgtagtggtgcacacctgtaatcccagcctataattgggaggttgaggcacgagaatcacttgaactcgggaggtggaggttgcagtgagacaaaagcgtgccacttctctccaccttgggcaacagagtgagactctgtttcaaaacaaaaacaaaaacaatggtttcatttgaacataaaatgaactacaattaggatttcatgttttctttcaacttcaaatggacattactcattaaataaaaaaacatactttcataaaccttaaagcttatcataaaattggtagcaattaatagcttttcttagtctttctctctatataatcaatgaaccaattattttctccctattgtgcgaagccaaatggtcaatgcaattgatttcaggttgagcagtttttagaaaatcactcaaacatata

SEQ ID NO: 113741 - DNA, 1481 bp, Homo sapiens
gaacccagaatgcagagtttgcagtgagcagaaatcacgacactgcactccagcctgggcgaaagagtgaaaatccgtaaaaaaaaataaaaaaagaaaagaaagaaaatgcgctacatatacacaatggaatactatgcagccattaaaaggaatgggatcatgtcctttgcagggacatggatgaagctagaagccatcatcctcagcaaactaacacaggaacagaaaaccaaacaccacatattctcaatcaaaagtgggagttgaacaatgagaacacatggacacaggaggggaacaacacacatcagggccagtcagggggtgaggggcaagcaaagggagaacattaggacaaatacctaattcatacggggcttaaaacctagatgattggctcactctctttctgccaccatcttggttcctcgttccctgcacaaaatgccctgtgaagccacagaaaccgtccctgctacagagcaggagttgccgcagccgcaggctgagacagggtctggaacagaatctgacagtgatgaatcagtaccagagcctgaagaacaggattccacccagacgtccacacaagaagcccagctggtggcagcagctgaaattgatgaagagccagtcagtaaagcaaaacagatttggagtgaaaagaaggcacagaaggctatgtccaaactgggtcttcgacaggttacaggagtcactagagtcgctatccggaaatctaagaatatcctttttgtcatcacaaaaccaaatgtctgcaagagccctgctttggatacctacatagtttctggggaagccaagatcgaagatttatctgagcaagcacaactagcagctgctgagaaattcaatgttcaaggtgaagctgtctcaaacattcaagaaaacacacaaactccaactgtacaaaaggagagtgaagaagaagaggtcgatgaaacaggtgtagaagttaaggacatagaattggtcatgtcacaagcaaatgtgtggagagcaaaggcagtccatgccctgaagaacaacagtaatgatattgtaagtgccattatggaattaacaatgtaaccatctgaaagcaacttttcttggtgtctcaaaggagtaactgcagcttggtttgaaatttgtactgtttctatcataaataaagttatggcttcttgttggaaaaaaaaaacctagatgatgggttgataggtgtaggaaaccaccatagcacgtgtacacctatgtaacaaacctgcatattttgcacttgtaacccggaacttaaagtaaaataaaattaaagaaaagaaagaaagaaagttatcagaagtgttttgatggtgacacaaaagggtatacaggatgctatgggaggatggagaagtgatagaagagtcaacaactttggatgaattacccattctaggactcactttcttctgctttgtataggaggcaattat

SEQ ID NO: 113742 - DNA, 1513 bp, Homo sapiens
gcatattattgtcattatcattatcatcatcactattcctagtactaatatcttaaattagtggaaggaaattaaaaacactttatagctattacttctgagcagtgagaccgaagtgggttggggcagtagtgtaggaaggagttagattttttttgtttgttttatatacttatataatatttttatttgtgtcaggtgcaaaaagatacatttttgtggtatgggagaaaaaaggagaaatgcaaaaataaacaaatgccatacatttaaaaaattgtttcccatggtcagagtagtctattttaatcgtcatctgattattgaatgaattttgcctttatttatctttaaacgccatttaagttgattacttatactcaattatcttactctaacaaattaggatccttcttaaataaagcaatgatggccttttttaaaacatagaggtgtgaaagtttatagcattttaaatttatttcaagagtagaagttactaaaatgatttatgaaaataatcttatttggcaatattaccctggcttctgacatctaagaaaaggtggcaaatacaatatgctttactaaaaactagtaggtactcatttgcaaagacactaatgagtattggtgaatatgtgtaacccatttatatcttgattacttgcagaactatttcaagcctagaagaaattgttgaaaagcaaggagacaccattgaatacctgaagcgacacaatgcgctgctgagtaagcgattgttggctctcacttcctcagacctgggctgtcagccaagtagaacgtgagaggctcacggtcatgacagcaattgcagaggaacccagagtaattgagactgactgaccacctgacaagctgccacggggaactgcagcttttgctgaatagcattttacagtgtttgttggaaacctgaatttggttctgacttctgtggctgtttaaaatatagggcttgtgggtcacttgaaaagtacctgtagaagcccggataacttgaggggaatgtctgtttgtacttttggaaattatttaactgcttggtttatcctaggatcagaggctaaacaactccatagtcaacacttttccacctgacattagaaccctgtaatgatttcattatggataggggaagtctaacaagacaatcgattttaaacagggttttaatcaaataagttcttcccacttttaagctgatgaaagaagtcattatttcttgtgaatattttttcctggagagccttatcatgtattttatatgcttatgtggtgttggatgacatcatggaccatatagcttttatagagaatttttctcaccataggactgaggtctcaccaggtgatctactatgcaaattcctacagttttctattcttaagaaataagggctgggcacggcggatcatgaggtcaggaaattgagaccatcctggctaacacggtgaaaccctgtctctactaaaaatacaaaaaaaa

SEQ ID NO: 113743 - DNA, 1046 bp, Homo sapiens
tacgccgtgcgttcggccgccctttttctgcacggagaaccccctccgctcccattttccagcgcccccgtcccggcgatccagagacccgctgtgggcggccgccgcccgcgtcccggcctgcgggccagcgtctgggcacgcccgccccgcacccggctggcgcccgcccgcccgcctccagaagcagaagcggcagcggcagcggcagcagcagcagcaggaggaaggggaggcgccgagggaggggtactcggccgccgcgggaggccgcatcgcagtcccgtcacagcgtcggcgccggccggggccgaacccggaagtggccgagcccgcgcgcccgccggtcccgtcgccgccgccccgcactcgggcgagcgcgggagccgcgcagtagacggagcgcgcccggccgagcgggccatggccgcgggggccgccgccgcaggtggtggcgcgcggtgaggagagcgcggcgccccctccggggcggatggaacgcggctcggcgggcgggcagtgccggcgtccgcggctggaatggtgctggctgtgttggtcggtgcctgcgttctgaagcccgagaggagccacaatggagacgccgccgctgcctcccgcgtgagtgagcgggcgggcgggctgcgccgctgcggataagcgcgccgctgcggcgcgtgtcgccggccgcgggcgcagctctggggacagccgccggggccggcgggaggtgggagatgcggggcgtgacgaggcgctgtgcccgcagtcctgagcggacgcggacggaaactcagcctggccaggcggtgacttaaaacgctgcccaggatttctggggaagggtcttccccatctcgggcggatagaagattcggggtggggctgtgcatgggtgaccctgcaggtcctgtgtgtacctccctgaaatgcatgggcacctggtgccgagtttgcctacccctttataagagatcaggctaggatgcactgagtccgttgaaaaaaggaaactggaaagtaccagtcacccgctgtctaaatga

SEQ ID NO: 113744 - DNA, 1166 bp, Homo sapiens
tggaaaacttggaatgccagcatggatgaaagaattgttaaaactcctttcaatcaggggtggctaaagttggtgagactttttcattgtttctgtctatttaattataaatacaagtaggtttttattttcatttggttctgtccaggattaaacctaattcaagaactcgttatggtgttatttgccattctgtggatcagaaatagtttttttccttgccaccccttggcctgtttgcctccactcccattaacatccctccaccatggatcccgtgtgccggatttgagacttgcaggcagtgtctttaggaaggaactttaccgggcctcactgccagagctgggctagaacagaggccagtggaaactattaggaagactcagcttttcatgaagttagatttttagcctgagctttaagtcaaagaaagatgacctggacttaaagtgccttatggtatggttggaagcacggccccagattctctttgtgtaagtgtctgtttattaattcattcaatgtgcaaatatttgaatgcctgtctctgcctggcactgtgcgtggtgcttttgcttgtgttctcttttaacatccaaatttacattgttctcagatcccaccttgttctccactggcctgttggcacattgtcttggagggaggtcaggcatctgtacccaccattcctggttccttcaggatggactccttgaaattagcttttgatcttttgtgctttttctattccttgcctccaactttcatcctttttaattctcatataattaaaaattgtcgttggactatatatttgtgcttattgttttttgcatacttgagtatatgtggcatttagattctgttgcattctgggtctgggtgatattgagactgtgttacatttgcttctgatcaaacctgaaagatgtgtaactaaaagatgtagcttagtaaaggaatttcaggtagtaaattgagagatgtagtttagatgtagattagtaaaggaatttcagatggtaaactgagatgtgcaaaaggaaatgtaaattgaccagccctgacctcaggaatgtattttacagtctggcttttatagttatttgtataaaggattttcataataagttgaaggaagactgtgaggtataggcctgagt

SEQ ID NO: 113745 - DNA, 1035 bp, Homo sapiens
ctgtcttgcatgacttctcttctatcactgcttgtgggcagtatttcctcacggaagtaggccttggccagttcttttcaatcacctgttaatcattgagctctagctccatctatatcttaagtcggggctctaggtctgtgctttggtgtggaattttgaacttctcacatctctactcttagctcatgcctctaaacccaatatatccaaaactgatgtttgttcacaaactgacttcattttataacatttccacttattcaatgggataaccattcttctggtccctgataaccaaagcattggaatagtctttgatttctctctctttcttcatcctccacatcttatcagtccccaggaactgtggtcttggtttcaagtgtccattctggttgctactattctgatgaatggatttcatcacttgatacctgaactttttcactggtcttctattgagctctgtgtattctctcctcatccttcagtccccacactgttttaaccctccaacatcttagagtcatgtgaagtgacttatcaaaaccagagactcaggcagtcacagcctttcatcattttatcttatcctatatatccaagatcatcatgtgcttttaaaactctcccttgtccacaagccaggattctccagccttttcctatgcttctcttcttctctcccctgttacaacaacttgaagttcctccaaggccccattggagccccatctccttcaccaagtctttcctctttactccaactcattccagctcatcgttgcattcctatggtgtttgtcactgcacctatgtactgacttgtgccattccttagtggtttcccatgtaccttcctgtttagatggtaaatggaggaagatctcaattcagccttcctaatgtttcttacccttcttagtacatggcatgcagtgggcatctaggcagcacttaaatacttaatttattggctttggtcattttgaatattgctattaactttgaattgaatgttgcaattaaaaa

SEQ ID NO: 113746 - DNA, 1064 bp, Homo sapiens
aatgcttccccacacacttaacatacagccgcacaactgagttctccagagagaatagggtgctctttaatacctccctctgcccttcagtgagttcagggctctgctttttaactgctaatatattttagtaaagtttggcaattcaagcttttctagatgtttccttttcagctctggaaaattggaaaaataatttttaactatatatgtttaaaatattcaatggcattatgatattgtctgaaaggcattctgtgacttgatgcaagatcagaagttttttttttttcttggagaagtaagtaatacaaagaaaaaagagatagaagtttttatctcacaagatacctcatattcagttctacatactgaagacctaatccaagttcttacatgtctatagggcaaatgttaacatttttaaaaagctctatttatttggtaatatgaacatatgtttgtagattagtctactgtttccatacctaataaaagtttaaattccagacatgtgaagaaaatttgcagtgtgtctctttgccttagctaactgcaaaaattgaaatcacaaccctaccatagacccaaacgtgtttccaactgagaaagtcttctaccttcacagcctctaagtaatatagtggttatttgtttgaaggatgtgagagtattttgttgagaaactgtagaatgacataacaaattttagttaaaatgttagttatggttgactctgtacttctgatatcctggatttgtttatgagagcaatgctagtaagatgcctgcttctgaatgcaagtttggctgggaagacagcagagaaatagaagaaatattataaagtaatggagaaacctcaaaacattacagcatggatgttgactttgaaaacaacagctgctgacgtgaacttggcagaaatttgtgagtaatggtgggtgactcattgcaagcaggggagtcttgcagcttttgaggtgaacaggcaaaggggagaacagtgatggtggccacccaagggccaagtatttatgtcctaaatgtcaaaatgtctttga

SEQ ID NO: 113747 - DNA, 1072 bp, Homo sapiens
gtatagctaattctaaaaagggcttgtgtgactcttcatgtgagaaggggtggttatttgtggcttgaaaaaattgcttgggtgattctgatctttctctttcacgctgctgaaaaccattgtttcaaagccaataataaatatctaaagaagttttacttcatttctgtggtgttctcagaattgttacagcaggtttaaacctttgcctggtttggaaatcttgactatttgagagagacagccctgttagagtctttgttttcttcctgtctgagaattcagttatcatcaatagtgtattcttaggcagagtcagaaagtcacctcatctgagaagccacctgtgtccacagctgggaatttgcagaagtcagtcactgaaggaaggctttaggatatctatgataaaacatagcagtacactgggatccaaaccctgggaaacctcaactattttagagtatgtgttgataacaataggctattggataattgccagactacttgaggagtctaagagttgcataaagacttaaaggtgaaaggaacttggaaaaatatcttcttcaggtattttaagggagacagttctcagaatgagaagcttttctggaaaaggctagcactttgcttcagaagagaagcagggcaaaggtgtaattcttcatttaatgtggtacaacctaaagggtaaacctttacctctcacttaactagttattcctagtatgtatatgtatatatgtctcacatctatagttttagacattatgcatcattttctgttctgcttctgaatgagaagccatctaacacaaagccacacagggaatggaaatttatggaaagggcattcgttttgaaaatggacgtttgcagaaggggtgatgtatttgtaagtgactctcggtacagagaacacttaacaaaattcagtgttttttcttacttattcctttaagcctttgaataaagtcttctttgcagggtttctgtagtacatcagaaaaaggaggagctgaaaataggtttaagagagcaccaatgtgggcattgattgttgtatggc

SEQ ID NO: 113748 - DNA, 1036 bp, Homo sapiens
gttttttaaaggaaaagagcaaataatttatcagaagtgtggatggtgtggggctcctctattagtgtggtagccgcttagccacatacagctagtctgatgagatagtttggaggtgaaaaatacacaggggatttctaaatgcaaaaaaaagaaatgtaaatattttattaatacttttaaatatattgattccatgtagaaatgataatatactagatattttgagttaaaaagaatacagtaggccaggtgcggtgactcatgcctataatcccagcactttgagaggccagggcaggaggatcacttgaagccaggagtttgagaccagcctggtcaacacagtgagactctgtccctattttctttctgttaaagttaaaaataagagaatatattattgaaattaatttctcttgtttctttttacctttttaatgtgattactataaaattgtgacttgcattatgtttatattggacagtgctggtctagggcttctaacttactgtggcaaagagtatggaaagaaacttttagagaaaaatgtaaccattgttttgtgggagtggtggtagttttggggggcagtgacctgcctgttgctgaggtaattctcaagtgtactaaggatcactgcaacttttaagtagtattaaaagttgattgaaaaatgagtagctttttttttaattaaaagggtaatatatgtattaagagtcttggttttattttcttagcactttatgaaagatctgctttttcccagcattccgtttgtgaaagtactctacgtatatctatctgaaatgctgaaagcctggctaagaagggattaaaccttcccttaatctttctgtgctgcctaaaagctctcccttttaggcccatcatttgtttgtttcttctttaattaaattagggattcaataaatatttatctgctaggtactgtaggtacaatggtgagcaagaacaaatatggttgccacccttgtgggcccatagctgactgcaggaagcaggcattca

SEQ ID NO: 113749 - DNA, 1199 bp, Homo sapiens
acattagtgtatatgggtctaactcatgttaatcagctatatatatatatgtatgatttttcacctttataaaaacagtgcaatgagtgaacatttttatatttgcatccccaaattttataagctggattcctcaaaatggaattggtggatcaaagagtacatgcatatattaattttttgatagcaatgccaaattgccatctgaaaatgtgtgtttatttatattccttctaacagggacactgtgttttgaggacaacaaaaataactaggactaaattcttaagaaataatctttaaattctacttgcacaaataggaagttgttggctcaatccttatccctgctaactagttgaaatatgctacagaatgaattcggagactgaaatctttgcacttgttaagacatgctatcgattgttccatgtgaaatactggcagtagtaaggcctcctggtgatctttcccagatggcctcattagcttttgcttagaagttccagttgtgaggtaaggcatttgaaaaaccttggtcaatattggggttgtttctaaatgtatgcatcagatgctagatgaactttttttttttttttttaacatggaagaaagtgtttggtatatgtcatgagatcactgaactaatatgtcatctcgttctggtcttttaggtacatttagactatttgctagattctggggcattgttttcaacaagagtttatcttggtttctttttgttcattctttttattcattttagtgcatgggcctcattatgtccttatatttgaccttcaacaaatgaattactgatttctttgattcacataatgggccacatgggagaaaattgagaaaactcatttaggccttagagactaaactgtgtgaattcagccctgaatgttgtttgtagtagttcttgtggtggggacatgggcctattaggaattaggagaacacctctcatgtttcttttaataactatcatgttccagtcctgaaatattagtcatcacagcctttcagaaaactcttgccatcctaatttgcctcttgtgtatatattgcttagcttttagaatatgcaggaatacattctaagagttacatttggcaggcttattaaatgcttaacatttgtatagttttgttttgttttaagtttttaagagggagagggatatctc

SEQ ID NO: 113750 - DNA, 1027 bp, Homo sapiens
acagtgggaacagaagtttctgtaattcaaatgtttcttggtggtggtatatttttctcactggacctagactcaaatcttttaccaggtgacctcccttttgaaagtttctgttttagtagtaaagtataatattgggctagaaagtatctttgggattgcatgttttgatgcagaatcattgtgccgtagaatgctgaggtccagccatctgttggcagtcagttggcgacagaacagggccatacccctggtttcccagattactagtgtagggtctcttccatgataccatatggtctccttattacactaattttaaacaatataatacctatttgaagtgaaggttgttaacttggagtcagaatgagggaatgagtaatttaaaaaattaactccaaagaagggactattgttattatagtcccttctgatttatacaagcaatagggctttaattcttggccattccaggtttcctagctttttgtgtgtttgttgctgctgttgtttttttgtttgtttaggtttttaaactttggctttaagtttggatatttggttttatttatggcagaattggaggataatttgagctaaatgaatttacaggtttttttttaaagggagataaaaggagaaccaatattttacctatgactacacttgtaattcaacttttttgttgttgttgctgttgagtgaattaaaatttaacttgtgtctagagtttcaaagcaaactttatgaactgcataaatctgggaaatagagaaaatacagtcaaaggctattgaaaagtatgctctttgacatttggtggttatggacacctttgagaatatgatgaaaaactgtcaacccttttctaaggaaagggcacattagcttatctgcacaaagttttgcatacattttcaatacactttcagagaatccatgtaccttgctgcttgccccaccttccactgttaagaatacttggctttatttttaaatttttaaatttttttattttattgag

SEQ ID NO: 113751 - DNA, 1100 bp, Homo sapiens
gtagacagagaaagcaagcaagccaaagacataatctggggcattccagattttagatgagcagatgagggagatggagtactggtgatgtaggaggaaaagcaggtgtatgtggtgtcacagaatgctagttctagagaagaaggtgcttcaaggagacagtgtttggctgtgtcagatgttcttgataggtcaagaaagtgaattgagccatatcagtgtaggtgtcattacattcgtttgcctgagacagtcctattttatgcctgctaatctggtgtcttgtctgattagtgtttactttactcagaaatgttccagtgtggatgataaattatatggtcacactggtcattagtgaccttgggaaaagctatgtagaggtgatggtgagaatgaaaactggtttggagtggactaagaataagtggactcagagagtaccgaaagttcttttaatgccctttgctatgaaaggggagagaatgtgctggctgaaggggatgatgagtttaagggtgtttttgtttgtttgttttgttttgttttttgatgggtaatattttaaagcattttttatgttaattagaataacctagtagaaaagcgaaagttgatgtgataaaggggagaaagaaacaaagggtataattgcaaaagtgagaggggttggcatctaaaacaaaatgaaggggtttaccttagatgggagcaggaaaacttctctgttaaccagagagaaggcagactgtgttgttgtcagatacaagttagtggcttggatggtggaaaggtaggtattttatcagcttgcatataattataaaggctgtggcaagtaattagccaaaaggaagatgaggaagagggatgctggagatttgaactaaacatgataaatcattgtcttgcaaaggatgaagatgaatttactagtgaagtgtagtcgaattgtcaggccatattgggagctcatttgagattcgcagtcataaatatcaggtagaatggttgtgtgattttcttcagccatgttaaaccacttaatacttagtatagagatgatgaatgtgttagttagctattgccacaaaaatgcc

SEQ ID NO: 113752 - DNA, 1031 bp, Homo sapiens
ccttcagagttgatcagacttttgggaaatagctcagagtagccaaaatcagaacactaatacataaaccaaaatgatcttaaactaattttcagtgggtaacaggtgtttctagggactgtgtttacattatccggtgtgcatcattctcaggacctagatacctaagtgatagaattagtaatcagagcttcatttggtgagcagggaatcacaaggaaagggaatttacttcaaagtggtaatggaaagtcttaccaaactggcatcccactgcaaaatatacctttctagtgatttgagtattgattacatactgtgaaatccaatgtctccttacctttcatggtactgggaaaactctgacaaataattgctctttggataacccatttctgaatttttttgtaatctggtagttgtctttttctgtccccaagcacttgaggatgtgccaaactccaccagacacagtggttcattgacacagagattctcaactagagggcagggtgccctggtatttttaattcttatttatctccttgtggagatttaataatgtggaccattttaaacctcatgttaaaaatagtttcttttggccgggtacggtggctcacgcctgtaatcccagcactttgggaggccgaggcaggtggatcatgaggtcaggagatcgagaccatcctggctaacacggtgaaaccccgtctctactaaaaatacaaaaaattagctgggcgtggtggcgggcgcctgtggtcccagctactagggaggctgaggcaggagaatggtgtgaacccaggaggcggagcttgcagtaagccgagatcaccccactgcactccagcctgggcaacagagtgagactccgtctcaaaaaaaaaaaaaatagtttgttctgacagagactatcactatatatttgattatgttttgagctttgttacagtcatattccagatctgctcctccaacattgccctccacccattttgagtggatgaccatgcttcattcgtagc

SEQ ID NO: 113753 - DNA, 1087 bp, Homo sapiens
tctcaattttttataatttaaacagcactataattaatagttctttagctaagtatattcacattcgcagtttgttccattgtgtaatataacagcttggggtccttctgcaagcaaggcttatgtgcagttcatttatttgggaagtgatcccaaggagccacagtgagtgaatggaggacttgagctggaaaggagggaaaaccggttcataggtgcagtacagatctggccatagctacatgtgacgggacctttgaaagccttataaaatatgtctcagaactgtcttctaggagaataccagggggaagtatttctcttcctttgatgcattctccactagtcaagggtggtcccacagcattatttcctgcatgcttccagactgtgtgggtatgagcccagtgcatcactgaaggcctaggataggaagccagagagaggtatggccaggggctggggtgaggccctgttacgttacatcttcagaaaggtggtcaaagcctgcttgggcctggttgctgcagtggtgggttgggcaagaagtaaggctgagaagatttgtggtaggctacaagaagtgtctggtacatatacattcctagaaacagagcttgtaattttgtctcaaaggacatgcacaattgtatctcaaaatagaaatacacatgggagtcataaaattatgttcaggttgattcatttatgaggtacacattctgagacctgaggatgtggcagggggtaacagacgtgatcctactgccacagagcttacattcctttgcaggaagacagtaaacatgggaacaaatacataacatcagtgctgacagcagtaggtgctgtgaagcaaatgaaatggagcagtgctgttagtagtgacttgaaagggactgagcccatggtgagaacaccagggttctcatgattttagatggcacacagataaactgagagtgaagagactcagggttcggttgatggaatagaactaaaggagaaggatgtaggaaggaggggcgagggcctctttacattcactgtccgctttacatttttcctagaggcagatgtacccaag

SEQ ID NO: 113754 - DNA, 1069 bp, Homo sapiens
ttttccaatcattatctcttcttttcctgaaggtccttgccattctttacagtttttgatttgagacatcattaatgtttacattattctgatttgatggctgttattttcactgttgccagagagtgtctgtgcatactcagtaaaaggcagacacattgatttctaaattctatccatttagcaagaccatagatcaggttccaggaagctttcactaaattacggcagcttttcattttctgatcagcagtagcagttacgtctatactaatcacataatttttcgatcatatgtaattgtgtactcttcttgagttacttcataagtcttgtctccttagtgagatctatcaagtcttgaagggtagagaccatgtcttatatttcttatgtataacacctaacatagttctggacacatatagaccgtaggcatttagtaaatagttgttggattgagttgagggaacttatagacctcatttattctcaaaagtagacttttatgtatttgttcattatgatatctagcatctccattacatgtcctgttaggttgttttatttgtggggcatcaggaaaggtctctactggagattcgggaatctgtactcttgtgagctccaattcaattactcctcctttttcaatattttttttccttcttccatctttcttttaatacttactgtccgtttcacttcacctacccagtaacatatgtttcatttctatcttctctcctggattatggagttctaatgcctggtcattgcaaaaaccaggatctagtttatagcaagccctatgacatactgcagccttgccagtaataactgcgtgctgtttttttgcttaaataactgcttttgcttgaaggatcagaaacttagtttctgaagtccttatttttgactaaatgtgctggacgatagaattgtatttttaacgtgtgtccccttggttgatgtttatgaaatgttggttaggtggttagatgtttgtattcgccagctcaccctatcatcttcatcctaacacttcccacaccagtgtctttgtagg

SEQ ID NO: 113755 - DNA, 1033 bp, Homo sapiens
acttatcaaatagtgttacctaaagatataatgagtgtgctattttatcagattattgatgaaagtataaaattaacatcatcagctataccctgcagatcttcataacatgatttgattaccccatctgtcaccattaggcaagaccctaatatatttcataaaaatcagcagcactttaaggggaaactctgctgccatgaaggaaaatatattaatattttctggcttgaaaaattagtgttttttgtttgtttgttttttaataaatttggctttctatgtgattttatgtgtaggtttgctctatgctgtaggaggttatgatggagcatcacgtcagtgtcttagcacagtagaatgctataatgctacaacaaatgagtggacctatatagcagaaatgagcaccaggcggagtggagcaggtacatgtgaacctgttttagcaactgaagcacaaaaatgatggaaaatagttaaagtaaaatgattcagtggcatcactttacattatctgaaaatatatgatatgctgattttagtggcactgctaaatgtcttttgaattgtgcaggtaatgggagtaattacaaagtaattttactttaaaatttaatgtctaagtgccatagacatttctgtttcatttatatattcaagttgttagcactccttttagttttttgtttttagtgcttattggggaacttgcttaataatcaagtcttttcatgtatatttcttaaaattttgtgctttaatatgcggttattttactatggatattgttttcaaaaggattacattaaaggactttttccctccctgtgtttcacctacatgttattaatatttttattctgtttgacatgcctcttttttcagaataatagtttgttgagatgcttatttaatcatcaattgtattgatttccatttcttaaattgtaggctatagtatcagcttgcttttattatgaattataacttcgaaagttttagttacaagtcatttaaataaacctaatat

SEQ ID NO: 113756 - DNA, 1070 bp, Homo sapiens
aagcactcccttgaactttgagtgttttaaggaggttatctctgatgtttaaatttatatagatcgtggcattgcatcttagaaataaggtttaggaagggcaagcttggaggcagggcaagtccagaaaatgaaggagctggtgaaatccgtgttaaagtgccaaaggacagagactggctgacagctaaacttcaaggtttctgagaatccacaaataactaaatttatctagtcaacctgttccagaacaggcttccagtcatttaggttgcccaagaatgagtaaaggaaaaggaaattcaattttccaagaccttgtttcccctctcctctttaattccttgttcggttagcaacagtatatccattccctcgctcctttgtgaaaagtaaattcctgaatgttaactaaaccaagtgtttctaaattgggtaagagtttgaagacttaaggcagcagaatgggagagacttaaaacgttatgtctgagaattaggcattaaaggaggcctagtatttgggcgggggttgtgaggagcacatactgaacctttggacctgttgagtgagttcatgtgcctctgaactctctgactggatatgaccagtaaacttggataattagatcctggagtttaggggagagggctagagatagagatgatggatgtcagcatatttttaaaacagaaaatagttaagatcacccaagacaatctggaatcgttagaagggagtaaggaaggcattattgggaaactttccagcttcaattctcatattttttctaatctcctggttgagtctttggagttgctgttctctctatgcaaaacccctcccttgaccctctctccctcactctattttttaatttgtcacctccttctcctgttctaggtctcagtttagatagcacctttctctagaagttcatagcactgtgtattcccccctttattgttcttatcacataatttttgatggtttggacactagttgttattcctcactaaattttatgttttatgaactcaggggtaagggcaccagctagcacaatgaa

SEQ ID NO: 113757 - DNA, 1078 bp, Homo sapiens
ctttgtctttctattccccagtaggaggtacttaatttttatatactcatatttggcaggctttttctttataggttcttttggctttaagtgatacttttaaacccagctattgctcatttaaattagaaccttttccatgagaaccacactgacgatttctttaaatatagcttgaaaaaatttttcccctattgttcttttagctattgttcttgaaaataatgtgttttttaaaggaatatctacaaatagaaatggtgatgatatccagcaaatgttttaaaatggtgtaaaaccatttgtactcctttagtaattttttggtaaaaaatttatactcctttagtaattatcatttttaaaatgatcagaggatgcattttttaactgttttattttttgaaagctcattgtttaacttattatatatgtattcatttctacagaattataaggctgtctgcagagatttgaaaaatggcaacaaatgaaagtgtcagcatctttagttcagcatccttggctgtggaatatgtagattcacttttacctgagaatcctctgcaagaaccatttaaaaatgcttggaactatatgttgaataattatacaaagttccagattgcaacatggggatcccttatagttcatgaagccctttatttcttattctgtttacctggatttttatttcaatttataccttatatgaaaaaatacaaaattcaaaaggtgagtataagggactagaaatagaatattatcattaatgttgctgaatattttaaaagtacatagggctttgttttgtgaggctaaagcagtgatatccaatagaaatatgaagccacgtatgtaattttaaattttctagtagaatacatagaaaaggtaaaaagaaataaggaaattaatttcataatgtgtatcatttagctcaataaatgtaaactatcgctgggtgcagggtccatgcctgtaattccagcactttgggaggccaaggcaggaggattgcttgaggccaggagttcaagaccatcctgggaaacatagcaagaccctgtctctacaa

SEQ ID NO: 113758 - DNA, 1105 bp, Homo sapiens
ctttaaaatataatgtggcaaaggaaagaataagctgtagtctagttggtcagagctagttgtttatgaacagattgtaaggctggataatttgacttcaagtctgtactcagcaagtctttatgtttcataaccattaaagtccatgctttgagcatttttgataaaaaatgtgattttaaaccaggactagttttcacaagttaaaggagttttaaaagaaaccaaaatattggtacaaattaattacaggtttatgcatttcgaaggcagataccctgattaacattgagggtatcaattgtttaagataaaatatttgagaattatatttaacatatgcaataaatgtttttattcttaaaattgtcgaaaagaatagaagaagttggtggtggtgatgaaatagtactaaagactttctgctttcaaacagaacagacaactggagagctaatgcacatccttgctagttaggcgaaaatttcacaggaatgaaaaagtaaagcagactttgcaggatctatttctttaaaaaaaaaaaaaacatacatcttagtaattctccaaaaattttcctcaaagataaatgtactaaaaatattatttctgaagtttgtggcccttgtaaaggtattcctttatattaagtacagttatgcataaagaaagtaaaatatggtaaactttcatattgcactaggtatgaatttgtattgctaactgtctttgtaactaatttatgtatactgtaaatggtatagcatgtgattttattatagttgattaactttgtaatttctgtaactgcatcgatatcccagtctacctggaaaattaagtctattaaccatagttgctgtaggagacagtactattgccaactgaagcctgaatccttcatttattttgtccccaattacagagtggaggtttagaggagtggggttagataatgctcagattagaaatacaaaggcagctgtcagatcctcccattttattgttgaagaaactgagttgtaaacatcacaagagctagttaactggtgagtagcagccctggtattagagcacaagtctctggattgattcttagttcagt

SEQ ID NO: 113759 - DNA, 1023 bp, Homo sapiens
ccagtgaagcagaatcattggggtatatatatgcagagagagatttattttaaggaatcagctcatgcaagtgtgcggctgtcaagtctgaaatctgtaaagcaggctacagactagaaatccaggtaagaattgttgcagccttgggtccaaattccatggagcagcaagttggaaactcaggcagggtttcagtgttgcagtctcgagaatccttcttcaggaaacctcagccttttatcctgaaggccttcaaatgattggatgaagcccaccctcattatgaagggtaatcacctttactcagtctactgatttaaatgttaacaacatctaaaaaataccttcacaacaacatctagactggtatttaatcaaacagttggatatcatagcctagccaagttgacacataaaattgaccatcacaatagctaagaaattaagaatttcttatctgtttgtcttaggctccatttggaatggaagctgaatatgcacatcctttggagactctaattcttggaactggatttttcattggaatcgtgcttttgtgtgatcatgtaattcttctttgggcatgggtgaccattcgtttattagaaactattgatgtccataggtgagtattaatttctgttcaggtataaagcataatgaaatatatttattttcatggccataagattatcatatttctaaggagactaataggagaagttaatcttcttaatgttatattaagaaaacataactgttggataaaagtttaaataatagatgtttttacattctagcctatgctgttataatttttatagtgataatgtgttattagggcaagtatatattcaggaccagcaatttccttatccttctgtaataaacctaaacttaactcatatttgaaaaaaatatcaaagcattcagccttccttgaataagactttctaatctctactgttcagcactgataaaggcacttgcaagatgaaactactacttgtaacacatacatat

SEQ ID NO: 113760 - DNA, 1967 bp, Homo sapiens
tacaccattttctgtgtttgctgtttgtgaacacttagaaataaagtggtctaggcaaagtggcatgttatctaaattggttaatgtgaacacatgattattaataaaaacaacaatcatttgagatgtatttattccttaataatctttatcatttttgtttcagtggttatgatattcctctcaaccctttaaatctgatccctttctatgctggttctcggcatcatgatttccaccacatgaacttcattggaaactatgcttcaacatttacatggtgggatcgaatttttggaacagactctcagtataatgcctataatgaaaagaggaagaagtttgagaaaaagactgaataaatatctcacgtaaaccttcctgaaagataaacgttttcctgaattcagaaactagtagctaacattgcttctggagagcagaaataagcatgtcttctggctactaagtgataaaaagaacattaacaacctttaattaccttcctagtgggaactttttctactttacctacaagttctatatatgtagaaatgaataaatatatatttaagtacagttttcatgaggaagttttaaaagaccatgttcctaagcttccaagaaggttttggatactagaagtattaatctatggcttttctcccagtaaaaccataggcctgaagttcacattgggtctttaaatcttttagatatatactggtcatttcagaaaattcttcatagtggtattggccttatatttaactttttttttattttttttttgagacaaagccacactctgtctccttggctggagtgtggtggcacagtctcagctcactgcaacctctgcctcccagttcaagcaattcttctgcctcagcctcccaagtagctgggattacaggcacccgccaccacgcccagctaatttttgtatttttgtagagatggggtttcacgatgttggccaggctggtctcaaacttctgacctcaagtgatctgcccaccttggcctcccaaagtgctgggattacaggtgtaagccactgcgcccggcctttttaactttaaacatgttttagaattcacctaaagatcaaaatatcatggattgaacctcatcaattgatagcagtgagtgactgaagcttccaaatcaagaaaagccggcaccaagaacttccattctaatctagagctgaccagtttgagctgattctctctttgaagagtccttcttgattgcagtgcagtactggcatttctgaatggatgtaagtggagtattttagtctaaaggcttttcaaattacttgaatttttttaaaaattgaggagctttatttctatttacccttccatttttgtatatcaaatttccattgtcattaaaaactgtatcttgaaactttgtgaactgacttgctgtatttgcactttgagctcttgaaataaatgtgatttttgtgtgattatctggtttccagttttaaacattaactgtcaccttttattcttaaacttgaaagtacagaaatcattaaattattaagttgtacaataaaaggattggtttcttttcttttttttttttttaagtgcttcctttgccgaaatgtttcctggctgtttgaacatgaatttttcaggtttaagtattgtgggaaatcatcttgacctaataaagcaatacatactgaagcagttctttgccctgcttagataatgtatgttttctgtacagttgaagaatagagctaaacttttcagggctgataaaatctcaactatctagtttgtaactcatcaagggttgggaattcttagtatgtggtgttaattatttttatttttttaagctgcggagtcattatctggtaacttccttttttttctttttctttttttgaaaccttacacggtaaagatgtccaggtgtaagggattcagata

SEQ ID NO: 113761 - DNA, 1026 bp, Homo sapiens
gattgggcttaaggaataatatagtatgtcagatcatgtcacatgaagctccaagttcttctccagtagaaaggtagacttagagggatgtgcatttctttaatagatcagtggggatgaagtcttttaccctgttgtcttctccgaagcccactccagcaatgtggaaggtgggtaatgtctgcattagcactctgcagcagcaaatgcttttgcttaggaacctgagagtttgtgcttttaaggtataacaacccccgacctatgttgttcaatcccttacagcagatgatttcccttaagttttcccacaggcttcccaaatgccctggtttgtgtaccttttacttggttcttgattcagaagactagcctgtgtagagttttaggctccttgtgcatattttgactttccatttggtgttttggcagggatgcaagacttcaattaccttagcagcaactgttttgagatcaccgtggagcttagctgtgagaagttcccacctgaagagactctgaagacctactgggaggataacaaaaactccctcattagctaccttgagcaggtaaacacagtccccagcataaaaatgcaaggtttacaagcattcaaacctgtcctacaatggtcttgtaagaggagtccaggagaatccgtctggtgcagaatgaggatgccatatttggaaggcaggtgtcagcagtgtttcagttaggcttttatttgtcataggttttgtggctcaggactattcaccaagaactgactaaactggagagtatacagaaaagacgtagactctcgtttctgtttgtattattctaagcaagggcaatcctaggactctctcccaccctgatcaccgtgaggcatcccaggcagagccagaacaaaagtaaggcaagcgaggcacctgaatggaaaatttaaggaggattttaatcttaggggcatgcaagtacaggattagcacttgagagtgagtgtctctttaagttttgagctgtacaagcctcatc

SEQ ID NO: 113762 - DNA, 1080 bp, Homo sapiens
tattgactagtttcacatcccaggcattctgtgaggcactggggatagtgaccgtcctcaggaaggcttcacacgagtgctgtcagaaacaagaatacctaatcacaagagaggaggagagctggctgaaaaacaataaaagcttagctacaaggagcaataacagtacacagaaggggacctaaccgagtcacgggagtttggaaaaggcttcttggagccgggctataagatttactaaagttgatgccaataagatcatcactgtgatcaacaatttaaaaacatgcttagctgctgtttaaatcatctcttagttcttgagaaaaaaaataatacaaaacaaataaaacacgtcttcttaccatcaggaaaaaggagatttgtcatacttatggtagcaggtgggcatgcatccaattcatctgacagtaatatcaatttatatataaataagctaaaaagaagaaggttaaagttatacaatcctattttatgccacgcaaaataagaatttgctctgtccacagatccatgtgatctaccttgatatggcattgtcattaggatgcaaactgtgtctaagcagtgagtggtatttataaccagctcatctagcttgcatcatagaacactccagtttaggaaaacaaaggctgatgaaaaatcagtgagggctgccagaagttctgtgttgtaattgttgtcttgacaatggtggtgattagtaattgaacacctgggcctaaaatctaagcttggactagtttacaactcatggaaaataggtgattaggagatctatttctgtaattgtttgagaggaaatcccttgcagagttttaaagagatgtttgcagggactagaattgtaaagctaattagagtagagagtctgctaaggagaagagcctcccttccactcagtagctttgaaagagtctagttctcaaaattctcaaaaaatttcttaaagaatggttcatgggccaggcgtggtggctcacgcctgtaatcccagcactttgggaggccgaggcaggcagatcatgaggtcaggagatcaagaccatcctggct

SEQ ID NO: 113763 - DNA, 1031 bp, Homo sapiens
gtctgtaatctatagataacataaccgattaggtcaggagtccatctttaactaccaggcccagggtgtggccccgggctgcctgcttgtggatttcatttctgccttttagtttttccttctttggaggcagaaattgggcataagacaatatgaggagtggtctcctcccttaatatgacactttttaaaatgatttggaaggtactaaaatcttttttttgggaagcaaacaagacattaattttcacttatctatttagggaaaagcagaataaaatgcacaaaaaattcagtggccttttgtgcatgtcttgattcttaaacaatgggggtctacggtatttgctggaaaataaagagatgcttgatatgaaacatatttaaggccatttctataaatttataggtcatattaattttttggttatttttgaccttcacagatacaccgaggagttaaaggatttgtccgagaccttcaaggtaacccaattgcgaatgccaccatctccgtggaaggaatagaccacgatgttacatccggtgggtctttgccacaattggaggctctacgttatgtacaagagcataattactaattatcataattataagtcttatgttcttctaagcaaaacaaatagctcgtatctctacagcgtttctcagctttgatctggtgaagtttcctttgtgggctcaggtcaggcggagtgagtggagcccagggcggctgctgcgttagaaatccgggtgcagcagatggcgccctttcctcagctatctcgccccagagctgggaggtggtgccacaggctgccgattcttcgcggttcttcaggcaaaggaaaaggagctgctggagttaaaataccagtgactttctagtctctgttaagaagtgctaacgagctgcgaatggggagaccgaaggagggagcggaaagaggaggaaggaagaaaactgctgcgggttgtgtgtctaaaaattctcacacagtttttcatttaatccgtataataaatcc

SEQ ID NO: 113764 - DNA, 1281 bp, Homo sapiens
ttgaactggagtcattttctgaaaggaaagaagaggagaaggaagaattgatggaatggtggaaaatgatgtcagaaactttaaatttttaaaaaggcttctagttagctgctttaaatctatctatataatgtagtatgatgtaatgtggtcttttttttagattttgtgcagttaatacttaacattgatttattttttaatcatttaaatattaatcaactttccttaaaataaatagcctcttaggtaaaaatataagaacttgatatatttcattctcttatatagtattcattttcctacctatattacacaaaaaagtatagaaaagatttaagtaattttgccatcctaggcttaaatgcaatattcctggtattatttacaatgcagaattttttgagtaattctagctttcaaaaattagtgaagttcttttactgtaattggtgacaatgtcacataatgaatgctattgaaaaggttaacagatacagctcggagttgtgagcactctactgcaagacttaaatagttcagtataaattgtcgtttttttcttgtgctgactaactataagcatgatcttgttaatgcatttttgatgggaagaaaaggtacatgtttacaaagaggttttatgaaaagaataaaaattgacttcttgcttgtacatataggagcaatactattatattatgtagtccgttaacactacttaaaagtttagggttttctcttggttgtagagtggcccagaattgcattctgaatgaataaaggttaaaaaaaaatccccagtgcatgtatttcagttctctaagatttttggtctggcattgtggtcttatgatgaaaacatgtatcctcttaatggcggcttctcatatattcatcctgtacattttaaaatttgttaagcaactactgtgtgctaagcactgcatagcctctatgtatgttattgtggcaggcaaaaggttctgattttgggcacaacctttatataaataacacaaaaattaatgtttggacacaaactctaaatcagtaacacactggttaatatgtaattatgcattgtgataagtaaaatgacaagaaagagtagggaaagagaaagaatgacagagcaacttaaattagactggatgagaagagtcagggatgcatcttaatgcacagacctagaatattgagtgggtgtgagcagtgcagagtgcaggggtgtgtgtgtgtgtgtgtgcatggtggtggtggtatggttgatcaatgctg

SEQ ID NO: 113765 - DNA, 1032 bp, Homo sapiens
tttagagtttaagctaaaacaaatgctatccattgtattttttaaaagaacttctttgaatgatagtaattttaaaaagttgaaatcatatattaaatgggtcagaagtgctctaaatatattattttttcccaatcaaaatctagttttatgtattggtatgctacttgaagcattcaactcagtgtttaaaaaagacttcaacagtttttaacacaccataccattttacaagtcaggggagttgttacggaggtggagataaaagccatatatttactctcagcattttaaatattctgtgttgttgagttttccattgacgacatttaatttgtgtgatgagggaggcagagatggaggggtaaaagggtgaaatagttccctcattccttacatttctcatctatgttaaactgtcagcacatggattgtgtaccacagagccacctctggtagctcctggccgggttgctgctgtaagtgtcttctgagctctcttctttgcctctgagtgtatttgaagagtttattgggataatctcagtttcttgttaagtgttggaaaccaccttggcattagctcagttgattgaccatccagaaaagatggaactttgttcctctgccctattcttttcagagcacaaatacctaatagttgaggcttatggtattttgtgtttcgtattcagattaaagataattaagtatatgcctcattgcatagaagttaagatctttcaaatatccccgggagaaacaccatgaataattaggaaacaccaaatggagaatattaaagaagggaatgagtcctcacctatctcaagtacctcgcatatctaggaagtctcttcatggctcacatcataacatagtttacatttttgcattaaaaaatctagagcctcctgtcttcaccatatccccatcaattaacattatccctccttctggatacgtgaggaaaacaggcaagtggtgagggcttgaacctgagtttctatatttctgatgactttccttttt

SEQ ID NO: 113766 - DNA, 1079 bp, Homo sapiens
tacagatggaaatgggcactcagagaaagattaagttgctttcccaaaagaactcaaatcatggtttcttcatcaggaacattttgctgatatatttttattttttggccatttctctccacaaacattatgctcccaacaacattggcatttgcagttgctggaataagtgagccattttatatctgtatggctttgtcatgcacttgcctccaaggtgcttcccaccaccctcctttttttttttttctagctaaccctccatcctccgccaagactcagtttgaacaacagcatcacttacagcaggaagccttccttctctgtccaccttaggctgaactaaaaacaatactgtgggctcccatgtcattcttcatgttttatcttttcattttgcattgcagttactgttttgtctatctccatgattgggttgaggcaaaagtaacctcctatctgtatttgtatcaccagaacgtaatctaaccgaataccttccagtataaagtagtagggaagtaattgagagcagaatgtgtgtgtgtttgtatgtgtgtgtatatattttacataattatatatatactatatatattaattataagctgtggaatttgaacaaattatttatttttagcttctgcttcttccattgtaaaaatgggttcaatactattccaccctcatgggataactgtaagaataaagataatatatgttaagcgcatacatgcccttagaatgcttacttaataagtgacagctgtttttatgatcattattagtgtcttagattatatggagacttttcatgtaatcacatatggacattttctcaggaaaccaaaatgtgtagtttatcactggtcctggatcatgggcaccatttattttcatgtcagatattttcactgagaatatttcagttaattgttgaaaagagcagaaaataattcttcacttaccaaaggtgaataggacattcaagttccctttattcgcctttaaatttgcaacatttgtctaggtacgttaaatcaaaattaattgtattgcaagattaactccattattca

SEQ ID NO: 113767 - DNA, 1035 bp, Homo sapiens
ataatctctccaattcaaattcctttacttaaccatatttgcaaagtcactttttcatgttaaggtaacattatagattctggagattaggaaatgaatatctttggtagggcaatttttctgccacacttgtagaagaaattttgaattctttgcaaaatgcacagtctgacatgaatttctataacaactgggatgagatcaatattactggactggaaatcttgcataacatacctcaataatgattctgcttttagcacatacattttaacaaatgatagatttttaacatgtgataattttccagaaaatggatctttcattatctttgataaataagatagaaaacaaattactttctaaaaaatattcttaatttttataaggattttatcttgcagaaattgacagtattcagtcaaataaaggttatgtttactttcacttgttttaagctatagattttgagatctccggagattttgctagtggcgattttcatgaatggactgatgatgaggatgatgaagacgatattatgaatgatgaagatgaaattgaagatgatgatgaagatgaaggggatgatgatgatggtggtgatgaccatgatgtatacatttgattgatgacagttgaaatcaataaattctacatttctaatatttacaaaaatgatagcctatttaaaattatcttcttccccaataacaaaatgattctaaacctcacatatattttgtataattatttgaaaaattgcagctaaagttatagaactttatgtttaaataagaatcatttgctttgagtttttatattccttacacaaaaagaaaatacatatgcagtctagtcagacaaaataaagttttgaagtgctactataataagtttttcacgagaacaaactttgtaaatcttccataagcaaaatgacagctagtgcttgggatcgtacatgttaattttctgaaagataattctaagtgaaatttaaaataaataaatttttaatgacctgggtcttaa

SEQ ID NO: 113768 - DNA, 1049 bp, Homo sapiens
aattggaaacttgtttgcaagtggcattccttagtatcaactgaccttcttatgccttctcacttcctcagccactagtgcaacagaacataagtcagacaatactgatggcaaattgtctcttcacctgcaaggtgaactatcttagagagtaagcagttgaatattagggacatatagagttctaaggccaaaatccatgaaaagtactcaagtttggaaaatggtgggagtggagaacatctgttaaaggcaaatttgccatctatgcattttgcaagaactctgcttggtgagagattacctcctccccccagatagcagattctctcaacttcctctttgtagggattttaaactctactcactgctttttcaactgtctaaatccttttatctttatagcacatatggcctcccaccctgaaactggtaggcacagtttctgatctaatttaatacccacattagagtatgttttaaatatcatatcaccaagtccataaacaactatgctaatgtatgaagtagctcagcactgctcaaaacacattacagttgccaacaccataaaatcccatttactttttcttaaaagtgtttgatatcgaatttgctttccctgaactgtaattaacaacattctgaactgcttacaagattcaattgactggcattattaatcacacattcacagagaagttgaccattacatttgatttttttttctttcttatgtgtttttggcatctaatcactgatgaaaactaaggaaatggcccttttcaccatgttccatgaacatttattttcttggtgtatttagtctataaagatttatccccatttctattggatgctgattctaaatttctatagacatggaattaaaccaagaaacagtatttcttgtcaagaggaacagtttattccagataattaaacccagaaatgttcaaagaaaacacagcaaggagcataaattagattctatcaagggatataggttgttcctcatgaatggatactgacaaaacaattttgtggga

SEQ ID NO: 113769 - DNA, 1122 bp, Homo sapiens
tcggcttaatctcctttgcatctattgctacttttcctcacaccttccaataaaactttagttcggttttcaatgaggtcaacagaaggtgtgatttctttattcacattattttcttccgtttgtttgttcaaagcattcctcctaaaataactataccctttctatctttgttgctgtcatgtgactctcattctaagacattctttgtcagtatattatatttcatttgcttatttatattgatggatttttttttctcgtggctgcctcttttttgatttactactttaataggaaagaatagcttccagtagtttcattaccataaaagcatgatgatggcatgcctgctgattgaatcttactgcatcaacctattatgccttagtgtggttgccagcctgggttctcatctcaccaccattttagagacatccttgactattcttttgactgggtcttcagttttctctattttgtggctgctatttacttgctcatattgcttggggacctcttccagcagtcccctgaagaagagtctgttaaacacaaaagtttggagacttttcatgtctaaaaatgctttactcttctcacatacttaattgatgtgtcaataaagtatattctagattttggcagggtaaaaaactctaaattggaaataattttcctttagaagccattggtccattgacatcttccttccagtgttgctgttgagaaagcccaggccatttgatttctttcctttgcaaataagcttatttgcttgctgaaagacagttagattttttctttgttctaattacaatattttgtcttagagttttcaatctgttgtgctgggttctaggtagcccttttaaatttgggaactgatatacttcaattatgattatttagtttataatttgttgccttctgttatctcagtggaatgtatcctgtacttttattcagaaattggacttctggatttgccctctaatttactgatcttttctttcctattttccattgctatctttttgctctactttctggaggtgtaataaaatgtatctgccacctgtgttgtgcaagcaaagacagatggacaagcacacacacagc

SEQ ID NO: 113770 - DNA, 1030 bp, Homo sapiens
tctaattagagtattaaattctcactaggatttatatatatatacaccacttttcaaatgcaacctttgcagcgtgactttccccagctggactgcctctgctttcctgtattccgaagacttgccctaaagcagactctgctggaatcacagcttggccttacattaagctaatgagtacttgctttgcaaattgagctgttctgtgttgccaatgaaactgcagactacccttgctgcagctattctaaccactccatttaaattaaaaataaaatggcattttcttatttcttattcgtcttacctttatcttattatggataaacaggggcaagaaatagaagtaagactaacatctttcttgtctgaatatgctcaggggaatagtttcatatgcttttcacttatatggctttttctattattatttaaaatgttctttgctgtttaaatatcaatgatgcatgctgtataaagtgaaatttagaatttatcttaattctatctccctcccccagtggtcactatgtaaatacttgcatcattttatattatattgaaaaattaaaatgaaatcctaagtccctcaactgactggatgaaccccttcctggccaagggggccccagagcaatcttgaaaactgagttcctagcaatgatgggatggaatttagaatacaccttatggtaccccctccctagctcactgcctttctttcctaagagttaaccagaaaccagccctttggaaagacttactccacccctgatatcaaccaaccctcttacactgcctctcctttttgtggtttagacaaaacaaccagccagcattctttcctggctagagaccactgaccgcttagtggttctggccagtctatggaggatgtgcagtgagggttttctgtcacctttcagtgtcagagggctgaaaattccaccctcgcaacatgctaacaccaccatgttttgaacgtgggtcctgtggagaggtatgaagcttaactgcgcatgtgcgtgtt

SEQ ID NO: 113771 - DNA, 1057 bp, Homo sapiens
tgtgctcatgagggacctatgagaaaatgaacgaagcaagaaagggaaggtgaagaaaagcaagaatgtggcttctgctagaatatagcctgattctaaccctactgggaatgccaggacaccagagaattgccccaccttgagtcaagggggctgatttttatacttcatgtcactcagacattgggtgtgggctatttcccatccccaggagaggtcgtaaccacccaggcatctccaagaggcctctgtcagtttagggcaattgtccagggaatggtgcagctgagagccttagcaacccaactcaaagcagctgtagcatccactacaaggagggaaggagaatgactagaattggcaatgtggagcaaggagaatgcctaccttacatccaagcccagggtcatgaaggccgaggaagagaaaatgatcatcactttaacaaggagaaacagagttatcttgggagaactgggtttggcaagactacagccagaaggaaaaggaacatcccagaaaatatcaatatgtgatagaattttctcatgatggatcataacatccagaggctgaaaaggaagggcattagaggaagactgagttattaaagatgcacagcaggccgggcacggtggctcatgcctgtaatcccagcactttgggaggccgaggcaggtggaccacgaggtcaggagttcaagacaagcctggccaacatggtgaaaccccgtctctactgaagatacaaaatttagccaggtgcggtggtggacacctgtaatcccagctactcgggaggctgaggcaggagaattgcttgaacccaggaagtggaggttgcagtgagctgagatcacgccattacactccagcctgggtgacagagaaagactccatcttgaaaataaaataaaataaaataaaataataaagatgcacagccgtggaagtctgggtgagaagactgacttgggaagtcttgggcatcctctggtggccaaatcaaattaattacttcattcattatttacaatttcattaattaaaattttat

SEQ ID NO: 113772 - DNA, 1011 bp, Homo sapiens
catgcttccctggcacgctgagttcttccaaagctgctgtggataccatgtgctctactttataatttccatagcaggtagtaaaaaagaaaagaagaggcagaaagaggaagatacaggtgaaataggatcacatcaagatgtgtaaactcacggcaagtgaaatgatcttgttccataatacctccaaactgacagttcttctgagcaaacctagttgatctgtcagttttgagcatctccacactttgatccatttaacacatgacctccatgttctctccaacaccctgacctattgtttctctccagcaacctcctattgtttctgctgcttaattgggaatgatcaagtgttatgcattgtttttctaagtgaactgctcacctagaaaaacagtgcataacaatcagtatgaactgtattacatttcctttgtagcctcttactgtattcagtaggtgttagttaatattgttaaataggtgaaatataggtgattgattagaagaaaccctgacataataagtatgaaataattagcagagcagaggaacaaaaagggtatgtatgaatataaagcaatggagagagattagcaacatctagaatgtgacagttggaagaggtggattgaattgaagggctccaatgagtacaccaaatacttatctgtggtcaaccataggactcaataaatgttgctaaggttttaaccagatatttcaagtaataaagatatttttctttgaacatagtagagcacatatgaaaataaaagatggagaaaatatttgttattcttcctaaacttttacaaacttgagcttttttgatcttatttctattatgaactacaatttttttcccaacactgatatagctacatctcaacaatccacagagatgatgaagtgtggatagtggaacttcaattttactttatttggtcctttctactccaaaacctccactaatgccaagtgagatagtgaggccatctagatgat

SEQ ID NO: 113773 - DNA, 1043 bp, Homo sapiens
gcaaactagtatcaaatagttgttttgaaagaatttgaccctgaagtttcagataccttcacagtcaaaactactcaatgtctcaaatcttttctgcagagtctattttaagtacttttcaacatgtttcttcatttgccttggggccatacctcctcatggatcactgaatctgcttaagcataattacagcaattcaaggactccatttagacattgcattcttttgacgttttggagttactttataaatgtaactgtagcaaatacaattttaagtatgaaactttatatagcttactgtgctgaccaagatgcaaaatagttctaccagttggtgtttgaatgatatataacaatagaaatggttctttcctatttaattttaattgatttgagccaagaaatagcatcctattggatatctgctgaaataggactaaactgctggtctcctgaactgtgatagagaaatccaatcaaaagcttttcctggccaaaaataatactaattgcaagtgaaaactagctttgttctctcggttatgagttccaatggtgaagtctagttccatataacagtgcatggtaaattaggccacagaaacaagcttccagtcactgtttatatgatccacatgttgtggtccaaaaaatgtaaataaaaataccctagggaataagaactttttcctaagatgacagcttttagccttggttgttgaaaatggtgagtatttctaatgaaattgaaaacaagtctagggaaatgaatttccaagtaatggaggagaatctttgagaacgagaagaaagaggagaggagaggaggggaggggaggggagggtaaggaaggaggaagggaggaaggaggggggagggaggaaggagggaggcagacaaagaaaactctcatctgaagattaatggttcttttaaagtcagaaagatcttcaaaataattttcaccattatatagacattacagaccaattgctttgacagagaatattctaattgtgttagtgcaaagagaatgcaa

SEQ ID NO: 113774 - DNA, 1039 bp, Homo sapiens
agcttcaaaattacttttccagctctatattccctattatttctcgctgtttgcttttagacttaagtaaacttcaactccaattctataacttagtaaaagaatcacattgatgtgaaagtccaaaaagacatttgatgttgtaagtggaattttctcattcgttcactctctgtcaatgagaaattaaatgactaacactaaatggagtgctacatatgtctggcattttttacaaaggaatttatatactgtctctcatccagttatctcgcaagctctgtagggtaggttctgttattacgtgttttagatgtgagaaaactgagactcagagaggtaggcaaactatccaaagacataacgtgacagtaatgtgtctgggattattaacaccaaaagttggctttttggtggaatttgtaatgatgagtgattcatacatttgaagtggtgcttgacttatttaatggtacataacaaaccactccaaaacttaatggctcaaaacaatttattattttctctcacttactagtctatttgaagactagctaccacaggggaactcttaggcatttttttcacgtctgttatcctggaatgagtaaactctaatgagaacaaagaataccgaatatcatggagtttggatgaggagtgtgatacaacagggttacagtttgaattaggagtcacgccaaaaggaaggtagaaaggaatccagatcagtggaaaggaggaagcacctaacataagaactaggtgtgccattaagaattatgctttgggccgggcacggtggctcacacctgtaattccagcactttgggaggctggggctggtggatcaccggaggccaggagatggccaacctagtgaaacttcatctctactaaaaatacaaaaaatttcgttgggcatggtggcacatccctgtaatcccagctactctggagactaaggcaagagaattgcttgaaaccaggaggtggaggttgcagtgagctgagattgtgccactgcactccagcctga

SEQ ID NO: 113775 - DNA, 1037 bp, Homo sapiens
agctagcacagtccttagtgcattgtacatttgaacaaatgtttgagtgaataacaagcccgttctccattctggttaacttacgagtactgtaccaattttcttccctgggcggaaaaaattatgaaccatggttcttgtgaaagttattatttttaaatgcctagacattcattcccagaactagaaacataagaaacaagttgatacatcaagggaccaagagatataaatgataataacttggaaatatttaaagttgtaaagatcctgcttagaagagggaagttatcaaaaggggttgagacaatagttgaatgactgagaagacattaatgaaaatcacataggagtatgatctaagaaaaggtacttgacatttttccaagtgagaaaactgcatgatcagataaccatgcataggttggagatgtgtccagagaaatttattcctgaaagacagcgataaagtaccagagctaaaatagtccatctgatagagacattggagctgagatctgaaatgatgcctgtttcttattaagttggattctatttactacacattttttagtgtatagatagaaaagggtacacaataggtacctaaaagcagatagctgtaattactactatttatcttttgtgctctgaggtttctcatactgtgttggtgccacactctaatcagctgcataaaagggtagatcacttgccaccacagaggcatgtgggagaagacagcatgtctaggacattacgctgaggctgaggcagtaggcaaggaagtccaacctgcaggctaagagtcagttttcactcctgtgggaaaagcatgcccagctctcagcaaaagcatagaaatcaagagagaacagtaaaggcaaacaggatatgtagcctagttccagttgaaggtattattcctaacaatgaaaaatgtcaatataactatttccagagttaaaacttcagacacatgctatgacaatgagacagtatgtttgaaactacagatgtccaaggaaattcaggct

SEQ ID NO: 113776 - DNA, 1054 bp, Homo sapiens
gtctgtaaaggaaaaaaacacaaacaccggaggagaatcatcctaacaagccgacaacatatctatgggcctaaaaaacttaaattctttcccgttattagcacttctcgatcgttccaggaaagcccgatttgtagcttggctgccccaggaaggggcctgcgaccagaaagatgcaaagggcgggacaaggttacgagtgggtgcggggaagcctccctaacctgggggccgcgtcccagagctgcgagccacgcctcctctctcccgcccgccgcgccgccggactcttattttgaagggcggcgggtgaaggctcggagcctcctgagtcacccggcgggcgaggtataaagcccgatacctgccccgcgcccggtccgcggagcccgctgcagctcccgctcgctccggacgcggaatcgggcagcagcgggaggcggcccggagagccgaggtaggcgcggggaatcggccctgaggctggtggaagaaatgtgtgaattaaagggagtgcagcgtgcagggtgggccgcgagtcgggagtgcagggctcgggacagggtgggggcggggaggacaagagactcgtcagcgcactttccacccggccggttccttcccgagccctctccctcccccggcccgcgggagcacagatccctgaaagcggagctccagataggaatgtctgcatcatcttggcagggcccagacgggagaagatgctctgctgccacggacgatccctcccgctctcctaactcttctctgaacacctcgcacccccacggccccccgcccctctcttaatcttggccacgctccctgaggggtcagacctggggtgggagagcagagaaagcggggctggcagagacaggggtgagggccgggagaggcgatgacatcattccctggcagctggcggggagagggtggggacggaggggtccccccgacctgagccgagccctcccttcccaagcccatcctcctttctttgggatggttcaccccacctgggcgccattcaaaggaagtttgcgcgtaa

SEQ ID NO: 113777 - DNA, 1052 bp, Homo sapiens
aaagatagcaccaagattttattggtgttttgccctgtggagtggaattgtatgaggattggtggttatgtgggaaattctttacatttactttattatcgtactactttcactttattttttaattaatattttatctttaatttttgtgggtacataggtgtgtatatgggctatttggatatggacatgcaatgcgtaataatcacatcagggtaaatggggtatccatcacctcaagcacttatcctttgtattacaaacaatccagttatactcttatactttctgatacttcagtttctcacaatgaatattccttttctaaaaaagaaaaaaaaaggaagaaactaagtcccaggcatattaagagagagctaattagctgtagaactaattctgacactctatttcccaatcagtattattcagaattattttttacttccctgtaatagttactcaattttagagccagaatttagcctaatctactcatttaacctctaagaaaactgagcccagggggtgctaagttcctggagagtggtcctcaggtggtgactgaggactgagttagcctcctccggcaaccctacccccgtcccaccccaccccaccccaccccacccctgggcaaagtgaaagtgaagcaaactgagaggaactcctccactgtcccttctgcttactcagcagatgggagccagccactttgttttgtcctggggcctgtccttgatggcttctaagactaaaaatcaaagctgtaaatttgtgtaatttagagattgaaggtactgatcgttgttgtcagtgactggaaaccaggcctattgagcaagagccattgttcagtgcctgtcagcccagagagtgtgccgaatgcactggccatcttagacacagatctacttggtggtgttctgtgttttttctcctaaaagaaggcttctcacaccaccactgatgagaaaacaattcgaggaaaacgtaggcacactcagtacatgaagggagacactattaaaagcaaaaagagggttattgtc

SEQ ID NO: 113778 - DNA, 1048 bp, Homo sapiens
ggagtgccacatagccacagtgccacaatgttgtatgctcttaactacctcttttatataagcagggctttggtttgaaatgttgccccatgtttgtcacaaagaagagcatgtgtcaataagagcttttatacagatgtattaatgacagcttttattatataggcccacagctccttatggacattatctcattgtcgctctctttctccctcataggaaacgggtaggtggggacactatcatcgttactcaagaggtgacgggatttcccagggttctggaagaaatgcctgagcaaggagagcatagcgtgacttaggttcatctcaaataactctaatgtctaacatttcttgattaaagaaagctgttgtagaagcagcaaatcagaatccccgagtcaaggaaaactttgtaacaaatttaactgtactttaagattcatgacacagggcattttcaccagttttcaagtcaagactgtggttagatagtaaccagtgaaaaagaatccaacagatacaagccgcaatgtactttgcagacatctcatctacctatctttctcctatttttcaggaaacagatagtggggggcttttcattctctgacctgaaggggttggaggtgttattactgggctcattagggtccagtatcttatcaagttgtatccaatcctggacaagtatttaccaacaaattagtaggcaaggcctccaggatctgctgcgactgggttattctgttgaaatgtctctgcccctggggcagctcaaaatcagacctgtacggctgtgtaccaagttgtacagaatgaatgaacagaagtaacccgaagccagtggatcacgaggtcaggagatcgagatcatcctggccaacatggtgaaacaccatctctactaaaatacaaaaaattagccgggcatggtggtgtgcacctgtagtcccagctacttgggagggctgaggcaggggaatcgcttgaacacagtgggtgaggttgcagtgagctgagattgcgccattgcattccagcct

SEQ ID NO: 113779 - DNA, 1086 bp, Homo sapiens
agcacatagttgttctatggtctacatcgcacaggcttagagtaataatgggaatgtgtgtgttcccagtccttgctgatgtaacagagagctggctgccttcagtttacctttaagatgacttcaaaacctagctcttctagttctcagatgtaaggctgtagtgaaatgcagagaacttcacttccaaaattgtataatttttacttgtcctgggcctgactttttacatagggtctgatttcacatggctctggcacaagttttcttgactgaggaagggaggggagagagaaatcagaagtagagatggacagtacatccattcactcatttcagaaatattatttgagtgtctgttaacagcactgtgattaacaaaggagccatggtaagggagagacaatatgaaaaaatagtagagtgatagatgctatcaggaaaacaactaatgggacaagcttagtcagggacatcctttccaaggagtcattaagctgaagactgatgataacaaccccagataaaggagtaggaggggagagaggttccaggcttgggaaaactagcaaactatgcacgtgtttgttaaaggattccatggtactagaaattgaagttataaataattcctatggttcttactgtctcagggtctccttaaatatcaaaatgagtttgtaaagtctagtgttaccttatttgaacttcagggcaaatgactaaaagggacaaacctagaatagcaggttttaatcagttagcatattttccactgtaggtatcagaagactcaactacaaggagattcgatgcacagggtttactgacttatgaaacaagtctggggtagggtagttccatggtaggttaagacagtgcccccaaaacattatcagggcccaggtattctccatcttttcagtctatcatcattggcacatatgggttctcctcttacagttatggagtgaacaatgccgcttttgacattgcatttctgacacagtgatatccagtgaaagaagaggggcatttcttccttctgtttcttttcagagatgagagaattttaactagagcacc

SEQ ID NO: 113780 - DNA, 1005 bp, Homo sapiens
ttaaagatgggaagcagatctctccaaagagtgatcactacaccattcaaagagatctcgatgggacctgctccctccataccacagcctccaccctagatgatgatgggaattatacaattatggctgcaaaccctcaggtaaagaagggtataggtctgggctcagttctgtgtctagtgcttacaggcatttgattagacaaaggaactatttaaaaggtgaagttaagaagtttctttgatttatgaaactatttttccaaattctacatccatcttggtttcagaggatagaaaaattctttgtttcatgaatacttatttattccatcaggtgttattctactccttccacaaatattattaagggtctaatatgtacacactttctatgtgggtgatggggttgcagtggtagactggacaaagtcctatggtaaaaaataagcaattaacaaataatataacttcaggtaggattacatgaagaaaataaaggagaaaaagagtgagtggcatgcataggctgtataagaaaaactcaacaaagtaaaatattttaaaagaaacacatcagtgggatttaatgtgcaaatgtagacaaatgataattttgatagcattcaggtttatcagttttcatcaaaatgttttctcttgtatttgcctttagacttagggtcaaaaaatcagttgccttcttagaatttaataggaggctgctgggtatcatgttgccagttcgagcctgcaaattcttttttattatgttatacattttagtcactatgctggatataggggatacaaaaatgagtaaaaagttattttgtaccttaagagctcaatgtatgacaggtagttttactaaagtctgcaaaagtagtataaataacacacttttaaaaagaaaaaaaaaggcatggtaaaatgagcagttttctctagaagtcatctttttagaatctctgatctacttatatcattccatattatttctttt

SEQ ID NO: 113781 - DNA, 1021 bp, Homo sapiens
tttatacaggttgcaaaacatagtattcattaaagacatgaatttagaattgatttctttgagtggtatttctcttgattgagcagctagacaaaataatctgcaaatttaaatgtggcgcatttgactcattcttgagaaattctcataagtgaagaggattagcccttaaggttttaatacctggtacagtagtgaaccgcacagatttcatgaacttaggatgtgttttttattcatgaaaaacttagaatagtgaactattaatatttaaaaacgagaaatacaacatttaaaaaattaagagtattttgcattagtgattatgattcttatcccaaaattctagaaagtaataaattctgtatgaataagcataaaaaataaataaatatgcaataacattaaattaaatgtctttacaagaagcagtgaaggcactggtcttaagtgagaatatttgcctgggagtagagataaagacacaaaccgaatgtgaaataccaggtaataattattttgcattaaactctttttatcgggaatagtatgatattttcagtgtcactccattcatgttgatttggagctgacagttattttgtgtaagcagagatttaattttatattgaaagtcagtgcaaaattatgaataggatatactaataaatacaaagtaataacaaaagtcaaagcagtgttctaaataaaaattctgggttccttaaaaattattttaaatttatctttgaaatagttttcttagattaatctcaggatatgagaaagtcaattaagtgtgagtaaagttagtatcattaaacaaattgtctattaaatgcaagacgtggtaatatacagaatttatcaggcattaccaagtctaggcacatataggaaatgcagcactcagaatggtttcaatgtagtagttgatgcttgtaaggtaggggagcttattcagacatagtagatagtttctctaatgctgtctcaattgctggcctttggctacctgtac

SEQ ID NO: 113782 - DNA, 1034 bp, Homo sapiens
ggctcgaatcccgactgatatgacccagcggggacagaggatccccctcagtgccacaagtacattccccaccgagcagcgcgcctgcgccagttgctctcatgcgtcaagactacaggtcccagcaagcatcgaggccctctccaggccattcttccgccggcggggagctctcgtcggcgtatttgttaggtgtggcgcggaagagtccgtgcgtgatgacgtcgacgcggcgacgtcgagctcttcctccttttcacggcgtcttgcattactattgtgcggctgcaggaggtgtcgagcggcgttatttttttttgcggtttgcctttttttttcttttttttttttttggaaccgcggttgtttaaaagcctgagggaacctggagaggggctcccactccctaccctctttcctccgagtttgtgactccgagatggacaaagtgtgtgctgtttttggaggctcccgaggcattggcagagctgtggcccagttaatggcccggaaaggctaccgactggcggtcattgccagaaacctggaaggggccaaagccgccgccggtgacctcggcggtaggtaccaaactggagttgtccagttgtatggccgcggtccaggcgcctaaagaaaatctcctttgtaaaaagagcgggtctggcctttagggctctagggttactcgatgtagccgcgtgcaggcgctctcccgttccaagggtagaatgcgtctcgtgcagaaacccgcgatctccctatgcctcgcagaatgccggccacgcagcttgccgccgagggctgaacacttggggtgttctttgagacctcgtagtcttttgaggccccgctatacgcaccctccgccctgcggctagtgctaacgctgaggagcttccctgttgtgggagagagccacgtaacagtttacttttaatgtagggaaaagggcgagttctcggcccccggagacagggctgggtcgaaaggagttcaggcaggaaaggtgggagtgcaggtaccaacggctc

SEQ ID NO: 113783 - DNA, 1011 bp, Homo sapiens
gtaacaatgaaaaactattataaataaatgacacagagctgctctgttcttaaaaatcaccacatgatcaatttgagagacatgcatgaagatgggactcaggagattttgttttaattattctgcccgaaggaaaacaatactttgctctttgctggcaccgctgtacagagaagcttaaagagactttgaaaacatgatcctgttcatccttctcaaatcacaggcagacacagttgccctcattttttgaaaggggaaactgaggtgtagacaaatgagtgttttctgtgtttagcaggctatttaaagactcatatatcatcatatccaacatgtttttatgtctctcccctactcagctgttctgatcattgtatttgaaaactcaccaaaaaggggagaaattaacaaaaggctatagagaaggtgagcttttacttttataagctgccaacttcttaaaataattttaaaatgaggtgtgtgcacgtgtgcctgtgtgtgcatgtgtgcgcacacacatacatacacatgtttgagtatgccttggtattggggtcaggaaatagtaaggatagaaagataggaagaagtgagggcacttcattgcagccaccaaacccaggagtacctgcccctccccgaaggctgcagcctattagccagagggcctgggatatagccagcgactggggctggattagcgaggttgatgaaaaattatgtactttatagttctgtcagaccagggtacccttggaataaaatcttttagaatttgaaaaaatatccacttactagtgaatacaggacccccatctgagacctactgctgcccaggatggcagtttataattaatatttcatcaggggtcaaactgcagaccaccaagaagaccctgtgagactgtattgaaaaatcaacttgttaccctttgccattttttaaaaaagaaaaaagtgaatccatttgaaattcatagataggagtctgcgactgcaaaatgt

SEQ ID NO: 113784 - DNA, 1082 bp, Homo sapiens
agccatgatcatgccactgcactccagcctgggtgatagagtgagatcctgtctcaaaaaaataataaaataataaaacaaaataaaataaaataaaatgcagtgacacttctaccctcatatgctggagtttgatgggggagcacattgatttagatgccgcaaaagcagcatttagctgtggaattacagtcgttacccatttgggtatattttactctgcctggaagagttcatgtgtttcacggttgctactaggtaaggacgcaggccctgggagatcctggttcaacagtgactgtcttatgtaacagagtcattctctttatgaccaccttaggaaccgctaaggaacataataagaaatacacagaactgattgtggaactgctctttctccctgcgattcagaggggaaaagataaagccacacagccctggggcctcttgcttaagaacacatctcagtttaaccaccaaggccgttatgataacaaatgtcagtatggaggtgtgaacatcaggggctattcaaggacgcttctctgatcactgccatgtctatctgctgtgatcacgactattttataaacacccttcctacccaatgccatcagaattttagggacgatgcttcagtaattatctttttttccctccttcctccctattttctttttcctctgaatagctgccaaagtaactagagtcatataattttagagctggaagctcagggagaggcttggatcctgatgacccaagcatgggaggggcctgaaaaaatgtcaacagcgctccgttgttgatcccacacatttacttaatatgagctggtgctggcagaggtttatgttggaaaggctgcaactttctgtgccccacataaatgagataaaacctggggaaaggagtgttggtttaaatcagaaaggctctggtttttatttgatactaaacaaatcatgcagtttacaagtctgtgacactctaagagttaactagcagttttgttttttttcttttttttgagacggagtttcactcttgttgcctagtctagagtgcaatggcgcaatctc

SEQ ID NO: 113785 - DNA, 1484 bp, Homo sapiens
caatgacaagaggtttcatggtcttaaaaagatactttatgtggttgaagatgaaatcattcctaaattaaccttttttttaaaaaaaaacaatgtatattatgttcctgtgtgttgaatttaaaaaaaaaatactttacttggatattcatgtaatatataaaggtttggtgaaatgaactttagttaggaaaaagctggcatcagctttcatctgtgtaagttgacaccaatgtgtcataatattctttattttgggaaattagtgtattttataaaaattttaaaaagaaaaaagactactacaggttaagataatttttttacctgtcttttctccatattttaagctatgtgattgaagtacctctgttcatagtttcctggtataaagttggttaaaatttcatctgttaatagatcattaggtaatataatgtatgggttttctattggttttttgcagacagtagagggagattttgtaacaagggcttgttacacagtgatatggtaatgataaaattgcgatttatcactccttttcatgttaataatttgaggactggataaaaggtttcaagattaaaatttgatgttcaaacctttgtatgtcccttgtgtcagtccttaaaattttgctttttaaaaaaacaaaacaaaacaaaaaacacgggacacatttgacctaatttgtacctcacaaaaattctttgcatacatctcaagcggaagatgtctacaggaatcaatttggtgattatgacacattttacctctgcaactaacaaaccttgtttatttctccaagaagcttaaaaagagtttgtggagtcgcacgaggtcatgtatggcacttgtgttcccctcttcctcttccagttactaaaataatctggtgagtgctagttgtcttagccatagaaggaaaagcagacctatcaaccaatagtatgataacccgtaagtctcagcatggcttggggacaaaatctttagattcaccatggttttaatttcccatgaaatgaaaggcccatgtaagtcatgttaaaaactattttcttattaacttttggctactgtcaaatgacttatcagaattgaaaatcaggaattctaggttgtattgtagcttttccaaaaactatctctgtagccacctgggcaagttgattattacttagtttcctccttttggtgtcccatctaccccactgggtgaggatgaggagcaaaggagataatctcactgtttttgaaaagtgctattttaatgtgtggcattaagtttatctctggtttcaaatattcatctcactctcttggagtatatgatataatgcttttcagggtctgattggttttagaaggaacaaattaaggtgatgtttccaactgctatgcatttaactttctgttcctataatagaacatatttgcatacctccagaagaacattcaattctctgaatatttcaatc

SEQ ID NO: 113786 - DNA, 1097 bp, Homo sapiens
tttgtgtgggttttgttagtctggattcggatgtataaggtgtgccttgtactgtctgatttactacacagagaaacttttttttttttttaagatatatgactaaaatggacaattgtttacaaggcttaactaatttatttgcttttttaaacttgaacttttcgtataatagatacgttctttggattatgattttaagaaattattaatttatgaaatgataggtaaggagaagctggattatctcctgttgagagcaagagattcgttttgacatagagtgaatgcattttcccctctcctcctccctgctaccattatattttggggttatgttttgcttctttaagatagaaatcccagttctctaatttggttttcttctttgggaaaccaaacatacaaatgaatcagtatcaattagggcctggggtagagagacagaaacttgagagaagagaagttagtgattccctctctttctagtttggtaggaatcaccctgaagacctagtcctcaatttaattgtgtgggtttttaattttcctagaatgaagtgactgaaacaatgagaaagaatacagcacaacccttgaacaaaatgtatttagaaatatatttagttttatagcagaagcagctcaattgtttggttggaaagtaggggaaattgaagttgtagtcactgtctgagaatggctatgaagcgtcatttcacattttaccccaactgacctgcatgcccaggacacaagtaaaacatttgtgagatagtggtggtaagtgatgcactcgtgttaagtcaaaggctataagaaacactgtgaaaagttcatattcatccattgtgattctttccccacgtcttgcatgtattactggattcccacagtaatatagactgtgcatggtgtgtatatttcattgcgatttcctgttaagatgagtttgtactcagaattgaccaattcaggaggtgtaaaaataaacagtgttctcttctctaccccaaagccactactgaccaaggtctcttcagtgcactcgctccctctctggctaaggcatgcattagccactacacaagtcatta

SEQ ID NO: 113787 - DNA, 1063 bp, Homo sapiens
ttagaaatgaaaatgtatgaactacagagaacaccagagaggctagaaaaataaaggaaacaggaaatgtatactaataaaagattgtaaatgcccattcagatggaagttaaaataccatagcattggaagtctgtggagcttctttatattgcaagactctgtttcttgaattgtaccttggcagttatcaccaaaagttgagttaaggtcacacagccaccaagaggcagaggccattcagggaccggtctgtgagccactctggtcaccccataatgcctccacagcgctttgttcaaagggaacaaggggtgctttccaaccaaggtgccagtcagctttatacatttttcctttcttttttttttttttttgccttttttttaaacaaaaaattttattcattcatatatcttattttttaaattgtggtaaagtatacatgaaaatttactattttttcaagtgtacaattcagtggcattgagtacattcatgttgtcatacaaccattcactgctatccgtttctagaactttttctcatcctaaactgaatctgtactcattaagcactaactcttcattccccctcctccaggccctgcaaccacccttctactttctctccccgtaagtgacttctgggcatctcataagtggaatcatgcaatagtcttccttctgtgtgcatgcagcttatttcacttagcataacgtttgcaaggttcatccctgttgtagcacgtgtcagaatttcattcctttttaaggagctttgtacattttaaaaaacagtttttctatacaactaggctttttctttttgccacttgacatgcttattaagaattaaaggtactatgctaagtcctatgaggcatataaagtgaatttagcatcatctcatccttcaagcagcttatggtttggtagaataaacgagacggacacagatggtaataatacattgtagactgtgctaagtgctgtaagacatatacatggaggcctctgcgatttagtcaagcatgaaattgcctccagccatggggctggag

SEQ ID NO: 113788 - DNA, 1064 bp, Homo sapiens
tttgcttaaaaagtgtatagggcattttaatgtttcataacaaattatgaaacatttcattttctcacacctaaaaggttaattttcagaaatgagtcactactcaacaattttaaatatctgaggttgcctttttatgagaaaaatcacaaactaattaaaaccatgatattttaatgtcttttcaactttttatttttattatttaaatattttattattgctatatacacactaaatttttccagtaactaaagctttaataagcagaatagattcattttaattaatcaaatgttaagtcatgtcttatatcgtgtaaaaaagactgaatgaatattctatactggtccagcatgtgtgtgcatgtgtggcatataaatgacttgaacaggagcatctttattacatcaatggggaacaggcttctctagaatgaaatggaatgttttaggaaagtatttttcctaagtgttataaaacaacattgctttttaaaataaagtttagtgataatgtacctattaggcttcacatatttgtggggcgaaaattcctccatatgttgagaggaaggaagatctcaaacaaacgtgcaaagtcctgatggtcaatatccttggtacagtattctctttctgtgccagattctttcttggcgatcaccattcccccaccctgcccccatgcacatccacacgtgctttaagtatccagggtaggggaaatacttgttcactgatttattagctgattacacatcactgtggaatttctgtcagtgtgtcatttcacattgacaaattttcacttagaattaatgacaattccatgttcataacctcctgagatacatgtatatttcttttatagtatccctacatctggtaatcaggttgtagaaaataaaatttgtcattggaatgatacttttggctaacagacatttctgatttatggtgtgcattcagtgaacaaatatgtaatggaaacatatatataaaacttcatgtattgtcagaaccagtaaacacagtgaagtgaactgagaccaatttaaaaat

SEQ ID NO: 113789 - DNA, 1002 bp, Homo sapiens
aaacatcagtgttaaattattcttttaactctccctggttttgttactactttcagaacttgttgaaagtaaaataattcccatgtgtgcctatgtgtttttagtttggcaaatattgttttttacagatcctccctgccctagccccgctctaatcccttcttcaaagtattcccagtggagataaattgtttcctggttttgcatcaacaaattccctgcagaataagtattcgtcaattgttaaagccagctctggcagtagatggagaggccgtggtgtttttctgatagaaactttaattccaaatttcattgttcctgctacttttcactaaatttaatccttttaaagatgttaattttaaaaatattgatcgtatattttaaattttatcatagaaaaggtttttttcaaattgccagtaatcagaaatggtgacaatactgtattattgtttgccatcttaatttctttatatttggaatcctgttgtgtttttaaaatttatttaactgacattgtgtctgactggctcgagagcacactgaagacttctgttctcttactgctgtcattttactttgaaagggccaagtattctagacagggacctcatagctgttctgacccattaagctctagaaacttaccagtttactcatctcagttgggatggactaattattctggaatctgatatacctgtctcaccagactactctggtatctaaagtatcttcctaatctgtgattgggaagagaagagtgaatagccgtggaactttctgttaagtagaaagatttttaaatggtaaagggagcacgtagttgaactgttcacaaatatatgtgccagtgtatcacatagtaatacatatgatacatatgaaagattatgtaaggtatatgtaagttatgaaacttgtttttttcctcacattatgtttctgattcatccctgttgtgagctgtggttcattcttactgaagtaaatact

SEQ ID NO: 113790 - DNA, 1073 bp, Homo sapiens
tggcttgtgtgttttcctctgtgcaccctataaaggttagacctttgatgcacccaaggtatcctgttagcttggggcagggattctctgtataatttatctttgtagcagcagtgatgaacactgcacataataagcacttgtcccaaatgtttcttgacttcacttatttaaagtgaatcccttgatggactttttttgtttttatataatttttaaaaattttttatggagacggagtctcaccatgttgcataggctggtttcaaactcctggcttcaagccatcctcccaccttggcttcccaaagtactggaattatgggtgtgaaccaccccccttcccccagccccttgaatggatattagactctagggcagtgctggcaaactcctaggtgggcgtgggtcactaaatgattgcaaagggggatgaatccagtgggacttcaaatatccattttagattgaatcatgtgtggcatgctaagatatcattttcaaatatttagaagtgctgtcatttatagcagtgaagattccataggttttatcatattttcctaatgttctcttgagagttgtgatatgcaagagatgctctttagcaccactgttctaaaatccttgaaattattgatcttgaaagagacttttctttgtcactaatgtttgcatttgctgtgttccccagttttatcactatgtattccatttaaaactatcagttaaaaatatgaatatattgtttttgtgatgttagcagtgaaggagagaaccagttgtaaaaggcccaaaatgtaaatgtccccaatgagccaaaaattgcttttttcataggctatttttgccaaggatttgaaatctcctttggatacatgtttgttttctcaagtcaggatatgggttttgtacatgtctatatctgtggttgagaaattctttaaatattcctggggtctcttttgctttccttgagtcagaaaaatttcattgtgttggtatggtacgttggtaaatttcaagaaagggaaagagaaatttattagtcctgctaacgtcattcattgggc

SEQ ID NO: 113791 - DNA, 1031 bp, Homo sapiens
tccttatacaccatccctcaaatatttggttagagatctcagaggagagtacattagttttgggggtttttggttttttttgtaagcgaataatctctgatagctttgaaatagtttcttttaggaggaaaaacctgaaaataaagtaatgactcctttattggaagtaaggtgttgtcatgggtgaatatatacctaactggagtttgttacgccaaataccagagccctttttaaatttctgtaatttttattaaatactttcttgaatacatcaagtattccttatattgattgaacagaaacgatttggcataaattaaccctctcctgatgatttagggttgccagtatgtatactcattattgcaccttgtcttaatacagactctggggttttctctgtcttctgtaaaggtcagttgttccttcttccactgttcttatgcttgcgtctatcagctcctcattgtaatttttttgtgagttgggaaatcagatagttaagcttactgtgaattctctgttatgtaagaaagggttattaaggagtttgagtctggtaactttttgggaagttgtatttggagggaggaatcatgattctttgcatattttagagagcaaagtctgttaagaagtctgactgctaaatactgtaaattatttattgaatatattgaaggtaccttgaatgaatcattgactcctaattacttaaagcaaaattttactcctggattacttttacttaacattttttattcttaaatgcttctttccattaatgaatcagttaattcatgtatttattgagtatgatgctacctagtttgcatacctgtatatgtatttcagcactagctttcaccagctataaaaaggcagtaatgctgctctaattcttaaattagtctttggctgtatctgcattttagattgagatggtggtgttcacttttggtccctggtctgcagctgcccttccctgtgagtgactgaatcttatccccaggctctcctggctccag

SEQ ID NO: 113792 - DNA, 1050 bp, Homo sapiens
tgtggccaatttttaaaaaagctactgacctaaagtcatttgctgctgttgtgtgcctttctgtatctccctttctaggggggtaaggaatggttaaatgagattagcatgggctttgatgatctcattaattacttagtttatgtattctgatctttcttgctcttttttttttttctttaaatcaggctccctcaaatttttcttcattataacattccatgtattttgcttttcactgctgtggaatggtagtgttatggtgaccaggaaaaccttgatatgtagacacgacaactgtgatgaaaagcagaatgcttttgatttatgaatttgcaactgaattataaatgtcaagtgactgtgaaagacaaaccaagtgggagtttaaattaatttcagaaacaaaatatactcttttatctatagcgtgatttgcattgtctggggggttcttcattcacttaccaaaggtacttatccacctacctctttcattcatattaagtgcactaaacaaaagagacaaactatgagtcacaacatttggttgttctgatgtcacgacattaagtagaataatggcattagtcagaatattgtttctcctagaagtggttatcagaagtgtgttgctatatatataatagctttattcattgtctcttctgttgtgtttaagggggctgtcagcaacatggcagccactgcttgatcatcttcccttatctgccagaggaacaggtgtctcttcctctttctaagggtaacatgtctctgctcatctcttctgttttcttgtcgttggtgggtcatatcatcctgcaacttcaatctctccactggattctgctctttaagctctgcaagttaactatttttacttttaagacacacacactcacccaacctaccctcaactctgctactccttcaagctaccatcacttttatcactttccttttataaccaatccttgaaaaatagtgtaggctcatccacatttcctcagactgactcacttcctttaacattgcagtcacctttct

SEQ ID NO: 113793 - DNA, 1051 bp, Homo sapiens
ggaaatctaaaaaacttttgggtatgggtgtggtatatgtctgtgagtctgtatgaaaaataaaatagaaagtgtactgatggatgattccatgctgcagtaggcagactaatgtgtcattccctttccctcccctcaagatgtttacatcctaatccccagagccgtgtgttattacatggcaaagagttaaggttgctaatcagctgacctggagaggagatgatgatcctgggttatttggatgagtccagtgtaatcactggggcttttagaagtggaatagcgaggcagaagacaaggtccgagtgatgttatgtgatgaggaactcaacctcctgttgaagatggaggaaggggccccaaggcaagtgatgcaggcagcctctggaagctggaaaaggcaagaaaacagatttttcccctagaacctccagaaaaaaaacacagcgctgccaacaccttgattttagctcagagagacccattttgtactctgacctccagaactgcaagataacaaatttgtgttatcttaagccatgaagtttgtgctaatttgttacagcagctgtgggaaacacatgtctactgaaatgtgtttagatggtctacttgtgtttgaagactatctgcctgtgtaggcaatattttctagtgcagatttttaattcttgcagaaggtatacatttagaatatgtacttaatatatattctattcaatgatggtctgctcactgttcctggaaacagctgaaaaagtagaatagggaggtaactacgtgaacaaaaatagtagttaaaaatgcgttatgttgcttttataggaaatgaaatccttaataaaattcagttcaggcatttgggattctgaatcacttcatgactgtgatttgtagagttcccttcattcgctcttgtgacattattttgaaaaatttctcttcctgaattgaaaaatgcaataaactctgttctcgtgtccagggatggtacatcttcctgtgggaaattccactgtctatcccgtagccctttgacattcctctt

SEQ ID NO: 113794 - DNA, 1005 bp, Homo sapiens
tagacagtcacaccctcaggcctgcctatctttttctactttctcctttaggcacgtagtgaattttttggccattaagcatgacctcttcagtgtctgtggagcagaacaaagtgacagaatacagatgagcggggttgcacatactcctagctcagtttgatacttcagtgataatatctatatagcacaccgaggtggaaatattaaaatatgctggggaaaatttgtgttctctagttaactcccccttttttgggtaatcttatttttggaaatctgagctctctttatgaaatacgtgtctcatgcttcaatttggaataaactgtagctgagtcttatttcaaatattctgaaataatttgatttcaaagtaaaacttgacgaagtaacaccttgcatagtaatatacaatttgcatgaatgactttgccaacttcagacacatggttcagaggggccagtgaaagtatcatctgggcttctgtagtagttttatacccatcacatcttcaattgctctgacttaaagtggatatgacacccctggcagactgtgttttcctgtttgacttaagcaattgatatttgaacaggtgaatgagcatagatgtttatgattgtcttgcctgcctttgattaaaaactaatgtgaccacttttcagtacatttggttttattggaagaatctattgaaggtggtcttgtacggatactcccctgttgcccttcctttggtttctggtaacattaaaaattacttacaaattacatttcactttatagaatatcctgcagttacaaggttacagtctttattactgacctaccaccgccatacggatttttctatcagctgaacttgctgtatttctggccatattatttgtagcagaaactgaggtttactatcattgctatatttataggtggattatccggttttctccaagtaggcaagaatgggatcttgaggacagttagttgatgatgttagacca

SEQ ID NO: 113795 - DNA, 1025 bp, Homo sapiens
cttcaactgaaaaatacacttagttggcacaaacacatgtatgatcaaaggtgatctgaataaaatatagttttgattgatgaatatgcaaggcttttctttaatgtttgaaggaagaatgatatcacagttttgttaataaaatagaggttaaagaatggaattgtttctagtaggctgcgcagccctaaatcagtcaaaagtaatgaagcagttttctgaaacagattgggtttccttacgaaggaagccacctttgttccatgtcactgatgcattccttataggtgaggtcactctgcattgctgatatcttcctcctttcataaaagggagatggggaccgctcccagtgcattccatttctcacaatccttaaaataaggcttaaatgtacctgtccattaaaagcttttgaaggacgaaagccaacctcagaggctttgtgaaccatgaattgacaatgaaagacagtatgcttctgtttttcggatagcctgtttaaggacaaaagaactattcagtcttacatgactttcatttagttataataaaagggatgaggatggtcatcttgttttgtgcacgattttaaggctgcttgactgagattatctgaaacaatactcttcagttattctgactaacaaagtcactgagaggaatgtgtgttacagcgtgtatacatgactttacgtgtatttgtttagatataatgaaatttaaaaagtagtttcctaccttccaccctccctgtaaaacctaaagggtgaaagcattttgaggatatcaggttaagctctatgtattgacatagtctcctaactaaccttctgtccacttgtgtctcccagagtagctcccttgaacctcagttagtgtgacatgtcactcttgctcaaaactatgttatataatggtccattagacttcagtcgcataactgagtcctgcccttttcctccaccttatctcctcagcttaagtattctgctccagccatacagactttcttgctgtttatc

SEQ ID NO: 113796 - DNA, 1034 bp, Homo sapiens
ctagaattatccacctctgttctgccagattattatcttcatctaaagttgttacactgcttgaaattccaacaattagagattgtctgcatattaaaatgtcctgcactttagaaccatatttagaattacctaaccatatttcttttctcagtttttactgatgtgagaacccctactttgatggacagggcatttattatgctgaaagagcggggaggcaggtaactgagctgctttgaggtcaggcaagcctggatgggggaagctgtagtgaggggtttagacagagcgaccatgtcgtttatcctctaccctgggacatttttgagagtgaaaaggatgttgttgataattttgcagagtcaacaggagtaagtcaggactgtctgaggcgaacagggccataagtttaccctagctgagagcagtgtgaatgagcacaggatatagaaaacaggattcattaagcataggggagatgccagagagtacagaacttttcaaaagtgttcaggggaaatgcagaggaattaatttcttcctctgaatgttccttttttgtgtgctctgtgattcctgctggacagaaagtgtctggtaataggaaaagcaggagatttattatcaggcagaacttcctctgttccttgttatctgtgtggctcttgggcaagttacttccttacctaatttcttcatttgtagaatgatgaagagctgctttccaagtttgtgaggattacatgagataaggaatctcaaatgcccaagacctagtacatgctcagtaaacattagtatcttcagttttccctctttctagaaattagaacttttaataccatatcacagttatattgtaaaataaactctggggcaagtggattggctcacatctgtaatcccagtgctttgggaggccaaggtgggaggatcagttgtggccaggagtttgagaccagcctgagcaacatagtcggatccccatcccccttctaaattttttttttaaattagctgggcatggtggc

SEQ ID NO: 113797 - DNA, 1038 bp, Homo sapiens
cttaaggattaaggaaattattattattattattttttgccagaaaaaactgcttatcaattcaggaatgaatgaacaggagtgaattttcattattttaatatgtaatgagtggtcctaggcaatcaacatttatacagaaagaaagctaaagttagctataggatgcttcatatctagttttaatttatgtgaagtaccccaaaataataccgtagcaatgtaagtaagagtgtcagtgtgggatacaaatatccctagcatttgtataaagttcctggaaatgtgagcagtaatgttgaaaagctgaacattagatatgttataaggagattcaattcttgtagagctaaaaaatattcttacattcctaattatataactgcttagtttttaaatatccttaaaaaactttaaaagtttttaaaaacaaacacatagaataaacattatataataaaactagatttcagaccttaagttttcatttgcccaccttatccagagtgacatttagtttactaatctctattatttcagtttttttcaaaatctttgaacagttttttccccattattgaacttgtgttttatgcacagtgatgattatttttcagcatttcatatgctttttttctgccacagttgaagtctgaggctaaatatttttgccatctttggtagatcgtattattttcattcctgtcttaactgtactatagtagcacttttatttttcttttttctactcatttttgtaaaacaagtctgaaatattaagaagacactggaagtgttaacactgttgtacaaagcctgtgatgttgctgaagctgaagtgttggttaaaggccccaaagtgtgacagcttgaaatgtttacatagcagctgttccaagaaagttcaaatctggcagcagaaaagtactgggtctccatatatgaagcatgaaaatatatgatgtgtggaagctgagaatcacctatatggtggaaagaatgaggagacctgctttctagtcctggctatgtgatttg

SEQ ID NO: 113798 - DNA, 1093 bp, Homo sapiens
gctggataggtaatggtagacaaaccattcttagcttttgaatgtgtagtccatcttgtgggagagacacattaggttttgaatgtatagtccatcttgtgggagagacacattaagaaaataataacaatgcaggcatgtaattaagtaagttctaagacacaaagctaggggagaggatagaagaaagacctgcatttagcgtgagggtgaattgtgtgtgtgatcttcaaaagcttcctgaggaagaggcatctgagctgagatcttaagggtgaaatgatattaattagggaatgggggctgggcagggaaggggcagaggcgaagaatatttcaaaggggctgacctaaacaggaagggatgtgcctcctaggaagaactgacagaaggtaagtgtgaactaggcaagccacagggatggtgtaagatgaggcctcaaatttgataatgtagaaggcatcaagaactgccccaagggccacgtagggtgaagggtcagatgggtaggatagataggaagtgctctgcatttgggataagaaagagggaccattgggactgagacgattagcagggcttcagaacagatacgggattggagcttgtgtcaaagaatggagagatcgggaaagaaaggtagggaattctagatatgagggaacacacatgaaatttattttcccctgtaaatgctgtgtctgctttcatttctccatagcacagtcatacctcctttctccctctttccctgttgctgactgttaggggctgaattatgtcccccaacattgctacgttgaagttctaactcctagtacctcacaatgtggccatatttggggataggacctttaaagagggggttaaggtaaaatgaggtcacatgcatgggccctaatccagtaagaccagtgttcttataagaagaggagatgaggatgcagacacatagggaagaccatgtgaagacacatggagaagatgccacttaccaaccaaggagagttgccttcaaaggaagccaaccccactgacaccttgatcttggacttccagcctccagaactgtgaggaaatacatttttgttg

SEQ ID NO: 113799 - DNA, 1032 bp, Homo sapiens
agccttataactgggataaaatagttgaggtggatggaacaggaaatatgtctgttactttgctgggggaggatggaggacaaaaacaaacctattcagtagtctgagttgatgcaattgatgcaatacttagaaaaagaacagccttttttctagtttaaaatagtttttcgagccaggtactgtggcactcgcctctagcccctagctacttgcatcttcagtcctagctactccagaggctggggccggaggatcacttgagcccaggagttcaagtctagcctagacaacatagcaagacccctccccctgctacccctcccccatcccctgccccccaccccccttttttaaaaaaaagctttctcagtaagttactagtaccttttgctttcaaatattcagaacagtcagggccatacatatagttcaaacacctgaaaggtcaatacatttctagaaaagactccttttaagagtgagaattctgtaacatgaagccacatggatattgtaaggcacttctttggacgcttcccttaggtgagtgactgtaataaatcccaaatgtgcatcctcctcccttaagtgttctgacacaaccaagtggtgcagtgagcctgtttccatatgttgtgcaaagctgaaagtgataacgtggaatgttgcttcagtttattagttatgttctgtgtttggttaggctgtgaccatgtggcctcctcatgcgtttagccaaagtatattgaatgttatcaacagatttgaacatttccaatgtgtgacgcacatcttgttcccaaaattttagtgtttcctgcctaatttgaaggagaaaaggagagtgtgggattggaatcaccatgggaatccatcagttttttacctctaagtaaagaattcctgttggttttaggccaaagtcaagcagtggaatgagccatagggagagggacactgctgatacctgtctatggcctaagaaatgtagctgcagaagttaaaatgcatatatataaattagataag

SEQ ID NO: 113800 - DNA, 1012 bp, Homo sapiens
ttgcaaaaataaaaagtagtcaagagcatcagtaattaaaacaacttcatttttgtaagaagaaggaattctaaattattggccaaactggtaaaatctgcttttaaagaacaattaatctagatgagaatatttttttcaaatgtcttcagtaagcactcaaaagtgatgtctttcatttaatacaggaactgcccattgggatagcattagttcccataattcgcagatgtggataccaggcagttttaacagaatagttttcctactactttctcaggctcatcttttgtaaatgataggaagtatttaagtatatagaccattttaatcactggaaaacctgatcagaaaacagtttcatcattaaggctgtcaggtttcttttgacatatttatttatttaaagatagtgagaactctgggatagggaggttttcttttccttatttggagcccacatgttgtgaaactgatctgcttacagtgcttttcttagatttcctttattttatggagtttacttatttggactcgaatattttaatcccagaaccagtgatcaagttgataatttctgagacacctgatgtaggtctgtttagcttaataaaggtgtagatttgcatctttggaaaggttttgtttccctgttaattagactagggaaggcatggcttcctggaatactgtatcttagttgttgacactgccttacctgttgtgaggaatgcattgaatgtttgttcactgataaagaggaatttaaggagaggctcaaacactcaacttaatgtcttttgaattttaagttttcttgctaacatggaaattgactatgtaattctcatttatctgaactgctaagctcccaaaattgaacttcataggtaaattatttggagattttgatcatgttagtattatttttctggtttatatgcttttcctaatttacttcatgtttcttctttagcatgagaaaaattacttgccaagaaactcaactaaa

SEQ ID NO: 113801 - DNA, 1008 bp, Homo sapiens
tgtgtttcagagtttatcaactactgccctgaagggcgcttttctgttttagctgctttcaagcaaatctgtgtcttttagaattgtcaaccttcagctctttttggttgggcaaaattaaacagttctatttttaataacagcgaagaaacatatgtatttaatattgggatcatttaccacgagcgattacatgaggcatggtttcttaaacgctaaagtggcttaaaaaagggaatttagttggatataaaagtaaatttcaggtagaggaaactttcaatggcctctgtcagcttctcctatgagttgaagactttattaaggcagctgataccactttcagagcttaagaaattatgttccttattgcacttcataaatccttctgcgggaattatgtaatactctgtgccttgtgtttgcccagtgaatccctagatatctttaggggttaattttgcgttgtttagaaagcctgttttgttttcagttgttgactttggagtttaggaacccacattccaaagcaaagctacactattcagacagggaatagtgtacttttgggtactttttgattcttggctcctttgaactttttccctagataacaacactcatgttctcttttcccccttttccccatgactctagagcaaagtctgaaatggatgttacatgagtcattttaagggatgcacacaactatgaacatttctgaagattttttctcagtaaagtagataaagatggatgaatcagccttgttggatcttttggagtgtccggtgtgtctagagcgccttgatgcttctgcgaaggtcttgccttgccagcatacgttttgcaagcgatgtttgctggggatcgtaggttctcgaaatgaactcagatgtcccgagtgcaggactcttgttggctcgggtgtcgaggagcttcccagtaacatcttgctggtcagacttctggatggcatcaaacagaggccttggaaacctggtcctg

SEQ ID NO: 113802 - DNA, 1051 bp, Homo sapiens
aagtccttttacaatcagtgtgtctcctgaactagcacacaggctgtagaaacagtcttagaaatcattgaaagatttgattatgaaagaatagcaaaattatatttcttgacatataaaaagttggtttaatgcctttatttctctttaaggaccagaaccaggaatactatatcgaaaaattagtctgtggatttaacactgacttagcatatagcttaaagttgctcttttggtttttaacttcctccatacataagcttcaaggacaataagatgttaaaaaggaggaaataattatttttattttgacactgtgacagttttggtaactaggatcctagggagggaaatgtttgcctgttgaacttctttctgttatgagaggatttagttaggtcattaagatgttgatcacacagcttcaatcacaatatgccaagtataacctggtttcgttagaggtgtctacagtccagatgttcttcgtaataaaagcaaagtttttgaacctctgagtccaaagcaggctggttggcataatatgtaatttgaaaaataaaatcttatcttgcagcactatcagtatgttgaatttattatgtatattatttctaatatccgaaactaaatacttgattttttaatatgtgtgtttattttatgatattgctattaaatttttattatctacctgaagtatatcaattgtcttttatttattattttacttttctcaatagaaggcttttacatcaagctgataatacttttgttggttttgtacctgatgatttctttcttcataatggaagaaaatgaattcaatattttaattctttacaatcctgaaagatgggcatgattttggggaggttgtgtattaattcttaaactattacaactattagaaaagggtataatatggtagaaaaaaattgttttagccatatttcaaaagatgttatatatgtgcaggaataaggatgatcaataagatttgtgccatctccagtcgattagcagtgtgtgactctggagtgttgttatg

SEQ ID NO: 113803 - DNA, 1040 bp, Homo sapiens
cttattcacaaggtagaattgacaccctcttttgacaactgagtggcttcaaaaggatataagcctacacagaaggccatttcccctgcaaaggaccaagaatcaggctaggttaatacaccactcaggaagcaatatcagattttctctagtacacaaatggaaagggaaagagaaccccagagttctgtatcataaagcctgacagtaattccttcaccctagaaaaaatgtaaagcaattgaagatgcctaccctggcaatcttttctaaaactcttagtacataccattacagcaggtgtagcttaaaaaaaaattgagtacagcccataaaatattgtaacttgctactatagctactaaagaaactggttataaaatggatattgaattatgtggatgacttgctgttttgtattgttaatcatgagagttaaatgaaatgactagatatagatttcatattcattgattcagaataaccgttttgcactccttcttattggaagtcagtagagcccatatatagctgttctttttgatttggggagttttttgttgggatttttttttttctatggagacagggccttgctctgtcacccaggttggagtgcagtggcatgatctcaactcactgcaacctccgcctcctgggctcaagcagtcctcccacttcagcctcctgagtaactggtactactggcgtgagctaccatgcctgactcatttttgtatttttttggcagagatggcatttcgccatgttgatctcaaactcctggcctgaagctgtcctcccacctcagcttcccaaagtgttaggattacaggtgtgacccaccgcacccagcctacctgtcttagagatagttgtccagacagctatcttttaggccacatctaggagatggtaaagccatgtcatctacatatggtacttacacacttttattttctgtgttggggaaaagggagagtaaagaagggaaggggtaagcaaaattttatctcgctcacccgaaagtgacatcaagt

SEQ ID NO: 113804 - DNA, 1045 bp, Homo sapiens
tgtattcttctctaaagaacaactgtttctttaaaagtacaaactggttaagcctgtttggttgtcctcacaagtggatacaggatgaatttgtggagttgcccacaaattctcactctgagtcaagctattgtaaggcagattcatttagtcaacaaatatttattaaatatctgctatgtgccaggtaccactctaaatgctagagttaacagtagtgaggaaaacagacaaaaatcctctgctcatggagccattctaattggagaatataaatgataaaatacatgatcataaataattggaaaaattgaagcaaggctagtgaagaaagtttgtgtacatgagccccatttctcctccttatctggagcctgctagtcaggtatgaaggtattcctcagaggttactcctggctgggatacatgccttcataatgcagtgaatggtctgtaggccaacataggtttgtaaagattcaaatcaaaactttgcatttgttgtgattttataaagggaaattatcaatatatttttccaatggaatttttaaaaatagtaacattttcaagatttgattaatttataatcccatgaaatctgaagtaggttgagatagagaattacctgctaactccacttcatttgcagccagttaaaatgacataaaagtcagtcatggcggtgtgcagtgactcacgcctgtaatctcagcactgtgggaggccgaggcaggtggaacacctgaggtcaggagtttgagaccagcctggccaacatggtgaaaccccatctctactaaaaatacaaaattagccaggtgtggcggcacatgcctgtaatcccagctactctggaggctgaggcccgaaagtcgcttgaacccaggaggcagaggctgcagtgagccgagattgcatcattgcactccagcctgggcagcaagagcgagacaccatctcaaaaataaaatataagtcagtcagtcatgaccactgagactaaaaaaaaaaaaaaaatagagtcagataaagatcataatat

SEQ ID NO: 113805 - DNA, 1031 bp, Homo sapiens
aatgagtaatgttattgatttgtatacatttatgtttctgtgttttacaaatgagattgggcatttttttttattttagcctgtaaaagaatcaactgcctgaattctttagtccttaactattttttaaatatgtcattttggccaggcatgctggctcatacctagaatcccagcactttgggaagctggggtgggcggatcatttgagctcaggagctcgagaccagcctggccaacatggcaaaaccccatctctactaaaaatacaaaaattagctgggcgtggtcgtgtgggcctgtaatcccagctatttgggaggctgaggcaagagaatcacttgaacccgggaggtggaggttgcagtgagccaagattgcaatattgcactccagcctgggtgacagagtgagtctctgtctcaaataaataataaatagtcactttgattttcaatttaattttccaactgggtatactttcattttgtggagtattttcttatgcttatcttaaatttagagattattaaatttcctcatgtatctaatatcagtcttttgaaaggtgtgaactaccaaaaccaatttatgatcttcagagttagagagaaaggcctatagataaggactatcatacaattcatgtacttttcttgtagtaaagatgtatagccatctttagctcagagcttcttaatacctattgccatctataaagttaatattctttgcataatacatttgattgtttgattttcttttatgaccttaagagttctatagaagaacttactctggaagtaaccacagcaaattagaagcagcaatgcagatttcatgtagaggagtatgaggaaaagaggcaagaaaaaacactagaaaatcaaagcagtctgtagccatttaggaaaagaacacaaaaccatccctgcccgttctataaatatttatataatctgtttactaaggtgggataatttaaccttttataagcatgtttaaaactcttttttgcaaatgttaagtta

SEQ ID NO: 113806 - DNA, 1144 bp, Homo sapiens
gcagtaatgcagctttttgaactttgcccccaatgccattacagataaaatgcatcattttgagaactagcatgattttttattttttgttttcacagagatttctcccgaaggggaaaagtacaaacccttaattactggagaaaaaaaagtacaatgtatttcacatgaaataaacccatcagctattgttgattctcctgttgagacaaaaagtcccgagttcagtgaggcatctccacagatgtcattgaaactggaaggaaatttagaaggtatgttctaatgagtcaaaatgagctatatttgatttagtaaaaacttaaatttcacaagctttataaacagattatcaaaatttgtatatgtttgggtaattatctcaaattaggttcagtatttttatatttttagctattggtcttttttttatgactgcctaacaagtcaccccaaaacttagtgttgaaacaccaaccgtttcataccatgattttatgtgccaggaattgagtcaagacttgtctaatgtgatttttcctaattcgtgtgcctttatctcagagatcagtaagtgttggtcagccggcagctaggctggtctgaagggtcccaaaaagcttcactgctatcttggcaagtacagcttagctgggcccctctccctctttatgtggtttcagggctattctatgtactctttctggcaggatagtctgacttcttatgtgatggcccggggctcacagatgctaaggtgaaagcagcttgtactcttaaaagctgatctcagaactagcacagtatcacttctgccgtattctattagtcaaagcagtcacagcccaacctggattcaaagggagggcaaacagaacccacctctcaatgggaagggcgtcaaagaatttgcatctgtcctaaatctgccatagtctgccctctgaccaaaaattatcttcattcctcccatatgcaaaatacactcacaccttctgaaagcctcatctcattatgacattagctcagagtttaatatgataacaaagtcaggccgtgcagatgggttttctcatctacaggtctttgagtacagttattctcaatctgaagacctatgagtaaaaaaaaaaattagttattt

SEQ ID NO: 113807 - DNA, 1050 bp, Homo sapiens
cttaaaaaacaaacaaatgaatttcatgtttagactttggtcccatcaacaagattctcgttatgtatatgcacatatttcaaagtctgaaaaaaattcaaaatccaaaacacttctggccccaagcatttcagataagagatactcagtctgtattaatttatggttttttcctatttttatattccccaaaactagaatttaattcatattctacaaggcaattgtagatatatttttattgctagtttcatttgcttctgttcttgccattattcatcattctttccctgaaagtctttgtgatataacctttttttctcatgaaccactcaattggataaaagactcaaaatctgccttaccatgcagtattattatactgttattgaaaattgtttctttgtatatttttcttataggacatacagtgggagaagttattaaattaggtcctaatggatctccaagaagagcctgggggaaaagtccgacagattctgttctaaagatacttggagaagctgaactacaacttcagacagaactattagaaaatacaactattagaagtggtaaggagaaactggtagtttttctatactagaagtaatattattaaaaatctaattatgtattttaagatgtttccattttaagtgaattatttttaattatctttctcttataataattttttaattagattgagaatgattgtgttttctagggggattgtccaaatggtagtcttgagttttgacctgatagacctggatgggatctaaaaggaaaatgaagtgtgtatgggtggagttggaaaagtcagaatgatgttttacatgaaaacagatataggagaaatgcactgagatgaattgtgtctgttttgatatggattcaagaatgagattgactaaaaggtattttagtaggtatgacagacattattaattctaggactggggaaggagagttgtcatgaggcaggaggaaatattcctgatccataagttttgtggcctttggtattacagctatgcatcaaga

SEQ ID NO: 113808 - DNA, 1048 bp, Homo sapiens
tttttgtatttctataaatattcttgacctttattcttggacacaatttagttacctgtgcatagcttggctctttcaagtcttgcttttaagctttgttagttggaacaaagcagcaatctatattattagtatttattagtattactgtgcattagcgtactgctaatcttttaccttttctgcatcaacaacctttctgaataatctgccttgtgccttgtgaattataaatcagtcttttttggctgatgggaataggaactctttctggcactgtgtgaactcgaagtattgttacctctgcttcttttgagtggtcttttctctaaactttctctaaaatttctttatacattatgtactgatatgctgatcagtactcaagtaaagactcaaaggggctttttacaattttcctgagttctctctctgtgaaacgtattacttcagtactcctatcttgcaaacactagccactttggcctccctagactcccatttccacctcctcagctcagagagaccattgactccacctctgttttccctccctgcattgaaggggttaaattccagtggtgggggggacaggagggtttctcttatgaacatttagttatcccagttttgtttgttagaactttttccccttttgaatttctttggcatatttgtcaaacatcaaatgactgtaagttatgggtctatttctgggttctctactctattttaaccatcctttaagaaattcctcttggtaatcattttggctgtatgaaactaattattatctgctaatttgcatgtactttcatggaactggtacattaactgtatcaatatgtattaggttaccattgaatgtctatataccttatgcctcataatacataatattatatcctgtatgttactactaggtacctgtatacttcatatattattaccaaatattctaaagactcaaacttcagtatataatttttatatattgctttgataaatgttattaaaatggtttaccccaaattattattgtcaataa

SEQ ID NO: 113809 - DNA, 1026 bp, Homo sapiens
ttaactgatacccgggaaacttcagaagagatgcaaaagaccaacaatgctatttcagtaagtaaaattttcaaagtttatcaatcattttacttaatgatatacatattaaaatatataatgtcgtgactttcagagtaagcgagaaatacttcgtagattaaatgaaaatcttaaagctcaagaagatgaaaaaggaaagcagaatctctctgatacttttgagataaatgttcatgaagatgccaaagagcatgaaaaagaaaaatcagtttcatctgatcgcaagaagtgggaggcaggaggtcaacttgtgattcctctggatgagttaacactagatacatccttctctacaactgaaagtatgtatagtagtatattaatatcctatttaggtctagtacatatgtaaacttatagactaaccactctgaaaaaaatgaacacttagaagaattgagagaagctgaaagaattctatatattttccttttgggcgaatagaagtgcctccctctcacagtgaaatgtgaagagcagagaaaactaatcaaactaatcagccttaatagcaaggatttttattacaaaagtgtatagtgtgagagagggaactaatgatacatatttaaattgcattactttaactctgtataccatgttaaattaatctgttactatgaataattcttgatgagaaccagggtagtgtctcagaaacatctcttaggcatttagcgagagtattgagaaaatctgacttaatgatttatatattcggtgataattactgagaatctatatttcttacattgttctaggaattggagatataggaacaaaacagaaacatatgtgctcttgtggagcttacattctagaagggcaagtctgaccatcaacaaatctgattttaagtaatttttttcacagactgtttttgtagaattttttcttgcattggaaaaaagcccaaagacttgatagcatttattttgcttatttattcaacagttctttatt

SEQ ID NO: 113810 - DNA, 1051 bp, Homo sapiens
gactgtgctttgtttgttttgttttgttttgaaacagggtcttgctctgtcactcaggctggagtgccgtggtgtgaacatggctctctgcaatttcgacctgctgggctcaagggatcctcctgcctcagcctgtctatagctgggacccttagcacacgtcaccatacataagctaatgttcttatttgttgtacaaatggagtctcactggtctggtgagactccatttctacaagaaaaaagaaaattaactgggtctcaaactcctgggctcaagtgctcctcctgcctcagcctcctgagtgctgggattataggtgtgagccattgcacccagtgaaaaagtatgtttagaatgaaatatatattatagatttagctgggtgatcaattgtataataaaattgggtcattctttgttccaaatttttatatttttctcttatatgaaactttatattgttttcctggcttagttaatttttgtgatatgtcatatttgctcaactttccgtataaaaggcttagtgtaatggtttatctttcaataattagaagtacattatcatcttttatctcaagatgtagttaatattgaaaagctttaaggttctgattataaataatacaccatgatatttatacagaaggcccaattcaactgtactaataagttacttaagtgtatgacattagcttataatgatgttgccacatttcagtagtcatcctgaaccacccataaattttcagtaacttagttgtcttcttaagttattgtaagagttagtaatctgtctttgttcatttatttagattccatgtctgaatttgtctgtttaggttcttctaatctgtttggtttagttgactcagaggagagatcagtatgcatttgattatagaacataagcatttactgaaggctgctgaagatcattattataaaagtgccaataaatttgtctctcacaatgctcaaattttaatttctgatcatggttaagataggaggtttttgtttttagtctgcattctaaagatgaga

SEQ ID NO: 113811 - DNA, 1018 bp, Homo sapiens
atgcagagaaggaaatttggaagacagtaccctcaaattttaagtttctcagatggcagaattataaatgattcacattttctttattttttaataaattttctataatgagtatgtattatgttatgacagaaaaaaatgcatatataaattaagtggattcagtcaaaactaatttccagtggaaatgttaaatgcaaaaatcactcagaagggctcatttcagttgtgaagtagaaagtcattggtgaccttagaaaattttcagtcataatgggatcagaaactagattgtagtgagctaaaaaatgactgggaagcaggaaaattgagatgatgaataaaaaaaatacacattcaataagccaataaaaagacatttgacaggaaagtgggactaaagagttttttttaagggagtaagtcgaagcatgctcgtatgctgaaggaagagaaatatataaactatgttcaaaaatgagtccatttttgattgggtttgaacatttgctgtatagtaactgaacatgcctgagtgcacagagtttgattgagatctcttaattaatatacaacccatttgttgaattcagaaaaagtgatctcaaatatcttattttgtatgtgtttagtatatatatagacatatgtcgaaatggattggctgtttgtagaggaaaatttggtttggggtttaacctccaaagcagtgatttaaaacaaacaaacaaacaagcaaacaaaaaaaacccctcttaagtgactaacacaaagatagctggtctctgttttgaataattatgtttggggcttaattgcttccttctgttctcactaaatatatatttcaagttgacataggaaaacgccagggtttgttatcacagtttatcatcaataaatggtcagtatttgccaaaagaaataaagtagcacctggatattccttggtaagataataatgtagccttagtcattctttaaacttagtacattaaatgataaacagggaatcctg

SEQ ID NO: 113812 - DNA, 1024 bp, Homo sapiens
tcttccgtaattaagtgtatctaaaataattgtatatgtttaaataagtagaatagatcaaataaatataaaagaaactatcttgtgaagacttagagtagaattatagattttacttgtattgaaaataataaagaatgtgatttaggtagtagatgtcaatatatatatagtgatttcttcattacagagatagtgtttcatcagccttcatattctgaaatgaaaaaaaaatttaggataaatgtaatttttaactttttagaatattttctgttcaggatggctgactttgtgatttgtccaaattaggcaaaaagggcagctagctgtagaaagagctaaacaagtagaagagttcctgcagcgaaaacgggaagctatgcagaataaagctcgagccgaaggacatatggtatgaattttgtttgtttctgagattttgaatgtattagtattccaagtgaaggtctggaataaggtaagtgtaagtaaaaagaatgacagtctaacaatctaggcataataagaggcagtaaagatactcagaagtcatttgcagagtataaaattgtgatatcttaactcatttaccttctcttttgctatcttttataccaggggtggaattctattgttgctttggttaattgggagtaagttcatacctgtatccttcctttaaaagagtagaaatgggtatagcaacccagataaagaaataagttcttggattgctgcatgttttttttccccaatatgcttttggttttacatacttttaagtggcaaagaattttagaagaaaaatgggaaataagtatttgggtaagtatatatgtaaactatgcatttgctcaaaagcaaattagaagtagaattttagtaaagtctccagttatgccatttaactaaattaagttatgtatccaagaaaatattaagtttttaggtaatcatttcaatcattaaaactctgttttctctttggtatttaacaggatttgaggtagttaaaactctt

SEQ ID NO: 113813 - DNA, 1203 bp, Homo sapiens
aagtatactgctttttggttgttaatagttataataggaaaacattttgctttaggctttatgtttgttagtatgttcatattaagtaattactttttaaaagtgaagcattgaaatttactttttcttttgagactagtacaggcctgttaggccttataagataaacatgtgagagctctttgtttaatccctaggctccttttctgggcagtggagggactatagctccatcatctttttcttctcgaggacagtatgaacattaccatgccatttttgaccaaatgcagcaacaaagagcagaagataatgaagctaaatggaaaagagaaatatatggtcgaggtcttccagaaaggtatggctatgttctgcagaagttgcttatgctttgcttctgagatagtaatgaaagtcactgtgcatatttatctacagaggaattctgcctggagttcgtccaggatttccttatggggctgcaggtcatcaccattttcctgatgctgatgatattagaaaaactttgaaaagattgaaggcggtgtctaaacaagccaatgcaaacaggttggactgtgatgatccatgaattcatccatgtgtgtaattttgtcgtttgtcatacatagcttagtacctacactttgtggatgttttctccattgttcacatatgatgttttttgcctcttgggtacaataattttctgaggtgcaaatttggcccttgattactctgaaagcatgtagctttccagttcagcctgatttttgtgtcttgtttgtgggtttagactgaatatactatttaaaggaacatgtgataacattctgccaacataattataacattttatcacccacttcctttaaataaatcaggatataaatctaaattgaatcacactttatgcagaaccccagtgcatttttcgcccttttcttcatcacttcaaagcctacttttctctttgttgtcttagcatgctttctcttcaccttcatctctgatttataactctttgtgatcctgttcatcatattatttcttttcttccattgaattaataatggtaactgattaatatgtacttgagcagagataaatgattgaggtaaatataaattaacgtttatatacacattataaattatatacagaagcctgatatatgaagcatctattttttgagaaagg

SEQ ID NO: 113814 - DNA, 1498 bp, Homo sapiens
gctttcttcggtggagctccgagggtagctaggttctaggtttgaaacagatgcagaatccaaaggcagcgcaaaaaacagccaccgattttgctatgtctctgagctgcgaggtgagttgcattgtatgagcgaagagttgtcagctctcctgttcacagattttgggtcaactgtgaggccacagcgctcatcttggtttctcttacaatgtacctacataatgttgaaaggtacatcgtgaattgggatgctaacccatcctgattaggtatataccctcagacattctttaaaatttcacacatctgcttcaggaaccgtcgaaggacctctgaataaaatggaagtgggttccaggagaagattaactttaaacttagaggagtgggttttactttcgctaaattttccccaatttaaaaataatattcagtttttctatctttagatatatatgtatgtaaaatattttttgtgtatatatatttgtggtttgatcttaaacttgaccagaaactgccttagaatctcagaaattgactttgcatgtggtatgctttgtttgtatggcattttaaaactgcggagcatatagaagataattacatatgcattgtgcatattagaaactgagatttctgtttcctttagaaagaaattcctgttcatggaattgaatcaacagcgaccataccttttacacagatatataattcaaaagttcagttctacaaacgtaaacttttggagctatgcagttcagttactgcagcatcattgtggcttgtataattgttgaatctttccagaaatgcttttactttcatctttaaagagttaatttagaagatttttttttatgaggtcggtatggaaataactgcgtccctttgtgagtcactacaaaataatatttgttcagttcaggagtacatatgggagttaaagtgcttgtgtataaattgttgactttcatcttaaaaggtgctgctgctattcagtgtcttgttctataatatggctttaaaaaccatgtgtgtgacctacagatattttctcaacttgaatatgcgtatatggcctctggttaatacagacagccactgttggcagaattcatcacagattgcatacccttcccaccccttactcccctcagcacctcgaaaactttgctgctttacttgaatgatgagtcacattattttaagaagtcaatatgaatgtatagtacctacatttttacttggaaattgtacttcagtatgtgttatcagtcatacatagctcattaagaatgtaaatatttaaactacttttggatagatgtggttcaggggaacagatttgttgatgttgtgggtttgtgttagtaaattggctattttccaggtcatgttagtggtaggctttccatttcctgttgtgacatgttggtcataattttcagacggctcaggaagccagatttgatctctgtggtgggtcttatatc

SEQ ID NO: 113815 - DNA, 1248 bp, Homo sapiens
tcttactactctaataaacattttaattttttaaatatgcacattcacatctgtacataaacattgtagctgtgattcattttggttcttaaagataaatcttcagtgaagtttaatatggagattgaaccccactgcctcactttcattgttgaaatccagagagatttgatctgcaactttgactggaaccaagttaaataaatatatttcttgctatttcttgtgagaaataatcgaacagtttctgtcttttaaaatcatgaagactatttagttttcaaagtttctgtcttccacagcaactttttattggtttattgttttatctttcttccttgttataatctgagtgttatatttgtatgtgtgtttattccgttgtcctcttgaaagcctctagcatttatacccgctgcccctgaggaatttgggtttttttgtctgtttttatttatttttaattgacagataatcattgtgtatatttatggggttcaatgtgatgttttgataaatgtatattttgtagaaaggttaaatcaagcaaattaacacgtccatcatatcacctacttgccatttgtttgtggtgagaacgtttaaaattaacttttagcaattttgaggtatatagtacattattattaattatagtcaccgtggcatgcaatagatctctaaaacttactcctctaactgaaacttggtattctttgactaacctctctcctttcctttttcccccttctccctagcctttgtagaccaccattctgctctctgcctccctgagtttgacttttttttttagattttacacatatgtgagatcatgcagtatttgtttttttgtgtcttatttatttcacttagcattatgtcctccgggttaatctacgtttttgaaaatgacataattttcttccttttaaaggctgtatggtattccattctgtatatatattacattttctttatccattcatcatagatccttttagatatctctaatatcgaccttaaatgcagaagatgaatcactgtattggaagaaagaaaagtaatcctataaaatcagtttaaaattaggtcagtatagcaaggattagatatgttgattttactttgggtactctgagaacttgatttaaactgaaccttgcccagtgctaatgtaatcagtagaccacactaattcctatggtatagtagtgactttttttttgagatagactcttgttctgt

SEQ ID NO: 113816 - DNA, 1102 bp, Homo sapiens
ctatagttttgcgagatgttcccattaatggaaactgggtaaaagatatacaggatttttttctgtattatttattgtaactacatgtggaaccacaattatctcaaaataaaaatttaattaaaaaaattgaacatctactgtgacacattttttttttttgaggcagatcttgctcagttgcccaggctggagtgcagtgagtggtgtgatctcagctcactgcaacctctgcctcctgggctcaagtgattcttctgcctcggcctcctgagtagctgggattacaggcactcaccactatgcccggctaatttttgtatttttagtagagacggggtttcaccatgttggccatgctggtcttgaactcctgacctcaggtgatctgccctcctgggcctcttaaagtgccgagattacagctgtgagccactgcgcctggtctaatgtgacatattttgctaaccattgagtatacagtgttgagcaaaaattgagtgtcagacctcatgacacgttctacaatggcagacagatattaaataatcacagaaataaatttaatattcaactgtggtaagtgctgtaaaagagagctataagaactaataatgagaaaatttgatccagatagtaagtgggtcagcgaagctttgcttactaactgcatgactttgggcgagttatttacatgctttgtgcctcagttcctcatttttagtggggacaataatagcacctattctttaaggttgtcatatatttaatatgaatattaaatgaatgaatttgtaaagggcttaagatattgcctagcatatagtaagctctggttaagagtttgttaaataaagggatacttgatgtaagaccttgtaagaaaaatgagtaggagagttaattcttttttatttttacaatttcaacttttattttagatgtgcaggtttattccatgggtatacagcatgatgctgcggtttggggtacagttgtacccattacccaggaagtgggtatagtgctcaacagtttttcagcccttgcttccttccctacattgcccgcgctggtagtcctcagtgactattgttgccat

SEQ ID NO: 113817 - DNA, 1859 bp, Homo sapiens
atacatttctctttttgacctcattaattgaatagtttgacatttgttgttcttacactgtgccagtcattatgccagatgtggagagcagaggcatgctctcaaggagctctcaaaacttcacctttttcaaagtgatctttaagttaggaaatttatataatctgtttaaaagatatttattgtcagtaatagtctagttttctaaaacttcataaatacctttttgttattaaagctctttgaggttatctttccatttgcagaaggaaaatttactgagtagaagagattgtcttaaaacactccacgtcttcagtgttagaattcactgctagaattcatcactggaattgaactgtgcttactttagtcttcatctgtcattttctgtgtgtacttactaggccatatctgctaagtcttgttttacaaggcttactggtttgactgcttttatgactgcatctttcaagtcccacccatgcagcttaaaagtctattactaatgtccccatacttatgttgaactcttattttggtgttgagtaagtaagtggaggtatttaaaaatcaaactagttaggagtaatacagatttaagaatatggagagtaagaacaatgaaaacatacccttttttgatttgttgcctgttaccattttatcagtggctaatgtttgaccataggctctgaagatttaaattttaaaaggatgaaaggagaatgaaataaatattttaaaattttttaattgtagtatttatttttaaaatcaggttgtacttacacctcttacacctgataaaatattcaaaaggggcagtctgtctttcaaaccttgtacttcagccatcttgttccctaccctttgggcaacttacttggaactctctcctgagacaaatctatacatacacaagcaaaaatgtaaatatacgttacatttttcaacttaacaattggagatctacctggagaaattcttcattcttttttacaactgtataatgagaataaaattattacctcaccccaaaatacttaataaaggtaactattgttacagtgaatacgcttaattttttttagcacatagatcataactttccttttgtgatgttaaactagatgatttttattgtatgtttgaaaaatgttaaaactactttttcccccccacagataatcagacagctaaatggagtctgagcagctgttccatagaggctactatagaaacagctacaacagtataacaagtgcaagtagtgatgaggaacttttagatggagcaggtgttattatggactttcaaacatctgaagatgacaatttattagatggtgacactgcagttggtaagttcagcatgacagcctaatgtttgtattcatgaatatccactaataaatatgtacactattttattgaggttgaatttttcagtaactttaaaaatttgagatcaaatttacataacataaacttaaccattgtaaagtgtggaactgagtggcatttagcaggttcacagtgttgtgcaactaccgtttctatctcgttccaaacattctcaccaccccaaaagaaactactacatttaagggtaagcttttaaatataatgtaatacagagaggtgtgcaatcatcacatcttagtgtggaaattgatgaattcctacaaagtgaacatttattatataactactcctcaatcaagaagtaaaacattaccagtagtttcagaatccttccttgttccaccttcagtttcaatattattttgatttctatctagattaattttgcaagtatttaaactttatgtatgtggaattcatactgtgtactct

SEQ ID NO: 113818 - DNA, 1051 bp, Homo sapiens
tcaccaatatgtttggtttcagaccatcctctatttgttttctgtttgtcacatctgttctttcctctccccttatttctgttaccttcaaaaccttgttatatgttctcttactttttgttcagtaggctaccctagagattattacatgtatccttgatttattagttctaggcattggtacttttaccacttcatggaaaatgcagggacttcagaatactttacctctttttacccctttctgcttccttaccattttctcaccaggaaataggtcaagaatgaaaatggttgagactattgggttttacctttctttgtttcacttcttttcagaatattgacacttcaagttctggctcccttggatatttactggtttaaaatacaatattttgctgttatttgtcatttgctgtctttatcacagattttttttctaattttaatgacaaaattataaacaagaaaaatacatatattcataatttgaaacaggtgaaattaatagcatacccattttttctgtgtttaaatagctctttagccctttatgtgaggcagaaaattaactccaggaagtagaaagatataggaagagctgactccttccaccttcccacgttgccgtcaagtgctggtgatgtctttactcatggtcttcaacaggagagagtgccaagcagtaaggatggggcaagggcataaaaaggatctatttgtgttgctcttttatcagggaggataatttttctagaaccttatcattagacttccttatgtgtcactggccataattgggtcacatgcccaccccaagactgataactggcaaaggggaatgaaattactgattggttaggacaattatgattccttctctgaaattaggcactttaacatgcaaacaagaggaaggcccaattagcaagtataaagttggaatgactatagcgtaggcaaccattggtgttttcttttctttttttggagacagagtctcgctcttttgcctagtctggagtgcggtggtacaatgatggctaac

SEQ ID NO: 113819 - DNA, 1428 bp, Homo sapiens
taaactcctaaataataaagtctttaaatgattgctctgagaattaaatgcatatagagatcttaacaaataatgcatatagaatccttagcagtgtgactggcttatggtaaggtaaggactcactaaatagtagctgtttctgttttcttctagattactttccctttggatatgttagactctgtacccccaacgtaagcagttttcttttatgttcatgttcaaatgagatgtcagtaacatctctactagtattaatgaaaagctgtagctctagaactcaaatatgacatctggattaggatttagcttgtcagagataaactgctttggaatctactgacttcagtagatatctgttgcatagcccttgctttgaaagtaactatgtgtacttaataatctcaaaaatgtaatcaatctgctcagagtgagtgctaaacaatctagagtacactgattaaaaaatagaagttattctgtataatgatgactagtagtatcagtcagaaatgtcagctagcaaaaagctgaaaaagtaggcctgaaatgtgtttatattaggtatatctaatttgaatgagtcattttggtcaataattcagattccatggaaaatgcaaaatttttttattgcaagtaacaggaagggagagccaagattttgttgccagagttgtattcattaaagagaaccatatggctcttgactcattgaaaatgaagcacatgactgttcatgagtgcagctttagaattattcttataatagatagtactatcttcacttgaagtaagagaagttattgagattgactgatggggtaaaaactgtgatcagccatgtttaagcaaattaactttcagtagttaatttatgttgataacgtgattatgctagtaagtttaaaatttaggcgcctatatccttttttatcacacctgaaatgtttacttgacaacatcaagggtctcccaggtttctgattatgtatagactgagagggaaatgtgagaggagtaagagttgagagggctcactcctaagtgtttgatttcctatctatacataactttaaaaaataaaaataaaaacagccttggaagctgggtgcctgtagtcccagctgcttgggaggctgaggcaagaggattgcttgagcccaggtattcaaggctgtggggtgctatgatcgcacctgtgaatagcccctgcactctggcctaggcaacagtgaaacccagtctctaaataaaaataaaaaacctttggaaatactaaaatgcaaatgtgaggttttctgatttattgggaatcttggggcatgtgataactgggaatggaatccagagaaattacatagattattatattctacttcccatatatgtaacattctgagcttcagaactcagaaaccacat

SEQ ID NO: 113820 - DNA, 1072 bp, Homo sapiens
ttagcttatgttcatgcctgaatatttgagaaactccttcaaaaggaattgtttaggcattaaaacaggtttgccggttttggttctgattttgaaaaattgatcatcgtgtgatgttttttgtttttgtttctaagatggggtcttgctctattgcccaggccaaagtgcagtagtgcaatcatgactcattgcagccttgacctccagggcccaagtgatcctcctacttcagcctcctgcgtagctaggaccgcaggcatgtgccactatgtccagctcatttttataaattttttgtagagacgggaatctgggaatctccctatgttacccagtctggtcttgaactcctggcttcaagtgatcctcctgcctcagcctccagagtgcagggattataggcatgagccgccatgcctgggccaattgtgtgatgtctgtgaaagcaaactcttcatatttttattcctgtgatatgttatttgggtaaccggatagctatattggaaactaaaacttcttatgtttatgaggtatgaatattataaaaccattttgttttttccatttattttctggcttgtcagttttaagaatttccacctcttctttctttagggcttcaataactttacaactaattgtgtagtttattgattgtcccccagaaaagctttgctgtatcttttttttttttctctgatgcattttgattcggagaatgactgacaatgcaagttaaggtttagtgccatatagtgtgtccaaatgtaaacttaaagcagcctgtattagtcccttctcatgatgctataaagaaatacgtgagactgggtaatttataaagaaaagagatgtaattggctcacagttctgcacgctgtacgcgaagcatagcgtcttctggggaggcctcaggaaacttacattcatggcggaagatgaaggagaagctagcatgtcttacatggccagagcaaaagcaaggagggcagtgagggaggtgctacacacttttaaagaaccagatctcatgagtactctataatgagatagcaccaagtggatg

SEQ ID NO: 113821 - DNA, 1062 bp, Homo sapiens
tttctattaaagagacaatttctgaattttataacaatttctagaacagttgagtacctcactttgagacacatttttgctaaaagttaaaaacacaaaacccttatgagataaaataggaagctagtagagataggaaagccctctgcttagtaaacctcttttttgcgtagtttagacacatacaatagtaaagttacttagtacgttgatagttttctttctcctcaaaagctacaatgtcttactagctagttccttcaagaaaggaaacaagaagccgctggaggagattggtgagtgggataaaacactattcaactcttcagttattcggtttttaaatcctcaatgaaaggctgctgtattatagagtattttttttttatttttaatagacttagaaccaagtttcttgagaaacctttggcatattgtagtttttttatggctatgactcacatgacattactgtataaaactagtacattctctcgtaaaaccacacaaacttactagagtgctgctctcatttttctacattagaaatgaaaaagggcattgtctgcattcaaaatttcctttttacatctctgtattactttttcccctttatatttatcttaaaaccaaaagaaataatgtttctattgttttactgtagttaccactgatgctaccgaagctgtattgtgagtgtttcaaaattctcaaaccagttttgtgtgttgtacttggagcttagtcattgtcatacgtagcaggacctgattaagaaggctgtgccgcctctaagccttgctagattgtagccactagcaaccaggctgcaataatttccctttgatgacatcatccactgtggaagaacccagttgcttcagcgagtcgaactacagttttaacctcatcaaatatggcatctcccttgcttgctgcagcagggatggaagaaatgtcactttctttttaagctagcaagctttttctttttctttttcttcttctatttaaaaattctaatcatggatgcttcttccgacccttatttgccttatgacg

SEQ ID NO: 113822 - DNA, 1088 bp, Homo sapiens
aacaaattttataaatttatgaaatatgaaatttagcaaattttataaacctttttattcatgtattgtacagctcatcatatttgcagacataataattgaatgtggaacttgtttccaattacacagatgtcttaatatccaccttatcatctctaactaaggatgtggctttttattttgaggtggcaacagaacagaaaagaaaacagtgaattgagtaatgggcttagtattgctgctgcctggttgtgtatctttggtaaacttctttgagatttggcattaacttgcaagtctttgcagtttagacagttaaatatgactgaatggctgaacaaattttaatagcgtatgcttcttttttgctatttatttacccagtagacatttaattgaccacctgctaaatgtgaggcactattcttgccattacctttttaatctttgatttggagtctgctaacattctggaacttccactatcaacttagaacgtttactttcccatcccttaccaggatggccatttcttatcagtagggtcacagagagagaaaaaaaaaaaccatctggggctagacttcctgctcttaacatacagaagcaaataggttgtgaaggaatacatagtattttggatttctgcctcttccttccataatttttttaaaaaggttcatatgttttatgtgtgtcttatgtaacagtaatctgcattatgaacttaaatgacgaggatcaccatttcacatctttggagattgatcacagaggtaataagtaactctttttaaataactatatgcatcatttttcatgtaaaactattatttggataaacccctttgagaaaaggcttaggctcctgccagtgtcactgtgatatttactaataagctcagtttaaggcgcagcaattaaggttgtgttgtttttttttttttaagttcagttcagcaaatatatgtggaaagcttgtgggtaaaattatatttgtatttttgggaaagcagacaattttattaatgcctatatttttctagttcagtgtttgtcaaacttcaagttttaacatgttgatcatg

SEQ ID NO: 113823 - DNA, 1042 bp, Homo sapiens
catggaatttctctactaggccacctggaagaaaagtgatcttttttccagtcttttttgttactgtttttcagccaggagatagtagagttaggtagtagaatagtagtcactggcatccggtagtcagccctccaaaaaagtttttgatttttttttttttttgtcttaaacttggaagctactaactttcaggtcatactttcttatcatccaagagctggatatttaggtagcagaaactatggaattatcctaagtcctcttgaagcttcagctgttaaaattaattggttctgattaacactgtgctcaagatttacatttctaggagccacagtttgattggtctaacttggatctatgtgttttctttagctggggaggagaaggtatcttgattgataccttcaccaggactgcatgcagtgagggacagaagtttccttaaaataattgggttctgttataggaagaaggggaaggagataccaagtgggcaaaacaatcaggttctattacataaataataaacctaatgtgacgataataaatggataatatgattattttaagtttggaaatatacctggttattagtattggatatctggtagtggggttggagaaaaagtcgagaataagaaaagacttaaaatcgtaaaaattaactggaaaagaggatggctgagcagatacatatatgttagataatgttcataatggcaaaccaacctgaagatttgtttaaattgtagtatgtagccaggtgtggtggtgcttgcctgcagtcccaactacttgggaggctgaggcaggatgattgcttgagcctaggtttgaggctacagtgagctatgtttccaccactgctttccagcctaggtggcagagcaagaccccatctctaaaaaaataaagtaaaatgaataaattataatatgttatgacaaatatagttatctgaagtcacagaaaatgtgcatgtgcatttaatgatgtgaaataatttttaggaagtatgaataaaaaaatcaacttt

SEQ ID NO: 113824 - DNA, 1053 bp, Homo sapiens
aacccgttttagattatgagcactttggcattattatgtttttgttttctttctatagcacacagtaagatgttctgcccacattgtgcataatttatgggtttattcaaggatttatgcaagtgtagctgcaagaaaaaaacctagaagtgaacttgctaggttgaagagcatctgtgtatgttaaattttgttagctttcgccttcccaaagggattattccatttcatacttaaactactaattttgtgataggacttctttctccatagctttgctaaattaatgcattcacacacttcatctttactaatctgatagagggaaatgatattgtggatttgatttccatttctttttatgtgttagcttgagcttattttcatatttaaaagccaattgtatttctttttcttgagctatcttttaatgtccttcctgatacatttctgaagtctgtgatactcatataagatatatggtgaacatgtgtcaaagatttatttgactctaatgagggaacccgcctgatgacaaggctgattgagaagaggatgtgtgagatgaagtgtatatcatcagtgaaagaaagcaaattcttacagggcaaaaacaaaaccacaactctaagggttattgtttctactggacagaattcatttgcattttaccagataaaaattactattttcaatttatcttttacaaatcattttctaattttacagagtctattccctaatcagtagtaaatagtcttcaaaattctccgcagcgtcaggtgactattatgcaggctaattgttgacactcgggcttgactttaagagaacatgccataatcttttggccttacttccaagttttggataatttttcttaacacatttttctctaattgcaatgatttcaagtgatattatttcttttttttaaatttttttactatttattgatcactcttgggtgtttctcggagagggggatttggcagggtcataggacaatagtggagggaaggtcagcagataaacatgtgaacaaaggtctct

SEQ ID NO: 113825 - DNA, 1130 bp, Homo sapiens
cgccactgcactccagcctgggcaacattgagcactgagtgagcgagactccgtctgcaatcccggcaccttgggaggccgaggcgggcagatcactcgaggtcaggagctggagaccagcccggccaacacggcaaaaccccatctccaccaaaaaatacaaaaatcagtcaggcgtggcggcgcgtgcctgcaatcccaggcactcggcaggctgaggcaggagaatcaggcagggaggttgcagtgagctgagatcgcggcagtacagtccagccttggcaacagagggagaccgtggaaggcgggagtcggagacgagggagagggggagaccgtggaaagcgggaggtggagacgagggagagggagagggattatttctgtatgacttaataatgaatttctaagaaggtcacttagctcactgttgtctcttctaaaacatactcatctttccttttctcttctgtaggaactcattatacaatgacaaatggaggcagcattaacagttctacacatttactggatcttttggatgaaccaattccaggtgttggtacatatgatgatttccatactattgattgggtgcgagaaaaatgtaaagacagagaaaggcatagacgggtaagtgtttttagtaaaaatttttaaaaacatagtgcataattagatcttttaataatatatttctgccaatgatctcaggctgccaaatgtttacatttaatataagtaaatgtctacatttcatatgtggtacatgtttttttctttttctatgtttaatttttttagtttacttataccctgtaactttccagaaaggatttcaggtagctaaaaaacaaagaaatacaataagaagacaaaataagaaggaaagggaaaaatacagcacaggagttggggggaagaacaagccaagttccagatatggaggtcagcatgattttgggctttgagcagcccaccagctaaggcaaaaaaggaaactcattgcatagctcttacctatggaaaaagaagaaatctactgggggcagatggtcttgtgggattttgctgttttcttttatctcctttcccagcatttgattctgagatatttctcaatttggctc

SEQ ID NO: 113826 - DNA, 2421 bp, Homo sapiens
gttatgtgtaccaattgaggttcaaatttgattcaatttaaaacaatctaggccagattttatatagtttgtggaccctttgcactcaaatctcaaggttcttattaaaatgcagatcttggctgggcacggtggctcacacctgtaatcccagcactttgggagcccaaggcaggtagatcatttgagctcagaagttcaagaccagtctggccaacatagcgaggcccagtctcattgaaagaaaaaaaattttttaataaaaaataaaagcagatcttgggtaaagacatgtagtctggtttacaggtattaacaactgtctgtaatgtagtgattttgctccagacttaccttttccattatttagttctgaaattactgttctatgtatggtaaatgagaaaaattgctagattctagaactgtggcttctattcatagttggaaaaatgaagcataaacatttctaatttcagatcaacagcaaaaagaaagaatcagcatgggaaatgacaaaaagtttgtatgatgcgtggtcaggatggctagtagtaacactaacaggattggcatcaggtaaagaaaatttttcaagcaatccttttttagttaacagaagtataaactgttcttccctccttccctcaattttttttcaggtaccattggattttaaaaagcatttgtttctcttcttcaaaaaatctccttaaatataagactaggaggcagaggcttccaagtctagtcttggctctatcactttacgtgtttatccagcttggttgatctttctggactcagtttctatatctgtaaaataagtggtttggatcagatgatcaataaagtatcttttgatattaacatcgtaataaatagctaatatttcttgagtgcttcctatgtgttgtacactgttctaaaaacttgacatgtatttaaacctcaccggaatcctgtggtaccagtgctgtcattatcaccattttgcagatgaggagactgaagcagaagaaaagtaacttagtttgactgaggtcatacagtttagtaaatggctaaaccaggatttgaattaaagccttctagctcaagacctatccccttcatcaccctgctatacagcgtggccacaaagtcccaatgtgtgagattttaagaaagagctgttgaggacctgaaaacaaatattaagcactgttataatcactttcagcttccatgatggaagattatgttcagaagaccataaaaattaaaatttttgtggagaataaagtactgataattctaattggcatgcatagtaattttatggcctctgtgtatgtaacccactgatctctttatgtaagaaggacccagatttgaccataaatttgtgtattttttatattctcacaataaaataatcttgatatatggttttctgtaatttaagaaaatattattcctatgagtttcaataattatttctaatggacattaaattttaatgaaattgacatcatttataagtctgttaattaagttatcgattgaaaattagatttgtgaacctcctgccaagtagctgtcttttgaagatattttagtatcttttaaacattgtttttcagatcacaattaatttgaatgatgtaactttttaaaattccaaacaaaaatagcacttttattgtaaaaaataactctttacagtttataactaaaatttgaaaatcttaaatttatatgtagttcataaatgaccctttatttaggagtctcctgctttctacttgccttttaactagattgttctcgactcccaaaaaattgacttaatttttttaccatctccaacatgtttttataggggcactggccggattaatagacattgctgccgattggatgactgacctaaaggagggcatttgccttagtgcgttgtggtacaaccacgaacagtgctgttggggatctaatgaaacaacatttgaagagagggataaatgtccacagtggaaaacatgggcagaattaatcataggtcaagcagaggtaagtcttgctttgtctcaagatgaattaataattgatatagcaaaatgtttccaattcatttaattatagaactaatcacatattagatgattacatacacatcaaatggatccaccctcaacacattgcagcaagaaagaattaagtgcaatattgtttcaagtagcttttttattagttaactgcatagtcatataacaaatcctctggattgtggtgcaaatatatttgagctgtagtagaaaagaagtgatagttattgcagtaagatctgtgtaaagttactaagaagtcaagttattaaaactaatatattactaagattgggaagtttgaattatgaaagtattatcaaataatttagta

SEQ ID NO: 113827 - DNA, 1408 bp, Homo sapiens
agtatataacagttgttactcattcttgatacataaaaaactattgcacataattacagtactcagagaaaacataatattcttatttctaacataatgtccaaaatatatttaaaatattatgcttatttttacaacagaaatattcaaatttgccctttttttggttatgtaattataatccttataattaaggtctgtattcattttaacatggcctgatattttgattttgttcctgagatagtgttgccctctctcctttcttgggtagagaattagattataatatcaatttattatatgtagcataataggcaaagttttcgaaaaattaactgtaaatttttctgtagactgctaaaatttgcaaggttgtttttgtgcataaaacaagaaaataacttggattcgttacattctcatgtttcttaaaggacattaagctgccttaatctttgccttgtagattaaaactattttaagtggattcatcatcagaggttacttgggaaaatggactttaatgattaaaaccatcacattagtcctggctgtggcatcaggtttgagtttaggaaaagaaggtcccctggtacatgttgcctgttgctgcggaaatatcttttcctacctctttccaaagtatagcacaaacgaagctaaaaaaagggaggtaagtgtcttttgtagttaatttgactgaaaaatatatattatatagtatttatttaagtaaagaatttcttagtgtaaaaataataaattctgtattcagataaaaaattttgagatttgtgcttctgtttttcctgaataatctataacatctttctagaatccattcccagtgctgctcagttcgtcttacattttagagaagctttagatagacagctggtgtccattgggtttcagctgcatttcacgaagatcttcctgttatcactttaccttacatctttcctcttctgaagtgttttctaagcttagctttgtttttcactcttactttcaacattaagaggttgggaaatcttaatagctatgttttcctcctggaggcagtgtctggtgccagtgtaagtggtgtgtgatatgaaaaatgctatccagtgctatggggaagttctgagggcctttagaagctcttgaagtttaaatcagaaattcacattaaagagattacaggaaatccttttcatttgattgtttaaggcaatttcctttaccatttctttaggccagcctgagatcttctacaagaccttgaaaccttatatatattatggatttcctctgatgtttccatattgctctgggcattttcctgaatcctttatattagctctagactttgggagcccagtcccttcctattttccaaatctaaatctacagccctaga

SEQ ID NO: 113828 - DNA, 1511 bp, Homo sapiens
ccaacatggtgaaaccccgtctctactaaaaatacaaaaattagccgggcgtggtggcaggcgcctgtaatcccagctactcgggaggctgaggcaggagaatcacttgaacccaggaggtggaggttgcagtgagctgagacgacgccattgcactccagcctgagaaacaagagagaaactctgtctcaaaaaaaataaaggaatacagactcttagaaaaataattacaaataaaaccctagtgaaattataggtatagttaggtatagttggcttacaggtgggaagtagaccattaccaactgatagactggggagctggagagaggacacggaagagtgtccttggatttttcttttcctttaatttttttgtagaggtgttggttggtgagactgtaacttgaggagctgttgtgtgtgctttcagaatgaggctctctagattgatagtattttagcagtatttcagaatgcatagggtagtgaaaatatagggaatcttacaaggtcttcggttccctgcatatcttgctacgatttggaatagagtatttatggtggagcagttagctctaaaatttgaagaaatgatatcctatttaaaaatagctccccatcccagttactgccctcccctcttacctacacaaacatacgtcttgaaaattgtctatattcattgcctcctcctctttacaccctattcacattagtatatctggcaaaaattttttttaactgaatggtaaatgcatgactgacctttcaattaaagccaggagaaagaaacaaatcttaatagaagaaatgaatagttaccctttgcttagggagcaaggaaacatgcaagttaaattcagaaaatccatttggaaaattcaagtaacatgaagaatttttatttggtatgtttgaatttctatgaaattatgaaataagccatatcctctttctaggtgctatcagctgcctcagctgcaggggtttctgtagcttttggtgcaccaattggaggagttctttttagcctggaagaggtaggtgaaaagaatacaacaattaaaattatatataattaccattacaaatatatttcacacatttcagttttgtaggtgatgtaataggtagagactttgttttcaaatttatttttctaaagttgttttccactcattcttaataaaaagtaaatgttattcatgctccatacctggaggaaactttttaaaaatttattaatgtatgaatgttagtaattatttaaaatctaactttgttgacatatttaaaagtaagaagatgtgaatttgacttaatagaggacatgtgaaacaatctatttccattggctaaattctgtatttttagtagagatggaatttcaccatgttggccaggctgtttttttgtggggtttttttgttttgttttgttttgtttttgtttttgagacggagtttcactcttgttgcccaggctggagtgcaatggcgcgatcttgg

SEQ ID NO: 113829 - DNA, 1035 bp, Homo sapiens
tttttttttttaatgtagaagaggcaaattaaatgcattataagttaacaggagttggtgatggtacatttatttttaactaccatgattgaattgaatgtgaaactcattttgaatataaaacagcactaggtattctattagtatttattagacatttatgatcaattgatactgtcaatttgtaatgatgatcaccatctccaaaaataataataacatcaatttttcttattacagtaaaatccattacatgtaaattctaactacagcaaaatttagagctaggatatttaccattcaagttataatatatcagaaacatcttataaaattatagcattaatttttcttttccttttcttttttttaggttagctattattttcctctcaaaactttatggagatcattttttgctgctttagtggctgcatttgttttgaggtccatcaatccatttggtaacagccgtctggtccttttttatgtggagtatcatacaccatggtacctttttgaactgtttccttttattcttctaggggtatttggagggctttggggagcctttttcattagggcaaatattgcctggtgtcgtcgacgcaagtccacgaaatttggaaagtatcccgttctggaagtcattattgttgcagccattactgctgtgatagccttccctaatccatacactaggctaaacaccagtgaactgatcaaagagctttttacagactgtggtcccctggaatcctcttctctttgtgactacagaaatgacatgaatgccagtaaaattgtcgatgacattcctgatcgtccagcaggcattggagtatattcagctatatggcagttatgcctggcactcatatttaaaatcataatgacagtattcacttttggcatcaaggtaagtgctaatgtgaggtgatatttgggtaattttggcatgttcaaaacttatatgtggaatgagagaggttgttgtttcataaatgactgaaaaaagtacttatcttttgagtt

SEQ ID NO: 113830 - DNA, 1024 bp, Homo sapiens
aaagacttcttcattcatgactagcacctaggctaaaaaaattcagacacctgggctcctgggatcaatcacgcatactgtgtctcttgtgctcactcccgctgtctctctctctttctctcgcttcctttttcctctctctctgtggttttctagggtggtggcctcagggaattggatttcttatattatagctcaggattcccaagagggctgtttttaatgtagccaaagaagtcttgcagcgtgacttgttttattctattcattgaggcagtcacagaggcccgaccacattcagaggagggacatacacttgctgggacaagtgtaagagaattcatgatcatgttttaaaaccacttttattagtttcctattgctgctgtaataaattaccacaacttaatggcttaaaagccacacaaatttaatatcttacagttctgcaaatcaaaagtctgaaacggatctcactgtgctaaaattaaggtgttcgtagggcattctggaggctgtaggagagagtcttgttttttgccttttctggctattaaaagctgccagcattccttggctcctggctgtctatttgcatcttcaaagccagcagtagctggtcaagtctttctcttgtctcatcaccctgacccaaactctgctaaatctcccttccacatttgaaaaacctttgtgattactttaggcccacgcagataaatcagaaaataatctcctttttcaaggtcagttgcttcgaaactttctttctgccaccttgattcctccttgccatgcaacgtaatgtaatcacaggttctgggaattaagttatggacatctttgatgagccattattctgcctcataccagtatagggtattagcttgaaaggacactgcagactcagttaaattactagatctataaatacatgcctttttccatcaagaaattaaggcagctgggtcttatgccctgggacattgcttcttttggatttataaaataacaaaatttgttg

SEQ ID NO: 113831 - DNA, 2575 bp, Homo sapiens
taaaaatatatattttttaatttcaatagcttttgggttacaagtggttttggttacgtggatgaattctataatggtgaagtctaagattttactgcaactgtcacccaagtagtatatattgtatccagcatattgtccttttttttttcttttttttttttcatttcaccatggactaatgaaaattttgttagggactgacattagggcacccttgagctaccttgagctaaaggaaataacccttgaatttttttctgtttggcctagagaatgtggtttgttttgtaactgaattcatgggattgttaaggtacaagattttgctttagttttatttgtactaggattttgctatattaatacaatgtgaaaagaatcaaaagtgttagaaataaatgcatagaatgtaagtttcaggcatgtgagtagaggatctctgctccataaagagttctgttgttgttataggttccatcaggcttgttcatccccagcatggccattggagcgatcgcaggaaggattgtggggattgcggtggagcagcttgcctactatcaccacgactggtttatctttaaggagtggtgtgaggtcggggctgattgcattacacctggcctttatgccatggttggtgctgctgcatgcttaggtaatatggctgtgtctgcctgtgtgtggatgtttgcaagtctgagagagccaagagaaagtgggacacattcttgcttaattggtgggcggattggttgagtaaaggagggtgccaggaggagatgttttaacagataagaaacagtagtactattagggtattatacagtaccggttttctgtcttacaacatttgttaatacaagaatttaatggcattagcatattgtaatataacttaatacactatggcagaagccatctaagtacaacataagcttaatttgaatcctgaccaaagatgtctttgattctttcatcgttaaggatcttggcttacctataacaactatagcataatacctaagattagcattgcaacagagtttcagagtaggtttactttggttctgaaatgatttattgttagccttagtaaaagatgtatttacccatgctccatcatctaaggtatatttgtaacaaaatgagaaaaggtaacttcattttaatgagaagaaaagcaaaatacctacattaagtacttgagtctatttaatgtctgttagggcaggaaaaaatggttattgcttttcatatttaaaatatcagctacactctggtgataatattaatggttgccattttgaccagttttgtttagtgaataaaaattatgtgattattgatctttaaaaatgtaatatcaattaaaaggaaaggacagactcattttcaccaaagtagcaagtatttattaaatgtccactttctttttagcattgtgctagatacagtgcataatacaaaaagaacatggacccaatctcgactctaatcaagttgaggagacaagatgaacactgagaatacaatagtgaggaatactaacaaatatatacaaggttaaaagagtctaagtatggtaggaatataggggaagaaagagctgaagtacttcaggaagagtagaacatgagctttatttaaaagattagcagaatttaaggaaaaggtgactttgttgaagattataatgtgaagacaaaggaacgaggatgggaataaattttgtattcatgaggctttgaagaaattgactctagagagtatattttgggtacttttgggaaatgaagttggattagtgagaaggaacagattatgaaaagacaagaaacctgattaatgtcaggatgattttatatttgaagttggtcagatttatggcagtcctggctttgccatttttagtttgatgactttgagaaagttccttcttgaagttttaattttctgtatataaaaagtaataacacctggtgatctgctaggtttgttttgaggattatatgagataaaatgcatgcaaaactgttataatagtgcctggtaaaataagtgcctagttttaaaaacaagtctttgtaaactgcttaggacatgcctggtatagggtaggtatgtaatacatagtaggtaggatctgtctccttgctatttttaggtaaaaaaacaaaaggaagagcttcagcttaatacagtatgaactgacgagccctggtaggtttttgagcaaaagagcaacacagtaaaagtagtacttaggaaagattaacaagggaacatggcttatacagtggtaatggggcctggagtcaaggaggtaagataaaatggtattataattaaggaatagccaggcacgatggcacatgcatgtaatgccagctactggagaggctgaggtgggaggatcatgggagtccaggagtttgagaccagcctgggcaactgagtgagaccccaaatcctaaaaaatacaaagtaaaaaaggaataaagtcatgagggcttggactggattgataacagtgagaataccgagaaagggaccataggcagtgtgaacg

SEQ ID NO: 113832 - DNA, 1301 bp, Homo sapiens
aatgtaaatcaaaggcatcaaagtattttactctttttgaaaaaaatttagaggagaaatttattatattaatattctacccatatatgagtttaatttgtaaattgtagcaaagcatgatgtgctttactaaattcctttataattagaataagcttttataagggtgaaattatgtctttgctacagcactaaaccaaaatggcaaaattgttttagtcggtaagctttgcttttttaaaatatgaaataaacaggtttttaaaatgttattttaatagtcttctctgttataaacaaagaaaattggtgtttctctagagcttattaaaagtagtgattattgtcctaaaagaggagtagcagttttagatgctaatgcttttccctgactgagttctatttgccatttagttttaactgcctagtgcaaaaattctaataaaatgtaatgatgaggatcctgtccttcctgaccagtgggtgcttacttttttcaggtggtgtgacaagaatgactgtctccctggtggttattgtttttgagcttactggaggcttggaatatattgttccccttatggctgcagtcatgaccagtaaatgggttggagatgcctttggcagggaaggcatttatgaagcacacatccgattaaatggataccctttcttggatgcaaaagaagaattcactcataccaccctggctgctgacgttatgagacctcgaaggaatgatcctcccttagctgtcctgacacaggacaatatgacagtggatgatatagaaaacatgattaatgaaaccagctacaatggatttcctgtcataatgtcaaaagaatctcagagattagtgggatttgccctcagaagagacctgacaattgcaataggtaccctttcaaaaatatatatatgtatatatgagatggatttctggaagaaaggaaagcaataagcagtaacatttaatgggttggatttgtgggggcaagggacattattttatgtcccttaaaatcttctgttctttaggaaaggaaggtatgcttcagtggatgattttctgctatttagcagaaaatctgtatttcagttttgtcttttgatctggcattgtaccagaaattggagtcagattattttcccactcagataagcctagataagttgatcttggttattcaaaacagcatgtaatataagaccttagctaaatgcattcagtcaaatacattcttgtatttaataaagttggcttattggaatacaagttattgaaaatctcatcttca

SEQ ID NO: 113833 - DNA, 1033 bp, Homo sapiens
gcacaagaccagacagtgtatgtgggggagtgtttctcaaatcaaactggaaactctttaatttgtaagaaccattaagcagagagagaaaaaagaaaggaaaagaaaaaagatcctacagagaacaccctgttcagtttgggaacaggctacagctttggatttttcaaggcctagcattcccatcattctaaattttacttagctaatacaatagtagttgccagagctgatgacatagtattttgtcatgcttggctccgttcaagcattttagttttttagccattaccatggctagacccagtcaaaagaatttcattgtttaagattcccattctctagtttttactagtagccagccaaagaaaagaaaaaggaggtcagaatttcggtatttacatagaaatttaaggggaaaaggccaggcatgtttttaaagtgtggaaattaagaactattcattatcccactgattgtgtggatgtgttttttaaagttttgttactgtcttgagagagagaatattgagataggacataatgttggtttaagggaatgagggtactttctgtaggtgaggtgccaagccatgtcatcagaaatgttagtcacatgactttctaagcacaccttaaatgttttaccgtgtatgtttttgtaaagttttaaatttttaactgggaaaaacagacctgtatattaagttttatatatatatataaatttaaaattacatatatatgtttatatatgtaacttttatatgggagagatatatatttctatatcctctataaaaaaacatatctatatatgaaaattatgtacgtaaatgttaatttataattaattatataaatattaacataattacattatatatatagaaaacctagtgtacagatctgtatataaattaaaaatgtatgtgttatatatagttacatcatataatacatataattgatatatataatgataaatactttattgaaggatgaaaaaatttccatgctgtctcataaaataa

SEQ ID NO: 113834 - DNA, 1052 bp, Homo sapiens
gggatcagaagtcataggatacattaattttttttatctctgaataaacaggttgcctacttaaaaatctatcagtttaaaagtgttggtctcttctctctcttttcagaaagtgccaggaaaaaacaagaaggtatcgttggcagttctcgggtgtgttttgcacagcacaccccatctcttccagcagaaagtcctcggccattgaagcttcgaagcattcttgacatgagcccttttacagtgacagaccacaccccaatggagatcgtggtggatattttccgaaagctgggactgaggcagtgccttgtaactcacaatgggtaagtctggtaccacaggaatcagttcacttgctagaatataggatcctttttagtggaatctatatagttattaggggagcatgtgagtcagctcccaggtgggaaagtctgtcctatggtatagtcacaaatataggatcagtcaatcaaatttcacatttactaaggaataagaaagatgtcatctgcctgctctttgccaaacagtgacatttgtaaataatacctcaaagttggaaaagaggtgctgaaagatctccagcatgaaagcatgttgagcttagagtgcttcttttcctagggaagagtggacctaacctgcatggagcactgcaaaaacctgttttatttttgtaaatgtttcatttttagtatataaatttctagtacaataataagtttctagatattttgctatttactctttcagccaatatttgatttatcatgtaatgaaggaaagaatatatacttaaatgaaatttgtaaatgagctaaaaatctcctttaacaaatgctttgtttccttttgtctacctttctctatacacaaatcttttatatttatataactgctaaggacaaataaatactcatgtatttaaaatgtatacattgataatttatttttccaccttttacacatgaactgccagtgtttctccattgacaggaatataggaaagaaacagatgtcacgggggttgtggagaccttaatgca

SEQ ID NO: 113835 - DNA, 1925 bp, Homo sapiens
aaatccacgggagtttttaagtctcctcacagccttttgctaccttttcaccaaggtagatccagatgataactgctgtgttgtgacatcatagaaattagaaaaatattttcctctgaggaaagaacattgtaaatgaaactctacatatcagaggtctatagctatgtatcaatattaagtttcttttgtactttgctttgtagtcatcttcattccaaactttcataattattatttttactttaaaaagaaaaataacccaccaatattgaagattagtattgtgtcacttttgaaagtcagtagaatttatgcaaaaggaacctggaactttaaatcattttgtttttattttctaaagttcatgagactcattcttatggttcatgtttttattttttctctcattctttatcattatgattggaaactcttttaatttaatttctcacacagttattagcataataatctgtttcaggattgtcttggggatcatcacaaagaagaacatattagagcatctcgagcaactaaagcagcacgtcgaacccttggtgattagatatatcagatctcctcattagacaccttagaagtcaggaagcatgaaacttgtgaactgttgagttctgtctttcccagatatctgctgaacaaaaatatcctactatgctgccaattacatttgtatctgataaaatgtgtctgtaagataaatttagatatgtgtaaaatcccatttatagaaagtaagcaaaagttaacatctctcatcaaatcattcattacaatttcagaactgtaaacagtttggtagtggaataagtgaatattattggacattcttaaagtgaatatggcaaatctgtctacctcagtggatacaccggtctcagaagacacctgactggttaaaaatgtctgacccatccccgcaagcccttttttttttttttaaatgtttcccgatcttgtggtagtcttatggtaaatctaagctcctaaaggattttaaaggagcttagcaattagaactgcttacagttaaatggattttttaatgggcacactaactagagtgtaatgtgtatattatttgtgatcatagcattagttctttttctgctataccctgcatatcttcaaagtcacagtgtgtgtcctgccatctcattagtgaattgtacctagattatgtgtgtgccccttttgtatgatgtttctggaacgctataagcagcttttagagtcaaatgcattcattttaactggctttatgtcctagtggtttcatgactacaaatttgaattatcttactgcataacataaaaaatgtctggctttagcaattaatgcccgaaattattttgccctgcaattgtcatacctgtatgaaacctgtcccagtttgcttaagtgcacaactgattatgtattcctgtgtgtatgctaatatttcacaagtgtttcatgcatccttttttaaaaaactactaaccagaatattatcgtagctactcattcattctgctttctgcttcacctataataatcttttaggactgccttctgatttttcacctatcttttaatgtaagcattaacaactaagactttcataaaagcactgtatcttaactttcctggcctaaatcaaaaaaaggaaaacattgataagtgtcctagaaacttggattcttttatagatttgttcttggggctctgatgtttgggattgacgttctgtgctgaccattttatatgcattttatcttaatagtatgtgctttcatgaagattctgatacaagtgggcaatccttaaattatctttgaaaaattggttaattttggttaaaaaagggaaagtggctgggtgcagtggctcacgcctgtaatccccagcactttgggaggcc

SEQ ID NO: 113836 - DNA, 1742 bp, Homo sapiens
tttcccttttatttcataggagtcttctgtttattcctttcaggcgcctccttggcattataacaaaaaaagatatcctccggcatatggcccagacggcaaaccaagaccccgcttcaataatgttcaactgaatctcacagatgaggagagagaagaaacggaagaggaagtttatttgttgaatagcacaactctttaacctgagggagtcatctacttttttttcctcctttacaaaaaaagaaaggaaatataaaagccgggtttttgcaacatggtttgcaaataatgctggtggaatggaggagttgtttggggagggaaaggagagagaaggaaaggagtgaggtatttcccgtctaacagaaagcagcgtatcaactcctattgttctgcactggatgcattcagctgaggatgtgcctgatagtgcaggcttgcgcctcaacagagatgacagcagagtcctcgagcacctggcctgttgctccaacattgcaaagacacattatcagtccctatttctagagggattactttgaattgagccatctataaaactgcaaggtcttgcccttttttttaatcaaaactgttctgtttaattcatgaattgtatagttaagcattacctttctacattccagaagagcctttatttctctctctctctctctctctctctctctctctactgagctgtaacaaagcctctttaaatcggtgtatccttttgaagcagtcctttctcatattgagatgtactgtgattttactgaggtttcatcacaagaagggagtgtttcttgtgccattaaccatgtagtttgtaccatcactaaatgcttggaacagtacacatgcaccacaacaaaggctcatcaaacaggtaaagtctcgaaggaagcgagaacgaaatctctcattgtgtgccgtgtggctcaaaaccgaaaacaatgaagcttggttttaaaggataaagttttcttttttgttttcctctcagactttatggataatgtgaccgggtcttatgcaaattttctatttctaaaactactactatgatatacaagtgctgttgagcataattaaataaaatgctgctgctttgacagtaaagagaaggaagtattctgattagctgtatctggtattaattgcatgttaaaacactggaatttttaaaattgaaattagatcagtcattcttttcttttctcaagatatctcatggctgacactgaagaagaaatgtaattcataacttgcactaaatgtatattttttttcttaaaaatttaccattcttatttatatttttatggattaaaatttataaaatacagatcagttaatattgcacttaagtaattttacctttttaatgtgatttttatagaataattcagacttacaaatacagagatatgaacaaagtttacagtgggaacaaaggtttaaaaaaaggttgtggttctctctctgtgatccagtgtgcacataaacctttctctgatctttcactgccatcctctggattatgtcttctgacctgtccattttgacccattaactggaaagttgaaaaactacattaactggaaagttgaaaaactacattactttggagaataaaaccgaaagttcgtgtataccttcttaaaaaaaaaatcaaaccaaaaatgtgaaaacaatagaattgcaaagatagcagttaaaattttaatctgaaaata
